United States Patent Application Publication US 2007/0083945 A1 - sequence listing, part 32

SEQ ID NO: 216396 - DNA, 432 bp, Glycine max
  unsure (1)..(432): unsure at all n locations
tctacctccaagntcatacacaagtgatataaatctctcttccattccaaaagtatcctaagtaagaaggtactgatgcagtttgatcgaaatatggcatggcatacatatataattactatccaacatgatgtgaagatatattggtgaaattatataccaactgataataataaaaataattataaacaaaaaatataatgtaggttaggttcatctttacctgcacgaatggtattgttgaccttacgaatttgacaagaagtgatattaaagttttcttggacacatgataagcctcaataattttagcagttagaaaatcaaagagaggcttagcataagatgtgaagctcaaggattgattcttcacaattggtatcgactccttctttaactagaaaacaacacaagaaagccatgattattatc

SEQ ID NO: 216397 - DNA, 390 bp, Glycine max
  unsure (1)..(390): unsure at all n locations
tgcaagcttaagcattnngnacccatgagtatggcattttcttggnccgctccatataccattaaacacaaatattttaattactgtcattctgtcaatctatcaggtgtgacttgtgcagccaaaggaaattactacatagaatccccaccccgttaccccccaaaatgtgaacatgataatgggtacctgtcaaaagggcgaaaaaaaccctggagtctttatttaagcactaacaaggttttccaggtgggacccaccttgctatcctacaaaacataaactctggccgagtgtttctatcaaggtgaaggtgcaagctcttcgctacaccaaatctattctttcgggtttttatttatcctcccgacgaacattgatggcatcata

SEQ ID NO: 216398 - DNA, 346 bp, Glycine max
cttcttcgtgagttgatgggctctgtcatcgaagaatgtcttgatcactggctgacatggtctaattagctcagtagcttcttctgcggtcttcactattatctttctcactgtataagcatctaacagatgcttcggttgtggtcccaacccatctataaacatattcaattgattggctcatataacccatgattgagagttcttctcaacaagccttagaacctctccaatgcttcactcagagattcatcaagaaactgatgaaatacagagattgcagctttaccctttcgcatgcttggactctaggaagtatttctttaggaacttatcaacaacttct

SEQ ID NO: 216399 - DNA, 403 bp, Glycine max
  unsure (1)..(403): unsure at all n locations
gccgcatgcaagcttcgaagggaagagaaagaccaatcactattctctttcatggncttgaaagaggagttagctgcttgctcaaggtccaaaagaaacttgtctcagcgtttatgcgagacagagaccaacatgttagccatcatcaacaagtaccaagaagactaaatctagccacagcccacgagcataaagtggcagacgagtatgcccaatgtggatggaccgatttgctcttacctagaacgggagtcaagaaattcccctattgctagccaaggtcaaagcaatgtggatggactgatttgctcttaactattgtcagcatatgatagacttaatggcccatataattagaaaccgctaggaagtttgtatctgcactcagaacttaactagatta

SEQ ID NO: 216400 - DNA, 473 bp, Glycine max
ctcgagaaggataggtcaagccctagggcagagcttgtagagctcgggtagtcaaagagaagttcaagtccatagccatcatagtctgaaaagagtatgatgaactaagggacgtcaatatggccacagctgaagccttggaacgagaaaccaagaatgcccgaaaggaagaacacgaccaattgcaagttttgaggggctttatagggcagcaatagtgagctcaagctcggaagaggtgaaaggaatcatcacgggtcaaaggcatgatcttgaaagacgagctaaaggcttgccttatgtcgaaaagaaatttgtcccaacagttaagcgagactgaagggaatatgtgggccatcatcgatgagtgcaaagagaagctaaatctagcggcgactcacgagaaaaggctataggatgagtacgccaagatatcagcagaaatggaagcaatggaaagggtaattgattat

SEQ ID NO: 216401 - DNA, 381 bp, Glycine max
  unsure (1)..(381): unsure at all n locations
gcttgctngtggatctgctatggaggctggatctttgatcttcaaccacgcccttcaatggtgattttccaccatggagatgcagtggaacacaaaggagaagaggtgagaggaggcaccatccactagggaataagccatggaagaaggagcttcgccaccaagaatgtgccttggagaggatgcttcaatgacggaaaagagagagagaaagagagagggggggagcacgaacttgcacgagtataagagggagacaagttgaactttgagtggcgtctcacaagactctcattcatcaaagttacaacaagtgttacacatgctgtaatttatagcctaggcatctcccttgaaaagctctcttgagaagcttttttg

SEQ ID NO: 216402 - DNA, 386 bp, Glycine max
  unsure (1)..(386): unsure at all n locations
ngaccattcagcccattnttactgtgatgcttagacgatattatcgtttttcttacataacaaagagatcaataggcttaacttttgcaatggtccaacctactagaaagaaataagaacatgaacaacaaggtaatataaatggctcagaaaatttaataaggatgttacccactatcttcagctaaggaagtgttgatccttaaaccggagctctgatacctaatgagatgaaccctcatggcacaagggctgacttaggatcgtctacgtataaaccttgacggataatgcggatattgattaaagaaaagatgacaaataaggtggtttatttcgttggacttaataacgtcggtctttgcataatatggatgaatgggatg

SEQ ID NO: 216403 - DNA, 390 bp, Glycine max
agcttatggcatctctgacatgtgttggttgtttttgtccgccttaatttgtgttgattctgatcttcatcaacttctttggtctaccagctgcacgtttgtaattaggaggcaatatctcacgatcattagtcttaggccattttttcctaccatcgattgctgtaatactatgactataacatagcttgtaagtatccctatggtaatatttgccatcacagtcttctgcatgctctcctttgtgattgattgcagctatagcatgcttgcaggggattcccaccaactgcaaaaagttgcaagaacatgaatgcttgctcaaatcaacaacaaaccttacaatgaataagataagcagccaataaaagagagatgagggagagagat

SEQ ID NO: 216404 - DNA, 398 bp, Glycine max
  unsure (1)..(398): unsure at all n locations
cgctctaaantacattgacgtgtgtattgatgggaggatgttatatgccatatctgctttaagagtaacgttccactggtaaatctaactctccaaaatgttgccttcgcaggaatggcctcgaggaagcttgcctccaagaggtccattaaggactaagcggccgaccgaactaattcctccccggagtacgactgtcaccgctataagagcgttgtacaccatcatcgcttcaaaaccatcaagggatggacgtttctcctgcagcaacgctgtcatctcaaggactaccagtatacattattcctgtaggaaatatggcgcctgctgtggtcaccactttttactctcattgtcaagtttgatccacagataatccttgaggtttatgccaatgc

SEQ ID NO: 216405 - DNA, 282 bp, Glycine max
  unsure (1)..(282): unsure at all n locations
cttaactgaaaaagaggggcttttttttattcncncaactctagagggcgttgtcgttgctatggagatctcatcattctgattattattgatatggccgcagtcatcaacttaaagaatggtgaaatttgatgaggcagcatggaaaatactcaactcaaatccagtttgactcttgtaccaactgagaaacaggattaaagacatactttgacaatatggttcttacagctatgataaacaaggaaaaattaactaggagctcgggcactactacactac

SEQ ID NO: 216406 - DNA, 408 bp, Glycine max
  unsure (1)..(408): unsure at all n locations
cgcgtctctcagttgtctgcaatgatgagagggagctaganagtttttatgcctactgngcacagatattctcccatgtttaagatgtatgcaacttgcattttcttcacagatagggcatgcatgatgacccttaacactgtaaccgctgagattcccatatgctggaaagtcattaatggtacatataaacattgcacgcatttcaaaggtctcctttcgaaacgcatcaaacactacaaccccctcgtcccacaactttctcatatcttcaaccaatggacttagataaacatcaatgtcatatccttgttgtcttgggcccgacatcatcatagacaacatcatgtatctgtgcttcatgcacaaccaaagaggcaaatcgtaattactatctaaactggccat

SEQ ID NO: 216407 - DNA, 235 bp, Glycine max
ggggggattttttacaccaacattaagagtgcctcataacacatggccaaaccaacacaaaaccaagtttcgaaccaaccaagaatcttaaaaccatccactaaggatgaaggaattgcgggtaggagaatttgggagacattggatcgggcaaacttaggatagccggcgtaggaaggtcttgctaagttggtgagaggggagggatgatggcgggcttccacgcaaggggact

SEQ ID NO: 216408 - DNA, 292 bp, Glycine max
ttgatgatgactcttctattctttgctacttcaagtggatgagaagccaatacctgagtaccatttatgggatgtgaaagaatcaaaatctaatgaaggcaaagagcttaaaaatatgacttgggtcctaccaagaagatacctgggatggatattcacacggatagaagatccacgaatactatggctcgtcaaacacggcaatgttgagaaaatgttatacaggcttggcttgagcataactaagccactgagtactccacttgcatactactacaagctatctatagat

SEQ ID NO: 216409 - DNA, 390 bp, Glycine max
ctgcagcttcgagaagtgatgagggcatgcttttttgcagagcttgaaagagcccgggtagtcgaatagaagttcaagtccatatccatcaaagtttgaaaagagtatgatgaactaagggacgtcaatatggccaccgctgaagccttggaacgagaaaccaagaaggcccgaaaggaagaacacgaccaaagcacagttttgaggggctttatagggcaacaatagtgagctcaagatccgaataggtgaaaggaattatcacgggtcaaaggcatgatcttgaaggacgagctaaaggtttaccttatgtctaaaagaaatttgtcccgcagttaaacgaaactgaagggaatatgtgggccatcatcgatgagtgcaaagagaagc

SEQ ID NO: 216410 - DNA, 472 bp, Glycine max
  unsure (1)..(472): unsure at all n locations
aggcgcttggcatggtatgtaacatcaaagaagctatgtattcacactcacaatgaattctccttctccaaccttaacactcattttaatttctagaatattaaaactgtgtatctaagcttgttcacaattacttgattagcttattgatgcacaagatgcaagggtcacacgaaggtctgttactataagcctataagaagaatgaaatcagatctttgcttccatctttgttgtttgagttttatgctttttgttagtgcttccatatttgttgtttgagttttgggcttttcgttgaaattagacctaagttattgctttcaattcataaatatntaactgtgacttaacataaaaaggcatctgactgaaacaagtatgcgagcagggaattctgatctgtatggattcctcgagccacgttccattcataggtctgngcaatcgcagtttgagactgatagtacat

SEQ ID NO: 216411 - DNA, 471 bp, Glycine max
tgaccacaatcaacatagccgccactatcttcacctatttccgagttaattgacatggatcaacctccttatggcatccccaaaaggtgttaatggttaaccactattgtagtcaatatcacatattccaaaataattttctctgtatccttactaaaaatgaaacctactcactagccaaaacaccataaataaaatactataccacaactaccaaatgaaataaattatcatcttttattatgactaaaaagcatgaggtattttgcaagtagctaaatataagcttcatgtccattgctcgcagaaaagaatatcataataaataataatatataggtaatataaatcattcatagtgttgatcacttaactgttctttattcagagttatgggcgatccatgccaggatactttgctacatgcaacaccttatagtcataaacttgctagaaggtttcaaacacgta

SEQ ID NO: 216412 - DNA, 393 bp, Glycine max
agcttcttcggcccataaggtacctgtttatcttatacacaaacataaattaatgattatcaagactttggtcaaatcctttttttaataataataaacacaacaaaaaggaaatacatgttcttaaaaaggctttacaagatgttccggcctatcaatgaaggtttgtcagggcctgccccactaattgaaccttttcggtgactatagggtcaacatcttgaaattcttcaacatccaccttcaccatatcattggtcaaatgcacgtggtatacggttgacaaccctcataaactttcccaagggcaaccaagcggggaggattgtcatcaacatataacccatgcctatctaatgtattagtgacagagtcctgccctgagggatcaac

SEQ ID NO: 216413 - DNA, 402 bp, Glycine max
gcttcccatcattaatatgaagagggaggcatcttactgtgaataccaatatgcaggacgaaccaagtatttagaacggttaatatgccgtcgctgacacatcatcatcggatttccatcctacgctctgggtattcattactaatattcacgctgaagcctcatagcggctattatattaggatatgttccactatgtaatctgtatattatatatccatacttgctaataggcctcttaatgatcacatacaaaccttcttgtcacaatcagctgattatgagctcgcactttctgcttcgccactcctgccaaaagaatgtctaacaagtacacaccataccaactatctagtaataagcatatcatatctgagaaatcacctgctgatgataaacatc

SEQ ID NO: 216414 - DNA, 395 bp, Glycine max
  unsure (1)..(395): unsure at all n locations
agctngcttgaggagcgtgatggaggcttttctttgagctccaatgaggcccttaatggtgattttccaccatggagatgcagcacaagacaaaggagaaaaggtaagaggcggcgccatccattagggaataagccatggaggaaggagcttcaccaccaagatgagccttggataaaatgcttggagaggatgcttcaatggaggaaaagaaagagggagagaaagagagagtggggagcacgaaattgaaggaagaaaaagggagagaagttgaactttgatttgtgtctcacaagactctcatttatcatagttacaaccagtgttacccaagcttatatttatagactaggcagccttcttgagaagctttcttaagaaaacatccttga

SEQ ID NO: 216415 - DNA, 388 bp, Glycine max
agcttttgagaaattcaaagggtcatatctttttacacggatgttagattaaggcgcatcgcatatagagacgctcgaaaatgaacaacggaagctctcgagaaattcaaatggtcataacttttcacactgacgtccgattcaggcttataatatattgatatgctcaaaaataaacatcggaagctctcgagatattcaaatggtcataatttttcacatggatgtccgattcgggcgcataatatgtcgagaggctcaaaattgaacaacggaaggtcttgagaaattcaaatggtcataacttttcacacgaatgtccgattaaggcttataatatatcgagacgctcgaaattaaacaacggaactttcgggaaatttaaatg

SEQ ID NO: 216416 - DNA, 244 bp, Glycine max
tcggacatcccggtgaggagatatgagcatttggatttgacgagagctatctgtggtcaatttccagtgtctctatatgagatgctccatatatgaacattctggttaaaagttatgaccattaaaatatctccatagctatcgctggagaattttgagcgtctcgttatgagatttgccagaatcggacatcctagtgaaaagttatgaccatttggatttcaccagagctatcgatgaacaa

SEQ ID NO: 216417 - DNA, 396 bp, Glycine max
agctttaaaaaaaataaggagattatgttattattatatatgacaagttagtattatatatatatatatatatatatatatatataccagagatcagcgaaaaggatacaaacggacagataggaagtaagagtaatgcaatatgacaaataaaaatgtaaaacagttatcaagggcacaccggaatccggcttacaaacccaagtttttgaaaacaaagaaaccgaagcgacggcagagccgcacaggatcggtgaagggagaagggagatgtgaaaaatagaactttgaatttattgaaatcgaaagaaaagcttacaaagagattttccctaggcagagcttctctctctaaaacctggttttgagactatctgaaagggtgcctcacaaagg

SEQ ID NO: 216418 - DNA, 473 bp, Glycine max
  unsure (1)..(473): unsure at all n locations
tcatggntngngtttnggaattaacgctatatatatatatatatatatatatatatatatcctggctgtctatatattcttcttttcccccagcttccaattctttttcttctatctctttccattttttatcctagtaacatttttttttctacaaggacggttatgaatctcagacgattaaggcgatatggtgagtgactaatcaattaatcaatctgatgatgattgaggaactgagaatttaaagagatatattgctttcactggtatattacattattaattaccatatagaacttaacctaaagtcatatgattcctcatatttatgatatggatcttaataataatgatatgttttgctcttggaattaaagccatctgcaattgtattgtagtttgcgtgagctgtccaatcttggttctgattgtatatctaccatcctaactgtatattttgacatatatat

SEQ ID NO: 216419 - DNA, 406 bp, Glycine max
tcacctgccgcagcaagcttacatagcctatacatagctgggtggtttatttcttcacgataaacctcatttgacgtgtcatctaggaccatcaagtttaatctatcaggtgcatggtgcacttgagtagattttctagacggttcatgcattgggttcataggttgctaaattgactctaagattggtctattaacttgaacttgaactataattggctcttgaaccatacttgttcgaggtgatgatctttgcggtaacttgagaacattaaagaagggtatctcaagttccatcttatagccttgagttgtttcattggttaattgagtttcatcaagctcaatttttttaccatgatttcctctagcaagaagattcctttctaaaaatatagttcatcttg

SEQ ID NO: 216420 - DNA, 325 bp, Glycine max
aaagacctgtgactagaactatataattaatctcattgagtcgaaagagaaagatgtgaaccaatgcttatgacgggatgtgccataagcctctcacagacgactagacctactttcactcctaatccagagtgaagtcctatttaacgctaacagacactcattggtctatttcactatggagacagatatatcacttggagtgatcccattactgtggagaatggacaagtaaccacttgagtgagaatggatagtgttgaacacataatgatcgtaccgtacctctttatatgaccccgtgaactgtcccttaacatggtaa

SEQ ID NO: 216421 - DNA, 236 bp, Glycine max
  unsure (1)..(236): unsure at all n locations
cgctgcaagcanagaggaaaaaaaagtggggcgggtcttctgtcacccttccggctgcacggatgcgaactacttaatagttgaattcacgtaaattccagtgtccatttgtctcgcgtacagatgagatatcacttttgctcgttaaaaacgatgtaggtgactacgttttgagactcttaaaactgacccataccctaaaaaaagaacaatatggcactcaaagtcttactact

SEQ ID NO: 216422 - DNA, 401 bp, Glycine max
  unsure (1)..(401): unsure at all n locations
gcatgcaagctngccaatttcatcagttaagtgggagttttttctgcccaaactccctacacagcagtcatggcatcagaacttgactataaatctcaatcacaaaattgggggtgggggcaccacattgcatgatgccataatatcgataaaaccgacaagaattagttatacattgaacattataaaaaagcaggggataaagttcatggcacacattcgaatttcattcataattgattagtttaaaaacaaccaaaattaaaaaaaaaaaattaaggcataccaataacaatagaagcaagatgattgctattttgtaatattaccaggcactctccataaaagcctctacctagacgaaccctgaaaaccttttccagcaatttgttcgcagcatt

SEQ ID NO: 216423 - DNA, 445 bp, Glycine max
acaactatggacgaataacgagggaaaatggattctctgatgtaactagtggtccaacgtttatttttatgttgatcagcctaaataagtatatatatattagcaaagtaccagaggtactagaattacaagctaagattctagtctagttcagcaccataacaatttgggtgcagaccagaataagtttcatattataagactaatacaattatggaacctagattcaaaccctcatctgcggaagaatccttcagatagatttgatgaccactgattataggggggtgtgaaatccttctcaaaattctggagccaagtccataacagaaatactgcatcatccaccactttatatgtgttgaaggcagaattggagaaaactatactatgtgtgagcttgcaaatagtccatgtcaatgcttaccaccaccccttccatctg

SEQ ID NO: 216424 - DNA, 381 bp, Glycine max
ttgccgaaactatgagaggtgaggaggagttatttttttgttgcctacacacggttcacaaaggttgtataatgactcggatgagttgtctatgagacaaatccggcttgttgaaaaacttctactctcaacgttccacctccaacccatgtgagtgattcttacatctcatagtctaaatcttgtcaaattatattatgcttaatcaatcactttttattactattgtaggaaacattcttcatacctttaccgatgtcaaccacatttagaccacctcctcttaagcttccaccaccacttcatattatattgcctcatggaatgcccaactgcatgattctgagaactaaaatatgacatagattcctcttttattta

SEQ ID NO: 216425 - DNA, 425 bp, Glycine max
  unsure (1)..(425): unsure at all n locations
tgtataataaattaatagggccgacattgaggtgcttgttctattatcattntaatcaaattagcatggtcaactgcaataataacctcacacggcctcttgtttgtttgtgttcacaagtttacatagtgctgtttatgagctttntactctattttcttggctcattgttctaaagaaacactgcangcccaaacgcctcacttgaagaattggtagattttataggtgttgctcaaatggcaaaggctgaagatgctcttctgcctcctgaagaataggtagcaatgtaaccatattagtaatctttggatgaacaaaatagaaatttattgcatttaattatctgtaaatttttccttcanattatctactataatccatattgtgtccccctccaccacttcctttatctatcacatgtt

SEQ ID NO: 216426 - DNA, 391 bp, Glycine max
  unsure (1)..(391): unsure at all n locations
ctgcggcatgcagctcagaacacgaatggggggattttattacccaccangaagaaaacgacaagaaatttttaggaattgcacttaaagcctcatcttccattcaagaagaaagttgacacacagaatgaactattcgaagacgatgatttcagtctcttcgtaaagagatcaataagtttctaaggaaagaaggaaattaaacaagaacatacttcaatcaatagaaaagaggagaagatttatcttttgttccaaagtattataaatggaatcaacctggacatctaacattttgatgtcctaatttcaagtgaagaatggaaaaatctggcttgaaaaccttctatgattatatggaacaaaatgccttcttcacttgggaagataa

SEQ ID NO: 216427 - DNA, 382 bp, Glycine max
cctcacatatcttgagaaggtgtgggtgaattaagatattccaaactgctttcccaatttaaaatctatttcactgtgtattcaagatatgaattcccttaatgacaatcttcgtgaatattaattccaataaaacaccttgaatatgaatataaatcaataataaataaaggagattaatggaagagagaatgcaaactcaggtttatactggatcggccacaccctagtgcctacgttcagaccccaagcaacccgcttgagaggttcactatcttggagattacttttactaggtctaaacacacacggacaattcttccttgtggtgataaatcctctacaaaatatactcacggccgtgtaatccttatagaatgag

SEQ ID NO: 216428 - DNA, 405 bp, Glycine max
  unsure (1)..(405): unsure at all n locations
agctngnaggattatgggggagcgccatcacatgtggtactaggcggcggtcgggtgatggtgcacaacaagtttttccacatccacaaagcgcgcataaacccaccattccctgttgcccacctccaactgagctcacgtactcccacgtagcccatatcttcgtttctctcaacaccgggaccccatcaatcctcccaagctgtcctcaacatccaggtaaaacaacattcaaaccgcacaaactatcacagccaagaaaacagggtaaaggcagaaaactctgcccaaaacaccaaccaaaatcacagcttttctcacttaaagaccccagtaacaattcctttgttcccgttcgttaactggtggattgactcgaaaattttactggaagtctctagtaca

SEQ ID NO: 216429 - DNA, 297 bp, Glycine max
tatgcgggtatccttctttctttacaactgaactatagggagttgttttggctacttctatagctcattccaaaggttagggccagctttggctggaggtggatacccttttactcctcaacgcttttactgttatcaatgtggctccttaggatttaagaaacgtctggatgaatactctattctattgtggcccaaatggagtttcgcgactcccatatattctgagatagtaatgtatgcgctgatcatttggcctactatcgagagaattactctattatgcttgaagataaa

SEQ ID NO: 216430 - DNA, 383 bp, Glycine max
agctgcttcaacagagcacaggtttttagttttgaatgagaagaaagagagaaaaagaagctaaacattgccattgcgactgaatcgatttctacatcgttcgtcggccattcttcggtcgtttatcattcgttcttcgttcttcatccggttagtacttgttttaaggatttgaacttgatttatggaccttaggggtcctctcttttgttttgagcatcttcatctccttcttcgatcattggtaatcgctcttcttttgtaaagtaagttttaaccgatcattaatgctgcaagttatctttaaaaatggattgaagattaatgatccaaaaccaaataaaaccaactcataaactttcttatttcacaaaaaaatcaag

SEQ ID NO: 216431 - DNA, 405 bp, Glycine max
cttatctgtgcaccacgagtatcaatgatctttatgttgagcaaccactcctcctcatatccatttgtaatatttgttgggttaccttgttctatagcaaaaggatcatgaatctttgagggtgttcctcgtgattctactccaaatccccaataatgtggaagaatgtcaccattacatgtgccttccgttccttggaaaaaagcatcctcaggacgacgaagcttaggattaggtgacatggtaatattctggtggtactttattgcaaaccaatgatgaaggtaagtttcatacgaaggtatagagttcccttcttggtcaactagttccgcataaaaactcttaattaccacatgaccttgtggaaactttatattctcaatatgtgttgatgcaattgat

SEQ ID NO: 216432 - DNA, 378 bp, Glycine max
agcttgagctcactgttgctgccccacaaagctccacgaaatttttcctggccatgctcttccttgcgagccctcttggtttcttgttcaagggctcttgcggtagctgcattttcttctcgtaacccgacacactctttccggacgtctgtagtgaccaacttgaatttttctttggcaagtcttgcttttcctagctcggtttttagagctcagacttcttcatcctcttccggagcttcgaagttctcttcgttgataatctttaacttggagagccaatcaaaccctcgtgtacgaactttcagccattcatgataattttcgcaacctacccttcggtgggagggcgacgagggctcacgggtgcgtcttcca

SEQ ID NO: 216433 - DNA, 421 bp, Glycine max
atataaatcaggggaaggtaaaacgcataaagcatggtaacacaatgaaggcatatgaaagcatatatggccacaaagaatagtaatgctttggtttttagaatagtgatgtttttctctcacttcctgatttttctatccctttccacgtttccctacccctcctaatttttgttatcttattactagtgctgtttaaattcctgcattttgtatctgtattaaatattacgtttcaattttgccaaagaatacaaagtaccactcattttaaaataattgaacgagaaggggtgtgtttggattgcagtcatgtttaacggaatctacgctgaactcaatccattattcacaactgaatcgacgttgaatgtaacttattcgtttgtcactagaaagtataaaatttcgtcaacaaatt

SEQ ID NO: 216434 - DNA, 398 bp, Glycine max
agcttctcccttattttgctatgataggggttttatttttcataaacagggttcaaccttcttggcacttctccctctctcgaaattgctggggaaaattgtttccgtaaagaaaatccaagccgaggcgcttccgtaacgtttccgtgagtaattacgcgaagattctcgaccgttcttcaagattcatcggtcgttcttcgttttcttcagtcttcaacgggtaagtacctcaaaccgagcttttcaattcattctatgtacccgtggtggtccacattatgtttcatgtatttttattctcgttttcatttgctatttatacctccttttgacgtgcttaagccatttatttaaatcatttctcgcctaatctaaaaataaaataaatttccacc

SEQ ID NO: 216435 - DNA, 470 bp, Glycine max
  unsure (1)..(470): unsure at all n locations
ttacattctccccctatctcaagcaaattcttatattcttcttgacatcatcaaaatcttcatgatttacacaacacacaccccattgactcatccaacatagtcatatataggataaggggtcttccgagcaccggtggcacaagcacaagaggattcatgaggcaccgcttaatcctttcgaatgccactcgacattcatcgtcccattggacagacaggttcttacgcaataacttgaagagaggctcacaagtggtagttagttgtgatatgaacctcgctatgtagattaatcgtcctaggaaacctcagacttgcttctcggtgcgtggctcgggcattntgaggatgaccttcactttgtctgagtctacctctatccctttgtggctcacgataaaaccaagcaactttccagatttgaccccgaaagtgcactttgcgggattcaaccttaatcggtatta

SEQ ID NO: 216436 - DNA, 288 bp, Glycine max
tgcagctgtaaaaagtcgactggtataatttttttggcactaaacgcttccagcttacatctatctttagcataaaggtaaagatagatccttagcatgtataactgatctttgggcctttgggatagtcctaagagcccccttaagggcctttaaaatggcagatgaattgagtcacaaaaggctatactacaccaatgaaggagccactggatcacttggactgtattcaaggtggggttgtctgtttggcagaatgtagaaaaagttcagtggggggaaccattg

SEQ ID NO: 216437 - DNA, 398 bp, Glycine max
ctttgctgagtggagtggaagctctcccttcagcccttaaatacacactgcctcccatttataatatatttaaccaatattttatcccatattaattcaacacagacactttcttaggtcacagtcacttataaattacacaaccacgagaatatttttaggtctgtgccactccttaacccagataaaatttgctttccgataaaaacatatctgctacgttaaattaatttttttgggaatttttaaacaatttgaaaaaaaactgcgtgacaactggttttgagaaaaaaaatataacaatatgttggagagaagtgtatatattttaaacgaacacttaattttcacttcagcgacataaatctctttcgaaagtgctatgaaataattcatta

SEQ ID NO: 216438 - DNA, 431 bp, Glycine max
  unsure (1)..(431): unsure at all n locations
aagctggcgaactgaagcagacatagaagggaacgaagaatgcttctgctactcttcatgcggntctgaagagcacgtcgccgactgactgcgcggtggcatatcatacgttgtcggacaagccgccatgctttaacaaccctgttactgaggtactcaggcatgtcttaagcctattgaaaaccggcagccaacgcgtcgaggatgcgttcatcgaccgacactctccgtcgcggaacttcaaagccttcgtcagtggccattttcgcgagcgagccttcccgattcttgatgtccttatgatgaagacttgcagcagaagcattcctctttggcggcaccgctgcaatacgaatgcatcaagaaagttagtcactatagcacaagacttcgaattgcactagtgaaggatgatgcaatcggatcatgat

SEQ ID NO: 216439 - DNA, 399 bp, Glycine max
  unsure (1)..(399): unsure at all n locations
tgcaagcttctgtaattntctattgtagtacgcattgtttttatactaaaataggtntcttgaaagaaatattacatatgtgaaaatttgactttcttcttgaactttggataggattctgagtacagctatgaaatacttttggattagtgggctacaagtggatgttgagctgaaatctcccttttcatgttagatggaaggaaattccagttaagtggagaaagaattaacttattggggaaccaatattatatggtctttaaaccaatatcaatgtcatgataagcctctggctctttgggacataagtgcagcatgatcagcattcaaggataacaatttaagatatgcagaacatttacttgttaagcggatctcatcatcttttctacaatc

SEQ ID NO: 216440 - DNA, 391 bp, Glycine max
tccctgacagacaagatgctactcttattcgctgacgcgattgctataaccgctaaatcgacaagtggatccattttcaaacagtcagaaatggcatgatcaatggttgcgggattccataaagcacacacatcatctagtatgccacaaatggcctctataaagaagtgagctgaacttgaggtaatggactagatccgaacagattcgcctaaagacgagtcattatcatgactatctattgctttggtcaatttcggatgtatgggcacaaacattggataatgcataataattgaaagctgcaaaaaccatacgggactataggcactgcatatgttcggcttagcttacattctttctaaaagtggaaagataaatctatataagg

SEQ ID NO: 216441 - DNA, 272 bp, Glycine max
taaataaaaaagaacaggctcgacaccctttatttcaaaatacattcatgaatcaaaattgccaaatatatgaactgattactttggtgatcaattctaaacgtgctcaagtcattttggctttctttaccatgtccaaaagcatagtatcacccaaaattttggtatttgtagcaattggcaaatgctctcggacctttatccaaggagacagacaaattacttgctaaccataatgaactgaaaattatactccagcgtgagtatgagga

SEQ ID NO: 216442 - DNA, 418 bp, Glycine max
  unsure (1)..(418): unsure at all n locations
tgcagataatacaacctccatcagataagcagtagaatgcttctatttctaaacaggntagctcattcaacactgcttggccttcatcagcatataccaagggtatgaaaatatctcaatgactttattcttctatttgaaataacatcgctcttgacacctgtatcatataatcaagtgctagtcatcacatatgtgcctcactgcaccggtttcactcttatatggaaatcaatcccatgattataaaattaccaaatggttatcatgtctaccactaaatatgcaggcacagatgagattttctctttctttaggatcaccaatgtcctatatgttcctaccttcacagtcaatactatatctgtctctcaattatggcaccatacaccttatatactcaatttcactgacacta

SEQ ID NO: 216443 - DNA, 395 bp, Glycine max
  unsure (1)..(395): unsure at all n locations
gcatgcaagctntgataagtagagtaacgcatgnggaatttttttaccaaccgaacaaaatgtcaaacatatctataacttgaaggcactactccaattcattggaggtaaagatgtaaattttagattacatgcattataaatgaaaaacaaagaaggaaagggctcaagttattaataaacctgatgaaaaagcacctgattattatggatataaagaatagtactacaaatgagaaaaaaaatgaggaaagatcattatcaaataatggattttctgcatcaaataaaggattgtcaaataagaacatcattttttaaaaaattgcaagccacagaacatgatcctgctctaaatactaaatagaaatcataactctagttactatcgcatg

SEQ ID NO: 216444 - DNA, 301 bp, Glycine max
taataggtggccttgttcgtgctcgtgtgcttatcgcaattctaaaccgcttagcgcacattattgaatattggcttagcgcgtgcgtttctcgctcatcggatggactgaagtggtgtgctttgtgagataaagcggtgtgctcagcgaacctgtacagctcattttcttccagattctttctcgcgcttagccaatgagtgttgcgcttaacagacgctcgctaagcctacatattggcttatcgagaaggcgaaaacaacattctttataggtgcctaataacctgtaattggagaaa

SEQ ID NO: 216445 - DNA, 402 bp, Glycine max
catgcaagctatgagccaaaataatgaactacatttttcttgacgccaggtgtgaatgtctatccttaccctcggaagcaaaaatagaagagaaggaaaatttccaattataggaaaaaagagaaggaaaatttccaatcaaggagaaagaaaaagaaatgaaaggaaattcccaatcaaagaatgggagatagcaataaaaaagggaggaaagaaaattcctgatcaatgatcaaaagaaaataaaataattgtgtagagaggtctttggaccggacaatatctgaacaatacatatttgtcaccaaatgaacaaaaagaaggaatggataccacgacctaaaatgtgtttcttcctttaattgccaaccaaaatcttgtgcgctagcgactttttcaccc

SEQ ID NO: 216446 - DNA, 356 bp, Glycine max
aagaccacagagggaactactgacagtcttctacgtaccctcacaaagaaggattgaggcaattcacaaataccgtgagatttggcgggaactttgatgcaggaagcaccctagctttatcgataccgtttcataagtaaaacatgaaaaagaacaaatcgatacagacgtattgattccaaagaaagccataataaacaaagacaaaataagagaaatatgataagcagaacacacgcaagggcgattggaaatataagacccctatatgtgcctggccgttaaataatccagaactagctaagaccatcacacattccctaagcattgagaagcaaagattctataacacacta

SEQ ID NO: 216447 - DNA, 398 bp, Glycine max
  unsure (1)..(398): unsure at all n locations
agcttctcccctattgtgctagtaaagggtttttttgaacaanaaaagggttcagccccttagacacttctctctctttcgaatttgctgaggaaaattagttctgtgaagaaaattcgagccgaggcgcttccgtaacgtttccgtgagtagttacgtgaagattctcgaccgttcttcaaagattcatcgttcgttcttcgttttcttcagtcttcaacgggtaagtacctcaaaccaagcttttcaattcactctatgtacccgtggtggtccacattttgtttcatgtatttttattctcgttttcatttactttttatacccccttttgacgtgcttaagccatttatttaagtcatttctcgcttaatctaaaaataaaataaatatccacc

SEQ ID NO: 216448 - DNA, 438 bp, Glycine max
  unsure (1)..(438): unsure at all n locations
ctagatggagaagaagacagagcgctagtggcttaaggctctccatattntttaaaatataacttcaacatcggttgttaagagaaaccgatgttatcaaaacgatgttaaggttaacatcggttttctagagaaaaccgatgttaacatatcaaatgttaacatcggttttctaaaaacccgatgttaataaacatatgttaacatcggttattgaaaaaccgatgttaaataataaatgtgaacatcggttctccaataacctatgttaatgaactttgttaacatctgtttttcacaaaaccgatgttaacgtgtacaccgtatatacaattatgccaccacgcatatgttaacatctgttgttttaacagccgatgttaacacaccgatgttgaatctgcttttgtagtaatgtatatgatcatggcataatca

SEQ ID NO: 216449 - DNA, 391 bp, Glycine max
  unsure (1)..(391): unsure at all n locations
agctntaagagactgagaggtgactctcttttttaatgncacacacattcacacatgaaattgatttaaaaagtaattaattagtgattacgatgtattcaatggaaataaattttttatttgaaatttctaaatgcatgagtgaaagaggggtaactgttgaccctcatgggtggatgtgtatcctatgaggtattggtatgttgatagatgttgatcaataattatgtgaatattcattcatatttgtatgtgaataggcggccaataagtcgagagtatttggtggtctcttaatctagtgctatcaaaatttgtagcagctaatgctaaatgagcttatggaatagatgagggggcaaactcctttagaagttaaggtcattgcaag

SEQ ID NO: 216450 - DNA, 378 bp, Glycine max
agctttggaaaatgatttctatacaaaagttattcgtataaagcgactaacactggttttcaataaaaaaaaattaaatagtgtgatgtgatatatttgttattgatgaatgaaattttgaatgatgttgtcattgtaattattggaatctttggaaaaaagtcttaattatagaggagaatctgcccaacatttcatatttgttgcctatttactcctttattaaatctcaaatgggcataaaagtttgtttcatataccatcgttcttttccttaatttaaaatttctcctaaaacactctcatggttttatggattgctactgtatgaaatttgcgttttctgaacttggaatatattatccccctcatgaattt

SEQ ID NO: 216451 - DNA, 266 bp, Glycine max
  unsure (1)..(266): unsure at all n locations
attgtttatggggataaataaggttnatgaagnntaagaaatgtnatggaagntaagntgaatnttttgggataatgtgagngttaagngagtnnttatnagataagtggatggttatttgtanttaagatgaataattttagataagttggtnnagatttaggtttatgaagagttggagattttttgatataaagtagtaagtaagaggaattgtnatagtgataagttaaggttatgttaaaaaaaaattgattntgagtttg

SEQ ID NO: 216452 - DNA, 364 bp, Glycine max
  unsure (1)..(364): unsure at all n locations
tttgttganaccaaacatgatgacgaagagccgtagagaatgagttcaggattgaatcaagaacacttcaagaatcaagagagaataagttcaagattgaatcaagaacgcttcaagaatcaagaggaaattggatttcaagattcaagaatcaagagaagactcactctagataagtactaaaaagtttttcaaaacattgagtagcacatgaactttttacaaaaccttttaccagagagtttttactctctagtaatcgattaccagtagcaaagattgttttcaaaaagctttcaactgaatttacaacgttccgattgatttcaaaatggtgtaatcgattacaatgatgtgctaatcg

SEQ ID NO: 216453 - DNA, 459 bp, Glycine max
  unsure (1)..(459): unsure at all n locations
gtagcccaccatctgttcatagtagagtatcgtatttgtgtctaccatcacgatcatcgtctccctttccatcattgggggtaccacctgtgccaccagatccctccaccttttgggcgtgttctttgaaagatccgtccccctttttgcaaatgttctgtaattgcatcctatccggaaccatatcaaaattgtactgatactgcctaacaaaggcaaccattatgtccttccaagaatggactcgggaagattccaagttagtgtaccaggtaacagctaccccagtaagactttcttggaaggaatgtatcagtaattcctcatcttttgcgtattcccncatcttctgacgatacatctttagatggttcttgggacaagtagtcccctttgacttgtcaaagtccagcaccttgaacttgggaggtgtgatgatattatgtactatgaacaact

SEQ ID NO: 216454 - DNA, 401 bp, Glycine max
  unsure (1)..(401): unsure at all n locations
gcaagctngagggaaaacttgatgcgtgggacaactttttattctcgccncgccataaatcagaaatctgcatctgctcctattattgtcgcacgagtctgtggtctatgtaattctgctgatcaccatacagatctttgtctcttctttgcaacaatctagagtcaatgaacaacctgaagcctatgctgcaaacttttataatagaccccctcaacagcaaaaccaacaacaacagattaattatgatcttccaagcaacagatacaatccaggttggaggaatcatccaaatctgagatgggcaaatccttcacaacaacaacattagcaacaacagcctgtccctctcttccagaatgttgttggtccaagcaggccctatgatccttctccaatat

SEQ ID NO: 216455 - DNA, 463 bp, Glycine max
atggttggggagcctatgaggaacaagcttatttctaagctctccaagaggaatcagaagtacttatctatgggtggcaaggtcaccttgataaaatctgtcctcaatgcgcttcccatttatctcctatctttcttcaagactcctcaaagaatagtagataaactggtgtctcttcaaagaacatttatgtgggggggaaatcaacaccataatagaatctcttgggtcaaatgggctgatatatgcactccaaaaatcgatgggggattgcggatcaaagacttgtccaaaattaatacagctctgagaggtagatggatatgggacctattctccaagcataagcagctgtgggccagaattctaacttctaaatatggaggatcgatagatctgcagaatggtagagataaaggatggcactcccaatgtgggaaagaccttagaaagctgtatcatc

SEQ ID NO: 216456 - DNA, 127 bp, Glycine max
ctgttccttacttaaaaatgtgctggcccaatctaccatgctttcctgcccactccaacatcgcacaatcccaaaactgcaacagatgaggccctcccaaccttccttgtgaacttcgaggcaatga

SEQ ID NO: 216457 - DNA, 294 bp, Glycine max
tttaaaataagtactttgattaggaaggatctcaattctgaggatcaaacccctacttataaggacatccacttttggtgattcctgaagaggatatccttttttatttcaactgttctatcaaccacatccaaaaacatttgccaattttcgggcatactccatttaccccaaattggtcttgcctattgattaaagaatttccctattgaatcctattgaccctgactgagtatgctacattttgcagcccctacctctttgttattctcttctttagccaaacactttagc

SEQ ID NO: 216458 - DNA, 402 bp, Glycine max
  unsure (1)..(402): unsure at all n locations
gcaagcttaagagagaaaatacattgtggggactgttttattacactngcagtgctcaaaacattagaatttgatattaatttcgtttaagaaaatatgtatctagaatatttaaataaactcaacatgaagcaactatgacaaatagttataaatatctgcaaaatgttatcaaacttaaaatttgacgacctttaagactaaattataaaaaaattagtttcgatgaatataaccaaaattagaagttgaagaccaaccaattaatttcaatagaggaattcttgaaaggaaataatctgattcctcaaatacgagtagttttgcaacaaagaccatcacaaagccactttcattgcttgaatgaaattaattattgatgcaaaatattatagcaaaaca

SEQ ID NO: 216459 - DNA, 470 bp, Glycine max
cgagaaagtccttctgattctgtatatacatgattgactttattgcatgagatgaaatgcaaagatgggatatcctgttagatgttatcaatgaatagcttaaaaacttgtgcttgagtgaaacagtagccgtaagactatggtttgagctactttccttgatatttgtcttatgattaactccatctaactgtatagttcacattttgttctcctctttgtctagctgcatattctgtgaaaaaaagtgataggtacacattgcttcatctttctcatcatgcaatcaataaattttgaagcatacacctttgtacataaacactgcatatttttccacttgaggacaagtgagttgttctcttttgcttgaggacaagcaaaactataaattcggaggagttgttagtcgatgaatacgactaacttttgtgataaaacttgagatactgatcaaactctccaattat

SEQ ID NO: 216460 - DNA, 59 bp, Glycine max
tcttctcccccattattcacacacttatatcatcaccaagtcatagcacctatcccttt

SEQ ID NO: 216461 - DNA, 380 bp, Glycine max
  unsure (1)..(380): unsure at all n locations
cacaattaaagtggtggggaggtttttttatcgnccaccgacacacacctagtatgatttatatttaaggatccatccactcaaccatctataattcttgcatttttcaatatagacgaaacctaacacacaaaccattcaataatcatcacagacagagaatgagatatccacaattcctttaaggaaactcaccaaatacattacacttgatagcctcaaaatgaacactattaaccatagacagtccacccatcgggggataaggtcaatgcacataaggacatttagccaaggcaatccatgatattagcaataaataaatttagctctgctgaaccactggatatacatacaagtatacaacctaatctttacaa

SEQ ID NO: 216462 - DNA, 156 bp, Glycine max
gaggaaaaagcgcggcaaaacattgagtagcacaagaagtgtcgcccaaaatcacgaccacagacggttactctctgggaaaccactaccatatggcacgaatcgacaaccaatgtggagaacgtaagactggcaaagcaatatgaagagcacatc

SEQ ID NO: 216463 - DNA, 401 bp, Glycine max
  unsure (1)..(401): unsure at all n locations
gcatgcaagcttataaatatatagtgcgcgcgaattattttttcatcaataaccctctacattnttttaataaacttgtacaatttcttctaaccattttacttttgggaatctaatatataataataaattattttgagctgtataagttataattttacattctattttttatgtcatatcttaaaatcacatatgtgatacaatctatattaattttaaaacgttaaattattctctttattctgactttgttaatcacattttttgcaggcaacaacgctattgaattattttctttattctgactttgttaatccgaaacataaccaatgtgatattcaatcctttgaattaattaaaatttaattttcataacttcaatcaactaaagtcatact

SEQ ID NO: 216464 - DNA, 473 bp, Glycine max
  unsure (1)..(473): unsure at all n locations
ttgtgtacactcaaatnttcatcaaaagtcacttagtgttntctgtagttaaaagtcattaagtatacaattgactaattctctatcatgtgataaaatattgaatgcttttaaatagcataggaacaatgatttcaccaatatcaacagataatgcatcaaacagctagaaaatgatcaagataattactaagtggtctgggcaagtcaactgtatcctgactttatcaattagcaaattatagaacaccgcataaagtaaaatacaatagctttcacaatttgtttgagtttctaaggaataaccaatgataaaatctgaagaataatatatgatagttgtctatactaccatcattacttgctgcgatatgactgaattgtgatattcatatctttatgtgcggaatatgaaattcgcaagttacaagaacctccatgggctggaacacngattacatgcctaccacaag

SEQ ID NO: 216465 - DNA, 197 bp, Glycine max
  unsure (1)..(197): unsure at all n locations
gacacccaattgacccctaccaagttgaaccgtgtgcttagnaatataaccaagaaaccctgctgagctaccgatggagnnnnngtaagcaaagtaattagggctttgccagtgtgttatgccagggactatgtgctgctgcaaatctcgaaggatggtttcaattggttcagggttgagaggtgcaaaagatggca

SEQ ID NO: 216466 - DNA, 383 bp, Glycine max
  unsure (1)..(383): unsure at all n locations
tgcgcccttacttatggaagagaggacagcaagtnctttatatcaagaacattatgcnntccagggcagcatgcaatgtgtaaaatcccagctcaaatgaagcaattcgtgaagctgatgaagcatctttagaagaagaacatgccgccgactttggagattgcacccaatcccggcttcacggaataatcgtcctctataagcagcgaggtcaacatagtacacagaaggaactaaagatacaggtctagcgcactatgcaaaggcgaagcacatctcgtatatcagcttctgcaattcatcagatgtaaacttcgtcttgtcccataagacatggtaatgagttggcttgctcgtacctaggtttccatagcacctacaaa

SEQ ID NO: 216467 - DNA, 389 bp, Glycine max
  unsure (1)..(389): unsure at all n locations
gcatgcaagctnagnngaatgtggtgggcattcattttttgtaaaattgtacttgtgtgcaaagtctttatctatcttctctagagatactgaaaaatccttttgtttaatccataagatttagtgtttttgcaaatattacaaagttgaggactaaaaaaaagagaggaaaatattacggggcaaacaaactgaaaaaaatgatttcttttataaaaaaaatcagccttataaaaagatcttctacaccagtaccaaattttttgcttttcatacacctttactccattttgttttgaatacactatcttttaacatttcgaattcttgttttgttcaattccttattcttgtgtcttatagacttgactttcttaggcattctattt

SEQ ID NO: 216468 - DNA, 451 bp, Glycine max
  unsure (1)..(451): unsure at all n locations
tcctatcattccatcagaatacaatgtggagtgggggttttatgagtcattttctgcaaggacctatatctttgtttaggaaaagaggttgatggtggtgttgtttggaggtatgagttatcaacaaatgagtggttcaagggtccttcaatgctcagtcaaaggtgcctctttgcatcaacctcttgtggtaccatggcttttgttgctggtggaattgagacaacaactagggaggctttgagttctgctgagaaatacaactcagaaagccacatttgtgagcaacttccaaggatgatacaaaagaggaagtcttgctcacgttgttacttggacaacaacatttatgtgcttgganggccaaacgagccgaagaaagacctcacttgtgtggaattctatgatgaagacacaaacacattggaacttggttcctgccatgttcaaa

SEQ ID NO: 216469 - DNA, 403 bp, Glycine max
tgcaagctatctggagaaaactgggggagaagctttattttatctacacacacccctctcataactaagctcacctccttgagaagcttccttaagaagattcctaatgaagttagagcttatctatacatacctctctaatagttaagatcacctccatgagatgaaaagctagagtttagctactcaccccctataatagctaagctcacccccatgactaaatacatgaaaatacaaataaaaaatctctactacaaagactactcaaaatgcctcgaaatacaaggctaaaaccctatactactagaatggtcaaaatacaaggctcaaactaaggaaaaacctattctaatatttacaaatataagcgggttcatacttagcccatggactcgaaatc

SEQ ID NO: 216470 - DNA, 398 bp, Glycine max
cttcgttaattaatgaagctcatttataaacatgtttgtctcattcaacgaagtggcaaaggattaagggactaaggggggcgttcacttgctttttttttttatctggttttatttcttattctcatttcttttatttatctcatgaatctctgcatcaaatcacattaaattaatttttttcttaatttattattcaaaatagtaatttctactttctattcaaatgtttaggtttcttccatggatattaattatctttaaatattaatttataaatcaactgatttatagttaccaattacacttattatatatatatatatctatatatatatatatctatatattaactccattcattaatctatatatatatatatatctatatttatata

SEQ ID NO: 216471 - DNA, 390 bp, Glycine max
  unsure (1)..(390): unsure at all n locations
agcttggaccaagttacttgtctgctttattttttttattcgccacactattgaactataattattctcaaatactctgattgatgatttgtagttcatacaggctctggttatcagactcctggtttaatgacttgtgaccaaaattggttaatcagtttttatttttttatgtttaggtgtggactttggaatatcttattttagaattcatatatcttgttttatggcgggaaattaaaaaaaagtataaatctgttatgtgtgatattcaacgataataaaacaagtgataaatcaaatattatgttccattttataaatacactagtgctttatgggtgtgcctcttggcactcccactagtcccactgctctanacaatttttt

SEQ ID NO: 216472 - DNA, 407 bp, Glycine max
  unsure (1)..(407): unsure at all n locations
tgtanacattaatcgggataattcgccagttccattatgttctngangacnntagaggttacttcctcgttgacatacttagtcttgaatggaatcgccatgacagtgttattgctactagtctccgatatttggtatatgatattgtgtagcgggaggtaattcctattggattaactcaccatccttaacttgccaatttgttatggcattcgttggtggatcacctatgatgttttgattccaagggcaatctatatcctttctgatggcataagcatgaaaccaatctaagaaaaagacattaattttgactcttttgacaaattcgtacaacttgtcttggatttgatttctgtctgtacccttgttatgttgtaaaaaccatctcctttgatgctcattct

SEQ ID NO: 216473 - DNA, 387 bp, Glycine max
agcttccatttttcgtgatcttttggttggtgttgtatcatgggtttgtgttgggtttcatggtttaaatctacttcacggtttaaatctatcgaatgcaaaataacaggggaactactatgaaaaaatgtttcatatatctatctacattcatgaggatatttaccaagagtaagcatcgattagtaaatgcctttttaaaaaggtgttaactacgttcatacctatgattgatgttttagtcaattgttaaattaaattttatagtatacataattatataataggtgttatatattttaatctcagacacaataacacatcttcttattttattcgttaaagttttatcattgtgatcaatcgattataatttttccctgatat

SEQ ID NO: 216474 - DNA, 458 bp, Glycine max
  unsure (1)..(458): unsure at all n locations
tcttagnttcagatgatgcagctgagttggtatctacctcatgcactcctctaatgattataacatcatttctggcgctaaactgctgggagttggaatccatcttctcaattaaatgtctagcttcaataggagtcatgtctccaaaggctccaccactggcagcatctatcatacttctctccatattactgagtccttcataaaaatattggagaagaagctgctctgaaatctgatggtgagggcaactagcacatagttctttaaatctctcccagtattcatacaggctctctccactgagttttctaatacctaagttatccttcctgatggctgtggtcttggaagcagggaaaatgttgtctaagaatactctcttattgtcatcccagctcgtgatgaacctctgagcaaggtaatacagccagtcctttgcactccctctaaaaatg

SEQ ID NO: 216475 - DNA, 437 bp, Glycine max
  unsure (1)..(437): unsure at all n locations
tttcttttntcgccaaatgtgctcgacttttttttataatggcccaagaaccgattgaacgtacgttgagaagaagcttgctttcctcttccctttagcatatgaaaggacactccagtcccttacaataatgtgccttaggccacgtttctcatcaccatgtgttactacaaatctaagaaaaaaattattaagaaatatccatggatacatgtggatataaaaaaatttcaccaacaatttttaagtgggtatatggtggataacaagacacattttctctaacaagacatatatagctattaattatgcttatgtttgtctttcctaaagtcggggtcatatcaataatgatgatgacattgtaatgagatgacggtagtatgaataaagacaatattaatagtgatgtcggtggtttatgataatcgacatat

SEQ ID NO: 216476 - DNA, 383 bp, Glycine max
gcttggttggcaggcagtgttgttttggctgaaaaagattttagggttcttttcaagactatccttctgcgttttggtttttcatttgcttagttctttctccattgatttatgggttcttttcaaaactattcttctacgttttcgatttccgtttgcttggtttggccgaaaaacccaaaggctcttgcttggttgttttctcttccgagaggaaaacccaaaggccgaagctttttggcttgtgttggcagttctttgcttgggttagccggaaaatgatttttgagttcttttcaagactattcttccgcgttttgtgtttcattagctcggttctttctccattgatttctgggttcttttccaaactattcttctgc

SEQ ID NO: 216477 - DNA, 464 bp, Glycine max
  unsure (1)..(464): unsure at all n locations
tctttcatctttcagaataaagacaaaagccttgctttctttactcttaagngaccataggaggctttctttccaaaccatacttcttttggtatctctccatttaaaggtcttgaaggagacaaatcgatcaaatcaattgcagtcttcactgcttcaccctataatgtctcggggaattctgaatgtgaaagaatacgtctgactttctctgcaattgttctatttatcatttctgctaatccattcaactgaggagttttgggaggtactttctcatgtcatatcccatgaaccttgcagtatgcctcaatgggcccttctaccattgtttgatctcaagcatttcagctttcttccagtctctcattctactgaggcatgaaactccttgaaagtttgaagaacttgatctttcatcttcaacggatacacccacacctttcttaagtgatcatcaatga

SEQ ID NO: 216478 - DNA, 340 bp, Glycine max
  unsure (1)..(340): unsure at all n locations
ttttttttggnggaacaacaaccactgactttgtgtacaaatgatttcctactcacgagttattcatgcgctttcttttaaaaaattgctcttaacatcgccaatttaacattgattttatgaaaacctatgataagaaaaagtacggtgatatttttgaaaacaaaatgactttgttaacatcgattatataaaatcgatgttgtgtatatctcttaacactagtttttataaaaaaaacaaaaaaaatcagtgttattatgtacttgtctacactgcgtttgtaaaatcgattttgtcgctaattcttaacatttggtttcaaaaaaaccgatgatat

SEQ ID NO: 216479 - DNA, 456 bp, Glycine max
atgtcaagagccaacaccaagatgcagaagggctatatatacactaccaggcccaattcttggtaaattcattgccaagttgggaatgattaacatctattcgccaacttgaggcggtctcacgattaatcacctagagctatttacaagaagttatttgagtacacactttgttatcgcaggtagttggttactagaacacatttgagtagatagttgggtaagacagttagttaactactagaatgtatttgagtaagctagttggctactcaagttacttattttctcgacttgataaataaaccaacttttgaatactttgatgaatgaatcctcaaagtgttcttcattatctttatatctgataaagataacatatacaccattcatggaaatctattcttgagctcgctaataaattctccttcattctctacctttatcacacttaat

SEQ ID NO: 216480 - DNA, 376 bp, Glycine max
catggttgttcaacatcccacacttctacgatgtagactcaactgttcagcgttaattacacacgtcattagacaccttatcgggcagtaagtaattgcgacctctacatgttccagtgactggatgtataacatgtcttatatactgagtaaacgttatcttaattctccatatagcattgtactctcattttcaataacgagaaggttattactgatcttaagctgtttctatcagaggacactgcaatgctgtggggagtcaactgccataatgtagttctcaaccgagcagtccctactggcaatgtcaatcagagctactctctcgaaatgataaagcaacttttactcttgataagggttggcgtttact

SEQ ID NO: 216481 - DNA, 317 bp, Glycine max
ttgagccccatataaagaaggagtctttttttaaccgaacttactatcaatatctgcctcactgatgctcggcacataaaggtcacggcttctctaaccaacaagtcctcctcattaagatgattccactgaatttcttaaatgtaaaacatcattccaaaatggattttatattgttgtgcccctacccttacaaaaaaaaagcaaatatctttatttacatttatacacatgtctccaaaataaattattgggattttttatacaccaattatcctttgttgggtgaacaattttactggcgggaattcgtggac

SEQ ID NO: 216482 - DNA, 341 bp, Glycine max
agaatgtggtagcacgaaactgaaggaacaaaagagggagagaagcggaactttgcagcgcgcctcataagactttcaatcatcagagttaccacaagtgcgacacccgctgctaatcatagactagggaactacctggagaagccttcttgagaaaaccaccttgagaagcgacatcgagaaaactcccctgagaagcaggagcgtagcgacccacagctcctcaacaacggagctcacctgcttgagaagctcccctgagaagaggcctaaagaagctagagcttagctacacacacctctctaatagcgaaactcacctccttgagacgagaagccag

SEQ ID NO: 216483 - DNA, 314 bp, Glycine max
tttttgaaccacgcgccaacccacgcagtttgttgtgctcgaatgagtaagggcgcaaaatctgaatttaccgcgtaacccactcatcttgttatacctgattgataaagggcacaatatttatagctgcacatttacctactcagatagctatcatgctttgagtattagagatagcattcgaaagcttatcggataaccactcgggtattctccgtcttgacacgagacaccagtgtattttaactgaatggtacacgctgaaatgacttaatctctcatgtcaacggtgttgtggccgctattgacaatgg

SEQ ID NO: 216484 - DNA, 315 bp, Glycine max
aaacctattgcaataatcaaaaattcactttgtgattcttagcaccacaattgattaacctattcttggtagctacctggcgacctatctggaaagaaaggaatcaggaaaccaacttccgtcgccatatttaaaaacaaaaaattgctcattattcaatgattaattaatcaaactttcatatgaaactatcataaaccagccgcacgtgtataacacaccctaaagatacgtccaccttttaaattcaaaatatcttgtgaagactacaaaaaaattgatacttctaatactgcaagatgcaacttggtgaca

SEQ ID NO: 216485 - DNA, 366 bp, Glycine max
ttcactccttcagctagggccatgtattatgcttcagttgttgaaagagcaacaactgattgttgatttgctttccaatcgattgttataccaaacaaagtaaacacatatcctgttagagacttccttgagtctacatttcctgcaaaatctgcatctacatatcctgtgactactgcctcgagtgctgtcttcttgtaccttaaaccagctttcaaagatccatttatataccttagagtgcacttcacatgtttccagtgtgcgctgtcaggatttcgcatgaatctgctgataatacttacagcatgagctaaccaggtctgatgcaatcattccatacattatgcttcaacaccactgcat

SEQ ID NO: 216486 - DNA, 391 bp, Glycine max
agcttctgttggaagatgattctgagatttttattgccctttgagtgctcttatatgtataccacatttgacctttgagtgctcttaaaatggtattattttaacacatctttccttcagggagcaaaacctggtgagggtggcgaacttcccggccacaaggttgtaagaaacattgttgtcacaaggaattcaacccctggtgtaggacttatcagcccacctcctcatcatgatatttactccattgaagatcttgcccaactaattcatgatctaaaggtatgttcatatcttgcttcaatccttttacattggatactttttgttggattttgttgccttaggtgtccatcctctttaatccctttttgtttatatgcagaatgcc

SEQ ID NO: 216487 - DNA, 478 bp, Glycine max
  unsure (1)..(478): unsure at all n locations
tatanaacaagcctatcagccttaacaggccccttttttttgtgttctcctcttgngatccagaacaggctgttgttaaaacataaaaggcaggtcgatgagtaagttgaagagtcgggcatatttgggccccaaaaatcaaatattttgtgttctgttcttttgaaatattggctgcgtctangtaaagggagttgctatcactactcacatgagtgcttcctaatagtatcctgaaaataccctcttgttagaaacacaaaggaatcttaattctgttccatatgttacctatatggaggtgggaaaaaaaaaaacaaagcacaacgaaaacaacaaagttgcattttcatcatgtatttgtttcacctccaatataggtaataaaattgcgattctattatataatctcttcttatttcttaattaattgtaaatgcaagttactttcttttgtaaaataattgaattcattgtc

SEQ ID NO: 216488 - DNA, 379 bp, Glycine max
  unsure (1)..(379): unsure at all n locations
aaagcttatacgagataagcttttctttttttagcnganagctcgctaaaaacttgtaaactagttgatttaacttaaaattattttgtaagactgactttaagttaattaataaatgtcacatgatatatttaattgcgcgtacgctttagttaacaaaaaggaaattttctgcttttaatagataaaataaaaatcatgcatggaaacaaatttggtcatatacttattgcaaaaatagagaatgattcaacaaataatcataaagttgatatgattcataaaatttataactttaagacataatgcagtgatgataatatgccaattgactatcgtgtatgtataaggacttataattatatataagattcttttt

SEQ ID NO: 216489 - DNA, 428 bp, Glycine max
  unsure (1)..(428): unsure at all n locations
acctatagaaactcagctgcattggaaagcgaaacacgacgagggatgatgtattattacctgacancccaaacaaacaaatcaaacgtgacaagacaattatagatgctgcgagaatacctcacccactcaagagtatcacacaatgagggcgtttctctaatgaaacactctgtccttttaccactctaatgcccctcgagtgcgtaggcaattcaagagagtatggccacaacagagaacaaatcaccaatatgtgtaagggaaggctagagagacaaggaaaaggtgaaccaagaaaaggctaacgatgcgtttaggcacaaatgaaggaaataaaattcagaacttatgaattcaagtaacaatcctccatgcaaccaatatactaccttaaagagatatttgtaaaggtcttcaagcatgaa

SEQ ID NO: 216490 - DNA, 403 bp, Glycine max
  unsure (1)..(403): unsure at all n locations
gcaagctnggaaaaattattctgaagagagaaactctttttttcaancattngcgcttttcaaaatcttttctattagtctatctaaaacctatcttaattcttttcttgagacctttgcctttgcttgaaatcttgctttcttcattcttgaatgatctttatatttccttggcatcatcaaaataattcttgaagctttgcttctacacttactactctcaaaacatagaaccaccacctcacacgagaactcaaaatacagaggaggaagggaaactcactcgtggaactcacacgaggaagaatagtcccaagggattgagttctattacttnttttatgatttaatatgattacactaagatactgctctttatacaaatgaaagcaatgggacccgc

SEQ ID NO: 216491 - DNA, 453 bp, Glycine max
  unsure (1)..(453): unsure at all n locations
tgtgtagcccaccatctgttcatagtagaatactgtttatgtgtctactattattgtcatcatttgtttctccgtcattgaggtgccacttgagctgccaggtttctctacctttgggcgtattcttttgaaggattcgagccccctttttgcacatgttttgtagtagcatcctatccgaagccattatactgacactgcctaacgaaagcaaccattatgtccttccaagaatggactcgggaaggttccaagttagtataccaagtaacagctaccccagtaaggctttcttgcaaggaatgtatcagcaattcctcatcttttgcatatgcccccatcttccgataatacatctttagatgtgtctcatggcaagtagtccccttgtattngtcaaagtccaacaccttgaacttgcgaggggtgatgatattgggttctaggaacaac

SEQ ID NO: 216492 - DNA, 386 bp, Glycine max
  unsure (1)..(386): unsure at all n locations
agcttggntcgaggagtcatagtaagaactattttcatcttaactntaaaagcccctgcaggaggaggaggtactcgtgtttagtcgcgtactaactctccatgcacccattagtctagtgtagtatgtgaccaactagggtatgataactatgttggtgtagtagtgccataaggcgtggatatttatgctctcgacgctttgtgttgcatgtacaatctatctcttggtggcgtatctttgtttcatagttggatagaggttgcataacttaaaaaaaaaattaacacatttttataagcaaattaatggagagttttcttataaaatggatcgtatacattatgttactataaagtaattaatagtggcactggatcgttaca

SEQ ID NO: 216493 - DNA, 467 bp, Glycine max
  unsure (1)..(467): unsure at all n locations
ctgtagtacaaatcagaaattctgagaattatattcctccttntgtatctaatcattctattagattatgtaacaactaccaactaactttaattaaaataagttttattctctntatatatcaaggtttggacgtgttggcatggcatcattaattggtgaaagaagattctctttctctctctgtctatatatatatgtatatatatggatcaagcttgcactatggtttataggcggacaaaataatgtgattaaatgaataactgcagtataatttcaaggatcaacctatcacaaagcttgaaaatcgactaaaagcagcaccggtaatagttttcttttgtgccaaactaatttgaaattcctaggacttcatgagaatgaatctaactcctgtaagattgagacaggtttgattgcaattttcaataataaactcttatctgatgcacacttattgaatg

SEQ ID NO: 216494 - DNA, 381 bp, Glycine max
  unsure (1)..(381): unsure at all n locations
acccgccgcatgcaagctncttacaaaatacgacagacaataccttttttttncnnggccaacaccgcgtcgactttcctataacacgttgcaaggctagggttttcaacaatcttcactccctgttgacttctgggaaccagtttctcagggacagaagcttgaccaggaattatttgtatagggtgaatgctgaattctggctgttcctggtgccgagatgatggtacagcgggtgaaccagaagctgcaatttcttttggtgaggtagccatggaaaagcaaatcgtttggaaggattttccaaactctcaaaagcttttggaaacagctggaaaaaaccccatcccaccccaaattaatcttaatgaaaaaattaag

SEQ ID NO: 216495 - DNA, 456 bp, Glycine max
  unsure (1)..(456): unsure at all n locations
tgnactgctnttaccctattcatagtgtacattgtctctatcatttccacagatctatgacgcactgcaagagcaacctataaacatacgtaacaatgtcactganaagaacaacatgttcagtaataatgttgcacaaggaaattgcagtgcattcaataaggtagattcacaaaacaagacataatccttgtgccaactttctatggaattttaagcagtattactaaatatgtggcccatttattatacaataacatgagtgacatgctaggtgcactcagtaatgttgctggtgcacccaacaattttatgaaatggctaaattgcccttatattaaatattaaaaagaaaaagtgctggccctttgttttcttccacaccttttatgcttctttcttcttgctatatttcctcttactccgcgcctgccatctgctattgttgcggtgctg

SEQ ID NO: 216496 - DNA, 291 bp, Glycine max
aaactaaaatacctgaatatcctctcattatcaaatcattctaagcggcagggacttccttttaggtgtcgcatgtgacgtcgaccttatcacgagcgaaaatccccaaatatgttcttaatttcactttgtggggaccgtcggccttgccggtcgcaggatcgatgatgaccactggtctctctgcgccaggtggtataaaggccaaggatcatagttgtggtactttgcgtgaccgtttctgggtggacggagacactgctgctcctgcgggaggaaaaagataaccac

SEQ ID NO: 216497 - DNA, 366 bp, Glycine max
tatcactcgcttaataagaaactcacccctcataatatatgtactgcgcggttagcatctgtgatgatcgcgaatcttcgtacgtgggagcacaatgacagcagtacgatattataagcgaaaatcttttgtggaccccatcagctgacgtgatgacattggaattatcttgagagagatctagagttgtgtttagttaatcatattcactccatagctagtaccataaacccttatgctgaattcacgatggaaaccataaattcaattatatgcaaggaaaagattatctttattatgtgaatgaggcgtactgagatactatatatatatatatatgtattcacttaactaatgaagcgctcg

SEQ ID NO: 216498 - DNA, 274 bp, Glycine max
gtttttttttactgccatcccatcccactccaagtggaccggacattctttccttaaatggaagaatgtaattaataccatcatcgtttgttaggacacataacccttactctttttttctcatagacttatttcattgatccaaccttctggacgcatcattcgtgttataaccctcaaagtgcatacacttgcattgaatcaagcccatcatattggatagccctacttaaacacaataatgacagacattaattctgtgatacccccccta

SEQ ID NO: 216499 - DNA, 423 bp, Glycine max
  unsure (1)..(423): unsure at all n locations
atcatcctactaggacgactgagaaaactgtggcaaataaatagggtgaggatgatggagaaacccatgctgtgactgccattcctgtacggccaagtttcccaccaacccaacaatatctttactcagccaaaaacaaactttctccttacccaccacccagttatccacataggccatccctaaatctaccacaaagtctgtctaccgcactttcaatgactaacaccacctttagcacaaaccaaaaacaccaaccaagaagtgaatnttgcagcgagaaagcctgtagaattcaccccaattccagtgtcctatgctgacttgctcccatatctactagataattcaatggtagccataaccctagccaacggtcatcaaccttcatttatccgaaaataccactcgaacgcaacgtgc

SEQ ID NO: 216500 - DNA, 355 bp, Glycine max
cgcaacggactctaatggggaatgataacataatttgagatgcaagacgctaaaacaccaaatgagaacggtccaactctagatatctagcaaatcattcacatgatcatgatagctatttttttccatacaatctttatcttcatcaataaccatggcagtttctctagattccatgaagttcattatcaaattaagtttctttaagttatcaagaggggttccaacaacaacattaacatcctttcctactcgaaccaaggttcattcggagattccaaatccaaaccaaagctatatgagatcccatctttatttctattctaatcatcataggaagaaaggtcttcacttt

SEQ ID NO: 216501 - DNA, 445 bp, Glycine max
  unsure (1)..(445): unsure at all n locations
gtaatgtacttgtatttctctttttcatgctntaagtatttattatttcaattcatcataaataaaacaacgttgcttcaatgttctttaaatgctaatcgagtgatctatgtcttcttaatattaatcaagtcaaactagacccataaatttgacgaacataaagtaaaatttcaaatataaattttgagtatatttctatcgagagagttaataacactatattagatatatgctccttattcaagccgaattagtatgcatatctgatacctgtgatccttaacaataattaacaaatgcataactgatctgacatactgcccgtatcctgaatcattgtaagtatctacttaacctcacatccaaccaacataatcaacattcagaatagatcttgtcttgaacacgtacataattatttgaaatgaatcttcttcttata

SEQ ID NO: 216502 - DNA, 319 bp, Glycine max
  unsure (1)..(319): unsure at all n locations
aagcttaggganggaatacttacgtgggggtgttgtttcttagcgcgaaacggaatcaaaaagtgcgataaatgatgaccctagggctgcaaactcctaaatcccgtgggtatggcttttgaaagggggaaaagaattttttgaatgcaaaaacgtcccacctttcctcatctttatattctggtgcacgggtggttcgcctcagctagctaacccgtcattttttttttgataggaacattaaccacgccccctccttcctcatgggttgaacgggtgatttcctttgcctaacttacattagaatcaggcattcctt

SEQ ID NO: 216503 - DNA, 355 bp, Glycine max
  unsure (1)..(355): unsure at all n locations
tttttttttccccccncccaggcaccaacctttttttgtacacaaatacctcgcccccaaacgcctaatgatcttaaattcagctgcatattccttaaccccccgactatttatatcagccatagagtttaattaaatttccaaaatacctttatacacagcacccaatcactcttttccgaccttctttgaaagagaaaatttacttgtcgcactttacatatagctacctcctgggtccaatgcccttgagatcaaattctcagaattcgttctttctttaaattccttatcacatgcatacaaaaacatccaattctaataaacaaaaccatagccaaataaaatccatccc

SEQ ID NO: 216504 - DNA, 456 bp, Glycine max
  unsure (1)..(456): unsure at all n locations
gactctatagataactcacgcttataccaccacctacaatttacatatgcgtagatagttttctttattggctgattcagaatatcgagtagatgccatgcaatatgtcgtgaattgcaacacatatacaccagatatacaaatagtgcgactatccatcactaccaaattcaaccaaacttttacaagcatatattttgattaaataagaaagaactcaacagcacttgaaaataaaagaaaagataacaagtcactcaacaaaggcctgcttctatagattaccgaagaaatagatgggaaacagctagttgaacttctcaactttctgccagagaatgtctaacaagctctacattcactctngaaacataaaggtgtgtgacataacacttgcacaagttgacatgcaataaaaaaatcgctaaaaacccttcgctaaataactcatacaac

SEQ ID NO: 216505 - DNA, 371 bp, Glycine max
  unsure (1)..(371): unsure at all n locations
atgcaagcnnanggagctaagctgagaagatgttttttttttcanaacaagnngctatctaagtcgctggatgtattgactgaaacactaactaagtcgccaacttaaattcattctgcgcaaacttcacatttttctgtactacaggttgctggatgaacaatttgtggaggagctcatgaatctagatgtcgtatccctaatgaagaacaaatcacacatgaagtcaatcatatggggaaacagcccataaacaattataatgcgggtggatttttcggatctcaccatggacaacatcacaactaacatttgggacaatggaggaaccttctctggaatcaattcaatatacaccagaggggataatc

SEQ ID NO: 216506 - DNA, 424 bp, Glycine max
gggcttttatgttagaagacatactgcctacacatttgcttgtcttgagtctgaacaatctctctgagtgtgtcccttttttgcacaattaaaacatgttacgcctatatcgagacaatacgatgagatatgccctgacttaccacactcgtaacaaatgatatgagtggagaacatattgggttcgctaccgctaccacctgcaaatcccctagcaacagtactctgattgacatggcggttaccatattgcttaagaggaatcgaatatggttttactcgatgttgaggcccatacttattgttcactattgaacttgtactcatatagcaagccgccttgacttgcgagtcttcatcccaaatgctgctcatattaaccatatgcgagaactgacgagcaccgtggtaattcacagcttgc

SEQ ID NO: 216507 - DNA, 335 bp, Glycine max
cccccgccctcggggatggatgcttttaatgtttggcttggaactaacaacgaacgcgttagacagtgaataaactctaaatatattatttccctaaggtggggtggtaaatgcccatgtatgggaaacgctagggtctagggacaagttgtatatggatacttgtgacaatgaacattgggaattcgctccaaattttgaaaaattgatgtgttaaaatgagagttttgtataaaaggatgatttaatttatttttcgtaagatcggtgaaatggtttataacctaattaatacctattcaaatactcagctaattgattctcttaaatctcta

SEQ ID NO: 216508 - DNA, 272 bp, Glycine max
  unsure (1)..(272): unsure at all n locations
tcgcaaatgaaagggggggtttttttncgaaaaactacagaaggacggctgaaacctaggaacgagaggacccagaacaacctcggaccagaaagcccacgggatgcaactgacaaaaaagcctagcaagaaagagccaacaataagggtagcagctaacagcgggagcatgagcatacgaggtgccccattaggagaagaggatggaagacacagaatggaagccaagtatagaggaacggcaaaaagacacaaggctggcaaggcaacaa

SEQ ID NO: 216509 - DNA, 245 bp, Glycine max
tttttttctaccccccttcatgctctgagtgccttaggctgaccaaagagaaatctactcgaagattattcatgagccttgatgcttaaccatttactacccctgagagaatatgtattcgttctccttgagcgcttcaaaataaaacaagaatttgctctttgaatgacttgaaggcgggaagttaacctgataagattttatagaaaacgttatggagaggctgatagaattctaacctgtcc

SEQ ID NO: 216510 - DNA, 74 bp, Glycine max
caactgacacttggcttttacattgaacacaagttgaaaccaaaacaagagagagaaatgcagagactaaacat

SEQ ID NO: 216511 - DNA, 403 bp, Glycine max
  unsure (1)..(403): unsure at all n locations
gcatgcaagcnnanaagggaataagcaaaagagacttcttattttctaaangngcnnattcactttcatttacatgtttgcgtgaaaatagcgtccgctaaactgtaacttggttattgaagagacaaataatgaaaagtgacttcataaatatatagccaaatatgatatcttttactggatacttcgtacgtctttagttccaacaaggcatggtttatggacttaaaattttgcaaataatctaggaatctactgaaaaatttaactaaaataatataataaaagttaaccatcttatcatacttaataatttatattaacataaagcgatcaattagctcaatagttccaatctaatactttaagaaaaatctttattgtccatagtgatactgactct

SEQ ID NO: 216512 - DNA, 420 bp, Glycine max
tcacttatggatattattaacaagagagacaaagcgctatatgcgggtgaagccactaaaaataacttattagatatacttctggagtcaaatcacaaggaaattgaagaacacgggaacaataagaatgttggaatgaatattgaggaagttattgaagaatgcaagcttttctactttgcaaggcaggacaccacttcagttttgcttgtttggacaatgatattattgagtaggtaccctgattggcaagcacgcgcaagggaggaagactcacaagtttttggcaaccaataaccgacttttgatggactgaattaattaaagattgtaagtttgtattataaacctgttattgaatagcatgttcatggtatttactatgaatatttgtgcaacaatgtactatgattttgtatg

SEQ ID NO: 216513 - DNA, 399 bp, Glycine max
  unsure (1)..(399): unsure at all n locations
catgcaagctngcacaaaatagggtgacaaatacttttttattctncatcaaagnncccatagacagatatactaactgtaacaattttcacgacacactctcaatgggggcctctcatcaaattcattccaacctccaacaagttcaaaccctgcaagaaatgacaaagtggataaagaggttaaggtgtgtgtaccaatggagagatctctaatggcagaataggtggcaacagtgcgctcaatttgggtcatctgaccaatcttctccctcagagtcatgcgagaaagaaggtccttcacacgagctacaatttgctcttcgggattcttgaaaacgcaagccatggctccttggttgaaggtggtcggggatagactatagagtgtgtcattatg

SEQ ID NO: 216514 - DNA, 476 bp, Glycine max
tcgcttcatccaaggggagacagaccatatgatgtgcttgatataatcataggcaatgctcacaaatatgagctgcccggtgagtatcatgttatctccaccttcaatgtctctgatttatctctttgtaatgcacatggagaatcccatttgaggacaaatacttctcaacacggagaaaatgatgaggacatgaacaagagcaaaggcaaggatccacttgaatgacttgtagggcctatgaaaagaattccatatacaatattgagcttattgcgtaaatacacgcttagcacataatgctgatatgattggtcctacaacttgcgcttagctggtattgtgcatgcttagtgcataatcatgctctaacttgcataggtatgtctcgcttaacctgtgtggcacgctttacacatttcacaataattgaaatccagaaaacgtattacccctatcgagtcctcgcggtaacc

SEQ ID NO: 216515 - DNA, 374 bp, Glycine max
  unsure (1)..(374): unsure at all n locations
agcttcgnagctgtcatgctgaagcaagaatttatcttcaaatgctgcaggccatgcataaacaattttatttgctctcgtaattctttttgtctcgtaattttttttagttaattaatggtccatttaaaactttacagccgaaagaagaaataaaggttaatattaagtcattgatcttgaaacaagagaagaacattccaaagaacaagggaaatgaaagtagactgggcagaccctaccatttaataaacttaacaaaagagacgaaaaaccattaaagattgaatggctttctaaaagtattgtttttttttaattaattttcacaaaaaacactacactatattatactaataaacatctgttttggt

SEQ ID NO: 216516 - DNA, 436 bp, Glycine max
  unsure (1)..(436): unsure at all n locations
ngtatctgttgcacgatagagcaagcagaanaatacgatcctgtgtcagttataccgaagtatgcaagaagcatatgatcaaatgcagactccattagcccgccaaataccacctgccttggtaagtataatcctatgattcccaattgacttgaatttgtgatctctctctcctttatcctatatcttgttcttcaagcaggggctaaaggagctgaaggaatccaccatccaactggcttcaagtcatggatacattgattcccctgttgatgagactgttttcgatgtggataacgatgttgatgaccttctgccagttgaagttaaagaacagcgcctcagcaatctgctgcaggcattgatggttgcggcttgtgttgctgctatgcctctcttgaagaagataccaacttcagtgctttggggttacttt

SEQ ID NO: 216517 - DNA, 393 bp, Glycine max
  unsure (1)..(393): unsure at all n locations
atcctggggaanggcgaactggatctacataacaggaaacgaccgcatctccttatatatataagataatccgatgtaagtagtcttattgcggtcctacacattctacacccaaaataacttttccacaggttgcggggacttaattggctctcccacaatagcctgcttcaccatgggagaagtttttcaacctacctataattctcggaaaataaaaaacttactttaagagaaaaaataaactttatttaatctaaaaatataagtgaaacagtaaatgtgaaacatccacattgcgcgtatttgacatgctgagaatcactacttctctgaaatacttttattaaactcgatgcacattgtatgccaagagaatcacacgtgtgctat

SEQ ID NO: 216518 - DNA, 387 bp, Glycine max
aagctttggagtttccaagtgcgagatgcggttcttttttattccagccctcttctggctgcaatacatcaatgggctttccttctgcgtccagcatcttgggatgatcccagcctttgatgacagctttccaggttctgctatccagtgatttgagaaaggccaccattcttgctttccaatattcatagttgcttccatcaagaattggtggtctgttcactggtccgccttctttctccatgttcatcagaatttatctccctagatctcactctgtgatttcgagtgttggctctgataccaattgaaattctgatactggggacagatgtcgtacaggatgtcacgacatcacgcttatgaacatgcacattgtatgtgacc

SEQ ID NO: 216519 - DNA, 460 bp, Glycine max
  unsure (1)..(460): unsure at all n locations
ctaagctagcaagctcctagtngaggataggtgccaccttcatgcttttagcgtagcactatcatgcttgcttttgatcagccttaacagtcacaacctctctcatcaaggtagggaacttcatttttagatgcagcgtggagacgacagctctgagctcgttgagtgttttcctgccaatcaaagcaaagtaagaggtatttgcatcgacaattaaatacctaatagtaaagctcctcgagagtcggccttgaccgaagatgatcattagatcgacatagcctctggtctctactttttctcctgcgaagttgaggaatggacctgcgtgaggctagatggtgtcaggggaaacttcaagtttatggaatgtcttccagtataagatgtcagtggagctatcttcgtcgatgagggcctnggacaccatgaagttggcaattacgatggacacaactat

SEQ ID NO: 216520 - DNA, 391 bp, Glycine max
  unsure (1)..(391): unsure at all n locations
gcaagctttntaacagctgcgtccagagcatcaatatgttttcttaggantcttctccaaaccattaaggattcaattgaaaactaagatcaaaggatgaaaaagaaggaacatctaacactcaaactgttcttaatcaagtcttcagttaaaacagaaaataaggcacttctaaatagaggaaacatctaaagtgcacacaaggtaaaaaaacaaggctaagttcacaaggtatgaacgcaccatcacttgcacacttcttggcttgctcacttcagtggagtattttcccccgctaacatagtaaatataaacattccagaataatagaaaaatattttgagatgaatctctagaatttaattacaatgtactgactaacactaaagat

SEQ ID NO: 216521 - DNA, 456 bp, Glycine max
  unsure (1)..(456): unsure at all n locations
tactcacgctatggaggngtggctatgtgtaatctgaaacatatgaattctgtttgtttgatgaagttacggtggtctctcataaataatgggaacaatttatggtgtcaggttcttggaggaaaatatgcatgacaagatttgtctaataatgctttggtagtcaagcctcaagatttcccccatttataaagctgtagttgggatttggcctaatttggtggaaggggaaatttgggccattggggatggtatgctggtggatgtttgggacaacattcggatcggtaatggtgtgagattaccaagtgctggtttaacattgctcaacaattcctgaacaccaaagtcaatgacctggtgggagagatgggccttggagttcaaatntactgcaacagatgttctctaatgaaatcattgagcttattaaaccgattctacctcctcagatca

SEQ ID NO: 216522 - DNA, 247 bp, Glycine max
  unsure (1)..(247): unsure at all n locations
gcttanccctagaggggagggacgctgacatgttttgtagaggancaanaacaatgcctataggttggacctcccagaagagtatggagtcaccaccacttttaacatttttgatttaactcctttcgcaggtgatgctgatattgttgaggaggaactaccagattagaggtcaaagccttttcaaggggaaggggatgatgcaatccttcctaggaagggaccgggtaatttatccattgaccac

SEQ ID NO: 216523 - DNA, 443 bp, Glycine max
  unsure (1)..(443): unsure at all n locations
caaggcctagcatacgtagatgggcccgtcttcttcttctcgcctatatacgccttcgccgtcctcttgtctatagaccttgccggtagcttgggaggggcaaaaaccgcccgctacgagtcatgccacttgtaccaaatagtattgtgatcttactagccggcatgccattcccgacacgtatgacagatgcggtctgcctttcatcaagccctcgtacaccatatttccatggtactgtcttatcactcttgtaagggaagggagctggcatttttgctatagggggctggaaaccttgnggtatctgagtgggaatgaacttggcgaaatggatcaccaacggctgatgcttgcttgggtctctgcacccgaatgatacatacccacctacctcttcttgactggaattcaattacccctgctaatattcccgagcactc

SEQ ID NO: 216524 - DNA, 402 bp, Glycine max
  unsure (1)..(402): unsure at all n locations
gcatgcaagcttgaaggggtgtagaggagcatctttttatattttaacactggnaatgcgtctactatcttggatatcatctcccttatcatcattgggggtgccacctgtgttgccaggactctcgacctttgggcgtatttttagaaagattcatgcccttttttgcatatgtcctatagctgcatcctatccggagccatatcataattgtactcgactctgcctaacgatggcaaccatttaggtccttccaaaaatggactcgggaaggctccaagttatgtaccaggtaacagcttccccaacaagactttctttgaagaatagtatcagcagtttctcatcttttgcgtatgacctcatcttacgacaatacatttttatatggtctttggggca

SEQ ID NO: 216525 - DNA, 460 bp, Glycine max
  unsure (1)..(460): unsure at all n locations
atttgaattaaaacgttcagagactgctggtattctattaccatgtatgtgnaatcgattacacagtgcacatcttaatagctctcctaaatcagttatggccactggtaatcgattacatcctctggtaatcgattaccagagagttaatttcttgtaaaagactttttaacttacatttcttggccaaaccttttgctacttcaattggaattcccttcctatttaatataccttttctaagattctagagactgtcttgatcatccatcttgaatatctttgatttctttgtcttgaataaagcttcgtgaaacatgtaagcctttggcatcatcaaaacatcagcttcgatcctttgtctacaatctcccnctttattatgatgactatcgctatatcgagacagaccatatacaagatgatagcacattcacacagcccttactcctcctttctt

SEQ ID NO: 216526 - DNA, 366 bp, Glycine max
  unsure (1)..(366): unsure at all n locations
gcatgcaagcnggaatccactgagcgggtgcgaggctctttgttttcactaacctcaacgtcacaaagtctgatcctatttaaagtcggtctcgcgcaaaaattagtggtcactttgacacacacttttattgactcttagacagatagtaggcagaagaaaaggcacagattctagagcacaccacattgcctatttggggaaaagagccattgaagcatcacgaggagcagcttgtgcattgaaacctaggttctgtaagactattattgtatgggtctctttgtaatggttggtcaagcaccctatgtggggatttctatagaaaaactgatgtatatacctaatattgaaatgattatggtt

SEQ ID NO: 216527 - DNA, 376 bp, Glycine max
atatgggacccaagcaggggactatgttcttcgaccaagagccacaagtttccacatcccgagccgcacaacccccatccctgttgccactccaactgacgcacgactcccacgtacccataacctcggttgtttacaccgggcccatctatcttccagcttcccacatcaagtaacacattcaaacacacaataccacagcaacaaacaggctaggcgaaacttgccaaacccaccaaatacaggttctacttaagacccagtacgatcttcgtccattcgtaccgtgggcgactcaaatgactggaggctatagctaagctactttgacgtggatcactagcaacatccaaacttctgcctacatttccagcac

SEQ ID NO: 216528 - DNA, 402 bp, Glycine max
  unsure (1)..(402): unsure at all n locations
atgcaagccngcaaaccagatcatgaggacgtatttttttattaaccnccacgccgnaccatatagagctttttctctaaaccaccatcacaaaaggttgatatcacatccattttttgcaaactaaggtcaaaatgagcaactagtgccaagataatataatgagaatctttcttagatacaggagaaaaagtattcatgtattggattccttctttttaaaacaatcccttagcaaagagtcttgccttgtatctctcaatgttgcctatagaatccttatacctctaaagacccatatacaaacaatggcatttgccccattatgcaactctacaaggttccaaactctgtcactccgcatgaaatacatcccatccttcatgacatcatacctaaaat

SEQ ID NO: 216529 - DNA, 326 bp, Glycine max
atgagggaaccaagagaggccccatattgtctttcaatatcatagaaactaaccgtcgtcgcagaatccaccaacatataactaatgaataaattaactaattatcatatattatatggttacgggggcttctcacgtgacctttaccaataccaatgcaaatagaatcggatgggagcgctgcatggtggacagctggttatccttcgaaacacgacggataaatgactcgcatagtcgcagttgaccatgtcacaccctgataaggtaaatgcacttagaagctcctacatgctgcatgtcatattctaatgaataagcctttg

SEQ ID NO: 216530 - DNA, 399 bp, Glycine max
  unsure (1)..(399): unsure at all n locations
atgcaagctttgagaaccttggaagagaatatctttttattcggatgncagaccgacaccagcaatatattcagacgctcgaaattgaataccgaagctctgagcaaattcaaacgacaataagtttttactcgtatgttcgattgactctcgtaatatatcgaaacgctcgaaattgaagaccgaagttctgagcaaattcaaacgactataactgtttactcggatgtttgattgagccccgtattatatcgagacgctcggacttgaatgccgaagctcttgggcaaatcaaacgacaattacttttttccttggatgtcggattgagtcccgtaatatatcaagacgctcggacttgaatgccttatctttgagcaaattcaaatgacaataact

SEQ ID NO: 216531 - DNA, 431 bp, Glycine max
tcgacattcaatatcgagcgtggggatagattactggactgaatcacacatccgagtaaagagttattgtcgattgaatttgctcagagcttcggcattcaagtccgagcgtctcgatatattacgggactctatcagacatccgagtaaaaagctattgttgttcgaatttgctcagagctttggtattcaatttcgagcgtctcgatatattacaggactccatcagacacccgagtaaaaatgctattgtcattggaattcgctcagagcttcaacattcattttcgagcgttccgattttttacaagactcattcggatagccgagcataaagttattgccgcttgaatttttctcagagctccggtattaattacgagcgcctcgatatattacgggactcactctgaggtccaggataaattatt

SEQ ID NO: 216532 - DNA, 391 bp, Glycine max
agctttgacttgagtcatgaagagattacatttatgtgaccatggcatgagtttaaaatataatccttcaacatctttataatcatcaatcatctttgaatcatctatctttcaatctttttcaacatcatctctcaaacatctttcaatatctttctacagaattttctgattcatttctcttcatctttctaaaagtttttgatcaacactttctcttccaagaaaagttctttgataaaaaacttgtgctattcatctttttcattctcttctccctttgccaaaagaatgaaggactaaccgcctgaattcttttgtgtctctcttctcccttacaaaagattcaaaggactaaccgcttgagaattcttttgattcatcccttccc

SEQ ID NO: 216533 - DNA, 472 bp, Glycine max
tgtaggaatatggcgtacccatcacatgtggtactatgtggcggtcgggcgatggtgcacaacaagtgtatccacatccacaatgcgcgcataaacccaccatcccctgttgcccacctacaactgagctcacgtactcccacgtagcccatatcctcgattctctcaacaccgggtcctcatcaatcctcccaagcttccacaacatccaagcaaaacaacattcacacagcacaagctatcacagccaagcaaaacagagcaaaggcagaaaactctgccaaaacaccaaccaaaaatcacagcttctcccactcaaagaccccagtaacaattccttcgatccaattccgtaaccgttggatcgactccaaaatattactggaagtctatagtgcataagcctacagtttgaccgttgggatctactagcaaacatccagaacttattgtacattactctttccacaac

SEQ ID NO: 216534 - DNA, 397 bp, Glycine max
agcttccaccctataattcccctaaatttgttttaatttgctttgaaccaaaatttccttttatgaatgatgctctcctacaacctaagacaaggtagaaggagataaattgtacaggctcaaggttcaatcaaacaatcatactttcagctcaaaatgggtgcaagggataaatcaatcatgcacaaggtaatctttttagctaagtggctatcttcaataaaaacatggccttcatcatcttcaatttcacgcattcattccatactcagagattcatgcaaaaaccattacttaaagttagtcgttctctcacaattaaagatcgcactctcaccggctagcagctaatgagtaccttcacaatcaacctgacaaaccaactaacattttcagt

SEQ ID NO: 216535 - DNA, 434 bp, Glycine max
  unsure (1)..(434): unsure at all n locations
tcttggttggttaatatagataagtcgtcaatttcgtattcaaccagactagccttcacctccttcagctggcataaaagttagtcaaattccaccttagctggtaaccattcggctgaatcctcaaaagttgaattttgcatcaaaatttgggtattaccaaatgccccctacaccttttagttgaagacagaaagaaggagctgaaagatgtattgtatcatttgaatcatgttaccaccattatttatactactagtgcctatgattctcagttaacatgattttgttgcatgtgaaaacttagatcttctagaactactangttngtataaagtagacttacaatgttaacatatcactactatatgtccccagcttaaattgatccaatacgcttcaactcattaacacttttagacaacattttcata

SEQ ID NO: 216536 - DNA, 184 bp, Glycine max
accttttaaaacccccccagaaaaaaataaaaaaaagagattttttccccacacactcaataaacaaaacaaacaaacaccacaccaaaataatacaaaatacataaaaaattacaaaaacaaaaatatacacacaacaaaaatcaccacaaattcaaaaattaaacaaaatactaaacaaaat

SEQ ID NO: 216537 - DNA, 412 bp, Glycine max
  unsure (1)..(412): unsure at all n locations
atattanaatccaactagatgcacaattgctgaatgaanatatatcatccaacattacaataaaacatctacgaaccatgagaatgagagtcttgcaatcctttgaatcttctaaatccaatgggtacttgacaatgtgctagctctattaatacaagttaacttgaaaattagttctgaagatagtataagtatggcatttaatcctaaaatttaaaagaaaaataaccctctgttagttcctaagtttgcgaaatgtcattctaattagtcattttgtaggtatattccattgttggttgcaccagataatatccaattagaatattttgcaagccaaactaatgatagattttaaatctcatgatatgagatgccatacacatacaatctcaacgactatatttgaaat

SEQ ID NO: 216538 - DNA, 301 bp, Glycine max
  unsure (1)..(301): unsure at all n locations
gcttgnggagatgctgagagggaggggatgttgttttgggcacaagcctacaagggctgtttttatgaggattcctttggaaacaaaacacaactgctttgctagtttacaagggctatataccgcaggtggatagggtttcttattgtcacatcaatgatagcttttgagtgaagggtgtattactaagattgtgggctttgttgataaatacactaccatatcagtccatttggagcacccatttcctctggtactttaattgaaaaattgtcacaacccgaatattttgtttcgtttt

SEQ ID NO: 216539 - DNA, 424 bp, Glycine max
  unsure (1)..(424): unsure at all n locations
cggagtcgngaagtgcgtgtctactagtgggacttcgaaatttcacgtttgggtggacttctttctctcttaaatttcgagggtgtggtgttttgggagatatgatgggtaatcttgctagttttctgcttcatgataattatttgtgaaggaacttgttgaaagcttgttgaaattgccatgtttggatgagttagacatacccattctgttttagggtttttgtgatgatgtttgagatgtntgtatgctgaaattgcttgcggaaaaactgttacagatgaaaggtacagtacacctatggctggaaagtgagattgtgttgttatgagttggaaaagagtgacgctttgatggttggaagagtaagtctgacttctctgtgtaatggaagttaaagcgagttataccatctcgaatgtct

SEQ ID NO: 216540 - DNA, 474 bp, Glycine max
acctacagacccaattccagtgatcggacatgacttgttgtttccaagtaggatagaaccaccaacttgtttgtcaagatcctcaaactgtgaatgtatgtatacatgattctgatgatatcaaagaagaatctaacaatgctacttcaaatgataagcatttgcttcaagaataattcaagattgcttcaacaaacaaaaccttgtgtcaagattcactaaagaccatgccttgccttaaaacaaagtgctttcaagacatgcaacgctctgataatcgattaccaggaagtgttatcgattaccataagacagggttgagaaatagctattgacaaaggtgttgaatttgaattttcaacatgtaatcgattaccacatgtctgttatcgattaccagcaacggaacttcgtaattctaattcagatgcataacccttcaagtataattggttatctattcacacacattgt

SEQ ID NO: 216541 - DNA, 152 bp, Glycine max
aaaatacagattcaagataaataataaaatcaatattaatagaatcaagaatcagattaagatacaagctaaaacagaacattaaaatcataaaaggtcataaaataaacaaaaaatactataaaaaaatgcaacacatacttacaagaaat

SEQ ID NO: 216542 - DNA, 381 bp, Glycine max
ctcgctttctgcgtgtgctgagaaaaatcagagagacaaaaggtgtagcttagtgagagagagagagctagtaataaaatatagtactaaataatcttaaaaagttgcttctgcatgcgtgtggaataaaacaaagcaagacaaatagaaaactctgatactgttgttaggtgatatttatgcttggcggctcacgttttattccgaccttacggatatactaaatttcatggaaaccataaggttgttctaatcgtggaattattcttggacattaatgtgtatcatgggctcttatattatatctacaaccttctataaatattaaagtgcgtttccgaatctcctttctttacttaaagcaccgttgctttctttctt

SEQ ID NO: 216543 - DNA, 370 bp, Glycine max
tcgtgtacaatggctacacatgatacatggagggtttgttttgagtcaaggataaaagggatgccctacattattctcgtgactcaaatgctgaaacgatgatttggagatcttatgcaaaactgggcctgcatgcacctatgtggatactcaagtgtcaagattttatggtcatgtgtcgctagggctcacgattcactttctttattgtaaaacaacccaatgcttccaaaagatgtttttttatccatttgtgcattcatccaagctcatttcatgccgtcgggaatattatacagtattcaatctccatgtggagacacatctttcaatacttggttatgatcaatgaatcttttattccaagaaa

SEQ ID NO: 216544 - DNA, 331 bp, Glycine max
gcaagctgggcactcgagggacgatgtatgtttttattccgagcccctctcgtcttgttggtgtcctctagggattcccatccactgtatttgtctcgttttttctaaaagaaaacatgggcgaggtttcactcctccctatggatccaaaccttgtgttttacatctgttataacttgagccctctttgctcgggatccaaaaactttccccccctcattcacatgaaaagactcaccaaggcttgctgcttttgctcccttaagcacttcttggctgcatttcgctttcacttttggtgtttctactcactgtaacaagttaatattca

SEQ ID NO: 216545 - DNA, 462 bp, Glycine max
  unsure (1)..(462): unsure at all n locations
ggagcttctatggaagatggagtnttgatctttttgaggnctctcaatggtgattttgcaccatggagatgcaccggaatataaatgagaagaggtgagaggaggcgccatccactacggaataagccgtggaagaaggagcttctccaccaagaatgtgccttgtataagaagcttgtagaggatgcttctatggaggaaaagaaatagagagaaagagagatgggggagcacgaaattgacgcgaggaaatgggtgagagaagttgaacgttgagttgtgtctcacaagactctcattcctctgacgtacaacaagtgttacacatgcttctatttatagactatgtatcttgcttgagaagctttctaagcgaacttccttgagaagcttatttgagaacacttgcttgagaagcttgagctctgctatacacacccctctaataactatgctcacctc

SEQ ID NO: 216546 - DNA, 329 bp, Glycine max
ttttagtgggacatccgagaaggctgaggtttacatataatattaaacgtttgtattgcgagaaacatataatcaaacatattgtcgtcagagaatcaaagaagacaaacttgtttgaaataaaaataaacgctttgtgtagattagtgtcttcttccaccttctttgcctacaatagcataggcattgtgagaactctgaaaatccaataaaaaaatgtaaactttttgcttgcacgaactgtatatcctaaattaaggaagaacacccataatactagagcttattttcgagaaaatcataaagcccccaaaaatggtatattaaag

SEQ ID NO: 216547 - DNA, 393 bp, Glycine max
  unsure (1)..(393): unsure at all n locations
attccagacatctcaaacaaacanatgaaatgtaacatgacaatcatagctggtgcttgaatacctcacccactcaagtgattcacacaattatggtctttctctaatgaaaacactcttgtcttttaccactctaatgccccttgaattcttaagcaatccaagagattatggtcacatcaaagaacaattcaccaatatgtgtaatgcaaggctagagagacacggataatgttaaccaataaaaacgctaacaatgtttatatgcacaattgacggaaataaaatccagaatttaagaattcaagaaacaatcctctatacaaccaatatattaccttaaaaatatatttcttacacgatctcttgcatgaaccattctaccccattatt

SEQ ID NO: 216548 - DNA, 326 bp, Glycine max
gacaaagagaaatattgtcaatatttaaacaaacttttacaaataattgactcccagatttctaaagatgtagaaaaaagtcttaaaaaaaaacaaaaaacattgtttagattttttaacgtgtacattattttatatatcattggtttaaaaaattttatacttgtattattagggtcatttttttgtataaaataggtaaaaaattctactcatgtaaaacacaaacttttgtaagttttgttatttgaaataaaaaaaatttatggtgtctcatatcttattaaatgtctgcctcttgatattgtacttctaaaaataaatca

SEQ ID NO: 216549 - DNA, 257 bp, Glycine max
gtggtaacctctactagtgtataacccgcatgatcgtgaggcacgaccagctccactcgcttggactactgttgtctacgctaattctggcaagtcgtctaatgcggacatgcttctgatcctcacgcaacatagacgtgccaagtgtatgacgtcctcatatatgacaattcaaccctttattgatcattacttgatgcattgaacaccaacgtgtccttatgactatatctacatgcgagtgcataacacatata

SEQ ID NO: 216550 - DNA, 367 bp, Glycine max
  unsure (1)..(367): unsure at all n locations
aagctnnnacaaaaaagaggggcacggtctaatgttatggtngaagcaacaatgccatattgtggacatagagatcttggctcgagtctttctaacttagaaggcttcaacttagcttcatgatgttccttgatgacctcttaaagtgccaaataatacctttgaactgcagcccactcatctgataaacttttggaggagagaggcataaatgacagctgtcatgttattcttaggctcccattctaaggaacctttatgatgatcattcgtaataacatatcacaatgatgatcttgatgntagctgagaaagtgatcatacttgaagtagacactttggaggaagtttcaaccgtttgtctttc

SEQ ID NO: 216551 - DNA, 438 bp, Glycine max
  unsure (1)..(438): unsure at all n locations
ggaccttaaatatcacttggaaacaactcgtctgaaatatacattatatatcgtaccggaagtaaactttgtaaaattgtaaaatttggcactcaatgttgaaacttaaaactatcttgatcggaccctctgattcttgatcttgactttgagccttgtccttgattattctagactcttgaaaacttgaatctcgaaacttctctagaatctttctcttgatccttgaattgtacttgactcaatcatgaaatcattctcatgggcttgtcgcatcaactttgctatcatcaaagatccttgaatcaatcgtgattcatcatcatgaaacaaacttgattctcatcatgaatcaatgaagcttgcttctacactccctacactatggagccatcaatacaagccccanaataatgagaccctcatctaatatgtaca

SEQ ID NO: 216552 - DNA, 405 bp, Glycine max
  unsure (1)..(405): unsure at all n locations
gcatgcaagcttagncactgtactgtgacataaaatttgttttttataattctgaaaaggcaccacagatgcagtgtcattttatataatccgaaaaatgagaagcctctcttcttaagacttaggagggaactttttgtcattttcttggtttccccctcttctaaaaaatattgaaaaaagaaaacacccaaaaattgaaacaaccactgcttcagaatcatgaaacatgcgattcaactatgatcctaatacacacgaaatcatacacttcattttaatcaggtagtttgtcaatgtagaataatttcaaagatcagcatcctattttactcgataaataaataatgagttgataactacctttntaaattgcctcatttgctcttaagaaagatctaattc

SEQ ID NO: 216553 - DNA, 342 bp, Glycine max
  unsure (1)..(342): unsure at all n locations
tggccgagagcatttgtgtttaacgcatttcagcctttgctaccgtgtgactcatganaaacgacatttgattcctcctacattcctccaaaggctctttaaggttacaagatcattcgatcatcacccacatacaccattagcgaccacaaaccgatgggagctctccattgattacacacaccgagaggaacctttcatgcgaatcggaatcttccaacatggcttgccgtgccaggagacaatgaaaaccctcatacgaccttacattctctccctaggtaaccatgggactatagtcggtgcttgtgcatgtcatcatgcctatggatatttattgac

SEQ ID NO: 216554 - DNA, 392 bp, Glycine max
agcttctattgaccgccactcatgacacatgtcttcaggcttccctcctttgggagttattgttgcaatggcatgtcgacatggcatccctacatcaaagttgtaaaatcagcacacatgtaggttaggaatgaaaaaaaaaactacaaagaacacaacctgttagtttccatactccacaagtgcatgtccattcaacaaaattgacctcaaccttattcccccacatgtggacctcatatctcaggcccatgttatcaccacaccaaatgggagtccattgattagcaaaatgaatttcttttttctagtcttttatattggacataatggtccaggctttccagaaagtttaactcttgcggcagccatggttctcatgatataacttc

SEQ ID NO: 216555 - DNA, 454 bp, Glycine max
  unsure (1)..(454): unsure at all n locations
ctattcttttataagatgagaagtgctagactcattactgtttctanaaaccttcgggtggatccaagtgctccgatcatccatttgcatactcatgttttggtggcatactcaccgttgtttatttctttaggaatttcatcataactaagaaaacacctaggcacccctataacactcggtccatataaatggattatgaagagggcatacaggaacagatgaaggccgatctatcggccttaaaagatcaaatggcttccatctcggaggtcatgttacaactccacacaaccatagaggacaaagccacggcaaccgtcttcagtacagataaggaagcggagccggtgctgcaacccctttaaatccgggccagacaaaacacagccggttgggcaaagatatacgcaactaatcttagggttgctcggacttactcccgtgccatctg

SEQ ID NO: 216556 - DNA, 398 bp, Glycine max
  unsure (1)..(398): unsure at all n locations
tgcaagctngntatgtatcagaaggctaatggctatttagcaggagttgttgattgaagaggataaaaatactccaccggctagatatgttaaagcttgtcttggtcatcttttcaaacataagtttcaagctctaaagcacaagagaaagctcattaatctggagtggtacaccatgaaaaaggttttatagattgaaggaatgttgctctgttctagaacctgatgaaaagccacatgcaggtgtaattcaccatgaaatagatcgatgctatcagaccttggactacacttgcttcactcaagaaattgcttttaacatgatttgtgcatggaaaagggggttctatgctatgtcttatccgacctttttgtttgtggcgttcctacccttctcc

SEQ ID NO: 216557 - DNA, 454 bp, Glycine max
  unsure (1)..(454): unsure at all n locations
gtgtctctactgtttcataattgggaagccatgcgtcctatagcttgtctgataattctctgtggcatctccatcggggccacataagtgaaaaaggtttgaataaggtctgaatattctaaccaagcaaggcttacctggaaatcacaatgtggaacctcttcagttttgtgagcactatgtctttaggaaacaacatcagacaaagtttccaaaggttatgcacataacaaagaccatgttggactatgttcattttgaccactgggggccttcaagagttcaatcgttgggaggggcaaggtattttctctccatcactgatgattactctangatgacatgggtattcatgaagaagacaaaatctaaagctctcaattttctcaagccattgaagattcttatgaagaatgagacaagaaagacaatagagtatcttatgattgacaat

SEQ ID NO: 216558 - DNA, 368 bp, Glycine max
agcttatctgaaagggcatatatcagtaaagttcttcatagatttatgatgggaaagtgttgaacatcacccattctaatgcataaaggagacaaaagttagccttgcacgatgtcctataagatctggagcgacaacgaatggaagtaagtgcgtatgcattagttgatgatgcatctaccatagcacctgaatttgtagcatgttgtgaggctacaattcaggctaattggctgcacaactttatatcagggcttgcaattgacgaccgcattgctaagccactaaggatgtattgtgataactccgtgactgtatattttctaataacgataaatactgtgatggcgctaatcatatgaaatcga

SEQ ID NO: 216559 - DNA, 119 bp, Glycine max
  unsure (1)..(119): unsure at all n locations
acatactccctacttgatgcaatgcataaagcaccactccttctgctatttnttctgcgtacacttgcgcagaatcctccactagcttatgttcatatgccacacactggttcaactct

SEQ ID NO: 216560 - DNA, 418 bp, Glycine max
agcttcgaagggaagagaaagaccaatcacgagtatatagcatggtcttgaaagaggagttagctgcttgctcaaggtccaaaagaaacttgtctcagcgtttatgcgagacagagaccaacatgttagccatcatcaacaagtaccaagaagactaaatctagccacagcccacgagcataaagtggcagacgagtatgcccaatgtggatggaccgatttgctcttacctagaacgggagtcaagaaattccccgattgctagccaaggtcacagcaatgtggatggactgatttgctcttaactattgtcagcatatgatagacttaatggcccatataattagaaaccgctaggaagttggattgtcactcagatcttaactagctataactttctaaataaaatgagtttatc

SEQ ID NO: 216561 - DNA, 333 bp, Glycine max
  unsure (1)..(333): unsure at all n locations
tcggaagatagtgatgaagtacaagccctaaaggcagagtcttgattatctcgggtagncgaagagaagttcaagtccatagccatcaaagtctgaaaagagtatgatgaactaagggacgtcaatatggccacaactgaagccttggaacgagaaaccaagaatgccctaaaggaagaacacgaccaaagtcaaagtttgaggggctttatatggcagcaatagtgagctcaagctcggaagaagtgaaaggaatcatcacgggtcaaaggcatgatcttgaaagacgagcttaaggcttgccttatgtcgaaaagaaatttgcccaacagt

SEQ ID NO: 216562 - DNA, 422 bp, Glycine max
agctttggtaacttgtagagaccagagagcacctctcttcttttttttatttccgactaacttgaactcttcgagagaaggcaatgctccatcttcaataacaatggatttcaaaataaaaaggcttcccagtagtatttgctttaggttctgaaaccccctgtttgggaactgcaaaactttaccctcgtatgcactacgattaataaagagggacgacaaatatggtatgtccttaagtagaggcaatggatcaacagtcaaataggtgcgtctcaaggacaacgtaacaagattttggagcttggcaacccagattgggaactccttcaacccccctacaatgcgaaccttctgaagcacaggtgcacatacatcaaattgcaaatcaatgcgcataaataatgcccatggagtagtaa

SEQ ID NO: 216563 - DNA, 427 bp, Glycine max
  unsure (1)..(427): unsure at all n locations
actcaagcttatgagaccaanacatgataaagaacgtttctacaatcttattctcatgctaatctagtaaatcttgtccaaaacacaaatgaattatacataaatgcttctcacaacatggggagtaaaatccctcaaacaatttcacataatcatatcaaaatcaaaggaatcaaaaacacgaaaacactcaattttatcaactaattcgcatcaggacatcaattgacccatcaaacataacaatcttatgattataaacgtataggtagaattaaaatacaataaatatcccaaaataaactccaatttgatactctaaagatccctgcacatgttaattctgaccctaatttaataaactcatcctctacctctaagcggcttatgtgtgttttcgacaaagaagcaacatctcatccggtct

SEQ ID NO: 216564 - DNA, 423 bp, Glycine max
  unsure (1)..(423): unsure at all n locations
agcttgctcaaactggcctcgtctatgctgaattgtggcagttgtttaatacaaagatctttgaacatctcctttactacattnttgcaacacctacccctttctctctctctctttcactcatcctaggtttgattttttcttctctcaattcccaacctcgcatctcccattattttattctcaaaccacgacaacaaaagcacaaacttggtttctcaatttcttcctctcgatcctacccgagttaaattaaaaacaagaggagagaaaacaaaacagaacacaatataggtttggtcttttgaagtgggagtgaggaatcagacatctgggttggctgcttgctaggttcggataatgttagaatgtgggatctcaacgactcacccgatcagaggattaacaaggacgaggaatccg

SEQ ID NO: 216565 - DNA, 370 bp, Glycine max
  unsure (1)..(370): unsure at all n locations
actaagcttagtcgatttgggaatcgataataatgtgggaagagatttcattctgactaggactgaggacaaataggtactagtgagtcacaactcctgctcactcttattatnactcaaaacctctctttatatttatttgtgtgttgtcttataaaaaccaaaatcatagacatatttaaagcctctgtttaatcatccttactgatagcttaataaacttgactaattgggaatataacttggcctttaggatcgatattcggacgttctagtctactattactattgcgtaggagacacttgcccttgtcaagcctaacatatttatgatcacatagccttgatctttgtaagcaatcccaaacat

SEQ ID NO: 216566 - DNA, 411 bp, Glycine max
  unsure (1)..(411): unsure at all n locations
agcttacggatggaacacttacttgttggtgatgttcaaatattcttatctgaatcaaaaaatgcgaaaaatgatgaccctatggctgcaaactcttcaatcccgtgggtatggcttttgaaaggggggaaaagaagtttttctgaatgcaaaaacgtcccccctttcgtcattcttataatttggtgcaggggtggctcgcccaggcgagctaacctgcacttttttnttttttttgacgggaacattaaccatgtccccttctttctcatggattaacgtcttgcctaacttgaacttacttaagttagaattaggtgttgattacttatttttattctttaaacacacacatattacaagaaaactacgaatacataggataccgggctgccttgcaacgacatgctc

SEQ ID NO: 216567 - DNA, 353 bp, Glycine max
  unsure (1)..(353): unsure at all n locations
ntcgctatgatggcagcttcattgggtgctctagtagatgttagtttatntttatgcttctatatgcatagtagtagcaatgtcctttatctctttcgctgtgtgcggctctttgcatactaatttagtagttttctcataaaatttacttgttcaacagtcaactggtgctttcattgctgtgtctaggtatgcaagtgcaacacctattccaccttcagttcttaaccgtggtgttggttggcatgtaaacagatactaacaattagtaatctttttcctacctatctttattgatctattgatcatgcattgttggtttcttggttggtttaaattatcatttttctaac

SEQ ID NO: 216568 - DNA, 353 bp, Glycine max
cccgcttccttcacaggtctccgatgtgggagtcttcaatgattccgaggatcaactgatcaacggccaaatgcgtgtcgccacgtgattattgcgccgcctgtgctctcctgatggccctcacgaggttggtgctcgccggcacctcatccggcggaggggactggcagggtatcttcttcagagcctggttcaacactcgctccacggcgcgtgccgattccttcccgccgcccgcgctgtttattgctagcacgaaaatgccgttgggatcggaaatcagcgcgtgggccaagtggatgggagtcaattgcgcgtggcctgaactcatcgcgagctcgtgggccgactca

SEQ ID NO: 216569 - DNA, 234 bp, Glycine max
tacagcgacaaaacatgaaatctgggtaattgaagatagctaagaagtttcctcgtgttataccaatatttatgtatcgattcatgggggcccctacctgtcataatgtctcgattaactgcaagagactacttgaagtcttaaccatccggatagataaacaatacttgttaaattacacttattcaagccaatttaacggaacttgcagtttatgatatctttgggtatctt

SEQ ID NO: 216570 - DNA, 408 bp, Glycine max
  unsure (1)..(408): unsure at all n locations
agctntgtccgcanaaatcacttgaaactgttttaaggtccaacgccttaaacgatcctctttgcttttatcagttaacatggatcgttcaaaagcataaaatcaacacgtaactttactgcttttgcaagaactacgtaggtctgatttcctcattgcaattgaagatacgtatgagcaaaagcccctcttttgtcgaccaccccaagagattgttaatggttcaacgccttaacgtttatctcctttataaaaccaagagatcgttaatggtccaacgccttaatgtttctctcctttcaaaaaccaagagatcgttaatgggccaatgccttaacgtttctctcctttcaaaaaccaagagatcgttaatggtccaacgccttaacgtttctctcctttccaaaa

SEQ ID NO: 216571 - DNA, 277 bp, Glycine max
  unsure (1)..(277): unsure at all n locations
gatccctccacaaaagaactgtttattgcttccatagtgccaaggaaagtaaagacaagggcaactaggatcgacactactattcttgagaaagattggaagcaaccatctctntctcacgaaactggtagtgttgatatcttagatgctcacatctcttctcagaggtcatccacctgcaccacctcaatagagtccaactccgtttcccanaaatgtaacattatgttttttgtaatgcttgattaaagtggtttaattagattgcaagattaat

SEQ ID NO: 216572 - DNA, 417 bp, Glycine max
  unsure (1)..(417): unsure at all n locations
agctttcagntcagatcagaagtggctcctaattttgtttgtaaactgcagctaaactctccaaaagtcatccataagaatcacaagagcctcaatattcatattcaaatatcaaaccttgcctatcacttcataaaaagataaatccatcactcgaaagtttttttgcttccaatagtcctttaagctttccaatcaccaaagttatatttgatgggtcaaagattaatattgtaaattcaacaaagcatcctcaaatacaagtccctgatctcatcatacctaagttgttaaagaaaatctagcccattctatataaatctcattaataccttactccaggacctgaaagacaacctaccctacaatcattaaacaatttagtctataccacctatgcccaaatagatatagata

SEQ ID NO: 216573 - DNA, 417 bp, Glycine max
  unsure (1)..(417): unsure at all n locations
ncaagcttggaaaagctggatcaccttctcgcttattcaatctgctggcttagcgagcatccgctaagcgcaacactcctgggttaagcgcgaggaagaatccagaagaagatgagctgtaccggttcgctaagcgtgccacttcatctctctaagcgcaccgcttcagttcattcactaagcgagaaaggcgcgctaagccaaaaatcactaacgtgcgctaagcggtccatatgtgcgctaagcgcacgagcacgaacaaggccacctatttaagcctaanatcagattttgtgaagggagtttggactgggattcaaagctttgcatgtctagggtttctagagagagaaaggttcaagttccagagagttttgagagactttgctgcgtgaagatttgcagagaccacagctc

SEQ ID NO: 216574 - DNA, 412 bp, Glycine max
  unsure (1)..(412): unsure at all n locations
agcttttccaaagtggncttcggcattacatttattctcgatccattggcgataagtacctttgcgacaacgtggtccatacatctcaccgacacatgtagagccttgttgtgtcctctcccctcaacgggaatctcttcttccgcaaacgcgatataattgttggtggttatatgattaacgatgccttcgaaaccctccactgagatatcacgtgctacatgggcatcgttaaggaccttcatcaacagcgcacgatgaggctcggagtttatgagtagttcaagcaaagagatccttgctggagttttattcagttgctcgactaccttaaactcgctttgttggatgaggaggaggaactcatgggcctcttccaaagtcactgtgtttccttgaagtacttctttct

SEQ ID NO: 216575 - DNA, 431 bp, Glycine max
  unsure (1)..(431): unsure at all n locations
ttagatntctgcttcatcatgaatacccatgttatcttttataatcatcgacgatggagaggaggtaccttgccccttctaatgtgatgtggtaaaacatgatcgtgagatatgtaggtgatcatatacatatgtaaagcatttataaactccctttgagttcaacagctnttaaagcatgaaaaataagaaagaaaattgctataatggaataaataatgcaataataatgcttccaaccacattcttcatttatcaagttacgcttacaatcaaaaaaaatttctaccccttttttcataaacaaatagaccatgggttcaaagaaagaaatagtgattaaccatcatagccaatcttgtattgaggtggtggtggacgctgcgtacgtagtggtgaacatagagtagtggtgtttgacaatgaatggt

SEQ ID NO: 216576 - DNA, 392 bp, Glycine max
agctgtaaaactcttttttatgagaatattgtttttaaggatttcaggaaactttgggataagactgattttgatctttcttgggataaatgatattacactgaatacattttttttatccataaaaattaaatacaatatcaaaaaatttacaatattcacatatcttatctaaccaactaagttagactctcttagtatacaataaatacatgatttccttataagatattatctattgtaaataattttactccattttctttccttgctaatttgtcgttgttctagcaccaccacattatgttagccaaacacgtcagtctttctttcctcatagatgcaacaactctttaggtaaaaattagactcgactgattctcttcattttt

SEQ ID NO: 216577 - DNA, 385 bp, Glycine max
  unsure (1)..(385): unsure at all n locations
agctatccctaaaaggctctccttgttctaccatattcctaactcaatcactnttaaagtcctcctgactaagtacaaagtgacttgtagcagtttggtgagtaattaagcactcatctctatatgtcaaattttggtatcatatagttatctaatatgaatttcttttgcatttcaggatgtgtcgagtaccatgtactcatttatgaaagctgcaagattcacccatttaagcatagaagggacgaagtgtagaatagtttataatcatcataggaagaccacaaatattggaaatggatggagaacttttgcacaaacacataatttgctttctggaactcaaattatatttgagttcccatatgcaacttctaactttatt

SEQ ID NO: 216578 - DNA, 415 bp, Glycine max
agcttcacatagcctattcatagcttcttggattattatcatcatgattaacctcatttgacgtgtcatctaggaccatcaagtttaatctatcaggtgcatggtgcacttgagtagattttctagaacgttcatgcattgggttcataggttgctaaattgactctaagattggtctattaacttgatcttgaactataattggctcttgaaccatacttgttcgaggtgatgatctttgtggtaacttgagaacattaaagaagggtatctcagtttccatcttatagtcttgagttgtttcattggctaattgagtttcatcaagctcaatctttttaccatgatttcctctagcaagaaatttcctttctaaaaatatagatcatcttgtcacaaacattttatggtcaaa

SEQ ID NO: 216579 - DNA, 470 bp, Glycine max
  unsure (1)..(470): unsure at all n locations
tccatanagtggacatcaaagcacaagagcttcaagtatgttctccttaaacctccattaattntagctttaccttctcttacatagattgttcttcatttttttctccatgcatctcctcacatgtcttgtgataaatgtttttaacatgattctttatagtttccaccgattaaacttgctatagaagctagatttgattttctatggttcaaatttcttgttcttgaaccatgaattgtgttgagtttacgctcctttgagttttgtcttgatatttttagtggctgaaacctaaaccataaaattcttacaataatattaaagttgaagacaacctctaacatctagagcgacttgtcacctattgtagttttgcatagaagcatgtctggcactaaacctgcacataagattcttatgtgtgcgaacttattttcttgttctttgctactaacttctcatgatga

SEQ ID NO: 216580 - DNA, 418 bp, Glycine max
agcttgtagaatggctagacataatacatggcggggtttggtttggttcaaggataaaagggatgccccacattatttccatgacacaaatgcaaaaatgatgatttggaaattttatgaaaaactggtcatgcatgcacctatgcggacactcaagcgtcaaatttttatggtcatgtgatgcgaagtctcaggattcatttcctctattttaaatcaacccaatgtttccaaaatatgttcttttatccatttgtgcattcatccgagtccatttcgggcgtccggggaaattttcacagcattcacccttcaggtgtgtacacattttttttttcaaaaattggttatgatcaatgaattttttcaaagaaaatttggaagtcatctcttttcaaaagcatgtcggttttttcag

SEQ ID NO: 216581 - DNA, 421 bp, Glycine max
  unsure (1)..(421): unsure at all n locations
agctntgagcaaattcaaacgacaatantatttttctccgatgtccgattgagtcccataatatatcgagacgctcgaaatttaaaaaagaagctctaagcaaattctaacgataataacattttactcagctgtccgattgagtcctgtaaaatatcgagacgctcaaaattgaaaatagaagctccgagaaaattcaaacgacattaacttcttactcggatgtcttattgagtcccgtaatatatcgagacgctcgaaatttaatacagaagctcggagcatattcaaacgacaataactttttactcggatgtccgattgagtcccgtaacatatctagacactccaaattgagaacagaagctccgagaaaattcacacgacaataactttttactcggatgtcttattgagtccc

SEQ ID NO: 216582 - DNA, 446 bp, Glycine max
  unsure (1)..(446): unsure at all n locations
tctagaaggagatcaacttgatgttctatgcttcttgaatgttgcagtccatgaggaatctccttgcgaaagacatctttaaattcctgcaataagggttgaacactaggagaaacataaatagttaactgattagaattatcactctctctctcttgtgtatcactcttttcctcgggtgtatcactcttctttttcatattcctttgtggtgcctcactattttctttctcttgttctctcttttctctcattctgatttggtcatcacacactcttctatgggatagaggtttaagaagtaacgaggaagatttggctattcgtctgtanggctcttctttgttaccgtttaacaaacgttgcatttgtgtagaccacgctgtcacaaataagcgctgagatcctccaattgatgatttcaccaccattgtcaccagctcttg

SEQ ID NO: 216583 - DNA, 422 bp, Glycine max
  unsure (1)..(422): unsure at all n locations
agctttctcataagtcctaaatgacatcgcaaactangtttatctcactttaacctccatttaccacagaattcagacttaaccttcctactctcaaagcctcactctttttccactcataacatcacattctcactttccaaccctaagttaactctacatttcatctataacaggtttccatgagcagtttttcagcatacaacatctcaaacatcatcacaaaaccctaaaacagaatgggtatgtttaactcatccaaacatggcaatttcaacaagctttcaacaaatgccttcacaaataatcatcacacagcagaaaactaacaaaaccacccatcatatctcccaaaaccccatacccacgaaatttaagacagaaagaagtccacccaaacctgaattttcgaagtcccactc

SEQ ID NO: 216584 - DNA, 450 bp, Glycine max
  unsure (1)..(450): unsure at all n locations
atactaagcttctgcatgtgtangaagttntagagagagagaggtccatgtgtctttgagttatgagagaaattgcttagctaagatcaacagacacgagagcttgacgcgaaagccgtccttagagcttgtgactagtttgtgactgattgagagatccttgaggtgaatgagacattcctaaccactcgtatttttgcaatcttccatcttgatctcctctgtgtagaaaggaggtgtctagactatggaaagcttaatcctctgttggatctactctggatgtacctgatgaaaaatatctttatatgtgcaatgatgtgtagtggttctctgtgctatccgctttgattctatatgcctttccgtgatccataatgtagctttgttgggtattcaaattggaactggttgatcaaagccttgatgacggtctaatgtgactttaca

SEQ ID NO: 216585 - DNA, 223 bp, Glycine max
aacaaattagccatatagtctctctgattaaaacgtttcatacacgtctcaatactctggatatagattttgcctgactttatctataccgtgcctctacaacgaattggaacatgtcccatacacatgctaggtgctcgccatactctttatccacataatgatgcgcttgcgatcggtgaatcatcgccacaactcgatgagatatgccaaatgatattta

SEQ ID NO: 216586 - DNA, 295 bp, Glycine max
gacctcagatcatctgagcagcaacacgcgaggacgacacaattctacttttttttttcaccagcgaactcccgatattctgactacaatccatcggctatttaaacactagaacttagtgccaggaatctattgtatcatgcttacattgcaatataaactaagttcgcattaaaagataggttctggtgtggggatacaaattatctccacaatagtgtcatctagaaacccctaatccacttgattttcttctgaccaatgcatgacaatgaatcatagaaacgctccccaa

SEQ ID NO: 216587 - DNA, 417 bp, Glycine max
agcttataagaacaaaattgccttaatcatttctttatatgcatgtgaattaagacgcatcaacaagaatcaagccaaggctattgtgcaagcaatcaatggggcaaaacacaccaaatgattataatgatggatggctcaaattctcacaaaggtaaaatcatcactttcaaattgagctttcaaaactatcatgacatgtagagaagaatcaaggatttcaagtcacaaaatgtcaagaacttttattttcaaaacaattacccatttcttgaacatatcctataattcaaagaaaaacatgcaaagtcatacgtgcacatgaaattgacccaaaatattaaactgaaaatccgacgaaactaacaacattaacaaattaacacaactaacaaattaacaaaaccaacaaaacta

SEQ ID NO: 216588 - DNA, 408 bp, Glycine max
agcttaagctaaagtcagagaacccacttgatgcattatgagaaggaaccatccagaaaattagatcataggtgatctagcaaattgtgttcaaactagatcgtcattgaaaacccaaggacacgctacaataatctctgagatagatcccaaacacattgacaaggccatgcaagatgacaattgggtgaaagagaagcaagaagagctcgactagtttcaaaagaatggtgtctggaaactagacgaactaccaaaaggaaagaaggcagtcagagtagatggtaaggttatgagaaataagacaaggttagttgctaaaggttactcataatagaaaggtattgactacatagaaacctttgcacctgtttcatgtttagaagcaatacacatcttactttcgtt

SEQ ID NO: 216589 - DNA, 325 bp, Glycine max
  unsure (1)..(325): unsure at all n locations
gatagctcactgatgaggcgcgaagagcttcacttcatctctntccttgattttaattcttgaataatgtgttcaacagacagttggcaagcactcttgggctggacatacttagcttcacattgtgataaagccactatggattgctacttagaactccatgatattggtgttgcaccatacatgaatatgtaccctatattactctttctgtcatctctgtctcctcctcaatccgcatcagtatatgccactaattactctgagtcgtgggcgccttttttcggaaatagaaatccaggatcgatggtcccttttatgaacc

SEQ ID NO: 216590 - DNA, 409 bp, Glycine max
  unsure (1)..(409): unsure at all n locations
agctttataagtgcgggtctgggagactaaggtctagtgttcgcgatatgtgaaagtgatgttccgagtacttcggatttggtccgaccatgccctcctgatttccagctgggaaattggcaagtggaggaacgccccggcgtttacgcaacaagcataatgtaaacctttacggttttaaaagctctatagttgggcctaggctttagagttttctttttgttaaggctttgtgtcttttgttnttgaatttataatacaaggatctttcttcatctgttcctggtctctacccattctcattcatttgcatgtttacttctttttctgaaacggcagattcgatgacgagtcccccgaaggtactaatacctgtgacccgtctatcaacttcgagcaagaaatgaac

SEQ ID NO: 216591 - DNA, 401 bp, Glycine max
taactaacagtgattatatctacttcgacgacgacaacaacaacgtcgagcacaataatgatgatagtaattataatattgatgataataactttattttatcaaatcttatcttattcagataatattctatctagattttattgtatcccaattatattccatctagattttatttcgtctcgatattatgtcattcaatcttatctgatcttggccagattttattttatttcgtgtatgatcttggactttaaatagattagtgagctttgggactgatgacctatataacaacaccaagggtttagattagggagtcttctttccgagaggagaataatctaggatttagaattcagttttatactggcattgccactttacatagataaaatcat

SEQ ID NO: 216592 - DNA, 418 bp, Glycine max
  unsure (1)..(418): unsure at all n locations
caagcttattaaaatcatataatttattttcttgaatttcttgctgntggtgaatcatctatctttatacaaacaaggtcctaacattataaggaaatgtcaaaaatgtccctactttgctgaggtgtcgaaatattaagccatgtagttcccgcccaaaaacgtcaacatcacgctatgtagtttctttttattttgtcttcgggtttttattgcacttttgtttacaatgcgcttctatttccaatgcgcttctatgacagagaggatgtgggctcagaccataatttgcaagagatagaacacacaatgcaagtgttttgaagctaaaccaagtcaccagtaaccctaactgcacctcccttntgtttgaatgagaaagaagatgaaatggaagtggttggatggtgaataaagt

SEQ ID NO: 216593 - DNA, 393 bp, Glycine max
  unsure (1)..(393): unsure at all n locations
ctctctgatacccatgtgattcacacacgtaagtgcatgtngccattttctgtggttatattattccacatcaatgttcatccttgttagcttccttggtttgctttagcaatgaaaaaattaaatagtgtntatatctatttttatttgcgtgaattagaagggataataatagaagtatacttgttattcgagttctagtaagtccctatgacttaaactcaatatgtttaaatcttaaatttaaaataaaatattaaagacatatatacttttggagtattttttgcttttgttttcctttatttcataatattattaaccataattgtatactgcgaattagctgggctccatttgtgtgttgttcactttngcccataaatacatgga

SEQ ID NO: 216594 - DNA, 416 bp, Glycine max
  unsure (1)..(416): unsure at all n locations
agcttcaacggaggaagagaatgagagagagatatagtgacatggaaattgaaggagaatagggataaaagttgaactttgaagtgtgtctcacaagtttcttattcatcaaagttatgacaagggttacacatttttctatgtatagcctaggtcattgttgtgaatttcatttttatttcatgcgaatctaaaaggaatattccaagaatataccaaaaacatcttatcatattccctttaaataccacaagcatggaaggtgtgactctagcacatgaaaaacttccttgggaagtaagaaaggttccttgagaagctagagggggggggacatgatgtaagctccattggagcttgtangcctaggatcttcttcatcaatggattcctttgctccttggaagatgaatggc

SEQ ID NO: 216595 - DNA, 434 bp, Glycine max
attctatgcacccatggtggtccacattgtgtttcgttcttttttattctcgccttggttactatttatacccgctgttgacgtgcttaagccattgtacttaagtcatttctcgcttaacttaaaaataaaatcaatttccaccgaacgtttgaattgtattatcagttaacttcggttaaaatgaattccgaccgttcggtcgggccgtaaccacgttggaaatcaaaaagaggtaaaaaataatataataatcaaaaaacatcttttagtaaaataaagcggaaaatcaatcagacgtttttctctttgggattgctcattcgtaatcgaatcgattaataactaaagtgaaactaacgctaaaatcaactcgcctagtcaagctcgtccacacaaataggcctttgaagatgtgcatttctatttctcac

SEQ ID NO: 216596 - DNA, 429 bp, Glycine max
agcttgatagaggcttcaagcattactttgctttctagaagagattctgttaacttcagcttcccctcaacccttgacaattcttcagtaagctacagtgaaaggaaaaaaacaacaacataaaataaagttacatttcaagttgacgcaaagtcatgaaagtatacattaagaaacagcagtaacatgaataagtgaaattatggcatagggacaagttttcaagtaaaccatgcacaagaaacaattgaaatcattataacaccaccaataaggttaaaatatgaaacaaaaaagtagccccaccccctacatcagccaaaacataattacctgcataaatatatgacacggaaaaactgacatacataatgactctagagcaaaaaaaatatatacaataaacaccaaaagcaaagtcgaaacaat

SEQ ID NO: 216597 - DNA, 363 bp, Glycine max
tgtaccctattatctgcaggaccatcaaagatatttttatccctccgtataattagcttggcataaacataatcaacttcattatgtaccatgctaattaacctctattgatcactgatcagagtagacaatgacgaatctgacaagccaagcaaaattaacaattaatccatgacatgatcaaatcatttgttgcttttcttggccttcccaacacgtaaaaaagaacccaacccgaagagactagtaccactttctttagaaatgcaaggagttggttgggtcataacatgactaatccaaagaccattggcataagatcctccataactcttacttgaatgagacctttgtatatgatac

SEQ ID NO: 216598 - DNA, 399 bp, Glycine max
  unsure (1)..(399): unsure at all n locations
agcttcgnaaactntataacaacagtgctcgtttgtgaaaggtttctatcaatactcacaatagatgcataagacttcttctcttgagctgaagaagccaattctgtggcctgagaatcatcattaccatttgactgaaaatgtggttctacattgtcgacattctcaatagggatgtgtctctcatgatgattagatggctcataaacattctcagcaacagtttgacctttgttcacatgagaatttggggggtctggtgcacaataattagcataatgactgggttctgtaaagaaggagaacaacatgaatccaactcctgaataaatcttgaaagagaagataaaaaaattttgaattacaatcttgcctggttctggtgttactgttacagca

SEQ ID NO: 216599 - DNA, 417 bp, Glycine max
ttttatttattactctgcttgtattgacatttgaaaaaataatataattgtttatacgtgtagaatgatatatggttcttgtattttactaatcatgagttattgtgattgacagtaaaagattacttgtattatatgcatattgcggttactaatcatgaggtattatgtagaggtttgtattatatggatgcaagaaatgcatgtcgttcttccattagaagaagtgatactgaaatgcaacatctaataaagcttcttgaacgggatcaatatatttattggcattgattaaatgataaagacgtggttcgtgatatcttctggtgtcccctgatacactgaagtagtcacatgcatgcaattcgtattttttattacagtatctacaaaccaacaagtcaaactcccctactt

SEQ ID NO: 216600 - DNA, 411 bp, Glycine max
agcttggctattgcgtggaggatggcaggacatccaggaattcacctatcagtggttcgaattattttgtttgatgaagcaacagaagtagatacttcaattgaagctgaagcacaaggaatattatctactgtagtggatagtgagaagcagaaagagttagatgacgagtatataagttcatttagacttacggcagtgaacaatgatgattctataaccttctcagagattgatgcccatgctgatgaagatatccccgcaatccttaatgagctagaaaaaaatggttgtgatttatacatagttggacaagggaattgtaggaattctcgggtcttctcaaatttgttaaaatggtgtgattgtccagaactaggagttataggggatattctggcatcaaatgat

SEQ ID NO: 216601 - DNA, 474 bp, Glycine max
  unsure (1)..(474): unsure at all n locations
aagccaacagtgcattgaactgtttataatttgggcgataaggcattaaacattttttgttaaggtttttttcctaggttggtatttcttggttaaggtttaaatgaaaccaactgcaacaggtttgatcttgaaacaagctgcaacttactattaggcttatcagaataaatacattacctaactcatcaaatttaacattactacggtaacgggttatataaaataaagctgattaaaatcttgtttagataatattttaaaagtatttataaaagaagaaataagagggtaaaatacatttaatcttttccacaagttaaaatcaaccttaactnttgaagaaagtaatgaaaaaacttctatttagaatatgtttggatacaaactagaagtcctttttgagagcttatctactaannaaaaagctttatatnttcagtagaagaactcttaaaatcactaatggattta

SEQ ID NO: 216602 - DNA, 394 bp, Glycine max
  unsure (1)..(394): unsure at all n locations
agcttctagccaaatggacttactcttgaatttatttctttgatagcccctttgagcttattttcccatttttttgttttgaagctcattacaagccttaagtgaaaaaccatgatatcaccttacccttaaggaattttggagctttggaattgttttgggaataagctgggaataagtgtgggggggtatgtttcattggaagatatgatttttggccatgtttaatgttntattttggccatacttgatgtatatatatatatatatatatatatatatatatatatagacatattcttttattgaccttcattttcttattgctcaataataacatatgacaataaaaaaaaaagaaattcaatagctgcaaatttctactgttgaaaat

SEQ ID NO: 216603 - DNA, 391 bp, Glycine max
tgtgccgatcccacatggttgaagcattctctctaacttctttccccgactggtctccctatgattttacttaatgagagtgacctgacatactcattgtgtggtgtgtcttgttatgtactcctaagagccctatggtgtattttcactgacatggtaccacattgcatataagcttgattcatagcataacctgttgcatgcgcctgctaattggttattatgaaattgatgtattattatgtcttgatcggagcgtgtgattcttgtgtaatgtgattgatgattgaaaagtaaatcttgaatgacatagctggttaattactcgagttatgtctaagtaagctctatttcggtcatatgatattgatatctagcgtgcttgcttctc

SEQ ID NO: 216604 - DNA, 392 bp, Glycine max
  unsure (1)..(392): unsure at all n locations
agcttgcatgatttacattctcccctttnttatgatgacaaccacctgtaggnnangagcaacaacaacaagaaaatatcattatgagagaccttgtggccttaataacttacgaaggggtgaattaatttttcactaacaagtgctattacagcaggattcttggtttaagtttaaaacatcaaaaatagatatggcctcatctaactttccatttcctgagagaaattctattantaagcctctgatgttcatggaaagggttatcattattgaaaaactcgaaagcaatctttatagaagccattatctaaagatatgggaagccattgaatatcatccctttatttctaccatgtgatagagaaatgtactatattaaatacaaccta

SEQ ID NO: 216605 - DNA, 394 bp, Glycine max
  unsure (1)..(394): unsure at all n locations
tactaagcttatagaaccaaatgcctcatcatttccaatatgcatgtgtattatgacgcatcaacaagaatcaagccaacgctattgtgcaagcaatcaatggggccaaacacaccaaatgattatgatgatggatggctcaaattctcacaaaggtaaaatcatcactttcaaaatgagctttcaaaactatcatgacatgtagagaagaatcaaggatttcaagtcacaaaatgtcaagaacttctattttcaaaacaattacccatttcttgaacatatcctataattcaaagaanaacatgcaaagtcgtacgtgcacacaaaattgacccanaatattaaactaaaaatccgacgaaactaacaacattatacaaataacacaactaac

SEQ ID NO: 216606 - DNA, 415 bp, Glycine max
  unsure (1)..(415): unsure at all n locations
agcttatgcgcctatntccttacaaacgttctcttgcaccagacatttaaccgaaaaaatgcacccatatacaatcaaggcagcttcgttacctagattatttacacgtacctccaaggtgtatttgttacttacatcacacacatctccttggctaaattcacatacatgcatactcaaagcattttggggcaccaaaaattgcacatgtgcacatcttggcatttctaatacctatacatacgcaaacttcatgatgaatcttgactatctacacaataaggtgctacatttcatgctcctttttcaagtttttgctacctaaagccgcatgcaaattcaagcatattttcctttgctgactaanattgtattcaaattaaaaggtatattttttgtaatatgttttcttcac

SEQ ID NO: 216607 - DNA, 484 bp, Glycine max
  unsure (1)..(484): unsure at all n locations
ntgatgcaacatatggagaggttaatgagacaactagatgttgcgctccatgagaggttggatcaaatggagaatatagatcataatgaagaagaaaggaggagaacagggaatgatggtgtttctagacaaaaccgaattgatggtattaaactcaacattcctccatttaaaggaaagaatgatccggaggcctacttggagtgcgagatgaaaatagagcatgttttctcatgccacaactatgaggaggaccagaaagtgaagcttgccgccacggagttatccgactatgctcttatgtggtggaacaagctacaaaaggagagagcatgaaatgaagagcccatggttgttacatggaccgagatgaaaaagatcatgaggaagcggtttgtgccggctagttactcccggacttgatatcaagctccaaaactaacccaaggcaacaagggggtgatgagttttttatgatatggat

SEQ ID NO: 216608 - DNA, 414 bp, Glycine max
agcttagtcttgagttgtaagggtcagaagtggttctagtgattaatacttgtaatttggtggtggttagccaaaacaaaacataatctcagtagtagaaatcaacatatataaatctctatgtcttaatgctttcgcttatctttttatttttaaactgacctaggacttgattagattttgttttgaaaactttgtctgatttgcaagatctattctaatcgtctgaaagtgattttgcgaaaatctattatttatcttataaagtttttcttcaaacggtaactttgcttttaaaaaaaatgctttaaaaattttaaaatcacaattcaaagcccggttatatttgcctttacatatactaaaaataaagcatattaaatcaaaacactaaaaatataataaattaactaa

SEQ ID NO: 216609 - DNA, 477 bp, Glycine max
  unsure (1)..(477): unsure at all n locations
gcttctacanaantcttatggctctcactcttatccaatgtaatgactaagcctatggaatattgtgggctgcatcttcataacccatggaagataatggttagaccatagagaaatatacccctaagactagttcccaagagaggactagcaacattaaatgcttcaaatgtcttgggagaagtcacattgcctctcaatgccccacaaagaaaaccatgatcatgaagggtcaagacatttatagtagtcaagagaagactacttcttgcctttcctctagtggaagtgaatatgatgtaaggggtgaagagattagtgaggaagactacccccatgaagaatgtaacctcttaatggctagaacgctccttgcacgtcaaatcttgtgatctattctaatccctaaaagagaacagtcttcatacaagatgcaaaatattagataaaacatggtctctccatgggatagtgaac

SEQ ID NO: 216610 - DNA, 417 bp, Glycine max
agctttacagcagattttagtaatgacccactaacctaaaattaaaataacttaatgccattaacctagggaattaaaaaaaacttaatggctgagtgtaactgaaattgtggcaaccaaaagtcacccccaacagccaacaagtcagccaccatttggtctcccaaaaggctgatgcctaggttgccaattgggcccttattacaacttgaactaaacctaactaaagcccttttagttaattaacccaaaacatatttttggtcagccaactttacaaggattgggccattatttagacaaactaaacactctaaaattgaaacaaagtggtgtcatttagtcctcctccatttgggccatgatacaactcacaaccttggacttttctccttgaaacttgggcttgtattcaaa

SEQ ID NO: 216611 - DNA, 432 bp, Glycine max
  unsure (1)..(432): unsure at all n locations
tanacctccataatcgaatcacatttcaacactattttcttcttcaacactaatttcttccaattcatttcctgtgtcatntcaatgactacaatagctccaatgagttcaacaaatagaaaactttgtatcccaacataagcactgaagcaacctaaaaattgtgtatgttcattctttaaaattcatacacaagtctatgggtgggtatgcaggctcgagtccatgtactatcttatggggaccgcggtccgcgcaggtaacagaccatattttttaacaatccatggttatgcagtattttgggcccgccccgcttaacacgtgggttgtgcgggtttggtctactggttggcccgtaagcccacttactaaatccacatatatattttaagtaaaaaccaanagtgtagacattgtggttgtatgtat

SEQ ID NO: 216612 - DNA, 401 bp, Glycine max
  unsure (1)..(401): unsure at all n locations
agcttaatacaccaattattaattnttttttaatagattggaggtattttatatgaaagataatcttatttaaactggataaataagataattataagtgataaaactctgtctccaaatatttaacgtaattatatatgtaagactaattaatctaaaataactttgcatgattaacatactcagtgctataacactaatagtttggtaataactaattcattgataaatattataaaatcatcaatatttgagagtattagaataaattttacttcgtattagaataaaattaattagatgcaaacctattaacgaaatgctttaacttcaccaaatatgtgattatgaaagcaaagggtagatggcagaagaaagagcaggataaataccatgggacg

SEQ ID NO: 216613 - DNA, 373 bp, Glycine max
tacctgtaaagactataaaataagacgcttttttactcttcggtgatgaatcactccacaagttgaattgagaaccttcatctattaccaatgtggtagacaaaagggctgtacttgaaggcattattgcaagcgaaggattttgcgcttcactatcatgttacacttattgcgcttgggttacggagcatgactactaccaatatataatgttgtaaacaaatgaaggtaacttataaatataacctaattatgtcgatcaatccaactaaaacatatttacgagacattaaacatttatattcggggaagagattcccaggcatcattttgctacatagatttttccacatctgcgtgactctaactaaaa

SEQ ID NO: 216614 - DNA, 412 bp, Glycine max
  unsure (1)..(412): unsure at all n locations
agcttcatgatgntgaatcaagatggattcagggagttatgatgataccaacgatgatgacaaaaagccgaagagaatgagttcatgattgaatcaagaacacttcaagaatcaagagagaataggttcaagattgaatctagagcgcttcgagaatccagaggatatatgatttcaagattctagagtcaagaaaagactcactctacataagtactaaaaagtttttcaaaacattgagtagcacatgaattttttacaaaaccttttaccaaagagtttttactctctagtaatcgagtaccagtagcaaagattgttttcaaaaagctttcaactgaatttacaacgttccgattgatttctaaatggtgtaatcgattacaatgaattggtaatcgattatcagtgt

SEQ ID NO: 216615 - DNA, 396 bp, Glycine max
ctttaagagtgtgtagcgcaccatcttttcataggagagtatcgatcatgtgtttaccatcacgatcatcgtctacctgtccatcattggtggtaccacctgcgccaccagatccctccaacttttgggcgtgatctttgaaagatccggcccccattttgcaaatggtctgctgttgcatcctatccggaaccatatcataattgtactgatactgtctaacaaaggcgaccattatgtccttcctagaatggactcgggaagattccaagttattgtaccaggtaacagctaccccagtaagactttcttggaggaatgatcaataattctcatctttgcgattcgccatatttgacaaacattttaatggtcttggacaacagcccctgtctt

SEQ ID NO: 216616 - DNA, 427 bp, Glycine max
catgcaagctgggttacaaaatagcatgccttatcccaatataagataaaccactcttatgagaataacacggcaagaagtttgtttggaaaacacattatcttgtgacaaatttaagaaatgaaacaagggatacatgagaaggtaatataatccacaatatccatatgttcaaagacagtacctgtcatgactccaatgcatgtcccaatgttattgccattaatcttccatttggaccgaagacacttttcatgtttggaaggtttttggtgcgtattgatgggaacaatatgcctgcctataaccaaaaaaaggaagtaaaaaacaaagaaaggataccatgtcttacattttgttcaaagacatgaacgttgaaccaaacaaaggatagctacatctgatgaaatatatggcaaccaacatt

SEQ ID NO: 216617 - DNA, 359 bp, Glycine max
tatgagaccaaaacatgacgaagagcattgtcaacaatcttattctcacgctattctagtaaatcatgtgctatttcgtatatagttatatgatgatccaactggattaagagcaaagtgcaaccctacacattcgtgtgggatcgaggagtattgtataaaaatttctccgatcatcatctataagcacaacatggaggttggcggcagttaattgaacaatagtatattaaaatcaaatagatatcttgtgacacacaaatactaatagcgcactcaattcacgataacaaaacaagtaagccgacaatttatacgtacgagaaacagaagaatgacatacattttaatattgagag

SEQ ID NO: 216618 - DNA, 419 bp, Glycine max
agcttctttatatatatatatatatatatatatattcctttggcggatcaaaataaataaaaaatattttgagccttgtggacgagattctagagggtaatttgaagaaaaagatcattgtaaacagttgtagcatttgttgctagagaaatgattatttggactcaccaggttcactagagcagacttggctttaacttttttagacagcttcaaattaattccatttttcattatcaaattgatatgaagcacatgatcaaatctttcacagtttttattatagtacaaagattagcttcacatgaatggatgttctttttaatataagcaatgatttttattagatatatgtttcacagttttaattaaaaaaatcaacatgtcattatttattagaagaatctgatgacaaaatt

SEQ ID NO: 216619 - DNA, 444 bp, Glycine max
  unsure (1)..(444): unsure at all n locations
ntacatggagctacatcatgtggtatcagagcatcttcatctatgtgatgttcttttgcttcctctatcttttgttcagataattcactttgattccttgttcttcatcatcttctccatgtatctcctccattatcttgtgatttggtattgtttagagtagattcaaaaaaataaactgactaaatcttagaattacacttgttcatgcattttctatggttcaaattttatagatctactcttgaatcatgtttttgtgttgattttaggttctatctattttcagtaataatcttcttgtgctgagcctttagatatcaatattcttacacaatattgattagaaaagacaacacaaaaatctaagtgtaaatcatctgattaatgttgtcttagaatcatgtttaatcataataactgtcacattatgtgctaagtttg

SEQ ID NO: 216620 - DNA, 312 bp, Glycine max
ttttcccccccaatcttgccagactattattttaccttcacacacacttaatcacgctatttacctaaacttgatctttgaccacaagggcatgagtttgatcgctgccacatatacttcttaaaatactagaaattcagcggtaggtaaaatggaccaatgcatggcccacactccacacttcacgacctaaagtgtgatacatgacgagcatatcacacactataccattcatataagtcataacctattaactcgcgctttcagatatgttgtacttaaaaaccaaattgggaaaatctatacaggaaa

SEQ ID NO: 216621 - DNA, 345 bp, Glycine max
tctcatataagagagatcgcctacgtgaggcgatatggttctcttcaacttgtatcctcaaaagtataactctgtaactctatgaagagtgggattacatatgataccatgccagttacggaagtgagcagaatattctcagagaggaatatttcatatgggtcgggtcatatggattccctcgacttgagcagtgccgactgaatctgctcatttcctaatgcgaaggtataccatattgaatttaatgcaaatagagaatacatctgagcatgtttagatgaaaatgctggtaacatgaaagaaaaatacttcattttgatgaaaacatggaggcttcttgat

SEQ ID NO: 216622 - DNA, 375 bp, Glycine max
  unsure (1)..(375): unsure at all n locations
agcttgccgccacggaattttgtgtcttgcctttgtgtggnggaacaagctacaaaaggagagagcaagaaatgaacagccaatggttgatacatggactgagatgaaaaagatcatgaggaagcgatatgtgcctgctagttactcaagggacttgaaattcaagctccaaaaactaacccaaggcaacaagggggttgaggagtatttcaaggaaatggatgtgctcatgattcaagcaaatattgaagaagatgaggaggtaactatggctcgatttcttaatggtttgactaatgatatccgtgatattgttgagctgcacgagtttgttgaaatggatgttttgcttcacatagcaatccatgtggagca

SEQ ID NO: 216623 - DNA, 300 bp, Glycine max
  unsure (1)..(300): unsure at all n locations
tcacaacatgtggatgatgctccagcacatctgcatccttgttactatgtatatcgnacagacgtcatcagactctacagtcgaggagttatcctcacctcgcctcgtgttatcactgccaaccaaatacaaagaacgatcctccatcgagtccttcatcacatatgtatcatatacgtcatcattagtccctaccttaatgtaagatttaagcaaaacttgtgccttgactcacattaagactctgaccacatctagatgcatcctattagtagaatactcatttgcccacatataggc

SEQ ID NO: 216624 - DNA, 409 bp, Glycine max
  unsure (1)..(409): unsure at all n locations
agcttcagccaatctggagggtacaaatcactctcagatatatgttntctggggattttttcctcgactcgagacttggggggatgcagtcactgaatccttcaccatttaaagtgagcaagttgatgaacttccaaaactactatggcaagtgatcttattaatagttgagcatgagctgataccattgtaattcattctctatagatacatacgaggatcctactccacacatgttctactttttgtctgtcttcctacattaatttcttttctttttctgttttggccggggttcacgtgacatataactgatattttcaatgtaaaaaaaagagttgataagatttaattatttgtcatatgcagatggcttgaaactataataagttttgaaccatgtaataat

SEQ ID NO: 216625 - DNA, 392 bp, Glycine max
tgtataatggcattggatggttgcaaacctctcatattttcttataaagttgattaatctcatttttatgatttctgtataatgctcaaaagactaatgcacagaaataatttcctatacaggtaagatggagttctgttatggacaggtctttacctgagccaccaacggctgtttttctgcatggaatcctactgtgcaagaaaaactggggtgcgtgctactgtgtacatgttggttttcacaagccttttgtgatatgaaacttatgcgtggcatgaattgtttctgtacaatgtgcatgattatcacgtggcaacaatgtattcacctgatcaaactacttttctacttactctcaaaactcatcaagaatattagagaagctttgg

SEQ ID NO: 216626 - DNA, 412 bp, Glycine max
agcttgaacaccttctcacaagtttttttatctctatttgctgaggtagactattggattttttgatggccattgtgaaattgatagttagtactctatgcacaccttcaagatgttaactttgatagggtctcttgagggtgctgaaagtgtgtgattcatggggccagcttggagaggctatatttatcattgggacattggtatgtgtggtaaatataaaatgagttatagagaaaacatggtcacgttgatgtggggacatgtagcagaccacacccaaattcttcgtacatgtctgcgagagttgctagcatgacaagacaagattcagatcttttttttaatggtggattgcatcacatccaaaatatctaattattcatatgtacgtaataattgtctctgggat

SEQ ID NO: 216627 - DNA, 413 bp, Glycine max
  unsure (1)..(413): unsure at all n locations
agcttgtcttaaactcagctaccctagttagctttatttttttagaggtaataattacaccccaaaatggaattatataatggttntctacatacatttatcatgcccatatttggcatgctcttaatttgagagttttaaaacttctagtgcttttaatatgatgaccaaggggtgttcaattcgaattcaattggattgaaatgtggtcaattgaattcatcggtttgaattaaattattctttgaattgtactgaattgtttagaattattttaaaatatttagtctctttttttaagtgtcttttttcctctccttaaattttttaatattcgctatttcttatctctataaataattacctaaacattatctatttttatttttatattttctgagtaaaatataatt

SEQ ID NO: 216628 - DNA, 348 bp, Glycine max
  unsure (1)..(348): unsure at all n locations
ggttcgcacatcnggcgcgtgtatgacatccactccacattgtttgacagcgaggagacctttaatcctattacccaacgtggcggacaaagatgggcagttaactcgaatggtcaatattgtcaatgcggaaggcattctgcgcttcactatccatgaacacatattatggcagcatgtggttacgggagcactgaactactaccaatatatagaggttgtttatacaaatgagcgcatcttagaagcgtactccccacaatggtggcctcttaagaatgaaacggctattcctccttctaatgacgcatggacacttatcccttacccaactacaattcgtgcgaa

SEQ ID NO: 216629 - DNA, 413 bp, Glycine max
  unsure (1)..(413): unsure at all n locations
agcttggctttggtttagacatgtttgatacatgaattgggacttgtaggatttgatttgagcaagattggatgagaggaagtgtgattttcgaaatctgcacttatgcagaatttttgctgtgaaattgtgcagcagaattttgcacaagtgcagaaaaatgcttgtgtgtggttggctgtggaaagtctagtgcagaatgagttctggatgtttgctagtagatcccaacggtcaaaatgtaggcttatgcaccatagacttccagtaaaattttggagtcgatccaacggttaacgaattggatcgaaggaattgttactgtggtctttaagtgagaaaagctgtgattntggttgatgtgttgagcagagttttctgcctttgctctgttttgcttggctatgatagct

SEQ ID NO: 216630 - DNA, 398 bp, Glycine max
  unsure (1)..(398): unsure at all n locations
cgcttcgaaagaaaatganaataaaacaagaatcttacttggattgtgatggaaatgcaagatgagagcaaaagaatgcagaagataacttatagcataggcagaaaaatgcacaaaggaacaaatgtaggcacaagcacaagagataaaagcttcttggtgaatgaaactgcctaagtcgtttgcttctaagcaaaactcatattgctcgcttaacgcacagccgcacttatcgtgtcaatatgacgtttggttttagcaaagccttgcccttagcccatccccgcgctaagcccaattccaaatttttttcaaattctacagagttatgtggcttatcacagtaagcttgtgattagcgctgtctgcaactcaaagattgtatgcaatgttcactt

SEQ ID NO: 216631 - DNA, 403 bp, Glycine max
agcttgaggataaagacttcccaagctatttatcttctctctcagagagacttactcaagcttgaggatagagacttcccaagctatttatcttctctctcagagaggttttttctcactctaagaagtggattcactcttgtcttggatggataggaatgaaggctcctacccttatttatactactccacctccacaatgaatggtggagattacttgtatcctagggtggagattaattctctagaatgctccacacattctaggagtctctacactcttctactcttttccatatcctttcataaggttccagaaggttccacacatctctagaatattctagaggtttccacattctttcacaagcttctagagagttctacactactctagagttct

SEQ ID NO: 216632 - DNA, 389 bp, Glycine max
acacttgaaactcagctcattataataatacccacatacatgcctgtccattacccttatcttacattaagggtactcaagtttgcacagtcaattcttgtaataagatcctatatttgctcattgtgagttcttaacctatacaagggacataggctttacacctatatatgtattgtgctttgaatcattacaaacagggaatataaccaaagataacttttatttctatctcaaatacacatcttgcttgcttctaaatccatgatgaatatgatttcgttatacatacataagcaaatgtgctttctttaacacagctgagcgcaactatcaaatcatattgcgcgaaagatatgccttgccattttccttaatatgcaatactc

SEQ ID NO: 216633 - DNA, 409 bp, Glycine max
  unsure (1)..(409): unsure at all n locations
agcttcacccctgcctttctttntatgttttcatgtacagggtgctcacccaagcgagctaactctacatttttttttgcaagaattctttgcaaaattttgactatcctctgggtttgcgcttattttattttaattcataggattatgaacaaactaggcatattcaactatgacttaagaaacataggtgaataaataacaagcagaaatttaaaaggtactaggttgcctcctagtagcgtttcgttaacgtcttgagcttgatgcgggatgatgatatgttgatcacaagcctaacacctgctcgtacctgcccctaagtcaggacatgacattacgcagcaaaataggactacactaccacttacctttgtttacctttgctttgaattcagcatgctatcaa

SEQ ID NO: 216634 - DNA, 409 bp, Glycine max
  unsure (1)..(409): unsure at all n locations
tgcttgagccanaatcctgactcaccatataccttgacccattgtgagaatgtcaattcttaccctcggaagcaataataaaggtgggagagggaaaatttccaatcaaagaggaagcaaataaggagagaatgaaaatctccaatcatatgaaaataagagaggaaagggaattcccaatcaaagagtgtgagaaagcatatagaaaagaaagaaatatcccaatcaaagaatgggagaaagaataaagagaagaagaaagggaagaatgttcccgatcaaaaaaaataatatgcagataggtctttggaccggacaatatctgaacactacataattgtcaccatatgaatgaatagaaagaaagggagccatgaccttatatggtcttccccctctatttgcaggc

SEQ ID NO: 216635 - DNA, 418 bp, Glycine max
  unsure (1)..(418): unsure at all n locations
agcttgcactttaagagttggttatatatccacagtccatgtgcagagggaagtttcgtatgcaaattggccacccaatactacattaatattgtccacaccagatggattgtagtaactactttatgggttatagtgttaggttgttaattagtatgtgtttgtcattatagagataaacttcattctcatgatcaatccaaagcatataaactaacatagttcaaaagttatcaaaatgtgtaacaactatgtagctgaacttacttacaatggtagcaaacaaatcatgccctctgcactgaaaaattaagaatgaaatctttaatttcgtccagccctatccagtgccgtccttccgtctgcatcttttacatcatattntgctccagctctcaagagttcttcaatttttggc

SEQ ID NO: 216636 - DNA, 439 bp, Glycine max
  unsure (1)..(439): unsure at all n locations
ngctntctagtctccttgccaatcacagcatgaaactctcttaccatcataggatatggatgcggcctagcaacataacacaaaatataatgagttgtccccacattagttacccagtcccttatagcctctgatgtcgcatccttcaatgtagtagtcccagaatggaagggtctcgcctatattacaagattatcctattagatagaccaacgtgtagaccattttttcaaatgaagacagatatttaaattcaatataacaagatttgaacacacatggggtcgcatcacaacactttgtccaatgtagagaaagagcatacaattcccaaattaacaaagtaataaataaatccaagtggtttttcatataaatcaatcaacacttaatcttttgatgctacaattagtcacatagagctaattgtattaacaca

SEQ ID NO: 216637 - DNA, 413 bp, Glycine max
  unsure (1)..(413): unsure at all n locations
agcttctagccaaatggacttaccttgaattaattcctttgatagccctttngagccttgtttccctttccttggtttgaagctcactacaagccttaagtgaaaaaccatgatatcaccgtatccttaaggaattttggagctttggaattgttttgggaataagtgtggcggggttttgtttcattggataacatgttttgttggctatgcttcatgatgtattttgggccacacttgatgtacattgtatattggttaatgctggacatgttgaatgagatgttgtttctcaaaggctacagagcaaaaaaaaaatcaaaaaacaaaaagaaagcaataaagtgagtgaataagatcttaaatggcaaaagaatgatgagactcttggttctactctttatgtttaaatt

SEQ ID NO: 216638 - DNA, 419 bp, Glycine max
  unsure (1)..(419): unsure at all n locations
agctntaacagccaggcccttgactcaattctgttaataattttgaagttgtcataactgtcaaactgaataaaataacataactttcattctatatcacaacatcaattgtntttattccattggatgaggtcagctacatggatcatgtgacatcactatgttcggttaacaatcaaattccctgatattattcactctgggctttctttgcatatgtccaaaccatcttaacccattttgtgtcatcttatccttgatgggtaccacactaatatcccttatttaatcattttgtaccctatactttcttgtgtgacagtggtgtgaccacatatcttaacattctcatttatgctactctcactcttttctttgtttatcacacaacgcacaaatatagtttgtgtaccaattta

SEQ ID NO: 216639 - DNA, 354 bp, Glycine max
  unsure (1)..(354): unsure at all n locations
tganagagcctgtgtagtcgaagagaagttcaaggtcatatccatcattttctgaaaagagtatgatgaacttagggacgtcaatatggtcaccgctgaagccttgaaacgagataccaagatagcccgataggaagaacactaccaatgcataagtttgaggggctttatagggcatcaattgtgagctctagctctgaagaagtgaaaggaatcattatgggtcaaaggcatgatcttgaaggacgagcttaaagcttgcctcatgtcgaaaagaaatttgtcccaacagttaatctagactgaagggaatatgttcgccattatcgattagtgcaaagaaaatcttaatct

SEQ ID NO: 216640 - DNA, 415 bp, Glycine max
  unsure (1)..(415): unsure at all n locations
agcttgctctaaatttacattgatgtatatgggatgaggttgtatgccatntttgnnntaagagtaatgtcccactggtaaaactaactttccaaatgtttgccttcgcaagaaatggccccaaggaagcttgcctcaaagaggtctaggaaggacaaggcagccgaaggaactagttccgctccggagtatgacagtcaccgctttaagagcgccgtacaccagcagcgcttcgaggccatcaagggatggtcgtttctccgggagcgacgcgtccagctcaagacgttaaagaagcgctactaagaggcaacctaataccttttaaatttctgcctgctatttgatcactttttatagtaggacgcacctagttgctcatgatcctgggaattaaataaaacaagcgcaagct

SEQ ID NO: 216641 - DNA, 417 bp, Glycine max
  unsure (1)..(417): unsure at all n locations
tctcaagggaagtacctagnctatatatagaagcatgtgttacacttgttgttgacttgatgaatgagagtcttgtgagacatacttcaaagttccacttctatacctcttttattccttcaatatcatgctcccccctctctctttctctccctctttcttttcctccattgaagcatcctctccaagcttcttatccaaggctcatcttggtggtgaaactccttctttcatggattattccttaatggatggcgcctcctctcacctattttcctttgtcttccgctgcatctccatggtggaaaatcaccattataggaccccattgaagctctagatccagcctccatagaagcccacaagcaagcttccatcaatgaactttcactcggatgtccgatcacgcgaataata

SEQ ID NO: 216642 - DNA, 409 bp, Glycine max
  unsure (1)..(409): unsure at all n locations
agcttaggaattgccctaacagattctttatatataagntcnatcaaacgagtcatgtgaatgtgagctacccttctatgccttagccataaacatgtcaagcgtgatgatgaagcacaatctacattaagcatgtacgtatttccaatgcagttaccaataaacttagtttgatttgtgattggattactaatatcgcaacaatcttcattaaaagaaattgtataaccttcgtcacataattggccaatgcttagaaggttatacttcaatccatccacatacaaaatattctctatcaaggtagttagtgagtttccaatgctacctataccaagaatttttctttttcttcattgctagaatcacttgaagtgctagaagcattcttctcccacggaatgtaagc

SEQ ID NO: 216643 - DNA, 406 bp, Glycine max
  unsure (1)..(406): unsure at all n locations
agcttaagcagatagaaaggatgtcgcctttctatgaaagttgcnannctattattcttaagaaatacgttctattttatttttatgtccatattaatataacataatatgaaagtgtttcattccattacttttgcaagtttaccagttacaggtcaatgtgtagtttcagtaatacttttaaattntaatcgagcttaaacttcacatattaattcagcttagccttaatgactctatacgtataatattaattaattaatattaatattatatattttcttgtaggctcttggctggggggagcaatgacccctcccaccccattaaagatccgccactattgaaaaataattaagtatccggcatcaactatttattatatcttcttatatatgtacgtatc

SEQ ID NO: 216644 - DNA, 416 bp, Glycine max
  unsure (1)..(416): unsure at all n locations
ancttgtgcaaagaggtcatggtttttccatattatatccattggcanatggcagatgcaaatgccatgttgatacccatgcatattgtcttatgtacgctctattggaattgtctactgactttgccagggtaaaccattggagtctactaaatgagctgagaaaagaattattctacattatataagaatatataccctcaaataaaaaaatagcaatgtttgttatgttggaatgaaattttactaatgaaggaaatatttgagagtgagagagattataaaatttggaagaaggttacttgtacaaaatgaacacttcttgatatatgccttgatttgacttcatacaaaatttaataccatacccctatatatattggttcctaccaaactaatggttagaattttatcaa

SEQ ID NO: 216645 - DNA, 92 bp, Glycine max
  unsure (1)..(92): unsure at all n locations
gacactatanaaatactcagctggaggaatcatangaatgagagagagaagccgctatcacttgtttaatacacacgagagcacgctcagag

SEQ ID NO: 216646 - DNA, 149 bp, Glycine max
tttcccaaccaagagtatacttgagtaacatgcctgcttgcatcactggactttgtcttgaacttccaaacgtgagccaaactttagtgatatacttacatctgtaaaccaattagtggacttctattaaaatcaaagactaaatgata

SEQ ID NO: 216647 - DNA, 393 bp, Glycine max
  unsure (1)..(393): unsure at all n locations
agctagactaatccaagatgtgtgctgtctacttattgngcttaagcgaaacccttatcttcgtcatatcccgccgtatcaaagatatctgtagtgcttacccacccataatcacgggtgtccattaacctagaagatcaaccctttgagttaattatattttttaatattacaaaatataattaatgttattttttttatttaagaaaattacattagttaaaaaaatgaaaacaaaataggtcagaattcaggctttgaacacccaaattcttacatgtaatatataaaagttctagaggggtggtgtgaattctggtatggggatcttaattcacaccccgcacaataaatgttgctagttgggcaaactatttccaaatgtggctatat

SEQ ID NO: 216648 - DNA, 409 bp, Glycine max
agcttagaaaaagcttataaatcaagtgatcatctttttcaaaacatagggggagtgaacgcaatatatcatgcatatacattacttgtatcttgatttcaggaactaaattgtcatcataaaaaagggggagattgtagaagcaaagcctttgtctttgatgttttgatgatgatcgtgatgatttgatgaaaatgcgcttctcaagtttaattcaagacaatgattcaagaatacaagatacaacatcaagaagatctctagtattttaggaagggaattcctaattgaaattgcaaaaggtttggcaaagaaatttaagttaaaaagtctttttcaagagatttactctttggtaatcgattaccagtggccaaaaatggtttactacagctattaaaatttgaat

SEQ ID NO: 216649 - DNA, 446 bp, Glycine max
tcgctttgcatgtctagagatttctagagagagaaaggtccatgttcttgagagtgttgagagctattgctgcgtgaagactggcagagaactgatcttgatgaggaagccatcttgagagcatgagatgagtttgtgagtgattgtgagggtttacacgtggaggagacatccccactacttgtatttcttcaatccttcatttttctcttctatttgacgtacagaaaggttccaggatttggagagctcaatcctctattggttcttccttgtagcagttgatgtaatacctttttttatctatttatgatcttttgtgtgtctttgggcttcactacctatttagtatatctttcttggcctaaatcatcctttttggatcttcaaatggaactgttttttttatacctgatgtcgggcttgtttcttttttatgaggatgg

SEQ ID NO: 216650 - DNA, 417 bp, Glycine max
  unsure (1)..(417): unsure at all n locations
agcttcttagtctcacccgatgaagatgaatttgtggctacttcatgcactcctctaaagacaatagcatcatttctggcactaaattgcagggacttggaatccatcttctcaattaaatttctggcttcagcaggggtcatgtctccaagggctccaccactggcagcatctatcatacttctctccatgttgctgagtccttcataaaaatattggaggaaaagctgctctgaaatctggtggtgagggcaactagcacataattttttaaatctctcccagtattcatataggctctctccactgagttntctaatgcctgaaatatcttttctgatggtcgtggtcctggaagcagggaaaattttttctaagaatactctcttgaggtcatcccagctcgtgatggacctt

SEQ ID NO: 216651 - DNA, 440 bp, Glycine max
  unsure (1)..(440): unsure at all n locations
tatactgaccaagcatacagtcagatgccgcaataatgtccggcgtatatgcatctttagcaagntttacaaagttagacggaaggtctgcagtctctgaagcaccacaaacctgtagcataaaactaagacatcaccaaataatgcacaagttcaataaacgaacattttaaatgagacaatgatacatagcagagtgggtgaaaaagtaccaggcacaaccagccaggtgggaagaattcctcctttatcttcaattctgatggctggagacaatacataatagaggcaggcagaagtcacatgatgggagtgattctgcttatagtcattattagagctccatggcatataatcccaaaaagtgtgaaactcgcaggttatggtcatatatgatcgagaacataacaattatcttgcatagaaatctgtaatatctt

SEQ ID NO: 216652 - DNA, 308 bp, Glycine max
ttttttttattagagagacttatcaattcagaatcagatcagagagactaatcagatagttgaaatgttttcaaaactgagtaccatggattttctcatacatgctaccacagagtttactctctggaatcgataccacatgtgtatcgataccgtacgaaagaattgaaaagtttcaaaaattacacgttcattgattcaaaattgaaatgatctatgatggtaatcactccactgccttgaacgtgaataatatcaatgtgaaagccctactttacaaaaagcctggggattgtccactgctgggc

SEQ ID NO: 216653 - DNA, 418 bp, Glycine max
taaatatgcccgagtcattcatccgtatgagatgttgttgaagtattggcatgcacgaatgccattccttggattataaggttgaaccaagctcatgcttttacaaaaaggttcatcaagttaagtcgaaatatggaaggaaccgtctttaataatggggcaaaagatgaatcgagtcacatcactgcttcgcccactgccaaacatatataggattattgatgtccttgttacttccaggttcaccctgacaaagatgtcatggaccctgtttgaatatctcaattgattaaactcccatatcctgcgtacaaatcgcaatacttctactgtcataattcgctgcatacatgctttcattggatgctggttggcgccttctttctttaaaataaaaaaaaatgacctaatcattgtt

SEQ ID NO: 216654 - DNA, 354 bp, Glycine max
  unsure (1)..(354): unsure at all n locations
cgagcatgcagctnctcgngcccttctggaagcaaatttttaatttactttaccacgggacattctcttaaacaaaaaggcatatacctcctccacaaatacaacattcagtaaatagagcagctatgcgcattttcttacaatcgtccttgacaaacataaaaaaagcaccatatacaaacaagcagcttcttacctatatattacacgacttacaggtgatttgtactacatacacacatttcttgtaaaacacatcatgcatactcagcatttggggaccaaaattgaccagtcacatttgggattctaaacctaacatcacaacttatgagaatttgactattcacataa

SEQ ID NO: 216655 - DNA, 379 bp, Glycine max
tatgacactcaagctacagatctgtggaaatccaggcgtggagtggatgggatcataatcttgattagataagataggataagagctatatgtaatggttctagatgagatcaaatctaaataatatctcgattggatatgatgggatctaattgtgttgaataaattagtcagccctgttcaagttcaagcccgattctagatacaagcccaatgcttcattaattcctggattagagaagacataaattcctgatgggccaaagataaaatgcctaataatttgacaataagacatttagtcgttaaatggtgcaaaggggtagaaatggaaaaaaatgggcatctaacccccatctatccttgtctcagggaaatg

SEQ ID NO: 216656 - DNA, 419 bp, Glycine max
gcttgagatttgaggctgagcgtaccatcattctttaactttctttagtagatcaggcctagcgccacaggtggtaagcgcactttcaacagttcaaaacccgtaagagattggtgcttattgccttctggccagctaagcacatcgtaaaagctcaagttacagaatggatatggtgcttagtgcaggatagcacgctttacgctgctactaatgacatgtatacagagaagatgtggcgcttagcgcatcatccacgctaagcccacaggttaaagttcaattaccacaaagatatggggcttagcgcagtgatgtgcacttagctgaactattcaaccaaccaatcatgggtctttatgctcagcacgagcaagttcagcttatcgcatgaagattgagcgcttagtgcgaggtct

SEQ ID NO: 216657 - DNA, 475 bp, Glycine max
  unsure (1)..(475): unsure at all n locations
tcttttggaccggaccttgaacaggcgacgaacgcctctttcaaattcntgctgtgngctcgcgactggtccctttcttcctttcgcaacttgagttcactattgctaccccatagagctccgcgaatattgttccggccatactctttcttgcgagccctcttggtctcttgttcaagggctcttgcggtaattgcattctcttcccgtaacccggcacactccttccgaacgtgtatagcggccaacttgaacttctctttggcaaagtttgcctttcctaactcgcttttgagagcttggacttcttcgtcctcttccggtgcttcaaaagctgtctttgctgacgacttntaaccttggcgagccaatctaaacctcgtatgcgatctgtcaatcattcgtggtaccaccaatgatgccattccaatgccctaagctctgatctttcttacggagtttccatgcctatggg

SEQ ID NO: 216658 - DNA, 283 bp, Glycine max
tgcaaaacataacctgctgtaaatatttgtactcctggccactaaatctgactttaacctctgtgcaattctgacgttcagtgtcactctgaatctcctcacctaaccttacaccttcttcctctaatatttgatcttccctgatacccatcgcaagttaaagatcagaggtccaatataaaaaagaaagtaaaccctacctctgaactatacaggtccattaccccaccatttctatgctcaacgtgacaatacattaatcaatgtcctataataacaccac

SEQ ID NO: 216659 - DNA, 412 bp, Glycine max
  unsure (1)..(412): unsure at all n locations
agcttgcatgatttacattctccccctttctcaatcaaattcttaattcttcttgacatcatcaaaatcttcatgatttacattctccccctttttgatgatgacaaccacctgtaggttaggagcaacaacaaagaaaaaatatctatttgcatatagtttactcccccttggttttgcaataattgcttatatgagacatttgaagatttcatatttttcatatgtaaacaaattgtctcataaacaatagataattnttcttactattttatcttttatctttctctccccctttgtcaacatcaaaaacaaatcatgaatagagaggagaaagatgttaccacttgttgcaatgtatgagaatcaagtgataccaaaaggcattaaaacaatcattcaatattaatca

SEQ ID NO: 216660 - DNA, 308 bp, Glycine max
tatccggcctcccattaataggacctttatagaataatattgcatgccaaggtaggcatagcagcaggagaaggaccaccagcagccagccacagatacgccgccgccacctctatggtagccaccatctctggagtccatctctgctcacttgcgaaggatggagctccaaatggatgcatatatgcagcatgtgaccgatcagcaggcgactaatcatacgggtcaggtgcagctgaataagagcttctaccagtacaccctgcatcagcaaagccaaaaacctagccctttctcgtggcctaccc

SEQ ID NO: 216661 - DNA, 411 bp, Glycine max
  unsure (1)..(411): unsure at all n locations
agcttgtagaatggccagacatgatacatgtctatgttntgtttggnncaaaggtaaaagggatgccccacattatttccatgacataaatgcaaaaatgatgatctggaaactttatgcaaaactggtcatgcatgcacctatgcggacactcaagtgtcaaatttttatggtcatgtgatgctagggctcaagattcatttcctccattttaatcaacccaatatttccaaaatatgttcttttatcaatttgtgcattcatccgagtccatttcgggcgtccgggaaaattatcacagcattcacccttgaggtgtacacatttttttttcaaaaactagttatgatcaacgatctttttaaaaaaaagttggaagtcatctcttttcaaaagcatgtcggcttttca

SEQ ID NO: 216662 - DNA, 352 bp, Glycine max
tagaacaatacttcattcttaactgtctctttctaacttatccataaacttcttttctttcaaaaaggatttaatagtttgggaaaagaaattcaaccccgtcttcttgtgctatttatgtcacttcaattggcgtcagagcttatattgttgggttaagccatcttcattgtgcaagatgaagatcctacaacatgtgatggctggacaagctctaaccgagtttatacctgaagatgcttcaaccaacaagccttcttgctttgatggacaatacttctactacaggagaggcataatgaattttgtcctagaatctagagatggtgatctatcagaccttatatagatt

SEQ ID NO: 216663 - DNA, 412 bp, Glycine max
agctttacagtgttacaaatctctatgtatgttgctaagtgttcataagggtcctcatttggtaatccatgaaataggttcccctgtatcagatgaatcaaagaatgagggtagtttatattatatgcttggacttctggcctcacaatacttgtaaagaattgcggtactgaactactagaataatcctcaagggtaatcctgtgttgatgttctttagccatgacaaaggcttccggtagatctgtagcggattcccttaatgacggtgaatcagatgatgtagagtcagaagattgagcttcttcttctagaatggaagctactatcctatcttgcaacaatttccttatcctttatgcactgttccttcttaaagtaacttcaatttccaagtccagaggaactaaat

SEQ ID NO: 216664 - DNA, 447 bp, Glycine max
  unsure (1)..(447): unsure at all n locations
tccatcaagtggtaatcagagcacaagagcttcaagtatgtgctccttaaacctccattgngttgttgctttaccttctcttccattgatgtttcttcatttatctccatgtatctcctcacatgtcttgtgctaaatgttgttaacatgattctttataagttccaccaattaaacttgctatggaagctatatttgattttctatgnngtcaaattattgttcttgttcttgaaccatgaattgtgttgagtttaggttcctttgagttttgtcttgttattttttgtggctgaatcctaaaccataaaattcttacaaaaatattaaagtagaagaaaacctcaaaaatctagagtgacttgntcacctattgtagttttgcataaaatcatgtctagtcatgaaacttgcacataagattcttattgtngctgaatttatttt

SEQ ID NO: 216665 - DNA, 388 bp, Glycine max
tgcaagcttactaaggcacctgttctaactctttcttacttttctaaaacttttgagctagaatgtgatgcctctggagtgggagttggagctgtattgttacatggtgggcaccctatttcttgatttagtgaaaaacttagcgccaccctcaactaccccacctatgataaagagctttatgccttaataagtgctctccaaacttgggaacgttactttgttccaaggaatttttcattcatagtgatcatcaatcacttaagtacattagagggcaaagcaagttaaacaaaaggcatgaaatatgggtagagcacctatagccatttccatatgttatcaaatacagaaagggaaaaacaaatgtggtagctgatgccctctc

SEQ ID NO: 216666 - DNA, 324 bp, Glycine max
  unsure (1)..(324): unsure at all n locations
tcacacaanaaatgttggtgagacgtgaacacctcaacatattcatgttgcggagaggaataatagatctcttgaagaagaagctaatactcctttaaatgacacaaagctaccaaagaactcttaagttgatgttgtgagtaccatatgctatactctcaactcttataagacatattttaaagaaaacaccctatgagctgtacaatggatgaaaacaatatatttctcatatacaggcaattggatggatagatgcctcgcttaaacacaagagaggaatctctttttaacaacacgactgagatgatgcatgtntacatg

SEQ ID NO: 216667 - DNA, 419 bp, Glycine max
  unsure (1)..(419): unsure at all n locations
agcttggtttattaatggattttagccttagtttcacgttggttattantcaattcgattatgaaagaaaatcccaaagaaaaaatcgtccaattgattttttattattattttattcaaagatattttttttattattatattattattttgcctctttttggttttaaacatggttacggcaagacagatcggtcggattttatcctaaaagaaattaaaagatgttacaactgaaatgattggtggaaatctattttatttttgattaggcaagataatgacttaactaaatgactgaagcacgtttaaagggggttcggaaaataaatgaaataaaaatcacagctcgcgaaacaagtggggaccactaacggcacatnaaatgaattgtaatgtttgacttctggaacttaccg

SEQ ID NO: 216668 - DNA, 443 bp, Glycine max
  unsure (1)..(443): unsure at all n locations
tctagccaaatggacgttacctgaattaattccttggatagccctcttgttcctcgnttccctttccttggtttgaagctcactacaagccttaagtgaaaaaccatgatattaccatatccttaaggaattttggagctctggaattgttttgggaataagtgtggggggtttttgtttcattggacaacttgttttgttggctatgcttcatgatgtattttgggccatacttgatgtacattgtatattggttaaatgttggacatgctgaatgaaatgttgtttctcaaaggccaaagagttctatctattgaaccatcattacgttaaaggagaagaggctgaagttgagtgatataatttaaatggcgcagaaagataaactctcgtgctactctcacggtactattaacttaactctttattttttttgtttaaaa

SEQ ID NO: 216669 - DNA, 423 bp, Glycine max
  unsure (1)..(423): unsure at all n locations
tagcttgaggaatcacangaaagtgctagagatgtttctctctttcttgtattacacatgagagcccactcataggataggggcgagtttatcgcaattgaggtctagaataaacatgtgtagggatccttataggattaaattgtgatttattttgcgatgtttattgaattataattttctctcatatgattataaatacaatattgatcttctgattgcatattggttgataaatattgagtgttattggtgttttcactttttatacctataatttggattaatcgaatttgatataattgtgttaaattatttgaggggttatactgcctaagttgagattaacccttttgacacattgttatatagagattgtgaaatggtgattcacattgtgattatataataaactgaacctat

SEQ ID NO: 216670 - DNA, 236 bp, Glycine max
cacattgatttatttgagcccctctaaaccatgaatttatgcggaaattactatggcttagtaaacctgatgattactcaacggtcacatgaacttataataaaaaaaataaatactgacgcttttgatgcttttcgcgaacttgccaaggtgatgtaaaatgaaaaagggctcaaccttggttcacttataagtgatcatgtaggtgaatttcaatatgagtctgttggaaaatt

SEQ ID NO: 216671 - DNA, 412 bp, Glycine max
agctttacagcagattttagtgatgacccactatcttagaattttttatcttaatgccattaacctatggaattaaaaaaaacttaatggctgagtctaactgaaattgcggcaaccaaaagtcacccccaacagccaacaagtcagcccccatttggtctcccaaaaggctgatgcctaggctgccaattgggcccttattacaacttgaactaaacctaactaaagcccttgtaattgattaacccacaacatatttttggtcagctcaactttacaaggattgagccattatttagacaaactaaacactctaaaaattgagacaaagtggtgtcatttaatcctcctccatttgggccatgatacagctcacaaccttgtactttttcctctaaacttgggctcgatt

SEQ ID NO: 216672 - DNA, 463 bp, Glycine max
taagctggatttattctggttcggccacttacagcgcctgcgccttgtgcttgtgctacccacttgagaatttgcactctctttgtaaaactccttttacaaaggctgaaccacacagggacaacccttcccttgtgttcaagaatcctctacaacaagagactctcagtctcttaatcccttttcagaagtgagaagaagagaagatgagatctctcttagaagggatagattgtacaatgaagaccaatcaaaattccttattgaatgtgcaagtgggtgaccaaggaatctttttgagaggataagacatttcagttcagaataactctgggactttcgagaggataaaactgtttgggcaatgaaaactctcttttatacatttgaatggcccgtcataaaacatttgaatagatatgtctctttggaaatatttactgaaatgccctctggagatcat

SEQ ID NO: 216673 - DNA, 411 bp, Glycine max
  unsure (1)..(411): unsure at all n locations
cagcttcaatgttgatgccgtatattattatgtttttttccgtatcaaantatggagaacgtggtatggcattgaaagtgacatccttggccagagtggatttgattgggatggcactaagcacatgatcacagttgagaatgacaatgctcggaatgaatattgcactgcaagtattctttaatatgttactatttgttattccaagtcgattggatttaactttcttttcagtcgcatatatcggctaaaccgtttcgattctaggtgattcaaaatcgggatgatagagtggatttgtgtgctaaagataaagccaccggatatggagctgaaactgctttggatgctgatgaagcgatgagtaaagaaataactgatgcggattctatggggttaggtgcttctgcc

SEQ ID NO: 216674 - DNA, 413 bp, Glycine max
  unsure (1)..(413): unsure at all n locations
agcttatagcaatatgaagctatatcaaatggatgtaaaaaacacattnctaaatggcttaatctaagaggaagtttatgttgaacaacctccatggtttgaaagcgaaacccttccttaacatgttttcaagcttaacaaagccctatatggacttaagcaatctcctacaacttggttcatttctctttaaacatggcttttatgcgaggaaaggttaacacaacactcttttgcaaaaactacaattctcaattnttgttagtacaagtatatgtgcacaacatcattttcggtgctactaatgagatgctttgtgaagatttttctaagttgatgtagacaaaattttgaaataagcatgatgggagagctaaaattcattcttggattacaaataaaacaaacaccca

SEQ ID NO: 216675 - DNA, 325 bp, Glycine max
tccatcaagtggtgatcagagcacaagagcttcaagtatgtgctccttgaacctccattaattatatgctttaccttctcttccattgttgtttcttcatttatttctccatgtatctcctcacatgccttgtgctaattgtttttaacatgattcttgagagtttccaccgattaaacttgctatataaactagatatgattttctatggctcaaatatcttgttcttgttcttgaaccatgaattttgagagtctaagctccttcaggtttgtcttgtatttttgtggtaaaaaccaaccataaaattcttacaaatattaag

SEQ ID NO: 216676 - DNA, 412 bp, Glycine max
agcttgcagggatgatgtttcactatctcctgctcgtgtctcaggatgcatattctttgcggtgttatttgcactacatgcagaaagcagaaccgctactgcaatcgcgggaatcccgcgcaagatatatctcaaaatcggttgagatttgaccatgttgtttgttttcccttgaagtccttaacgacaaatatcgttataaaaaaatgccaagcgacacgagactaattacctgggcatgttgaaacaattccttaaggccaaatctgtggactaacgcacaaaattatatgctgtgaggataatctaccgccgaggcaaaacgagttcgagattacccgattggtgcggtcttggcgagcggttttacattgatttttataagaaaaagtgatacagaaagttaataagc

SEQ ID NO: 216677 - DNA, 367 bp, Glycine max
cagcttcgttagcgactaccgcgtgagggtgcctgcgtgtttcattaaaataattagagcaaatatgattaataatttgccgcatatagtgtcgctgaatattgtcggcctcgcgctgtttctttcctgatatatccccgttaatcatggattctggttgccgaatgatgcggatattatttatttctttaatcaaaaactggtcgaaagtaaagcctttctgtggctggttgcatagaccaacaatcgcgccttctacagttgttcactgctggcgatgggtatgttgatgctgagtttctggctgaaagacaacgcccctggctgacgacctatcgtgattatttggcttgtcatgctattaact

SEQ ID NO: 216678 - DNA, 407 bp, Glycine max
  unsure (1)..(407): unsure at all n locations
agcttacatagagcttttcaccatatctnctttaaatgcaagaaacaagaatcgatctctaaatcctctactgaagcagaatatcagtccatgtctaccgcatgctctcatattatttggttacggggccttctttcaaaacttggttattcacaagcaacaccaactccattgtatctgataatacaagtgtcatacaaattgcaacaaatcctgtgcaccacgaaagaacaaagcacatagaggtcgattgtcattcaatcagggaagcccatcgtagaattatcactctgcctcatgtctctacatctggtgaactagctgacatcctcaccaaatattgatgcttctagaatcaccaacatcaatttgaggggggtgttaataagaatgatagctagattatt

SEQ ID NO: 216679 - DNA, 374 bp, Glycine max
  unsure (1)..(374): unsure at all n locations
cttggcatattntaaatatcatgcaatattattaattattatctttgacgttgaagaaacaagataaaccaatcacatctttgaatgcaagccacacacctgaaccagggacggattgaaaagaacatctggaatcttaaatctgtcagctccaatttcaattgtcctgcgtaataaaaacaaacacataacaaaacaacaacagacaataaattacagaaaaaccagcagcaacaattaggctatgaagtacatatagtagcatatgaaatgaanaaatatattttgaagatgaaacattattcattccatcctcctccctatctcaatgaacaagaataacatcaacttactggccatcaggaagctcatat

SEQ ID NO: 216680 - DNA, 399 bp, Glycine max
  unsure (1)..(399): unsure at all n locations
agctataacctcatcgtctctcacagtctttatatttgggagccaatccagtccttgtgttcggactctcaaccacttatgatagccggcgatgatcccattactgcttcccctaagctctctgtcctttcttcacgccgcatcccatgccttgcgaactccttggagtaccctcgcattgtggtcactgaaacctcgtgcggtgaaaggcgtgatgctttcgtctgatagcactcctctcatgggacattcttcgcatgaagatagaatcctgattcttccttccttctagcgagggaaccatttaacagacgcccctccatgctagccaagagttggtgcacaacaaacaattcttgcgccgctctnttcacatccccggtcgaacgtgtcatacat

SEQ ID NO: 216681 - DNA, 324 bp, Glycine max
  unsure (1)..(324): unsure at all n locations
cgcttgcgagattcctcactgaanacgttactgatacgtttctatagcgcctcggcttagattttcttcacggtaacaattattccaagcaaattcgaaagagagagaagtgcctaatgggctggacacttccttcttgctttcctcccctatttatagcaaaatatgggaggtggttgccgcccaacttgcccatacgagcaggggtgcttccttcagaagcaaccgtcttctgtaggaatcttctggagggcccaaatgggcctgggtgctatttgcaccctcattcttactaagatcaccccgctctgctattttttgtga

SEQ ID NO: 216682 - DNA, 391 bp, Glycine max
  unsure (1)..(391): unsure at all n locations
agcttgcctgggtgagctgagctcgcctgggctatctatgnggcaaccacctcccctgttttgttaaaagatgggatttcggggcttccgggacacccgcaatgcttccgtaaaattcccataaccttaaaaagcatatttcacttaatacgagtgagacggaagagaaaaaagaagaaaatcaagtcctatatgcttccgtaaggcttccgtaacttttctgtatattacgaaagaaaggggtgaacttatcaaaattgggggggtgcaaatagcaatttcgaaatattgaattggcccttccaaaattattttttgaagttggattgcttctggaggaatccacccacctcgccttggcgagctgggcggcaacctccttcgccttttt

SEQ ID NO: 216683 - DNA, 335 bp, Glycine max
tctgagccaaatcctgactcaccatattatctgacccattgtgagaatgtcaatccttaccctcggaagaatcaaaggaaagaaggaagatttccaatcaatgagaaaggaagaaaggaaagaaagaagatttccaatcatagagaatggaaaaaaggaaagaaggaagatttccaatctaagagaaagcacaacaagaaaagaaggaaaattcccaatcaaagagtgggagaaagcaaaaagaaaagaaagaaaattcccaatcaaagaatgggagaaagttataaaggaagaagaataaggaaagaaagctcctgtcatggatcgaaagaaac

SEQ ID NO: 216684 - DNA, 306 bp, Glycine max
cgagctgcactgacattaacatggcctctatttttatttgctttcaatggacaggacaaagtctaaaatttacttccaacaacataggttcaaaatgaaattgattggaaagacaagacagcttgggagatctttgttcttccaagtcttgactaagaaaatttaccgatgctcctaatctctgagtatgctaaaaaattcgagagacaaacattgattgacgtgaaatgactcaacaatatcaaatctcatgacactttaagccccttgttgatttaaaacttcgcatcccaaagataatatatt

SEQ ID NO: 216685 - DNA, 414 bp, Glycine max
  unsure (1)..(414): unsure at all n locations
ntaacttcaagaccccgaacaaatagagtagctatgcgtattgttcatcgaatagaagnntagaattctttaattcgttcaatttacatgttatgttggaatgaaattatttgcatagaagcattgtgctgtaaacaaggatgcatttcaatttgcagtatatttgtttgtactgacccatgatgttatgactgctctttcatcttgcttacagtaaacgatacataatatagcatgacttaaaaagaaaggcacaaataacgagacctgatgtttgcttgcagaatgcagattgatttatgcttgaaggctgacaccttgccatattatctgctttattgtattttaacatgataatttaatgtgtattgaatcgcattatcttggacgtgccacttggtattggctagagac

SEQ ID NO: 216686 - DNA, 425 bp, Glycine max
  unsure (1)..(425): unsure at all n locations
agcttcttcaaaaacgtggcatttgtgtgcaatttattatgttcttatacaccacaacaaaatggtgtatcagaaaggcgtaatagaactttaatggatatgattaggagtatgttaatcaattcaactttactcgtatttttgtggatgtatgccttgaaaactgccatgtatttgttgaatagggttcctagtaaggcaagttcaaagacaccttttgaactgtggatgaatacgacacctagtataaggcacatgcatgtttggggttgccagacaganataaggatttataatccgcaagatagaaaattggatgcaagaacaatcagtgaatatttcatttgttatccaaaaaagtcatggggtatatgtttttttgtcctaatcatagtatgagaattgctgaaactggaaatgcaacg

SEQ ID NO: 216687 - DNA, 478 bp, Glycine max
tataaaacatgtgaagggattaagagatctaaccaaagatcatttaaaacttgagaaaacctttcaggatcaagtagatggttcagtggattggttctacactcatcaaaaggatattcaaaaggatttgaatgagcttaatgaactctacactcatcaaaaggaagaaagatataatcctctgagagagtgtgcacaaacatacaaagattatgatgaactcaaaatgagtaaacataatctttgggtggaatgtgaagaacacaataaatctatgagttgtctgaataatgagcttctaaagtatcaagaacttaaaggtctacctcaagatattgtataacttcatgaggaaataaagaccttataccacattatccaatgtgttcaatggaacaaataatctttacaagttgttaggataatatagaagttctactaaaatctcgaatggtatgaaggaaagtattgtcatgac

SEQ ID NO: 216688 - DNA, 403 bp, Glycine max
agcttccatcaagtggttatcagagcacaagtgcttttatttgtgctccttaaacctccattaatcttttactttaccttctcttccatgggtgtttcttcatttttctccatgtatctcctcacatgtcttgtgctaaatgttgttagcatgattctttaaagtttccaccgattaaacttgctatagaagctagatttgatattctatggatcagatttcttgttcttggtcttgaaccatgaattgtgttaagtttacgttcctttgagttttgtcttgttatattttgtggctgaaacctaaaccataaaattcttacaaatatattaaagtagaagaaaacctcaaaatctagagtgactttgtcacctattgtatgtttttcatagaagtcatgtct

SEQ ID NO: 216689 - DNA, 378 bp, Glycine max
  unsure (1)..(378): unsure at all n locations
tgtcaatgttgtgcaagggatatctgatgtaagctccattggagcttgaaggcctaagatcttcttcatcaatggattcctttgcttcttggaagatgaatggcagcggaatggagaacgaagagagaggagacgccacttcaaggagaagatgagtctagaagaagctcaccaccatagaaagccatggataagagcttggaggaagaaggagatgaatgaagggagatgaagagaagagcatanaaatttgtgctctaaaagagctctgaaatctgaaatntaattttcaaatgatcaaagttccaagaaatgcacacacatgacctctttttatagcctaagtgtcatacaaaattggagggaaatttgaatttc

SEQ ID NO: 216690 - DNA, 414 bp, Glycine max
  unsure (1)..(414): unsure at all n locations
agcttgnatataagaatgacgtatataattctttttattaatattcgaanttttattcctctattaatatatatgcgaggggtagagggtgtcacatatccctactcgtgcaaacctcaattcgaggggtgttcagtgttcaattatttgtccttgcatgtcattttcgaccgatgtaaaatctgtgatttctagtagtgcttgagccaagttatacagagaaatattgtgctggcagaatcatgttcagggatgattttttcgctacttgcatgctcgcagtaggagcaattcaatcgaatggcaatggtgttgtgggggatctagaggggatgaaacaaaaaactctagaataaaatctatttctcggatcaattagtgatgagaagtgatgaattntacaaaagctgaaaa

SEQ ID NO: 216691 - DNA, 427 bp, Glycine max
tgttcgcacatcgtccgcgtctatgatatccacttgactatgtttgaactagaggagaccttcaatcctaaaacgcaacgtggcggacaaaagtgggtagttaacttgaatgaccattattgtcaatgcggaaagtattctgctattcactatccatgtgcacacattattgctgcttgtggttacgtgagcatgaattacttccaatatgtagatgttgtttacacaaatgagcacatcttaaaagcttatttcgcgcaatggtggcctcttgggaatgaagcggctattcctccttttgatgatccatggacacttatccctgatccaagtataattcgtgcgaaagggtggccacaatcaacaaggatatgaatgagatggattggttggaaccatctgaacaccgataaaattgtatatatgt

SEQ ID NO: 216692 - DNA, 414 bp, Glycine max
  unsure (1)..(414): unsure at all n locations
agcttctaaactttatacaagaattattctcttattccacttgnnggacaagtggcctcaaatatcttaagaagggggggttgaattaaaatataacagactattccccaattaaaaattctacttttaatttaacccaacaacctatgattccttttaaacaagaactccaagataataatgcaaattaatcttactaaatagaaataataagcaataaacaataaaggagtttaagggaaaagaaaatgcaaactcagatttatactggttcggcgacacccttgtgcctacatccagtccccaagcaacccgcttgagagttccactatcttgcaaaatccctttacaagttctgaaccacacaaggacaacccttcctttgtgttcaaatttctttacaacaagagaccc

SEQ ID NO: 216693 - DNA, 458 bp, Glycine max
  unsure (1)..(458): unsure at all n locations
ggcttgnggagcttctatggaggctggatcttngagcttctatgaagtccttcaatggtgatattccaccatggagatgcagcataatgaaaaggagaagaggagatgggaggcaccatccactacggaataagccatggaagaaggagcttcacgaccaataacgtgccttggataagaagcttgaagagtatgctctaatggtggaaaataaagagagaaggggggagcacgaaattgatggaataaaagagggagagaagtgaaactctgaagtgtgtctcataagactgtcattcatcaaagttacaacaagtattacagatgcttctatttatagactaggtagcattcttgagaagctttcttatgaaacttccttgaaaagagtacttgagaaatctcccttgagaaactatagcttatctacacacacccctctaataactaagctcacc

SEQ ID NO: 216694 - DNA, 401 bp, Glycine max
agctgttagaactagatcaatgtaagaaatggtttttctctatgaacaactcttcttcttggttttggggtaacttattgtaattatatttctttctggcatttgtattagcttttgaatcttagctaacctctttggccttaagagaaatccaatatttctcctacaaattctcattctcactattatttctattttactctttttttgtatattatatatgattttgctttgtttggcaagatttagtttcagatctatctcgcttctgattaaagtttcaatatttggaataaatcttttagagcttcagcagtttaagaaatgaaaaattctctatgaatacataaacaaaatcgagttcaatatgtttcttactgagatttgtttttggttatcct

SEQ ID NO: 216695 - DNA, 400 bp, Glycine max
  unsure (1)..(400): unsure at all n locations
ctanttaaggagctagaagtgatagtgtctatttcttgtntctagncgaagttagtagaagttggtggttagccaaaaactggatgcaatctctgttggtgaaacaaacaaatataaactttctgtgcgttattctttctattgtcgtttttttatttgaactgacttaaggtttgaatctgatcttataagttggtggttagccaaaaactggacgcaatctctgtggttgaaacaaacaaatataaatgttttgagtcttattctcattattgactttttcttatttgaactaacttaaggtttgaattcgatctttgtatgataactctttctattttactaagatatgaaactattggctaatttatctcgcataagtatgatatttagctttcat

SEQ ID NO: 216696 - DNA, 152 bp, Glycine max
tttttccccagaccgaaggcaccaactgatccatgtgcccactcatcaaagattgctacaaaacaaatctaattaaacccaccctaaagagtgactctatatctaataggatttgacagaaacactcatcctggatggtgttcatgagttgg

SEQ ID NO: 216697 - DNA, 396 bp, Glycine max
cagctttctcttgcttagaaaagtcatttatcgttatgaaaaacaacaattcaacaacaattaataaaagagaagtcaagcttattgaaaagctagtaaatacttggaaaatatccatttgcaacatgttggtataaaaaagttacaaccataataaaattaattaaggcgtacccaacaagctttctcttgctttgaaaagtcattaatcgtaatgaaaaataacaattaaacaacaattaataaaagagaagtcaagcttattgaaaagctagtaaatacttggaaaatatccatttgcaacatgttggtataaaaaagtaacaacgataataaaattaattaaggcgtacccaacaagctttctcttgctttgaaaagtcattaatcgtaatg

SEQ ID NO: 216698 - DNA, 409 bp, Glycine max
ggtgactttcactaggatgcaacaataatatgtgctgcttactggatcaccattaaattaatcactctctaatatgcattaaatatgaaaaatatcaggattaatttaaggattcatacccccttaacgtctctatataaatgagcaagttcctatcctattaaacaaaccagcacctaatgtgacaaacatagaaaaacctaccaattacgtgaagtcagtgagtgatattcaaggagatgagtggtcagaactaccatatatcaaacacctcaaaacattattccagttcccttctaaatcacaagcatggcatatctgtgatccctagtgatggtgatcacacatcaattgagagggtaatcagctctagtcatcatatttggcaatcgcgtgactcctacaatat

SEQ ID NO: 216699 - DNA, 458 bp, Glycine max
  unsure (1)..(458): unsure at all n locations
gcttgaagggaagagaaagaccaatcactagttcatagcatggtcttgaaagaggagttagctgcttgctcaaggtccaaaagatacttgtctcagcgtttatgcgagacagagaccaacatgttagccatcatcaacaagtaccaagaagactaaatctagccacagcccacgagcataatgtggcagacgagtatgcccaatgtggatggaccgatttgctcttacctagaacgggagtcaagaaattccccgattgctagccaaggtcaaagcaatgtggatggactgatttgctcttaactattgtcagcatatgatagacttaatggcccatataattagaaaccgctacgaagtttgtattggcactcacatcttaactagttataactttctaaatataatgagtgtatcccatggttttacgtcanaagattagtgcgaatcaaatcact

SEQ ID NO: 216700 - DNA, 425 bp, Glycine max
  unsure (1)..(425): unsure at all n locations
gcttcatggtgaatcatagatgattcanagtgtggtttgatgataacaatgatgataacaaaagatgatgacataggtgatgacaaaaagctcaaagatcaatcaaagaacaactcatgtgaatcaaagatcaatcaaagaacaactcaagtaaataaaagatcaatcaagaacaattcaagagttaagataagaatcaagaagaattcaagactcaagaagaaagtctagagacaagaatcaagattcaaggttcaaagatctcaagaatcaagatcaagattcaagactcatgattcaagaatgaagagaatactctctctagatttgtattaaaatagtgttcataactttgaatagctcatgaattgtcgacataaccttttaaccaagagtgttactctctggtagtcggtaccatattg

SEQ ID NO: 216701 - DNA, 438 bp, Glycine max
  unsure (1)..(438): unsure at all n locations
tcagacgaatatatttgcgtaaganataacctagtcaggtcatgtgtcactattcaagcccttcttgtgaccaaataatccatgtcaagtgtggtggcaaatcttatacatcctaaaatgaggcaatggtatgtttaaatcttggacaagttgtttccaatggtgatcaagactcacattctatcaattccacttagcatatgtgtatatctagacaaacttatttgaagtttgtagaggataattgctacactattaagtcaacatatcattaggttatggactcggataacttcaataaagcttcctcaagtgggacaatgggagacttatggaggaacatttggaaagttcctttgatcctaaaatgtagaaatatcatttgggtgcaaagatattctactagtatgccaaaacttaaagatatnaatagtgtca

SEQ ID NO: 216702 - DNA, 240 bp, Glycine max
gctaacggccaagactccagaatctgtatttagaatcagaatacacacgaacactacgagttgcttgtgagagccattgctctacttctggctgccccgtgttggatactctacatagaggtcgtgtggaaaacaccctgcaacactgcgcatacactaagaaatacaatgagcatgaaattcctatcacagtgcgaatgatcgtctttctaaaagaaagtacgaacccgtggaatgccc

SEQ ID NO: 216703 - DNA, 382 bp, Glycine max
  unsure (1)..(382): unsure at all n locations
gaaccatgctatgtgctcgcgactggtccctttcttcccttcgcaacttgagttcattattgctaccccatagagctccgcgaaatttgttccggccatactcttacttgcgagccctcttggtctcttgatcaagggctcttgcgagaattgcattctcttgccgtaacccggcacactccttccgaacgtgtgtagcagccaacttgaacttctccttggcgagttntgcctttcctaactcgcttttgagagcttggacttcttcgtcctcttccggtgcttcaaaattctcttcgctgacgacttttaacttggcgagccaatctanacctcgtatgcgaactttcatccattcgtgggcccacccatgatgccatta

SEQ ID NO: 216704 - DNA, 442 bp, Glycine max
agcttcagcacactatagatgacaatgcttctgtggccgcttacaatacatctagggaagcggatgcactgctacaccccgcaagcaacttgggccgatatataaatgagacgggctttaatcgtggctatagtactaaagcataccacttatggcttgcctccagactccactccgcgtattgttccagacgagttgagccaaacccctactatggaggggcagttgccttctcatgccgtctattctctgcaagaagatgatgaatgatatgcctcatctaagccctgtacttcccctcaatgaaccatccccccatgagtagccccaagcaaacatagtccgccacataccgtctccatgctggcccattaaggaacctcgtccctttgcataagacatggtggagatgtgatctactttaagagaggctgacagcggt

SEQ ID NO: 216705 - DNA, 367 bp, Glycine max
  unsure (1)..(367): unsure at all n locations
agctngaaggcatgtaacccaccattttctcattttataacactggtaacgcgtctactatcattgttatcacctccctccccatcattgggggcactacttgagttgccagatcccttcacctttgggcgtattctttgaaagattgatgcttcttcttacacatgtgatgtagttgcattctatccggagccatatcaaaattgtactgatactgcataatgaaagcaaccattatgtccttccaagaatggacttgcgaaggttccagattagtataccaggtgacgactgtcccagtaagacttttctggaagaaatgcatcaacacatttttatatgtcgagtatgcccccattntcctgtt

SEQ ID NO: 216706 - DNA, 367 bp, Glycine max
  unsure (1)..(367): unsure at all n locations
agctngaatagatgaggattatccttttcttttaatgtgcatcacgaanaaacttcttctgttgatgccagttaaggtcatgagggataatctcagctaccttgaagttagcaatggctagtaactcttgtttagtggtagcaaagttcatatgtgcatcattttggactttactggcatagtaaattgagtgaagcatcttatttgcctctgtcctagcactgcaccaacaacgtagtcactagcaccacacattatttcaaactcttggctccaatttggggccacaatcactggtgctgacaccagcctccctttcagggtgtgaaaggctaacatacattcttcatcanacttaaacacaaca

SEQ ID NO: 216707 - DNA, 302 bp, Glycine max
atctaaagatggaactcttcaaaaagggtttgacttttccaaatgggttttaaatcttttcaaaatttattactcttctgaatgaccttcttgaccagacatgaagagtctattatagcaaggctttgttttgcattttgtaatcaatcattccaatcttgaatactttttcaattcattcaaacaatcctttacaagccttgaatctctttgaacttcttcttctttgtaccaaaagctttctgaagttttctggttttccaatccttgaaaacctgtgtattcatactttcattctcttc

SEQ ID NO: 216708 - DNA, 407 bp, Glycine max
  unsure (1)..(407): unsure at all n locations
agcttctacttatgtggcagggcgggcttccctcactttcttgtctccaacgcgagctntgaccactgctcttccttcccgcgatgcttcttttcatatccgcctgagtgggcttatagcctaaaccatacttcccacgatttcctttggcatttaccaggctagttatgccgccgttgtctttgcctaaacccattccgggttcataaccgttccccaacataactcgggccatcattactgctgcatcggacaggcaaggctgcccagagaaggagtccacggaagaaatgttgaccacctcaaaagactggaaagcggtttctaacgattcttctgcggcttccacataaggcatagaggatgggcagctcaccaagatgtcttcctcgcctgacatgataacc

SEQ ID NO: 216709 - DNA, 377 bp, Glycine max
  unsure (1)..(377): unsure at all n locations
gaatgtaatcaattaccagtggccaaattgatttgtgaaacagtttttacaaatttcgaattgaattcaaagcctgtaatcgattacataaggtatgtaatcgattaccagaagttgaaactatctctaacagctattagaaatttgaattcaaactttatagcttgtaatcgattacagcatttgtgtaatcaattaccactaaggaattttcaaaaaataactcccaagagtcacatctattcaaaagattnttgaatggccatcaaaggtctataaataggtgacttgggacacgaaatttcttagagttttcctgaacanattgtcttatcctctcaataccaaattgtcttataactctcanaaagaattcc

SEQ ID NO: 216710 - DNA, 489 bp, Glycine max
  unsure (1)..(489): unsure at all n locations
gcttcaagagggagtaccagcttgcatattgtctctgtctagagctggtattaaaattcgggttcttacaggggacaagattganacagcgataaacatagcctatggtgagactgttttgaattagacccattttttttcttctttntatgcttatgttaatctgcccaaaagtgtagcagcagttatctcattttatatcttttttccaccttgctgcagcatgcaacttgataaacaatgagatgaagcaatttgttattagttcagaaactgatgcaattagagaagttgaagacagggtactgtcacttttcgctatcatgttttgctcatagttcttagttnttctgactgcaatagttgcattggtttgtaatttatttagggtgaccaagtggaaattgcacggtttattatagaagaagtgaaaagagaactgaagatatgcctcgaggaagcacagagctcctttcagtccctatctgg

SEQ ID NO: 216711 - DNA, 273 bp, Glycine max
acatccgagaacaagtattgtactctgaatccgcccacggctccggcattccatttcgagcgtctcgatatactacgggactcaatcggacatcacagcaaaaagatactgctgcttgaatatgctcacagctcctggattccatttcgagcacctcgatatattacgggactcaaccacacatccgagtaaaaagttatcgcagcctcaatttgctcatggcttcggcattccatatcgagcagctcgaagtattacgggactctatcatac

SEQ ID NO: 216712 - DNA, 289 bp, Glycine max
caaaaaaagaggtgacctgacccgaacaacaattggaaataaaacaactaccggggggaaattttcattttttccccaaagaaccaacgcggcaaacacgcaaacccgaccgaggcgaggagcccgaaacgcaaaaccgaaggaaggggaccgacaaacaacacaaacgcgaccggagcggggagccgcagaacgaagccgaaggaggcaacccggcaagcaacacaaaccttaccgaggcgaggagccgaaaacgaagccaaaggaacgacccgacaaacaacacaac

SEQ ID NO: 216713 - DNA, 501 bp, Glycine max
  unsure (1)..(501): unsure at all n locations
gttacctgcngcatgcaagcttgtaattcaccctatacaataatgagttttgttggcattggcgacccttcccttcaataatggaaaccctaaatatttcccacaattgtaggtgtgaggaatgcccatgatggagtgaaacttatcaattttgttccaatgcatattggaggacacattgaatttgcttttctgaatattaactntgagctttccttgatgatatgaacttcactagacttggcatgagcaaagagaagaccgccatcatcaaaaaacaagcgagacaccatataaccatctttggataccttgataggaagccatttgccttcaataactttctcctgaataagtaaagccagctcttccatacaaagaacataaagataaggtgacatgngatcaccttgtctaagacctctattatgagcagagctatcaaagttttcaccatttcactttatagacaagtaataagttgtaatgcaattcataata

SEQ ID NO: 216714 - DNA, 375 bp, Glycine max
  unsure (1)..(375): unsure at all n locations
cgatctcagagtcacctgcggcatgcatgcttgcagaggtcggtggcagactcaagaatattgtgttgtgtagaggctntgtctcatacctccattacacttcatttgtacctgagcttgcttccctatttttattaattttgttcatgtttatgtgtgaattgaatcttcccctccaggaccaaaagataaaataattggacatataagaacctttttattgggatagacaccaaaatctaagaatacatgataattatctatcctgcaaacttaactcaggataaaaagaaggagcacattaaaatcttatagggatagaaatgatatattttaccctatggtgtttcatgcttgacttaactcttcacattt

SEQ ID NO: 216715 - DNA, 405 bp, Glycine max
  unsure (1)..(405): unsure at all n locations
tgaaagnacgaatgtagtcaccaatactttgaccatcttccttgcgaaggtacatgatctgttgacggagtgagaattcatgttcttgagtcttccacatacaagtctttaagtgcaatccaaacagtgtgggtagtgtctaagccaacaacgagtccaagtgcttccttagagagtgttccaatcacccaattatctgccttgtgccaagcaatgagtttgtcagttaattttgaaacaaaattatatgtttgttgccccattggaatttgatgtggtgtattgagtatgagctgaatcatcatttgtaagatgaccaaccaagtcttggctgtctactaatgctaaagcttgctcacgcatacggtagtttgtggtggtgagcctcatagtgatgatattgtc

SEQ ID NO: 216716 - DNA, 448 bp, Glycine max
  unsure (1)..(448): unsure at all n locations
agctngtgaaacaatatgaattaacttgtttattttaaactctagaaaaatcgtccacaattaactcaattgcacttaaaacatgtcttagaaatagcaatccactatgtgtacctctagttaactgtctatgattaaattttcataacaacaattagaaggaaagaccaaattaaaaataaataaaagcatgggatccaattaaaagaaaaaaaattcaggaatctaattaaaattttaataaaaatatggagacatgtaaaataattaaacaatttgagacacttttattttttgtgctccaaattttaaattttttttatccgtccaattcagaaaatgctatttctagtttctcttcatggacgctgttagaggcaaggcacaggtgtcaaacgatatgcaatttgtaacaaaatttaatcattanaaattcattttataattt

SEQ ID NO: 216717 - DNA, 417 bp, Glycine max
  unsure (1)..(417): unsure at all n locations
agcntttcgcatagcttatggtagaatctgtgacctatccatggtagaagtctccatagaggccattgcctccctcgcccagtattatgatcagccgttgaggtgcttcacctttggggacttccagctatcatccatggtggaagaatttgaagagatcctatgatgctctctatgggggaggaaaccatacctcttcacagggttctatccctcattagctagaatttccaagatagtccaaatctcggcgtaggaattagaccaaaggaagtaagtcgaatatggggtggtcggaataccgagaatatatttggaggcataagcaagaatcttggcagataaggcgagtgggccccgttcatagatattctcgctctggtgatgttcggaggagtactctttctgatgtggatg

SEQ ID NO: 216718 - DNA, 400 bp, Glycine max
  unsure (1)..(400): unsure at all n locations
agcttaacgcacaggagcgcttagcctatgtctacaantttagaaataggagaggattggggcttagtgcaacatactggtgttagctcaacctcaatagaaagacactgaggcttagtgcacaggcgcacttagccttattacaaaggtgaagaaacataacccaagtgacgcttagctcagcaagcatggcttagcgcctgaactactctaagtatctcaatatactattgacgcttagcgcacaggcgcgcttagcgtcagcatcgttttggttcaacagccacgatgaacgcacttagcgcgacatggtccgcttagcgtgatcatcataaatctaaaaaaatttaacagttgcgatgaacaggctaagtgcagtaggagcacttaacacgatcat

SEQ ID NO: 216719 - DNA, 217 bp, Glycine max
tctctgaggaatataattgaagaacatatttcaagatcctcgtattttgtttcttatatcctgaaagtatcatgattcactagtgattaatacatgaataccttgtaagattaatttaaactgaaaatactctacaacaaattcactagtaaaaaaataagtttttacatcgtcttattaacaacaattatttgaaaatcgatatcgttaacaccta

SEQ ID NO: 216720 - DNA, 475 bp, Glycine max
  unsure (1)..(475): unsure at all n locations
agctagtagcagtagttagccttttttgtatgatggttgntttctcctaatcgttagggtgtaatggtatttggttgtaccctgaataagcatccatgaagctttgatattcgtagctggaggatccatccagttgtttatccacgtcagaaaataggtacgagtcctttggacaatgcttgtttatatgatcaatatagtcaacacacattctccatttttcgttttgcttttttaactatgatgacattggctaggacaattcttgttcatattagtatagcaacatacatcttcattttctattatgctttttgactaggacgacattggctagccaactcatgtacctgatcttctagtcgcttgaggccatgtttctccttctctagcacacaagttgtagtgatggatctactggcaaattataccagaagaggtttgatctatgtnggcatgttatcgatttcataca

SEQ ID NO: 216721 - DNA, 419 bp, Glycine max
agcttcacaaccaagccaatgaataatgtctcatgtgataagaagttattgagtaggtatttctattacgtttaaataaacacatcctttgttattgtttaattaaatatattttttcattagtaatttatattttaatttatatacaaaatctttcattacttttttttaaaaaagtattattatttttttcaaaaattaacccatgtgtataacatccatgaagcatagctactcaatgcctcaacatatttgaaagagaaaactctaaagttcacgagttttcaccaatcaagagcaaaatatgtaatcgtatgacttatcctaaagaacttgctcatccaaagaaatttccttaatgatgcaggaattatactccaaccagatgcacctaagtatggcttgatcgcacacataac

SEQ ID NO: 216722 - DNA, 316 bp, Glycine max
  unsure (1)..(316): unsure at all n locations
cgtcattggaagtggcggagacaagctttgtggttgatttatggatggcctttgtggataactgggtggtgggtaaagaagaaggttgttattgactgattaatgacattgttgggtttggtgggaaacttggccgtacaggaatgggaatcacagcatgggtttttcccttatactaccctctttatttgcccagttttctcaatcgctaagcaagatgattaatttgcctctttcaatccactttatccttcattgggaagaccaatncgaaagtttgaggtgcgtacccacatcctttatatggatatccata

SEQ ID NO: 216723 - DNA, 389 bp, Glycine max
  unsure (1)..(389): unsure at all n locations
tgaagatgaaagctaaaaaaataagaaatgaattgaaagtctcggattcaaaaacttacccgttgaagaacgaagaacggtgaagaacgacggaaaaccttcacggatttgctcacagaaacgtcttggaaacacctcagcttggattttcttcatggaaacaattttttttcacccaaaacagctgaaatgcatagccaaaggggttagggatattaggaacaacctcccttcgcctatttataggaaaaagggggaggacgttgccgcccagctcgcccaggcgatctgggttgnttnctntanaancaaccctgcttcnaanatattctggaaaggcctatattctataatctgataattgctatttgcacccccatctttgatag

SEQ ID NO: 216724 - DNA, 286 bp, Glycine max
tttccaggataaaaactatgtgggtacgaattgcacaagtaccccaagcacagctcacattgttccaaagttattctagttgcattggcctttacactgactaactcttacctttttgataccaaaatttttgtaacactttcagatggccttttaacaataaccttaaatgaacaattgcattatctctctttggcatatcactaaactgactttctgaatggctgttaaaatgaacatgtgaactctgcttctgttactgtaagctcatctcatgactgctgtt

SEQ ID NO: 216725 - DNA, 468 bp, Glycine max
  unsure (1)..(468): unsure at all n locations
agcttatgtgatgaatattacgatgaatctttttatataagctcaaaaaaggttataagacaagagccttgagctagtttggtaagcccaaataatctctctccttagaggttcttccgaatgcctccaaaatctactaataggagtgtgtgtaattgatgagtntaaaaatatagattatctccaatttaaaacaaagtaaagactccaacaagaaacaatttaaagactccattgttcatacaatgcacaatttatctttatggcaagtttaaacacccaaacaagatacctaacacaccattaatattcaatttttggattgaaaagactaactgcaaatggtattctcaacacaatgatcgcacattggtgataagtcctatcaaattgcatcttcctttggacacacacaatttgcatgaatattgatacaatatttatgtagatcaatcaaattcacttacg

SEQ ID NO: 216726 - DNA, 288 bp, Glycine max
atgaacacccacaaactaagacggaaatcgagcagccacctcgacacaagaagagctaaaaaaccaacaaccttggaaaagccctagcagatcattggaggaaatcagagcgagggcaaaacgggtacacaccctacctcacaaatatatatgagagggaaaagccgagggagcaatgggacccggggaaacctacaataagcaaaaactcattaagcaatacgaccattataaccaccgagggtcataaacagatcatcaaggaagtatgacataaaagaaaaaggg

SEQ ID NO: 216727 - DNA, 384 bp, Glycine max
  unsure (1)..(384): unsure at all n locations
caagctnancaagagatagagagagaagacacctattttttcaantaacactgaagatatggaggacatgctcggaacaaccgggatcaaccacggacggataaatgctacagagaaggtcatcgaaccaaatgccgatctagagaagaaacggacgtccttaagagcaacaggtactgaagatatggaggacagactagccagaatcgggaccaaccatgatgggataaatgatgccatagagccaaaagctgatccatagaaggaaaagatgatcccaaatgcaacaactattaccgcagagatagagcacatacaacgcaaaatcgggttgcaccaaaacaagacactcgaagaagatatcatgagagaccccaaatccgc

SEQ ID NO: 216728 - DNA, 432 bp, Glycine max
  unsure (1)..(432): unsure at all n locations
agctnntgggcagaggacatatataacaactctatagttntaatttagagttntttggagaggagaagaattctatgattttagaattccagtttttactgttcatgcacactgttcatgtagaataaaattcgttttctgcaatttcgtttctgcttcaatctacaatttcattttttgctgattaatggaaggctaagtctccagcgttattttctcttgaggatcaaacacaactctctttgaggttttgttattactattgaattctgatcagtttttcctcttcaccaattactctgtacttgttgctattaatccatgcatgcttagtgcttgattaattatctttgcgcttaatttacgttcatgcttaatgatcagtttcggtcatgattaaatggtgtatgtgttgcttaatcacataatgac

SEQ ID NO: 216729 - DNA, 275 bp, Glycine max
tgatgatcatggaaagcttaacacttatattcaaggatccactcccaaccacgatgaatttgcgtcctagtttaatattgctggacaaatggcctcaataacttaaaatgggggatctttaatccccttttaaatgatatatgataggctcaaaatgtacaagaagaacaacaattaattaatcatattctgtaacgtgcaaaacaaatcaattgcataaaataatgagatatggaaaaagaatgcaactcgattatattggtcggcactcctgt

SEQ ID NO: 216730 - DNA, 490 bp, Glycine max
  unsure (1)..(490): unsure at all n locations
gcgatcttaagtcacctgaggcatgcaagctaattngaactcgagactttgcttaattctatattaatnggntctccaatataattcacgccatacatgtcatcagtgcgggattttaaccaataatttggaggagacaaaataagattttatgtataaattaaatctaatatatatatatatatatatatatgcatttttggtttactctcccgtgattttacttgatgtgatcaaattcttgactttattagatcagacttttacataaatagatattcgctgcctttttataggatttagttgcaatcattgagttgggtctatatcctccaatcttttttgcgttgcttgattttttgaatgaagactttggtatgtgatagatgatcatttgactctgggtgtccacataagatgtcttaatttattgcgatactatcatattaatgtttataagaaaatactttctcctatttatagagattat

SEQ ID NO: 216731 - DNA, 301 bp, Glycine max
agctcgaaactcatggagctcatcccctcgctcatctttctccccactttcacgcctccgattttgaggcgctctcccagagcgctcactttctccatcaaaatctcactcatcttcttttccttccgacgcaaacacaaacaacgcgtaaggactcggaaaagtctttcctctctgcctttctctttctgattacaaagatattttgtctataacttatttaatacgcattgcattcactcttatctttttaagagcacactatttactaccatttaaaaaagactaatttcaaaatttt

SEQ ID NO: 216732 - DNA, 466 bp, Glycine max
  unsure (1)..(466): unsure at all n locations
agctttttaaggtgcagcctgatgttttgtgttcnttagnatttgttgatttagcagctttgtttgaaattcatgtattgattggtttttagtggtcttgcgtttctctttgtctgcattggtgagaggagctgaatggagtagtaggacatgtgattggttgctttttgttattgtgaacttggctagagtataccagattagttaagcaaacttggttctagtataattttgatgtgcttgctggttctatcctttggtttcatagaatagaaacaaatggtttatggtcagtattttggaccttcagcatattattgttagaaaaattatgactgttccaagacttgtaatgttgtatggactgaatgtcgggcagtaaaaagacaacaaagaataaatgcattattagaaatgtaatggtgcgtagatgaatgaactactanacagagatattagaatgatg

SEQ ID NO: 216733 - DNA, 217 bp, Glycine max
tttctcaacgtcaaactttgtatacggcatatctctgataccagtttggtgtgcttaatcgtctatgacgtgaaaattatactgcatagaatctctttattaatgatgaaaagaaacaactacaaagaagaattctcttgaattcgttttctctcaaaactctctgatggttcttgatggaatgaaaatctatataccgtaatgacccctttattat

SEQ ID NO: 216734 - DNA, 354 bp, Glycine max
  unsure (1)..(354): unsure at all n locations
agctngaggatagagacttgctaatctattatcttctctctcaaagaggttctctaactntctagctatctcactctaagaagcggattcactcttgtcttggatggttaggaatgaaggctcctacccttatttatactactccacctccacaatgaatggtggagattacttgtatcctagggtggagattaattctctagaattctccacacattctaagagactctacacttttctactctctctcatatcattccataggggttcagaaggctccacacatcctcaaaatattgtagaggtttccacattctctcacaagcttctagagagatctacactactctagag

SEQ ID NO: 216735 - DNA, 214 bp, Glycine max
ccaacaacacattctcttaaggacgaattgaagacaaagattatcaattttatttgacagacttactcacttgacgaatccaacactctgtgctcaacaagctgtaggaactctcatcatatacatagcatgtgtgatccaattgaagggtgtgagacaaagtctggaaaaacactatcatcatgtaatagataactcactctataagaaaagg

SEQ ID NO: 216736 - DNA, 274 bp, Glycine max
aacacgcgcgcacgaaaaaaagcttttttaacacatcaaaaaagattaacgacccacagccccttggatttccctacaactgaaaacatggataactatgccagagcagaaacaaactcggaaaaacggaatgatcaactccaataggaaagaggaaagactcgtacaaggaaaaacaactcaatgggaaaacacccccatcagaatagaccgaagggtacccccgcaccacaagtagacgcgaacaaccagcacgagaactgaaaaaaagcag

SEQ ID NO: 216737 - DNA, 401 bp, Glycine max
  unsure (1)..(401): unsure at all n locations
agctnagagtactaagcgagctcttactttgttactaaactcacaacaagattcttgagaattttacccatctattgtatcttggattcaactgcaaagatcctcacaatgtatcaaactaacggtaatctctcccaaaatattatggtgaacaccatggttacctactctaaatcacgcatacacgaaatcttttcataagtcttaaggtgtgaagaaaacattgaacactatttgtcctcctaccagcactcctctaaacttaaaaattatttcaaatattgtactactccaataacgacctacacggctaagatatcactcaacggtttatagtgacaaactcttctaggaacttatggcttactccttacaaggatctcacctggaaagttaactta

SEQ ID NO: 216738 - DNA, 269 bp, Glycine max
tactaagctcaaaatcttattggttaaacagcctccaccatgttccttattttaatgggaaatatttcttcaatgtggtcttgatgaaaaccacatggatttatgcctataccacaagggcaatgggatgaaaaaacgcttgcctattttatatgtagatgatattttacttacagcccatgatcgatgtgtactacataaggtgaaacaatttctctctacaattttaacatgaaggatatgggtgatgcatcttatgtcattggcat

SEQ ID NO: 216739 - DNA, 365 bp, Glycine max
  unsure (1)..(365): unsure at all n locations
agcttaacatatgaggaagaggctctcattgattttctnctacancanactcaaactggtccaaataaatgataaagtcactctcgactcaaagaaagtcatataagtctcatacaattaatatagaacctatattctaatgacacatcctatcagagcgcggagatctcgtgtcctctagcatgacgttctttataatcatccacctatatatatgcttcccctaacacaagttgaaaattatcacaggatccaaacacatcaacacacacggagtgagttttcacattcctagctaatagagaaactagacgattcaatatttatattatataaatgagataccacttgcttaaacataacta

SEQ ID NO: 216740 - DNA, 471 bp, Glycine max
  unsure (1)..(471): unsure at all n locations
cttgatctaccaccaccgtcgccaccatcatcttagntnttctattatttntaatattactagtacttngttttctagccgtgtatntggctatattatgacatttgaacaatntagtattttctttatttgcatggtatgattgaacaattatgaattatgttatatgactatgtggttntttatatatttgatctattcatgtttcttgcttcatgattggtttatattcttcaatgaatgtcttgtggatgattagtagtgtatgtatgttttataatgtatgtatgttttatacttgttacacacttttggattttgttgatgccaaagggggagagaaatagggattaaatcaagaactcacataagtaattaacttaatttcaagtaaagcatacactcanaaacaaagggggagaatatggaaatataagtgagtgatcgattangaaaaagtgtgtgtatgtg

SEQ ID NO: 216741 - DNA, 472 bp, Glycine max
  unsure (1)..(472): unsure at all n locations
gtcacctgcggcatgcaagcttctagccaagcaactagagaccctcttatatatgattatcaagcttcgtcaatagttgcaggcagtgcaacctgctcattcttcagtcatgcacattgtgggatacaacatttgtggtgaggcccatgagtcangcatgtgcatagtccaagacgatgtatccaaagaagtcaactatatgaccaatccacaccatcaagggttccatcaaagagaacttatagcatacaatcagggggaaatttctctcaaggccaaagttggagatcccaccccgggaataacttcaacaaaaatcaaggaatttcatctaagcggcctttcaatcaagggcctaatttatatgagagaaccaccaagctagaagacactctgaatcagtttatgtaggtttctctatcaaatcataagagcactaagtctttcatctagaatctagaggtacaagtgg

SEQ ID NO: 216742 - DNA, 477 bp, Glycine max
  unsure (1)..(477): unsure at all n locations
agctngatgagttcttttatcttgtcctttattgcgtttcattactctattgagtggccatgattgtggtggtaccgacaatgttatgagtagttggcctttggtggggtgttagctcttttgggcatggtcacaatgttgatacctagggcttgatccatgatataggttctattggcgataagatgagtgtactgggtaaagtgtagctctcgcaacgatcgatccctcctcttgttgtcacaagctttgttagagttgggcttgtcattatctttcttggtcgacaaggcatcagcccgcacctggttctagtactcagccaactcctccatctgcatatacttagccgctctcgttcacagtttgtcaagatcaaatgccagtttctttcgtagtttgttgacaaaaggtctcagttgtaacattattatcaatttgtgtatagccaatactgggtccaagtttcggatattc

SEQ ID NO: 216743 - DNA, 424 bp, Glycine max
  unsure (1)..(424): unsure at all n locations
agcttaccaccataggaggccatggatattatcttttaggaagaaatagatgaatgaagggagagaaagagaagagcacggaattttttgctctgaaagagctctgaaatctgaagtttaattttaaaatgatcaaagttctcaaaaaaatgcacacacatgacctctatttatagcctaagtgtcacacaaaattggagggaaatttgaatttctatttaaatttcacttggatttgaaattgaatttgtggagccaaattttggagccaaaatttcactaattatgattagtgaattntagttatggtttggcccactaatccaagatcaagtccaagattctccacttagtgtgcttaggtgtcatgagacatgtaaagcatgaagggcatgcataaagtgtgactatatgatgtggaatg

SEQ ID NO: 216744 - DNA, 229 bp, Glycine max
catgggtaggataagtcacttcttgtggtctcagatatcttgaagcatatgtagtcactcttgcatcaaaacataaccaagttctttgcctgatgcatcgtaatacactctgaacctctttttgggaccaggataaaatcaagattggtgcagacgtcaacttcttcttcaattcctggaaactcgcatcacaagcctcattccacacaaattcttggccttttcgagt

SEQ ID NO: 216745 - DNA, 348 bp, Glycine max
  unsure (1)..(348): unsure at all n locations
agcttagcacgttagaatgagatccttttttttnatcccacagaaattanagaagacatgactctcgaagcaactcatggcgatgtttgtgaaatgacttctacttggttccctcacatcaaccataatatatttttaagaagagacagaaaaatatgaagtgaatgtatttcgactagtgatgagttgaactcgcatgtttgaaaactacatatagatgaaatcatggcgagtttaccataaaagcgattgtttgctgtgttcaaaaatcttaattagttcaacccaccaccaatccaacacatttaactcatttcgaagattggtcttataatgggccttaagatc

SEQ ID NO: 216746 - DNA, 310 bp, Glycine max
  unsure (1)..(310): unsure at all n locations
caaaaccgcatcaattaccggaactatctnagaactgatcgcaagacatcatctagtatgttcatataatgctgaattgctgaataccaaacagctcacaccatcgaaaggaatatttcgaaaaagaatgattaatatcacaatattattggcaggcatacctcatctggagcaacaaaagctaccgcatctggatccatggaaccaccacgatgtaatgatatatcagccctgaacacacacggtaataacaattctattactgcaaccttctctgcgggacgcgttccactgatcctatacttagctt

SEQ ID NO: 216747 - DNA, 402 bp, Glycine max
  unsure (1)..(402): unsure at all n locations
agctntagaaggtgtggaatctaataggctttcttcanaataagtttaaataaagacaacaaataataagtatgaagcacatagtaataaataaatagctatatttcataaaattgaagatagtgtgtagccactaaagaattgcatacaacctccttttctgtgataccaaatggtaacataattttgtgggaaaagcttcctagtattaagactttctttcttctagttgtatcttacaagattaccgcaagaatatcatttccaagtaactaacaagaacatacaaagcttcttttaaacatatggcagtaacacagtatctaagaactactacatttatgaactttgcatttaccatagaacanatttgacacaaaaataacatgtgccaccaacata

SEQ ID NO: 216748 - DNA, 312 bp, Glycine max
cacttgcatgccttgagtcaactcattccctgcaactttttcttcaaatagatcccaatcaattttggtggtttgtgggtcatgattttaataaaaaagaatggttgtgaaacacaacaaataagcatgatgtaacattctatttttcataaaataaattaaaaatgatgttatttaaaataaatagaatgttaagaaaataatgagctttgttaattaaataaataagagaaataattttattaattcaaataataagtttcacgtaaataattaaatatatgtttttatgaaaaaaattatttattcatt

SEQ ID NO: 216749 - DNA, 414 bp, Glycine max
  unsure (1)..(414): unsure at all n locations
cagccccttatgcacttctctctctcgaaatagctgaggaanattaattccgtgaagaaaatccaagccgaggcgctttcgtaacgtttccgtaacgtttccgtgagtaattacgcgaagattctcgaccgttcttcgtgttcttcagtcttcaacgggtaagtacctcaaaccaagctttttaattcattctatgtacccgtggtggtccacattttgtttcatgtatttttattctcattttcatttactttttatacccctttntgacgtgcttaagccagttattntagtcattcctcgcttaatctaaaaataaaataaatttccaccgatcgtttgaattgtatcatccgttaatttcggttaaaatgaattccgaccgttcggtcgtgccgtaaccacgttggaaat

SEQ ID NO: 216750 - DNA, 480 bp, Glycine max
  unsure (1)..(480): unsure at all n locations
caagctttatccatggcctactaggtggtgatcttcttctatactcatcttctccttgaagtggcgtctcctctctctcttccttctccattctgctgccattcatcttccaagaagcaaaggattccattgatgaagaagatcctaggcctacaagctccaatggagctaacatcaaaatatatcacatcccattagctaaaaacacagttnttcttgaaaaccagcatgcacaaggatagacatacatccccataattggttcactgaccccaactatggtatcaaaagctgtaaacaaacaataaactcccctcacttatctatatctctctgttagttccatgcggtggttgtctaagatctcttangttcacgtncgttcgtccaaacgtagagctctatataccaaatcatagataattcagtatagatttcanagacaaggttaatattaactcgtggggtcaaatacccatt

SEQ ID NO: 216751 - DNA, 314 bp, Glycine max
agcttattggcatgtgaagaatgattagtgtcatgttctattgaagcaagggcaaataaaggtacctcacaatcttcttgttggctcttattgttctttccttcgatcccggtgatgatctcttgtttgacccaaacaatatgaataagcaaaattatatctcaacccatactaacaaagtcggctttcgggtgttattaatttgaaagttatagtatgaatcctattcttaagtgagagcctattattgaaaattatggaacatctttgggagaacgggaaaatggccatcttttccatatttataatatttg

SEQ ID NO: 216752 - DNA, 387 bp, Glycine max
agcttaagaacccaaacttgtagcttcaatgtttggaaacatgcttatggctaggaatccaaaatttggttttagaattagaaaaaacatgataattacgatttgcttgtgagagtttttgctcgaattttggctgccccatgtttgatactttacatataggtagtgtggaaaacaccttgcaatagtgtgtatacataggtaaatataaggagcatgaaattcctatcaaagtgtgaatgattgtcttcctaaatgaatgtatgatagtgtggaatgcctttttgaatgcaaatatgtgcatgatgtaattaactttccaatatgcatataaataaatatgagtgagacaataaaaacttgtgtggcgtacttcacatgtatgta

SEQ ID NO: 216753 - DNA, 394 bp, Glycine max
  unsure (1)..(394): unsure at all n locations
agctngagatgaggaagtgttgaagggtgaatcctctctgctnttattgntgaccacagagtggtacctggagatatgtcgcgggggtcaggagaccttggggacgtcaggtggggtgctattgcccaaaaccaagcttgaccaatcccgacccaacccgggcatagtcggtcagtgagaacctgtgatgtacctaagcaggcgagctcctggcagtcaacagataaaaggaacaaagaccacaaagcaaggaggcttgtggtggctggccagctgtgaaacttgactgatatgtgagatatgatctctggtaatcgattaccaagggtgggtaatcgattacaacgcttaataatgaagacaggaggctaagatggtctctggtaatcgatta

SEQ ID NO: 216754 - DNA, 479 bp, Glycine max
  unsure (1)..(479): unsure at all n locations
agcttcttctacaacacacacaaccaccgttggccaccacggaccgctgttgttctccgttgaaaccccacaccgagaggaacccttcaatcggagcagaatcttctaaacttgtctcgcggtttcgatagagaacgaagcccaatctgaccttcatggtcttctttgaggtaaccatgattctacgcttgtttcttgttagattcagcttatctttgcatcttttcttactttggaaccaccattgtatgtttttatgcttcctttgaaaaaccctagagagtagagaaagacactttgtaaaagttatctttttatgaaatgggtgttattttcgtgaccttcactgaaccccgatcacattggtgtgattggaattntacaatgatgttccttttgtagaatccaaaatgcccttagccttttcatgtagtgacatgagtatttgacttagaatattggtcgtaaccttatctctg

SEQ ID NO: 216755 - DNA, 271 bp, Glycine max
attccttcaatttcgtgcctccccctctctctttattttgcctcattaaagcatactcttcaagctccttatacaacgccacgtcttggtcgtgaagctccttcttcatggcgtattccctaatggatggtgcctcccatctactcttctgcctttccttctgctgcatctccatggtggaaaatcaccatggaggacctcattgatgctcaaagatccagcctccatagaagcccccaagcaagcgtgcttacaagcattcaacaagatg

SEQ ID NO: 216756 - DNA, 326 bp, Glycine max
agcttcttatttgatccagtagaggttattcatatctacctatttactcaagtcacacccacgaaactctggcacaagagacttggtcattgccatcttgaaagaatgctaaacatgaaaaaaagggaaatatgcacaagaaaatttgaagaagtttcaaatggaggaatgcatatctgttaccacaccaatgaatcaaaaggagaagttcactcaggaagaaggtgttgataacaattatgaaggatattatgggaacttgattggatgtctaatgtatctcattacaacaaggccaaacattatatttctcaaataacaaaact

SEQ ID NO: 216757 - DNA, 297 bp, Glycine max
aaccactcgtgaatttatgtactaagaaagcactcttgctatggcagagcacctcagctgataaaatatccagtggattataaaccacctgggattggtctacatgaagattgatatagctgaaattgatgattactcatatacagaagataattgcaataactcctttgagcatgagatgttaatattctggatgggataacaccaaaaacacaacttggatctctacttctaacctcctatgtgttcaaaaaaaaggtaaaaatcattcattgaagattctcatgacttgtttta

SEQ ID NO: 216758 - DNA, 287 bp, Glycine max
  unsure (1)..(287): unsure at all n locations
agcctaagcactgatgagngatactcatattatgtnctcccttcgnacaaactgcgatctcgggaaaaacataccgactcagaattgctagattgactgttntatcagcacttagcttccaaatagacgtaatcaaattaatgtctcgtttaaacaaactctttcttaaacattatggcaaaagaatccaagaaaatacggaagtaaaatatattaatagtttaagttatcgtgttacaattttaattttgattgaagctctcttgcgcaactttggtgtaaaagtt

SEQ ID NO: 216759 - DNA, 299 bp, Glycine max
tgcactactgtaatgacaatagcatacattgtggctctagatcgcatggatctagaaatccatcttgttcaataaatttgtggattcatgaggggtcatgagttcatggctccaccactgacagcatctatcatacttctcttcatgtcgctgagaacttcataaaaatatctgaagaaaagatgatctgaactctggtggtgagggcatctatcacattaatttcttaaatcgcatcccagaattcagatatgctctctacgatgagatttataatgcctgacatagtctttctgatg

SEQ ID NO: 216760 - DNA, 359 bp, Glycine max
agcttgtagggttaaagtctcacgattgtttctgtgctcatgcaacaattgttggtcgtggctatacgagacatcttgccaaacaaagtcaggttagcgataactcgcctgtgctttttcttccatgctatatgtagcaaagtcattgatccagtcaagtttgatgagttggaaaatgaggccgtaattatactgtgccagttggagatgtattttccccctgctttctttgacatcatgattcacttgattgtgcatctggtaagagaaatcaaatgttgtggtcctggttatctacggtggatgtacccgggtgagcgatacatgaagatcttaatagggtatacaaagaatctata

SEQ ID NO: 216761 - DNA, 368 bp, Glycine max
agcttgagactttgagaaacatgaagaatctatttcttccctagtgatgtggagggggaaaaaaaggggattctgaggacggaattgtgatgagaggttgacaaaaaagacaatggtttgttgagagtgatggagaagtgaacaaaaaatgagaatgatttgaagaacaccacacaaactgataccctagagggagagggaaagcttgcttaccccaccaaaaggtggagacattgttggcctttgatcaaaagggtgtggcttggcattgataacgtgtggagtggggctggcgaaaaggaaaggaagaattatacttttcgtttcgtttgggagcacagcatcaaaggataatggtggaagcaaca

SEQ ID NO: 216762 - DNA, 388 bp, Glycine max
gcttcttctccaacacccacaaccactcttggccaccacggaccgctgttgttctccgttgaaaccccacaccgagaggaacccttcaatcggagcagaatcttctaaacttgtctcgcggtttcgatagagaacgaagcccaatctgaccttcatggtcttctttgaggtaaccatgattctacgcttgtttcttgttagattcagcttatctttgcatcttttcttactttggaaccaccattgtatgtttttatgcttcctttgaaaaaccctagagagtagagaaagacactttgtaaaagttatctttttatgaaatgggtgttattttcgtgaccttcactgaaccccgatcacattggtgtgattggaaatataaaatgat

SEQ ID NO: 216763 - DNA, 461 bp, Glycine max
  unsure (1)..(461): unsure at all n locations
agctgcactagaataatctggaaaagatctatctctgacaatggatgaatctgcatattaagctggtccatgacacccgcaattacctgctccagttggaattaaagcatgttaaaatgcattaaagtatatctgcatttattcctaatgacaactaaaaaccaagccacttatctacctcaaactgaaaatcttaggatatgaaaacataagaaaaatcttaaataaagaaaatagataaggattgatattttggcatgccatatacattaacaaactggaacacataggaattcatcaacatggtgaaaaaagacctgaatgattgcttaatttctcttttctttntaagaaaaacaagctccatgatagtattcntaatggtgttctcatggaatgctagtaatgtgacaccggtgtctaccctatcacaacattaaacatatcatactagatataat

SEQ ID NO: 216764 - DNA, 403 bp, Glycine max
tataataagtgccttttaagatatgaatatgtctattggagaaaattgaaaataatttgaataaataattctataagaaatgattttggcattgaaatgattcatgtttagaatttttattcctaaactaagccatagataaacctacattaactgtttaatcctatataaaaagtcccaaaatcttttgattcatcaatcttgattaaaataaacttttacataaattaaacctgtgttatgttatattactaaattatgtacctatattatatgcttaatgcagtagaaatgatgttaatattcatgtcaatcaacccacaataataccttttattatgaagctgtttttgacaaaagatgggaagattgaatctctgtatcattttatctataaaaaaaa

SEQ ID NO: 216765 - DNA, 361 bp, Glycine max
  unsure (1)..(361): unsure at all n locations
agcttattaacatgatgctgtgaactnttttcttgatgacactagttaaagttagaagaaacaagtacatgcaactgtgatatatgtcaactaaattattgtatcaacaaagatgaaccacaatatatcacattccccatatatatatgtggcttcatccttccatcatcatcaacaacaacaacaacattactttgggtacatcttcattattattttattgcaatacatatagaatgaacttacctgtgtgttgagctcgatttgacgtgctataagaaccaatgctcctatcatgaggcatattccatgagcccagtgcctaaacatctaagctaatatgaaagggaatataatagtt

SEQ ID NO: 216766 - DNA, 433 bp, Glycine max
  unsure (1)..(433): unsure at all n locations
agcttcttatccaaggcaattcttggtggttaatctccttctcccttggcttattccctagtggatggtgcctcccctctcctcttctcctttgtcttccgctgcatctccatggtgtaaaatcaccattgaaggacctcatcgaagctcaaagatctagcctccatagaagctccacaagcaagcttccatcaactacgtccactaaagaagggtttgtgaggaatggcttaagtcggtgtccattgaccttgaagctcttgtttatggagtcgcttttgatctcaactgtaccataaggaaaaacattagtaacaacaaaaggaccaatccacttagacctcaacttaacactcatgagtccaagcctaaaattataccataacactnttttgccaaccatgaagtccttctaaatatcatgctatcatgg

SEQ ID NO: 216767 - DNA, 267 bp, Glycine max
tttcttattcctgaaacgcgtctctacgtgtgggacttcgaaatttcaagtttgggtggacctctttctctcttgattttcagtggtatgggggtttgggagatatgatgggtagtcttgctagttttctgcttcatgatagttatttgtgaagacactcgttgaaagcatgttgaacttgccatggttggatgagttgaacatacccattctgtcttaaggttgttatgatgatgtttgtgatgcctatgcgccgaaattgcttat

SEQ ID NO: 216768 - DNA, 428 bp, Glycine max
  unsure (1)..(428): unsure at all n locations
cttgaaagaatcaatgacaatgcttacaaagttgagctacctggtgagtataatgttagttccaccttcaatgtctctgacttatctctttttgatgcagatggagaatctgatttgatgacaaatccttctcgagagggagagaatgatgaggacatgaccaagagcaagggcaaggatccacttgaaggacttggagaacctatgacaagggctagagcaaggaaagccaaggaagctcttcaacaagtgttgtccatactatttgaatacaagcccaagtttcaaggagaaaagtccaaggttgtgagttgtatcatggcccanatggaggaggactaaatgacaccactttgtctcaattntagagtggttactttgtctaaataatggctcaatcctttgtaaattggctggaccaaaatatg

SEQ ID NO: 216769 - DNA, 466 bp, Glycine max
  unsure (1)..(466): unsure at all n locations
agcttgtatttgatctccagtatgaaagatatctatctattatattaattgcatgttaaattgcctagagatagtcatcaattgtactgtaatgtatattcttgtatgttgtcactttggttctctcctgttgtgatttaaggaacatatctacttttcagggccttcaacgccaacatggtgccattaatttgttggaagctgtcaattcttacttctcttcacatggcctattctgtacattgaatacctcctctttcacagtggatgtaagaacagtcactctaagtctcagattctgatttaatttccttgtggtggctattaagcatgatttcattataataggttgcagcatcaaaagatgattgtgattcaatcttgaggaatgaattacacatcatcaacaaatccatcaattgccaacctacacanaagacatctaatgggtcgaagttgaatctct

SEQ ID NO: 216770 - DNA, 354 bp, Glycine max
  unsure (1)..(354): unsure at all n locations
agctttgagcaacttcaaacgatgaaaactttttactctgatgnctgantgagtgccagaatatatcgagacgctcgaaactgaacaccgaagcttttagaaaattcacacgacaataactttttattcggatgtctgatcgagtcccgtaatatatcgcaacgctcgaaattgaatgctgaagctctgagcaatattaaacgacaatatactcttactcggatgtgtgattgagtctcgtaatatattgagacgctcgaaatggaataccgatgctctgagcaaattcaaacgacaataactttttactctgatgtttgattgagtgccgacatatatcgagacgctcgaaat

SEQ ID NO: 216771 - DNA, 265 bp, Glycine max
  unsure (1)..(265): unsure at all n locations
agcttgtaaatattaacaatagagatttgtgtatatactntatttacttgatggccctcatgtgtcactcttatgcccatcaactgcggaaatctatataagagaaaagatttaggaccactgtttcatcgattcctgcactgaagtgataaaatcctgaaattcagtatcacatcacacagtattgaacaggtcatgaaaagttcaaaaattaagtgtcttgattgaaatatatctgattatgaatttgaaaaagctagaatga

SEQ ID NO: 216772 - DNA, 190 bp, Glycine max
aattatacttttaaaaaaaaaaaaagatttgtcctgatacccactaaaccaacctagtctaggatgaagaagaaagcctggctaaaattatttttttaaacacactacaaacctgaaatatatgcaactaccctataaatgtgccaaatcccctatggggaactcaagaaaaaaaaagctaccatcatat

SEQ ID NO: 216773 - DNA, 376 bp, Glycine max
  unsure (1)..(376): unsure at all n locations
agctngngaagtataagtgaatagtgttttttatttangagaatggcttcaactacaatnacaactgtattggtagagcatatatatgtatcttggcatagacagcaacatctggcactatccatctctagatatcaataagaaataatttatgcactaagctatcttggcataaagctaaatggtactgctcaaaaaataatgtcacaacatatttcacaactcgggcattcattggttttaagttatgggccaattataagatccttcatggaatatacaagttttatcaactttctttaattctaaccttctctatatcttagttcagataaatatacgtcaggcgacactaagctaacctaaattgatattg

SEQ ID NO: 216774 - DNA, 373 bp, Glycine max
  unsure (1)..(373): unsure at all n locations
agcttctaacctttatagtgaggagtaattctttctgncgacaactatacgaatgcgttcgtctgaatttcagagaatgcgttatcatcaataatctgctctacctaagctgatcaataaaatcagagcatcttgtttattgctcaagaatatgtaccttgtcccttattgacgatcgctactccgcttagcttggcactgcttgaaagttcttctaatattaaagttctattactatttgctttggtgtgaatgtgatacttctaaagtccttaccacgtcgtctaccgttgaattcgaatcaaatgttaaaccaaaaaaatccgcttgtctgattttatcttctctttaaaagatacacgcaccacatgtt

SEQ ID NO: 216775 - DNA, 366 bp, Glycine max
  unsure (1)..(366): unsure at all n locations
agcttctgactattcagaatcttattatgttcaaactgagcaaagtcgatgtgacaganaatggttatggcaagcgattggactcgctggttgtggaggtaaacctgcagtgagagtagagagagtgcaagtgaagcataatataacaatagatagatgaaagaagcaagaatactcgatggtgagtgcaaaattctgctgctgaattgcaaagatagtcatgaactcacggtggatggagcttgaatagtttactaggtgaggaagacaaacaaatttggaaattttggatgaaacttgaagatgtagtaacataggagagagaattgttgggagagatgagaaagaaatgctctttaatctata

SEQ ID NO: 216776 - DNA, 481 bp, Glycine max
  unsure (1)..(481): unsure at all n locations
cccggatcttaagtcacctgcggcatgcaagctagttagaggtcttaacccaccttatgtgttaatntgacctccatcatcaaggccatgagttggacattgtctcaatagactattaaattgctcccaatcttcacaaagtggctcatcaactccttgagtgaaagtagcaatagttgtcttcctttgattgattttatattgagggaaaaatttatgcaagaacttatcacaaagttcatcccatgtcaaaggaatgttgggaggaatagcatggtaccaatgctcagccttgtcggcaagtgaaaatgggaaaagactaatacctattaaattatcatccacttgatgaaccgtcaccgtattgcatatacgaacaaagctagtaggtaggtgataactgcaaaatgagctatntgataccaattttgctaaaaatggtgtaattcttactttttattctttatgaacaagagaaata

SEQ ID NO: 216777 - DNA, 285 bp, Glycine max
atgacaataacatcatttctggcactgaattgctgagagctggaagtcatcctctcaattaaatttctggcttcaacacgggtcatgtctccaatggctccaccactggcagcatccatcatacttctctccatgttgctgaatccttcatacaaatattggaagagaagctgctctgaaatctgatggtgagggaaactatcacataattttctatatctctcccactattcatatatgctctctccactgagttgtcttatgcctcaaatatcttttctgatg

SEQ ID NO: 216778 - DNA, 83 bp, Glycine max
aaagaaaataattaaaaaagaagagtgatcttgaacctcgaaactaataatatattatatttcacctcgtatacaaggggggg

SEQ ID NO: 216779 - DNA, 471 bp, Glycine max
  unsure (1)..(471): unsure at all n locations
agcttctatattagctgaaccagtttatcaatatacacaagttggagtttattcagaaaattagagtttatctcttttatcctagtgagagtgattctcctaagttcttgagtgattcaagaacaccctggctatatcaaaggactttcataacctttgtgtgttgccctcgtcggaaagagtgattctttccttcctttcatcttcaaccttgttctttcaaaccacaaatccataaaatctatttctgcccaaaattatctcgtggccataactccccttttacgcgctcaaagtaagtgattcttgagcctaaattgaatttcaaaacgagacctttcacctcgttttggaatcacctcgtttggagccctgtaacttgagttattgtcatttctatatttctggccagccaccacttaacctacantttatcatctcattgtccatttatgccaagaaccaccttat

SEQ ID NO: 216780 - DNA, 321 bp, Glycine max
aaaaagctcaaagatcaatccaagaacaactcacgtgaatcaaagattaatcaaagaacaactcaagtgaatcaagaacaattgcagagttcatgattagaatcaagaagaattccagactcaagaagaaaggttagagtcaagaatcaagaatcaaggctcaagatctcaagaatcaagatcaagattcaagactcacgattcaagaatcaagagaaggcttaatcaagataattatgaaaaggttttctcaaaaatcgagtagcacatgatttttttcaaacatggttaccaagaagttcactctctggtaacatgtcc

SEQ ID NO: 216781 - DNA, 388 bp, Glycine max
agcttaaacattcaattgcgagcgagtcgttttatactggtactcaatcaaacatacgagaaagaagttattgtcgtttgaatttgctctgagcttcaacattaatttagagcgtgtctatatattacgagactcaatcggacatccgagtaaaaacttattgtcttttgaattggctcagacgttcaacattcaatgtagagcgtcttgatatactacggtacctaattagacatcccagaaaaaagtctttggcgtttgaatttgatcagaagttcagtaattaatttcgagcgttccgatatattacgcgtctgaattcgtcatccaaataaaaggtattgtcagcttgatttggtctgaagctcaaatttaatttgagcgcttg

SEQ ID NO: 216782 - DNA, 434 bp, Glycine max
  unsure (1)..(434): unsure at all n locations
agcttagaccanatgctaacgactatgtagatctgtaaatntagctacacacaaacgactattgggaaaaatatgaacatgaaacctggctttacaatcacacctaatttcctttcttggttcatggttttgtgtttaagttgttagccccctctcttctctatgaccttttctagaacaaacaaaagttagttgcattctttcaccgttaccacttttaagcactttgctttgcgtacaacaaaaccattgtgtaactgtaagtctactctagatcaacaattgtaactataagtcaactctagatcaacaaatccataccttccaaccttattgctgcttatattnttcatatcaaagttgactatatccagcagccatttattataattggctcacctttaggagctgcaacatcttttgctacatcacta

SEQ ID NO: 216783 - DNA, 384 bp, Glycine max
  unsure (1)..(384): unsure at all n locations
agcttctaatgatgtgtacatgtacttccttctgcanatttacaataatataagaacaatataaatatttcacttcacactaaaaattagcaaaagactaaataacattcataaatccaacaatccatagcatagggttgtagaatggaaaatggaaaattacaagtcttaatgaaaacaaaatataaaaattcaaagattcaagcatatgtatgttttaatcaaaccataagcatattcataaattcaaagattaaggagtaggtctttcttccgcccatctgatatagttagaaatacatctctccaagtagggttatctttcaatgccttgactgcctttgaaaaggagcaacaccaattccttcaagtttttcaggatgc

SEQ ID NO: 216784 - DNA, 397 bp, Glycine max
  unsure (1)..(397): unsure at all n locations
agcnttctctcttcaaagacatgctctgtttcctaattngcagggtccgccattcacctgcttttctaatgctggtatatattaactcaccaacctttaatcaatgtctatataatatatatctacacactcatattgttgtcaccaactcttgcactctccacttaatgaaaaatgattaaacaatcacgaagtgatcataacataagatcatagagtattatatataatcatttatatgtggatttaacacgtagcggagattgcgggagaattattacgaatgataagaggttgcattataaccgtgacatgcggaaaaaggctctccagaaacggacaacacaacaacactaacgccaatacacgtccagtgtataccaaaatcgcatatata

SEQ ID NO: 216785 - DNA, 245 bp, Glycine max
tcaccggctgattaactgattgaaaaaagtaaggaagtgttctgcactcattgccaagagttattcacttttttcaacccgcatgcacatgagataatttttactgtaagccgactgtatcgcgttgactgtatgtgttgtagggctcccaaatgtggaattagaactgtataatttgaactgatgaacactggagctaatgagtaaacaaactttctgaccttttgcaatctcactgtgcatat

SEQ ID NO: 216786 - DNA, 383 bp, Glycine max
  unsure (1)..(383): unsure at all n locations
agcttggaagctggttgggtgggagggatttattactacgngcggatttcatgaaatatgaggctaatttgaaaactaatttgaggctttgacgctcaagtctgcacacggatttccttcatgatggatatgcttgagggatacattccactgagagctgagttggttgtgaatcttggcaggagaagcatgcgtatgaaaaagtttgaaatatactgaagagtaaggaaataacttccaaagaatcagaatagcaattattttgccttatgcctctgaaccaaagttgattaaggccatgccatgggtttcgcttggagagtatcataatcagaatcttcatctcatatagtttcaccaaaatctgactgtccacgattact

SEQ ID NO: 216787 - DNA, 318 bp, Glycine max
  unsure (1)..(318): unsure at all n locations
agctnctagccaaatggacttaccttgttttatttcctntgatagccctttcgagccttgtttccctttccttgttttgaagctcactacaagccttaagtgaaaaaccatgatatcgccatatccttaaggaattgtggagctttggaagtgtcttgggaataagtgtggggggttcttgcttcattggacaactggttttgntggctatgcttcatgatgtattgtgggccatacatgatgtacattgtatattggttaaacgtcggacatgctgaatgaaatgttgtatctcataagctatcaaataaaaaaaaa

SEQ ID NO: 216788 - DNA, 358 bp, Glycine max
  unsure (1)..(358): unsure at all n locations
agctttgaatgcattcttaattgtgttattatgtgatagtacttacaagacgaanaaaatatcatcttccactattggagattgttgtgtgacttctaaatatgattgttttatgttgtgtttgcttatttagtataaaaaaggtaaaaaaattattatgggcattaactaaggtcaaaagattgtttgtgaaagatgataccttgccttaaggaaatattacacttcttgggaattacctttgtttggagaaagttactggatataatacaaatcaaggaaatattgcactctataacagagattaaacatggcctcttctacagtatcaacgcgaaaacaacaaagtcatctcata

SEQ ID NO: 216789 - DNA, 422 bp, Glycine max
  unsure (1)..(422): unsure at all n locations
agctagacgcacatcgncttgtgtatgatantcactccacaaggnttgaagtagaggagagcttcaaccctataacgcaacatggcggacaaaagtggacagtaaacttgaatgatcgtcattgtcaatgcggaaggtattctgcgcttcactatccatgttcacacattattgcagcttgtggttacatgagcatgaactactatcaatatatagatgttgnttatacaaacgagcacatcttataagcttactccgcacaatggtggcctcttggaaatgaaacgactattcctccttctgatgacgcatggacacttatccctaacccaactacaattcgtgcgaaaggtcggtcaaaatcaacaagggtaagaaatgagatggattgtgtcgaaccatctgagcactgaacaaaatgc

SEQ ID NO: 216790 - DNA, 383 bp, Glycine max
gcttggggggattctatggaggctggattttgttcttcaatgaggccctttaatggagatttttcaccatggagatgccacggaagacaaatgagaagaagtaagaggaggccccatacactaaggaataaaccatggaagacagagcttcaccaccaataagagccttggataaaaagcttggaaaagatgcttcaatggaggaaaagaataagggagagaaagagagaggggggagcacgaagttgaaagaataaaaagggagagaagttgaactttgagatgtgtctcacaagactacccttcatcaaagtttcaacaagtgttcacaattttctatttatagactaggcagcctccttgaaaggcttcttaacaaaact

SEQ ID NO: 216791 - DNA, 447 bp, Glycine max
  unsure (1)..(447): unsure at all n locations
ttanactcaaacatccagaaatgcttaatttagtcaatattcatttatgtgtggtggcttgtaatgaataacgcttataaaatagagaacaagccatccaaagagggaaaaattatgatgcctatgcaatgagcagcatgaatgcacttcaagggaaggaatgaaactacttgtggaaaatgctcataaacaatctatcattcatcaagaatttgttccaagaacctaagggaaaactttctcttttccctattccagaaacagaaccctgtaatcaactcaccttaacagccaaattcttgaactagattacaatgtcatataagattagattaatacaaaataagtggctcaaaatacagcaactaccatgagtacttgacctatgataaccttccatgtttatttgtggtcaagtgaacgatattagtggtaagtataaaacaa

SEQ ID NO: 216792 - DNA, 388 bp, Glycine max
agcttccaacttcttggcagaaccttttttctcttccaagttcgggccacacccacaagatattaccgtatcacaaatatttaagaaaaaaaatctttcaaatcctcctctaatagtgaattttctgtagcactttatgcaaatacatcttccaagttctaagtcagattctaaaagaaatgccatgatattgttcacagtaataaatatccagagtgagaagaccacttatcaagcatctttgaatgctaataatactgctactgtttaccaaaaaacacgaagagcaaatccatactcatcctttgtatatgattatttccttatgtaaggttcttttgtgtcaggaaacaaacctgagttgatcactcgacttccaatcatattg

SEQ ID NO: 216793 - DNA, 435 bp, Glycine max
  unsure (1)..(435): unsure at all n locations
ntcttcctatccttctctgctttgtgctggagatccagattccttcagtncaacatatcaatatctatttttgttatatgaatgataataagactcgaatttagaatctcataaattattcacatattttattattagattaatcttaatgggtaatgtatctacatttatatagacatgtataaattatgcctttcaatatcttttaatatgataaacaattataataagccaacaagttgattattttgttgcaaactggagtataaaagtagtcattctttcaaacttcaaattttgaactgcaaaaaacataaacatgtccttctggctatcattctgcgaatagtgattcttataagacatttatttagaaaaatggctttgaaatcgggaatataattcataaaaaaaatatttggattttcgaacata

SEQ ID NO: 216794 - DNA, 348 bp, Glycine max
accattgaatttctatgcttccaaatagtcatagataaagctatccaaagcactgcccatctattgtctatacatcttttgctactccagcttgaaaattggatgaagtgatcttttggatcagtgttgaagggacccactctgtcagcccatctcaaagcctcccaccaaaggcatctagttctagtgcaatcgaacatgacatgaccaatagtttcctcctctccttcacataaagggcaggaatacgatgaaaggcacacctgcctccttcttaagttagccttagtaggcaacctatctttataaattctccaagagaatgcagctgctcttggaggaattttc

SEQ ID NO: 216795 - DNA, 352 bp, Glycine max
aatgcatgcccactctgagatgatagagcactctacttatcttccttaagcaacaattctccacctggcttcattagtcaaattatcttttgttatatgcaactttgcacacaatatgaacacgctctttatgtgaagagagagtgttaaacttgaattttcagtcactttttttttcagttcgaccaatcttaaaataatcaaacatttcatgcacaaagatcacatgagaaaaaaccttaatgatggcttaaatgtttcacagaaccaatgtttgttggtatccgttggtccatcagatgagaatactacgcttatgttcgtcgacattccaaacaacctttttaattta

SEQ ID NO: 216796 - DNA, 272 bp, Glycine max
accgagcagcagccgggcccaaccaagaagcactttttgctgccgaacgacacggcaggagaaaaaacaaaacagaccaatatcggacaactaaacaagaaccaccgacaaaaaacgagcccaaaagaaactgaacaacaaaagaacaaacaaacgaacaacaaacaaaggaaaaccaaacaaaccaaccgaatcacaaatgatcgaacaacagcaagaacgcccaatcacaagccaacgggggaatcatactgaaccattccaaaggggaa

SEQ ID NO: 216797 - DNA, 306 bp, Glycine max
gtctctaatgaagaatatttgggcctcgctaagttgttcaacgatgaactcactctaaataatactaacacgtttagttcttaatactgtgtgacttcaatatgctggtttttctcagttgtgaggatcatgacttatattgagtctttactgctcgtaagccaccatcagtcaatatgtgcaagtacatgggaatcagcccctttggcactgatgcatacttgcgtcatatgctaataaaacatctacggatgttacatgcatcttatcatgcaagtttttgtaacccctctctttactaatctt

SEQ ID NO: 216798 - DNA, 353 bp, Glycine max
tcatattcaaacttgtccaaataaataataaagtcatctcgactcaaaaaaaatcatataagtctcatacaattaatatagaacctatatcctaatgtcacatcctatcagagcgtggtgttcccgtgtcctctagcatgaggttcttcatagtcatccacctattcatctgctcccccgaacacaaagttcaagatcatcacaggatccaaacacaaacagcaaaccgggagtgagttatcacattgctaactactagagataaacaacacaacatatagtagccaaatacaatttacttagcatatctcacattatttcatcactttgtcattcaacaatcacacctttca

SEQ ID NO: 216799 - DNA, 448 bp, Glycine max
tccaataccaaaagcaatctgtctccattgaggcttaactttgtattatcgattgggcatgcactatgtcatcaatcaacatagacatattatggcaagacgaacctccttcttctatggatctcattgccatgtctgcgtactttttagctctctctcttcattgttcatgatctccacctttacgcatcactttctctatggcctctataacactgtcctttttcacctctcgaacacattctccatacttatctttccctccacagagaatagcaatttcagttctcatcgtcacaccaatctcagccacttgagatagaagctcttcattgtaaaacatttcaacagcagacacaggtaatatcaccaaaggcacaccagcacaaatggcatccaatgtggatatccatccagcgtgtgtgaagaacgctccaactgctctatg

SEQ ID NO: 216800 - DNA, 369 bp, Glycine max
  unsure (1)..(369): unsure at all n locations
gggacccatttttttttttctgccngcaaattgtttaaaaagagaccctctttggtaattactctctacaactatccccctttacatacattgccactcacatgctctccaactaagttatgctaccaaagcttcttcctctgtgcctacaaaaatgacgtaagagaaaccgataaagataaccgaaaaaacaaaaattaaattgtctctctaaattctgaaactttctttctttctctctctctctctggagaacaaaacctaagcaaagcaaaagctagaaaaattaaaataagcacgcattgaggcacaatgagtttgagtatttaaattttgagtgctgaatacatactcaatcaaatattcata

SEQ ID NO: 216801 - DNA, 380 bp, Glycine max
tctctctcttacttagctacattgaactcttcttcttgggatctccctcgccatcctactgttactcgttccacacaccgcactccctccgtgacggggtcgacgattgggagacctccattcatgaatgcaccacccttcgttccaagtccaaatcaaaagcccttctatcatggagacttggccatgcccatggcgatggtacactcactgatgccaagctggccgaccaggacaactacacaattttcccgaccatgtcggccaagatggtgcatgactctagggaggagaacacggccaggccacaaaagtgccagcgctctatgtgctctatggggatcaaaccgcgactctcagaagtttcaactctaccattg

SEQ ID NO: 216802 - DNA, 360 bp, Glycine max
tttcatccataaccgctgcggcgggtcttcaattgcgataattgctctaaaatacatgcctgcaggctatatatacctcacattatggtcaccacgacatcgaaaccaacatggaaagtccatgaaattatttatgattactgaggctcagccaagaattcataaatacacattcgcagtgacaagcaagatgccaactttgtttcatgattcaatccttattgctctatgtttgtaggagatgcactttggcggaggattactctcatcaattgcgtcaggaaaaccccattgaagagtgcgagagaactggctgttttgctgcaaacattatcatccaaatgtttggctgtacttacc

SEQ ID NO: 216803 - DNA, 333 bp, Glycine max
aacaccaccctttttaattgttccatgaacatctaaagaggttcctctttcttttgtcgaatattgacaagggccaccaaagtcaaatggtaaggccgactggttgcgaactggatactgaagcttattgctagagtctcaaacgagttgatcgtgtttagggtagtcgggtaaaccaatagaggggttgccctttcaacaaagtgaggaaaagccgacacaagatgacatcattcgtggtacacaaactaacttgggtgacatacacgtcgatatgttcattcgaatcactaatgccactgtacttttctatagataggctattctagtttg

SEQ ID NO: 216804 - DNA, 431 bp, Glycine max
  unsure (1)..(431): unsure at all n locations
cgaggggtcagnggaaggtatccgcaataggttcaatgttgtctatgtaatccaatggtgcttgacccaagcctaatgaagcatataggtagagtgatgtgtgagttaggaccattaaagccccatgggatccaaatgatgtagtggtgtttgacacacacctaattatgctgaagggagcccgtgatgtttaacctaaaccccaatgaagtccaagtgatagaaataaaaatgacacacacaatttttaaaaaaaactaaatatacaccaataaaagatttctccctctagttgattcctttatgcagacaccatgtcaagtcctaatcctaacactttagaaccaatttagtagtcgatatatgattagatataattagggacgataatacgacaagacaagtacaagtatgagttattcgctacctgg

SEQ ID NO: 216805 - DNA, 386 bp, Glycine max
  unsure (1)..(386): unsure at all n locations
agcnncganacactctatgaacgaagtgcttgatatttgatcgancngcgggagactatcgcttcctttaaataaataaataaaatctgaaagtcggtaataagtgattatttcttcttacaagttcaagaacacacactcactaattgtgtccaattattcaaaaatacaagtgttaaattatttagggtgggtttggttggcattttcattttctgaaaactgctttcatttttaaaagattagaattctgaaaacatgtttggttcgacttcttgttttttgctttcaagaaataaaaacactgaaaatgtgttttcaaaagaaaatgtatttttagatttgcttacaattttattccctggccccttggtttcattttatcc

SEQ ID NO: 216806 - DNA, 441 bp, Glycine max
gaattagatacaactggtcacatcggaaaggagggcaagctactgtttcaaagcccacgtaaagcgcagagaaacaccctgatatgccggcgataatagcggatgacaaagagaagatgactgccaagcttgcatccagtaacgggctgggtgaagatcccctggctatcgagaaagaaagggctatgatcacaccttggaccccagaagagaaagaaggttcctcggagaaataagctgcccttggaaaagatcgcccgagaaaagcttcttttcttgaccacaagacagcggctgaccgcgatgaattctactacaaaaaacatacacctgagcgtctggagaaaaacaatacgcccgatggttgtaagcttgggaagacatattcagcaaaaactgactcgatcgcatcaagtcaaaaatggaaccgcgaatagagcg

SEQ ID NO: 216807 - DNA, 338 bp, Glycine max
cacaaaccatgatgttcgcaggaccagaaagggaacagaattttaaggccaactccaacactcaactaatttccagcgatgcggtctcctctttgtgatcaatgaagaaactccagaaaccatcaaggatgtccatgcctgtggatgctttccctggtttcttcaccacaataatgggagtcaagacttttgtctctttttctttccacattggactctgtggcactatatcatggtgacagcgtattattaaggcttctagtgataccaagaatcgaaccgttattacaacactatagatgggacatttgattggaaggctttgctaggaatatatg

SEQ ID NO: 216808 - DNA, 245 bp, Glycine max
ccaacaaaacaataaatatttggattaaaacaagaaacctcacctatttgcaagtaatccttaaatgagaataggcacaatatcctctaccaaaagtaatcatacacttccatcataaaatattttccttttttatttcttatttaacaaaagcagtccctacactaaactcccaataaatattaataacaataaagatttaacgatattaacattgagcatggacgacagctacccttatttaa

SEQ ID NO: 216809 - DNA, 387 bp, Glycine max
tgccagcctaagagtctaaacgtggggcttttatgtcttgtaacatggtcatggccacgaatccaaagtttggttttatgattagaaacacatgaaaatagggacttgtttgtaagaaattgggctgccccatgattggcactttgcacctaagtaacgggggaaatgcttttcaatggggtggaaaattgtgggtaaaaatatatggcataaaaatatgttttatgtgaatatatggcatgaaaattccttgcaaagggaatgaatagtaaataatgcctttccaaaatgtatatttgtggataggtagcgtaaaaatacctctctaaatatgtttattttgtggatagggagcataagacgcctttctaaaaaaatgtcccatgc

SEQ ID NO: 216810 - DNA, 439 bp, Glycine max
  unsure (1)..(439): unsure at all n locations
ctcgagaaattanantgcgataactgttcactcgcatgttctattcacgccaataacatatcgagacgctcaaaattgaacaacggaacctctcgagaagttcaaatggtcataacttttgactcggatgtccgattcaggggcatactatattgagaagctccaaattgaacaacgaaagctctcgagaagctcaaatgggcataacttttgactcggatgtcgaatttatacgcatagtatatcgagacactcgaaattgcacaacggaatctctagagaaattcaattgggcataaattttcacaggaatgtccgattccggcaaataatatatcgagatgctcgaaattgaacaatagaaactctcgagaaattcaaatggtcataacttttcacaccgatgtccgattccgggaaatattatatcgagacctct

SEQ ID NO: 216811 - DNA, 350 bp, Glycine max
caacagccttctgaaggaatcttctggagggcccaagtgggcctggttgctatttgcacccccatttttactaagtatacccctctgcctttttttggtgattcttttttcgtaaagttacggaaacttacgaatttcgtaacgatacttgttttctttctgtaatgttacggaaccttgtggattacataatcatcccctttttgacttacggaatgttacggaacctcactaattgtgcaacgatgcttccatttgatttccggtgtgtcacggaaccttacggattgtgcatcaatattttcttttgttttccggcacgtcccggaatttcacaaattgcctaatga

SEQ ID NO: 216812 - DNA, 247 bp, Glycine max
atccaagcccgaggtgctttcgcaacgtgtctgtgggcgatacacgaagattttcaaccgatctttgacgctcttcattcgtctgggacgtaaccggttagctcccgaaatcgaacttttcaattcattctatgtaccctaagtggggctcatatggttgaacgtgcttgtattttcatttcattgactttccgtaccccctcctgacgtgctgtagtcattttctcacctaatcaaagaaataaaa

SEQ ID NO: 216813 - DNA, 381 bp, Glycine max
  unsure (1)..(381): unsure at all n locations
gtcagagactgacagtgtcaacacttcggtcgcgttggttcatattattctcttgggaattgacacattagtacgaacatcttcaaggctttgtatagactttagagcttctatctgttgagagatctcaactagccgctgttaatagttttgacgtttacacgaagatgctactgtgcaaagagagtagggacaacaaacactctntgtagcatatcttcatagaaatataattttgtcaatgtcacataatgctcaaagttgactttcagcgtacaaatcgaaagaaacattaacattatagaacaaaaagaattgaaaatttccagacaagataatttaaatcttctcttttgagtgctaaagcacaagatgcttact

SEQ ID NO: 216814 - DNA, 340 bp, Glycine max
acagccttctagaggaaatttctggagggcccacatgggcctggttgctatttgcacccccatttttgctaaatacaccccctgcctttttttggtgattctttcttcgtaaagttacggaaacttacgaatttcgtaacgatacttgttttctttccgtaatgttacggaaccttgcggattacataatcatcccctttttgacttacggaatgttacggaacctcactaattgtgcaacgatgcttccatttgatttccggcgtgacacggaaccttacggattgtgcatcaatattttgttttgctttccggcatgtcccagaatctcacaaattgc

SEQ ID NO: 216815 - DNA, 444 bp, Glycine max
tcaccttctggtcctcctcatagttggtgcatgagacaacttgctctattttcatctcccactccaagtaggcctccggatcattctttcctttcaagggaggaatattgagtttaataccatcaatccgcgtttgtctaggaacaccatcattccctcttctcctcctttcttcttcattatgatctctattctccatttgatccaacctctcatggagcgcatcatctcgttgtttcattaacctctccaaatgttgcatcaaagcttgcatttggaattgcgaaagccccactccatcattaggatttgttcctgtcatctcaaacaaacaaatcaaacgtaacaagacaattatagttgttgtttgaatacctcacccactcaagtgtatcacacaattatggcttttctctaatgaaacactcttgcctttaccactct

SEQ ID NO: 216816 - DNA, 395 bp, Glycine max
agcttggaaggtaacaaaaggaaatctaggtgttgtttgttaaagaagccatgatctctttacatgattgcagatgaggatatggtagcaattactgaggttgtcaataattcaaccctatgacatcaaagacttggacacatgaatgaaaaaggaatgaagcttatggcggcaaagggtaagctatcaagcctgaagcatgttgatgttggtatttgtgaacattgaatctttggaaagcaaaaaaggttagcttctcaagggcagggaagactcctaaagtagaaaagctagaattggtacacacaaatgtttaggggtcaggcccagtgaaatctgttcgaaactcacgctattatgtcacctttatcaagactctaccagaaaggtatgag

SEQ ID NO: 216817 - DNA, 399 bp, Glycine max
atcaacccaatgtttctaaataaagctcttttatcaagttacgcacacatccgagtccattcatggcttcgggaaaaatcttcattgcattcacccttcaggtgcacacacattttgtctttcaaaaatatatttatgttccgacctgtgaattttccgaagatgaagaaaggcgattattttctttcacaagcatgttggcttttagtattttttttagctttttctttcaagcaattttttttcaagcaaatttcttttgtgttagaaaaggttagtaacccaggaaaagttggtaaccaagattacactttatcaaaaggaaataaaggcatacaagtgtagatacaccagactccctattcttttttggcgtttcagacaaaccatcacaaagta

SEQ ID NO: 216818 - DNA, 397 bp, Glycine max
agcttcatatgcaaaagagtgggaggcatgtttttttatttcgaactccgaaaccttgctgaagaaatgactaaacttacttatgaaaatgcagaactgagtggtgatctggaagctgctaaggaagcctcttgcaattcaaacttttctccaacatcttcatatgatcgcaagcaaaatattaataatagttttcaacgagatgggaaatcgaaaaagttggggaacgaagatcttattgaggacttgcagaaggaccttaatgctagactccaaagagaagctgcattaaaagcagctctatctgtgaaagttgaaatagaagatgacctaagaagtacacttgatgaaataaaacaccaaatacaagatttggagtatgagcttacaaacatgc

SEQ ID NO: 216819 - DNA, 384 bp, Glycine max
  unsure (1)..(384): unsure at all n locations
agcttatatagacttcagaggtgaattgttgttatacccatctacncgctgactaatagatttggcgcttgacacaacgtcctctattgtgcaaagaaagtgaggaccacaaacagtttctgccgcatatttttaaagaattacaatctgtgaatgtcgcctagtgcttagagctgactctcatcgtatgaatcaaaggaaacattaacaacataggacaaaaggaattaataatatcaagacaatgcaatttaaatctttcattttgtgcgctatggcacgagtgtcttactgaacatatggacgttactttctgatgattgtttttagtacttgagaatcgagtaattgttccactgcttttgtattgtgagccaagtgctt

SEQ ID NO: 216820 - DNA, 391 bp, Glycine max
  unsure (1)..(391): unsure at all n locations
agctttcaacaacgctgccaataaacgtttcttttcttccattaatcaattggcagacctcactaacgaaaagttcattgcacccaaaaatagattccaggggcatatgtgttcctcaatcattaggacaaccacttttaagtatgaaaatgtgacagcagtaccatccacagtggattggaggcaaaaaggagcagttacacccatcaaggaccaaggtcaatgtggtaagtgtatgataattcatttactaattcaaaagatattgaaagaatttctaactgttganttacttcgtaagatgttgttgggcattttctgctgttgcagcaactgaaggaattcatgcactgacttctggaaaataatatctttgtcggacaagaacttg

SEQ ID NO: 216821 - DNA, 353 bp, Glycine max
taaaaccaactggaaaacagtgcgaaagagagaaagttttttgtttgcccatgctattgaccactaccaaggttttttaacagcgtataaaaacgaagttgcacatactgctatgctataataattagatcgcacctgtcttatgtattaatctaaaggattaaaaactactgtatacatgctagcgatatcaaattaacgtcaaaactctcacaaaagcgacttaagctcgtatcacgtctttaagacttattgaaccccgggatgcggcggattggaagataaaataattgatccagttatttgacggctgaacgaaaagtaaattccaatactaaaacaaccgaccaata

SEQ ID NO: 216822 - DNA, 388 bp, Glycine max
aacttggtggccagctcggccaggcgatcattgttctttctccaaaagcaacagccttttggaggaatcttttggagggaccaagtgggcctggttgctattagcacccccttgtttactaaacgcaccccccttttccatttttttggaattctttttccgtaacgttacgaaactttatgaatttcgtaacgatacttattttccttccgtaaggttacgaatccttacggattatgtatttacactttcttaactttcgaagaagttacggaaacccacggattgcgcaaaaacacctcttttcgacttctgtcacattacggaattttacggatcacgcaagcctgctttcttttggattctgagacgcttgggacttatttat

SEQ ID NO: 216823 - DNA, 443 bp, Glycine max
  unsure (1)..(443): unsure at all n locations
gacgctgggcaatnctgctgcataagtgcaagaattcatttagtcttcttctaagctcctcggccataaccatacttccatgcctgagatgtggtcatgtaaactcacccctctgctatagtcacatgtacaagtgcctgagatggcatgataagatgcttaacaaagatagtaaatcgtaatatttggccaactcttacctttgacatgtatagcacacagtctacatgtatattcttgctcatctcttattatgtaatcagacaaaaaatgtaaattcaatctcccatgtatagaataaggtactatgcatagtgatggtgtgtagcacttttcaattattttcttttaattttggttcttgcatcgttggtattgattcattcagtctgtggagaaatatgaatatcattgcgaaagaatatctttttctatactcgttg

SEQ ID NO: 216824 - DNA, 327 bp, Glycine max
aacaaaacaagccatatatgactggataatgacacacctatacgtatggagtaatatttgtttataaatgattatgaaaatgaataattcgcctatacatgttcctctcctattcttcaaaaggaataagacaaggaattttgttggtcaaacaaatatcaaaataacaatgtcaaaacaacaattttgtacaatgatgtataattgagtccccacacgatttatagaaaaaattaaacaccttggacctacgtatcatgtataaaagcaaaatttacaaaaaatatattgattcctcccacttgttgttaagccactaagatcttt

SEQ ID NO: 216825 - DNA, 401 bp, Glycine max
  unsure (1)..(401): unsure at all n locations
tacnctgcttcaagagagcttgcaactagcatgcactttttcatgtgtgcatcatatgcatagggtgcaaatgaaattatggccagttcgtactctggcgtatgaagtgtcaaatgaaatttgctagcaagttatttgctcaggtgttggagctgttatgtacgctatggagcaattactgcgtacagagtcctctgcatctatacaatatctatgacagtaaggaactattgatatggactaggaccactattaaaccttacagtagcttgtagagttcgaaaaataatcacatgattcaatgacatgtttgctctctttctcgtataaattacacattgggtcggagctggagcttcatgtatttgagcttctaattggatatagaacaatgaatgacc

SEQ ID NO: 216826 - DNA, 394 bp, Glycine max
agctgagctcactgttgctgccccacaaagctccacggaatttgtctcggccatgctcttctttgcgagccctcttggtttcttgttcaagggctcttgcggtagctgcattttcttctcgtaacttggcacactctttccggacgtttgtagcgaccaatttgaatttttctttggcaagttttacttttcctagttcggtttttagagcttggacttcttcatcctcttccagagcttcgaagtcctcttcgtcgataatctttaacttgaaaagccaatctaaccctcgtgtatgaactttcagccattcatgataaccaccgatgatgccattacagatgcccctaagttctttatctttccttaacgggccttcccacgccttatggac

SEQ ID NO: 216827 - DNA, 438 bp, Glycine max
  unsure (1)..(438): unsure at all n locations
ctattctcattcactttcaacctagagacctattgtttgaagggtgttggacacctaaattctgtgttgctgtgctgtaaagcttgattttgggttagacatgattgatacatgatttgggacttgtaagaattgatttgggcaagattggatgagaagatgtgtgattntcgaaatctgcactttatgcagaatttgctgtcaaaataggtgcagcaagattntggctttgtgcagaaaaatgcttgtgtgtggttggctgtggaaagtctagtgcagaatgagttctggatgtttgctagtagatcccaacggtcacaatgtaagcttatgtactataaacttccagtaaaattttggagtcgatccaacggttaacgaattggatcgaaggaattgttactggggtctttaagtgagaaaagctgtgattttggt

SEQ ID NO: 216828 - DNA, 391 bp, Glycine max
ctacttatgggcagggcgggcttccttttttttcttgtctccaacgcgagctttgaccaccgctcttccttcccacgatgcttctcttcatatccgcctgagtgggcttatagcctaaaccatacttcccacaatttcctttggcatttatcaggctagttatgccgccgttgtctttgcctaaacccattccgggttcgtaaccgttccccaacataactcgggccatcattactgctgcatcggacaggcaaggctgcccagagaaggagtccacggaggaaatgctgaccacctcaaaagactggaaagcggtttctaacgattcttctgcggcttccacataaggcatagaggatgggcagctcaccaagatgtcttcctcacctga

SEQ ID NO: 216829 - DNA, 453 bp, Glycine max
  unsure (1)..(453): unsure at all n locations
cagcttgttacnccatgttgaatatgcttacaatagagctgttatatttcactaattggtctccttgtgaagttgtttatggttttaatccactaactcctcttgatctttcgcctatgcctaatgttcttgtttttaagcataaagaaggtcaagcaaaggcggactatgtgaagaagcttcattatagagtcaaagatcaaattgagaggaaaaataaaagctatgctaaacaagccaacaaagggagaaaaaaggttgtcttcgaacccggagattgggtttgggtgcacatgagaaaagaaaggtttccggaacaaaggaaatcatagcttcaaccaacgggagatggaccatttcaagtgcttgaaagaatcaatgacaatgcttacaaagttgagctgcccggtgagtataatgttagttccaccttcaatgtctctgatttatctc

SEQ ID NO: 216830 - DNA, 396 bp, Glycine max
taatgacaatagcatcacttctggcactaaattgctaggagttggaagccatcttctcaattaaatttctggcttcagtatgggtcatgtctccaagggctccaccattggcagcatctaccatacttctctccatgttactgagtccttcataaaaatattggagaagaaactgctcataaatatggtggtgaggacaactggcacatagtttcttaaatctctcccagaattcatataagctctctccactgagttgtctaatgcctaaaatatcctttctaatggtcgtggtcctggaagcagggaaaatgttttctaagaatactctcttgaggtcatcccaactcgtgatggaccgtggagcaaggtaataaagccagtcctttgccactc

SEQ ID NO: 216831 - DNA, 226 bp, Glycine max
cgagctcactgagaatgggacatacttttctatggcgcgcaggcacaagttccacacagcccatacccactcctgtgcacctcttactcagattcagaccattctcgttttacacggcatatctcagcttccaactcatcaacctaacgcagttacacacaaagacaagcaaattgtacaaccacaaaagttttctcagacctcatcttacatgaccggacatcaa

SEQ ID NO: 216832 - DNA, 439 bp, Glycine max
  unsure (1)..(439): unsure at all n locations
tgagcttcaaataggatccatatttctttaacaggtctacgggtctgcatacctgtntcttctaaaatatcaagagcatacttcctctgagaaatcacaataccatctcctgattgagccacttcaataccaaggaaatacttcaaagatcccagatctttggtctggaaatgactgaataagtgctctttcagctggacaatcttagtagtatcattccttgtaatcactatatcatcaacatagaccattagatagacacattttccaggagatgtatgatagtaaaatacagagtgatcagcttcacttcgttttagtccaaacatttgaacaacatgactaaatttaccaaaccatgctcgaggagattgtttcaacccataaagagatcgacgaagcttacacacaaggtcatactccccctgagcaacaaacc

SEQ ID NO: 216833 - DNA, 352 bp, Glycine max
agcttataatatattgagtagctcgaaattttacttcggaaactctcgagaaattcaaatggtcataacttttcacacggatgtccgattcgatcgcataggatgtcgagaggctccaaattgaacaacggaaggtcttgagaaattcaaatggtcataacttttcacacagaggtccgaatcaggcttataatatatcgatacgctcgaaagtaaacatctgaaacactcaagaaattcaaatggtcataacctttcacaccgatgtccgattcaggctcataatatatcgatacgctcgaaattaacatgcaaaactctcgcgaaaatcaaatggtcataacttttcaca

SEQ ID NO: 216834 - DNA, 372 bp, Glycine max
catatgaatcgctcgagagtttccgacgtttaattacaagcggctccatatatgatacagcctgagaaggacctctgagtgaaaagatatgaccataggaatttctcaagagcttccggcgttcaattacgagcgtctctatatatgaagcgcccgaatcgaacatccgagcgaaaagttatgaccatttgaatttctcgagagcttccggcgttcaattttgagcgtctccacatattatccgcccgaatcggacatccgagtgaaaagttatgaccatatgaatttctcgagagcttccggcgttcaatttcgagcgtctcgatatattatacagcccgaatcggacatccgagcgaaaagatatgacca

SEQ ID NO: 216835 - DNA, 395 bp, Glycine max
agcttggctctggccatcaaaaccatcttattcttattttcctcaacctttaaacagacatttcggtcaagtaagtgtttttctgaatcaaacagatcaaacttgatcttctgatcatctatgcccgtttccagtttaccctttctcatatccaccacacaatcggcggttaacatgaagggatggcccaaaatcaagggaattttagcgtcctcttcaatatccattacaacaaaatctacagggaaagtaaaatgttgcaccttaaccagaacatcttcaattatgccataaggccttgtaatagaccgatctacaagttgtagtgtcattctagttggcataatctccaactctccaattctcctgcacatggagagaagcatcaaatttat

SEQ ID NO: 216836 - DNA, 445 bp, Glycine max
  unsure (1)..(445): unsure at all n locations
tccatcaacctgggtttctggcattgatcacgggcctctgccagttattctgngntcccgncacacctagtaaagtgatccgaccaccgatcacccgaggtttcattgataagtattgcacgcctaggcaggcgcagggtgatgcacctctggccacagacgcaccactaccacctcatcaggttgatcccgctgtgtcattaggcatggagcgttatctacagcacttggttcgccagcaggcggccaaccaccgggggcaggtgcagatacatgagtgtctttaccagcttagcctcagtcagcaggggcagggttttgctccttttgcatgccctactccaaagaagtttagggctgaggtcgcatttgccatagattggcctgaggcctatgcangggaggcgcctgcaggatcccccgccaatgcagaggaggcccgcat

SEQ ID NO: 216837 - DNA, 384 bp, Glycine max
agcttggatttcattttagtagggaatctttttttctaagatggagccaaacccaatcaccctcattaagaactagctcttttcttcctctattgcctttagttgaatacacctttgtttggttctctatttggttcttaaccctctcatgcaacttctttacaaattctgacctagattccccttctttatgtataaaagaagtgtccagtgggaggggaatgaggtctaacggtgttaggggattgaacccatagacaacctcaaaaggggactgcttggtggttctatgaacccccctgttgtaggcaaattctacatgaggaagatactcatcccaagacttatggttgcctttcagaagagcccttaaaagggtggata

SEQ ID NO: 216838 - DNA, 449 bp, Glycine max
  unsure (1)..(449): unsure at all n locations
tatgcgcatatttccttacatacgttctcttgcacatgattttctattaaccaanaaaaatgcacccatatacaatcaaggcagcttcgttacctagattatttacacgtacttccaaggtgtatttattacttacatcacacacctccttggctaaattcacatacatgcatactcaaagcattttggggtaccaaaaattgcacatgtgcacatcttggtatttctaatacctatacatacacaaacttcatgatgaatcttgactatctacacaataaggtgctacattttatgctcttttcaagtttttgctacctaaagccgcatgcaaattcaaatatattttcctttgctgactaaaattgtattcaaattaaaaggtatacatcttttggtaatgtatcttctttacataacatgcaacatatttatgtatatctttttgg

SEQ ID NO: 216839 - DNA, 389 bp, Glycine max
  unsure (1)..(389): unsure at all n locations
agcttgcaaaatggaaacaaagaagactatctaggtttgcaccaacactctcaataattcagttttatcaacaaagtgtaccataattctatttatcaacatcattntttgattaaggtagcagtgcagggttattgtattctatttagaatggcacctgattcgcaagacctatggctctgctaatctgttggtttctacctatgatatttaagacctctggtactcacagttattaatacaaattataattttgctgataaaaaaaaaagattatacccgagacagagaagggcagtggcactcacaacatatatatagagaagggcagcagataaaattacaaatacattctacactaacaatgaacaagttctgagagtttaaat

SEQ ID NO: 216840 - DNA, 430 bp, Glycine max
tcttaccaagcattctcttgggagagaaacatctcctttctggtttattccctagtagatgacgcctcctctcacctcttctccgttatctatcgcttcaactccatggttgaaaatcaccattaaagaaccttattgaagctcaaagatccagcctccatagaagcttctcaagcaagcttccatcaaagggacctcattctacactaagcattataactcaaattcatctctcccttctttcattcattataactatattcatacatatcatagggtcactttgtgagataacaaaattggaaagctttaattaatatgttatatctaacttcctacacttatcattttatgcatatccatccaaatacgtgggacgcttgaggctccttttgggcctactactgcatcttcttcctatcaaccaaac

SEQ ID NO: 216841 - DNA, 392 bp, Glycine max
agcttaacatacactcaacctcacacatacttttttattttttcctacacagctgtctacatacagttgtctacaacataatactttaacattgcccctcaagctggaccataaattaaatgctccaagcttggaacatgagttgaagcatctcaagctgcaccaccaaactggaaaggattgcctcctgatggagtttatgcttccaaatacaaaatttgattgaactggggcaggttgctgacttgtgtggaggtagaggctgttgttgccggagtgaatgaaaattgaggagtggatgcactggaggttgattaaaaacattgagggaggactggcagaagtaacaaacacagtggatgacaatgatgtactagatgtggaaccaaata

SEQ ID NO: 216842 - DNA, 443 bp, Glycine max
  unsure (1)..(443): unsure at all n locations
tccttatgcaactaaatcttgctgtgtgtagtaattctatattcagtatnttacatgtatgaattattttcgaattatataaatttataaattaaaatattaaaaaataatatttaaatatttttattatttaattttacaggtatttatttttatcacaatattttattataatataaattaatatattattatatataaaaatttggtcttattttattatgattgtaaaaaaactacataaactaacatatagattatttaataaaattattttatgtaagttatacgaattaagtaaattaaaacaacatttaaataatataagaaattgaaaagttattatgttttataattaaaataagaatttgtattatgtatatataagaataaatttacatggctcttgcaaattacataaaataatttacatattaattaat

SEQ ID NO: 216843 - DNA, 382 bp, Glycine max
aattgaattaaagcattcaatatctgctttaatcgattaccatatatgtgtaatcgattacacagtgcaaattttgaattcaaatttaatagctgttgtaaatcatttttggccactagtaatcgattacatcctctggtaatcgattaccatagagtaaatctcttgaaaaagactttttaacttaaatttttggccaaaccttttgctacttcaattaggaattcccttcctatttaatatacccttcctaagactctagagactgtcttgatcatccatcttgaatatctttaatttctttgtcttgaataaagctttgagaaacatgtgatcctttggcatcatcaatacattcagcttgatcctttgtctacaatct

SEQ ID NO: 216844 - DNA, 444 bp, Glycine max
  unsure (1)..(444): unsure at all n locations
ttataagcgcgggtctaggagacnaggtcaagtggtcgtttatacgaagatgatgctccgagtacattaaatttggtacgaccatgccctccttatttccagctgggaaattggcgagtggaggaacgccccggcatttacgcaacgagcataatgtaaacctttacggttttaaaagctctataattgggcctatgctgtagagtttttccttatgttaaggctttgcgtcttttgtttttgaatttataatacaaggatctttcttcatctgttcctacgtctctacccattctcattcatttgcatgtttacttctttttctgaaacggcagatccgatgacgagtccctcgaaggtactaatacttgggacccgcctatcgacttcgagcaagaaatgaatcatacggaagatgaaggatacgaggatgtgggacttccc

SEQ ID NO: 216845 - DNA, 418 bp, Glycine max
  unsure (1)..(418): unsure at all n locations
cttagagagacctgaggcatgcaagcttgggccttatttgtatattatagngcatttttttttatttgccccttatgcacgtgcaataatgggccttgcaagatttttacactatgatttaataaaattattatttgaatttattctaaatttaaatttgaaacaaatgtatatgaaaattcttgttttaacgtgacggtttttaaaatttaaactagttttaaaaaaaaaattaaaataatttttaaaatatgattagtttcaaataaactcattttgaaagtttaatatcatataaaattagtttaaacgtttttttgtgtggtaatgaaacaatggtgatggtggtgatgtcatcagcaacaacgacgataaatatattagtggtgataatagtggcagtggcagtgacattagt

SEQ ID NO: 216846 - DNA, 442 bp, Glycine max
  unsure (1)..(442): unsure at all n locations
tctaaaatgtgagtctaatgtatgacattctatttctcataatgctccgaatgcanagatagtatccatgacatataataccataatataatcggagaaaaaaagaaaattccacacaaggaattttataatggttcactcggccacaaacccaacgctacgtccaatcctcacttttcaagtgagaatttctctaatcaacaaaacaactgaccatcattagcttaacaacagcaacatcaataggttcaacactccatagagctaaaaccgacctattggagaaacgcttgaatataagccactcccggctttacaacataacaacttcctcaccacaacaccacacttgatcttggccgtgggagagagaatcttggtattctntacctctttagactacacaaagtatattttttgctaaatctttaggctacaaact

SEQ ID NO: 216847 - DNA, 385 bp, Glycine max
agcttggcttagatcgcagatgtatatcacatgtttgtcccaaaacaccatgaatttggtttgcactctcatttatacctattttctttaacttgaaacgtttgattagcaatgtcttgtgttggagatctggatttaacttgacatgaaattttcatacaatagattactttcatagaatattgtgttaagaaccaacatccctcacctcttggttcccatttttcaatccaatgcaatttctctaacttatcatcaagcacacataggcctttctcttcacatgctttcaaaggagaaaaagttatgtactacaaatgagggacaaagtaggagatcaaagtacccaaagttgtgatagcaaatttggcatgatctgtggagt

SEQ ID NO: 216848 - DNA, 437 bp, Glycine max
  unsure (1)..(437): unsure at all n locations
tatgtaagtagggcgttgccatgtgcttggagataatgtttatgcttgngtcgcattntagacgatgatcttattctattatgtttcttacacaagtgttaacaattctaaatgttaatctctgtttgcttggagagaatattcaagcttgtcctgagtgtctaatgattatttttcttctctatcagtgttgtaaaagacgacttaaggtatctttttttttttcactcatatcatgggaaggcatttatcaattatcaagcctatgcattggtaggctttcaccgaagcttggtgtgggataatatgctctaagtgtaatacttattggtgggagggtttggtattggtatctactgtatggatgccttaccctatgggtgagcatttcgctctggatcttttttttctttttatgcctttggggtatctctgga

SEQ ID NO: 216849 - DNA, 403 bp, Glycine max
catgcaagctctgcacggagataaacttgctgtcatttgtctatctaagacttctaaaccttttttttttctcctctcatacaaacaaagctgaaaattagcattcatgtattgcaaaaacaaaacaaaaaaaaaaaggagcagttacattgtacaaggtagagtcacatggaaaacacttggggacttaggacacccaccttaatggcagcctaaaggaatcaggcaaaaaagaagcacaacctcatatttctgggggaagacaaggctgctaaagtaaattttgtacagttagtaaggcttgttgtaaaggccgagcaagggtttctccctctcctgtacccttttccttgcagcctctcttgccttgagagcttgcttttcttcatcagagataaccttg

SEQ ID NO: 216850 - DNA, 454 bp, Glycine max
  unsure (1)..(454): unsure at all n locations
acacaaaaactaagcttgctcccaagatcctangaaatacttggaaatatactttgatggtgggctcatgggccactctgggatagacaagacccttgtcttactcaaagaaaagttttattggccccatatgaagaaagatgtccataagcattgcactaggtgtgtggcttgtttacaagccaagtctagggtgatgcctcatgggctatacacacccttacccatcccatctgcaccttgggtagacattagtatggactntgtccttgggcttcctagaacccaaagaggtgtagactctatctttgtggtggtggataggtttagcaagatggcacactttataccatgccacaaggtggatgatgcttcccatatctcataactctgtttcaaggaagttgtgagactccatggtttgcctaggaccatcgtgtcagatagagatgct

SEQ ID NO: 216851 - DNA, 287 bp, Glycine max
caaaagatgcctaccctcatactttctcagctagccaaaccagccactctcctgaattcaagcagcaaaccgctctcccaattggagatgctggtatatactcacacaaataccattgacacaacccttttcaaacatgaggaagtagaccagatatacacatgactaactcagaaaactcggaatggaatctacaaaaaagataaatgtggccttggacaataacgtactagagcatgcaaggaataaataactacaccaacactttagcttagattacggaaaag

SEQ ID NO: 216852 - DNA, 304 bp, Glycine max
ttcttgcttgatagggctgaattgagggtttgcatgagacggccctatgcctataatgcactttgaagcaatgggacatgccacattgtcccggttctcttgctattgatgcctaaacgcgcccccaccaagtgatcggtgaaatgcctcaatggcattagcgcatgatcttcgtacggaaacaacccatggggcatctcggtctgcacatatattctatattctgggacatgcattcagatccgaaagggctagagtaattgccccacatatatcctaggcctatgaacccaagtctttatgc

SEQ ID NO: 216853 - DNA, 341 bp, Glycine max
gaaatttatgatgctatacaaaattaatattcattccataaagaaatctattaaaaaattcaacgttgacaacaacatgatcaatgctaaaaaggcatttcacatagtaataatagataggtcagataatatcagataatacgaagatttcgtcaccaatctaaaataattacatacaatataatcaattgaaaacataattattaatcaaggtaacataattgtatgcacttagtttactatttatatggatcgattgattcgttaaaattttattttaaagcaatcaaaaataaattgtaaccattattattttattcttttgaatttgaactattttg

SEQ ID NO: 216854 - DNA, 343 bp, Glycine max
cttcaccacatcgctagcatttcatccaaatacgcagacactagataaatagcctcaggttttctttcttggaaagcgcgcctcttttgcacaatgaagagccaaacatgcacttaataaaatacttcaagatgatgtcattgtctgagacaatgtaccatacatcatcattctgataagttaatcatatttaggtgttccttaatacaaacaaatttgtcttcagacaaatgcttactaaagatatcagtccattgatgacttgtgtatacaaactctatatcaagcacacctttttgcacatcatcactaatgaaatgatatctcatctcaatatgttatg

SEQ ID NO: 216855 - DNA, 207 bp, Glycine max
gagaatgaggcgaaaacccatgctgtgactgccattcctaaacagccaagtttcccaccaacccaacaatgtcattactcaaccaataacaaaccttcttcttacccaccgcccagattgaagcaatcctactccgtaagggcattaagtagaagactccaagtagattgggctagagatccaagggaaggccctagggtactcatg

SEQ ID NO: 216856 - DNA, 391 bp, Glycine max
agcttgctaacccatggaagctcctaatatcttttacactttgtggggcgggccattcttggatgaccttgattttctcagggtccacttggaccccatttctaccaactacaaaccctaagaaaactatattatctacacaaaaaatacacttctctatatttgcatagagggtgtttttcctaaggactgaaagaacttgcctgagacttcctaagtgatcatctaggctcctactgtacactaaaatatcatcaaaataaacaactacaaatctacctatgaaatcccttaagacgcgatgcataagcctcataaaggtgtttggtgcattagtgagcccaaaaggcatcactagccattcatacaaaccaaacttggtcttgatagc

SEQ ID NO: 216857 - DNA, 448 bp, Glycine max
  unsure (1)..(448): unsure at all n locations
nganagagccagggtagtcgaagagaagttanagtccatatccatcaaagtctgataagagtatgatgaactaagggacgtcaatatggccaccgctgaagccttggaacgagaaaccaagaaggcccgaaaggaagaacacgaccaaagcaaagttttgaggggctttatagggcagcaatagtgagctcaagctccgaagaggtgaaaggaatcatcacgggtcaaaggcatgatcttgaaggacaagctaaaggcttgccttatgtcgaaaagaaatttgtcccaacagttaagcgagactgaagggaatatgtgggccatcatcgatgagtgcaaagagaagctaaatctagcggcgactcacgagcaaaggctagaggatgagtacgccaagatatcagcataaagggaagcaagggaaagggtaattgattcattgcaccaa

SEQ ID NO: 216858 - DNA, 386 bp, Glycine max
  unsure (1)..(386): unsure at all n locations
agccaccngagctcaagagtgagagcattattatcttcggccagacaccccatctcttgccccaaatcatagccctcggattcctcgacctcttcaacaacaaactctccggcaacctcccttcctggcttacattctctcccgacctttacggaatcctctttgacaacaactacatcttcggccccatcccaaacttgttcgcttccgtctcggagaggatcgggtttatctcactctccggcaaccgccttatcgggaagattccggcgtcgctggggaagccggacatgaaaattgtggacttgtcccggaacatgctggagggcgatgcgtccgtgttgtatgggtcggataaacacacagagaggatatatttggcaaac

SEQ ID NO: 216859 - DNA, 457 bp, Glycine max
  unsure (1)..(457): unsure at all n locations
gacctatagatactcaagctacgagtcgctgtcaacaacgagaggaaatagacacatcttttatatatatatatcatcactccaaacacactagaatntggtagtcgatcattccacaagcgaacaaaatctggactcacacagaaaaaacatgtgcttttactctcatcactcaaaagccgataagttgccgttaaatatggggacgaaaagagaatcccaaaaaatacttattgtagcactctaaaaaagaccaccagaaggtgccagactaatcacggtgaaagcgaatcgaacgcggactcagataaaaaaaaatatggcgcgtatagactcagcactctacatgagtaaggtcctcacagtcaatgaacatacataaaacatgcggagaattccgacatctagaagttccccaggaaaggcctcaagagaaagattgaatcaattgataaca

SEQ ID NO: 216860 - DNA, 390 bp, Glycine max
  unsure (1)..(390): unsure at all n locations
agcttagcannaaaagagatgcaggcgtcttttttttttttgtaattatgacactgaatctgactatttcctgctttgtttaagacacattaaagtcccattcatcagaaaataaacaaacgaaaatggctaacgtgctaagggtcacagcaatggcaacattgttcttgctatgcagtggccttggctatgctgcttttggtgataacacacctgggaacatcttgactggatttaccgaacccttctggttggttgcactggggaacggattcatcgtaatccacatgattggagcatatcaggttcgatccttctttcactgaaacataattaagttactcatttttaattttgctcttgtaaaatattttatgatttaatttgtaa

SEQ ID NO: 216861 - DNA, 441 bp, Glycine max
  unsure (1)..(441): unsure at all n locations
nttagctatgtngatacacctcaggaagcgtagagattgtatttaaatcntccataacctacatctagcatgaactttagacatcttcatatctataaggaatggaactcttgtgcttacaactactcataatatttataaaaagcttgctatcatgaacttgttataatatggaccactctaatctttatataaaaaactaatattaattgtgctctaaattaaaatacacaatttaaaaagcaagattttctctttgtgcatcttcttaactatatattctataattttctgttatttccttaaatacacattcatagtagcattagtacaaaatttctctctcactatctcaaactactattatgttaccttatctatatattaaaaatcttagatcaccaatctcttataacccatttttttatcacaatgtgcgaa

SEQ ID NO: 216862 - DNA, 393 bp, Glycine max
  unsure (1)..(393): unsure at all n locations
agctntgttatgccctctcccctcggcggttatttcttcttcggcaaaggcgagatagttgttggcagtgatattattgaccagccctccgaaaccttctaccgagatgtcttgggccacatgggcctcgttcaaaaccttcactagtagagcccgatgaggctcggagctcatgagtaactccaacagcgagaccctggccggggttttgttgtgctgttcgataaccttgaattcgctctgctgaattatacggaggaactcactggcttcctctagtgacacctcctttttaccatcctttttctccggaagacctttcgcctgaatatctttattcgaagtgaggggtgcttcgtcatcttgttcctccaccacttttgctttcccctt

SEQ ID NO: 216863 - DNA, 453 bp, Glycine max
  unsure (1)..(453): unsure at all n locations
tgtgtcacactntcaattgtcgaagctgaatacatattctgttattatgttgttgtgctcaaagtctttggatgaagcaacaatgatgtaagctccattggagcttgtaggcctaggatcttcttcatcaatggattcctttgcttcttggaagatgaatggcagcggaatggagaaaggaagagagagaggagacgccacttcaaggagaagatgagtctaaaagaagctcaccaccatatgaagccatggataagagcttggaggaagaaggagatgaatgaagggagagggagagaagagcacgaaattctgtgctctaaatgagctttgagaatctgaagttaatattcaaatgatcaaagttgaaaaaaatgcacacacatgacctctatttatagcctaagtgtcacacaaaattggagggaaattcaaatttcacttgaatttgaa

SEQ ID NO: 216864 - DNA, 381 bp, Glycine max
agcttggaaggatatggaaaggttattttctttttttggataacatatgcttttaaggtaaacacaaaatgtgatttgcaagataataccatgtgtgaggcattctataatgtaataattggagacagagaaaagccaattattactctactggagggaatccgattttacataagttccaaaattgtgaagttgaggactatcctcatgaagtatgagggtttcatttgttccaaagttcagcaaatcattgaaaaaaaaattaaacagcatgtgaatcatggcgaccacattggtctggtgatgctgatttgtctttgtttgaggtttcaaagggcatggaaaaatttgttgtcatcttacacaacatacatgttcttg

SEQ ID NO: 216865 - DNA, 393 bp, Glycine max
ctgcgtggcggtcagtataggagcataaaccacagagtctggccacaggtgcagattttctattcatggccagttgggttaccaggttaaccaaggcatctagtttaccttcaagctttctagtctcagctgatgaagatgaattcgtggctacttcatgcattcctctaatgacaatagcatcatttctggtactaaattgctgggagtttgaagccatcttctcaattatatatttggcttcaacaggggtcatgtctccaagggctccaccactggcaacatcaatcatacttctctccatgttactgagtccttcataaaaatatttgagaacaagctgctcagaaatctagtggtgagggcaacttgcacatatctttgtaaatctct

SEQ ID NO: 216866 - DNA, 385 bp, Glycine max
  unsure (1)..(385): unsure at all n locations
agcttaatgaggaaggtcccaaactttatgtttattttaagtaaaagntgaaataagctgaagcatgacatcatctatgggggagtgcaaaagtctaaataaaacatcagttttggggaagtcaaaaatttaatttttgtcctaaaacattttgttctgtgctaaaaaagggaaattgagtaatgcttttatgtaatatcttataagtctgccttcaacttttaaatttgtgtttgtttgacattatctaaaggggggaccttgttaggtcaaaagacatttatgtcttaagacaaattaggagccttaattattttgattagatgtaaacaaatacaaaggttaaaaatggtgtcttatgctgatgtagctccatgtagagctt

SEQ ID NO: 216867 - DNA, 435 bp, Glycine max
  unsure (1)..(435): unsure at all n locations
tgttcagaaacgtgcatctatgtgcaatacacatattcctgtacaccacaacagaatggngtatcagaaaggcgtaatacaactataatggatatgtataagagtatgttaatcaattagactttacccgtatctttgtggatgtatgccttgaaaactgccatgtatttgctgaacagggttcctattaatgcagttccaaagacatcttttgaactgtggacaaataggacacctaatataaggcacctgcatgtttgtggttgtcaggcacaaataagaatttacaatccgcaagaaaaaaaattggatgcaagaacaatcaatgaatatttcattggttatccagaaaagtcaaaggggtatatgatttattgttctaatcatagtatgagaattgtcaaactggaaatgcaaagttcattggaaatgatg

SEQ ID NO: 216868 - DNA, 416 bp, Glycine max
  unsure (1)..(416): unsure at all n locations
ttagagncacctgcggcatcaagcttcattacaggcccatgatctaaatattatatgtttttatgatagctaatttatttattgatctaaaaatataatagacacgtttaattttaaaaatttgttaagattgcttttgtttggttccccttcattacctcctttaaaaattatggcaagttttatatactttagataaatttaaatatatttttagttcatcaaatttaaagtaattaaatttgattttagtctcacaaatttaaaattaatatttttaatctctgaaatttaagaaaattatgttttagtctcttgaaatgtcattagaaacttatggtacgtgataaacatgcaacaagttttttacatgatacctcctttttggtttgtattcttataatcaaatatcctag

SEQ ID NO: 216869 - DNA, 446 bp, Glycine max
  unsure (1)..(446): unsure at all n locations
ttcntataagctgaaccatnttatcgataaacacgagttgtgttttattcagaaaaattagagtttatctctgttatcttagagagagtgactctcctaagttcttgagtgattcaagaacaccctggctatatcaaaggtctttcacatactttgtgtgttgccctcgctggaaagagtgattctttccttccaccatttcatcttcaaccttgttccttcaaaccacaatttccagaaaatccaattatgcctagaattatctcgtgaccataactctcgttttactcgttcaaattaagtgattcttgatcctaaattgaaactcagaacgagacctttcacttcattttggaatcacctcatttcggccagggttatttgggctaactcaactgtggttgtgtttcggtggacattggcctgctctcatttattcggcctat

SEQ ID NO: 216870 - DNA, 378 bp, Glycine max
  unsure (1)..(378): unsure at all n locations
gttactgattacaagactcatttcttcttaccacataaagatagagactgaattcctcaacagccaccttatacttctcaattcattttaaaaaattgaaaacctcaaggtattacttgccgcaaacaagttgtactcctcaatgacaagagcctcttttttattgcattcatgatcatcgtcaacttgatctactgaactctntaagttaaaatctccaacattgtcgccatttgaagatgcagttgccgatttatgaccagttgaaaggtctacagggccaccaaaatgaaacagggaaaaaccactgtcttttgactntgcagaattaccatgtccaacttccccattcaatgctgctttttgcgaattagctcc

SEQ ID NO: 216871 - DNA, 397 bp, Glycine max
atctctgcacaatcaacatcccttcctccaactccaaattcttccccgtcaccgacccgtcgaaaatactaaactctcctccaacctccttactaatcctcgcattgctctgcgtaaaacccctccacctattctcatccatcagaatctcaaacaaatccctcgccctacaattaaacttctcagtcaaactaatcaacttaaaccccttcttcccctcactcttgttaacctcttccttcttcaaatcattgttatcaccattactactactagtgttgtttttgttgtgaggtaccgcaaccttcttcgcttcgagctcgtccttcacgggcccacccttcgccatgctctccacccaaaccctaaccttctccaaaaccaccacccttccctt

SEQ ID NO: 216872 - DNA, 388 bp, Glycine max
  unsure (1)..(388): unsure at all n locations
gacaaagaagcacaaggtgaactttttttcttcttgtttgaatncttgcaaaattaagggctaaaggctccaaaagattttctttctcacaanaaccaataagctatggtgtatggttcaattgacaaagctctgacacttgaatgacttccttggctgtcaatttgaatgtgccatgctataccacaaatgggtagtttttatttttgcaaaactaccaaaaatggaagagataagatttgacaaaaatgagtatttttggtttttaccgaaactagtaaatcttatcttaatagcctaggttgttgtgctaatctccctaagaatacatgtacccggagtgattctcatacagaaaacacctttacacaaagttaaattacactgc

SEQ ID NO: 216873 - DNA, 437 bp, Glycine max
ttgatctttcagcctgaagcatcaactgattggtgactcattcatcaattcttgcaaataaagtatgactaggaaagctcttgataaattagcttataagagaaactcgtgagagtttatgtgagtataaagagtttacttgagtttatccagaaaagagtctgacggcgagtaaacccattttatttacctagaattacaaactataagaagttattagttaactcaagagtttgacaacttttgttatggtgctcttcctggtggtttaagggtatgtggttcctctttccagtgaagatcttccactaaacaatgtgtgtgtgaatcttataatgatgcacgtctttagatacttaaatgcatcgaagcagctcacgaatgaggattagtcaagataaaagatggaaatctttggttaacgagaagcttattta

SEQ ID NO: 216874 - DNA, 393 bp, Glycine max
tgcagcatgcaagctttaacatcagaccacctggagggggctgtttttatttcacatggacttgatggggcctatgcaagttgaaagccttggaagaaaaaggtatgcctatgtgggtgtggatgatttctccagatttacctggggcaactttatcagagagaaatcagacacctttgcaactgtcaagcacttccacatctttggaagtccatgttacattttggcagatagagagcaaaggagaaagatggatcccaagagtgatgcaggaatattcctgggatactctacaaacagcagagcatatagagtattcaattccagaaccagaacagtgatggaatccatcaatgtggttgttgatgatctgtctccagcaagaaagaatga

SEQ ID NO: 216875 - DNA, 454 bp, Glycine max
  unsure (1)..(454): unsure at all n locations
ntaccatgcagagaatatccaagaaaaataccttcatctgacttatcatcaaattntcctaagntatcttttccattattcaatacaaaacatttacaaccaaagatattgaagatgtgagatgcttggttttctgccattgaaaaattcatatggagttttctttaaaatgggtcttattaaagccctatttaaaatgtaacatgcagtgttaacggcttcagcccacaagtattttggaagaggagtatcatttaataaagttctagcaatctcttccaaagatctatttttcctttcaacaacaccattttgttgaggggttcttggtgtagaaaagttatgcttaatcccatgcttatcacacaataattcaaattctttattttcaaactcacccccatgatcactcctaatagatataatcttgagatttttcttattttgaatgatt

SEQ ID NO: 216876 - DNA, 396 bp, Glycine max
agctaaagctccttcaactgcacagggctgttattattttaagagtacccttgtggaaccttcacccgaagacactgacaaaaacttatcttctcctttttggacaaagaatgacaagctggaggcaagtaaattttcttcccattagaccttggatgcaactatgatcgtatccccattctcaagaagatcttgacgagtattcaagccatccttcgtcttgccttgaatgttaaagagtgtcccaatcacactatcacacacatttttctccacatgcataacatcaatacaatgtctaatgtctagatcagaccagtacggaagatcaaagaaaatggacctcttcttccatatgcaagtcttacttatatccttcttttgggcctttccaaa

SEQ ID NO: 216877 - DNA, 323 bp, Glycine max
tataaatactaagcttctagccaatggacttaccttgaatgaattcctttgatagctctctttgagtctattttcccctttctctattgtgaatctcattacaagccttaagagaaaaaccataatatcaccttacccttaaggaattttggagctttggaattgttttgggaataagctgggaataagtgtgtgtgtgggggaggacgttacccaccttccttctagatagaatttttccggtgtttaaagtgtgagtatatagactcctgtcatatatctgtaggatatatttatgtgacgtcttcactcaccttaaattt

SEQ ID NO: 216878 - DNA, 392 bp, Glycine max
agcttgtgagaattaacatggtgagtcttgtttttgttgacgatattcataaacagacttgttggcatgaaaaacatttactctttatataaaaacacagtattattctttgtctgctaattatgattaaaatcgatggctcaatcatcatagacctaacaagtgggatgatattgttgtctattgaactatcatagttttggttgcaatacaaattgtagccatcagagcttggctaacttcattgaagacatgaccttgatgttaacccttaggatgaagggaaaatgaattatccatgtcaacgatttctccaataaaagaggcaatgaaattaggattatccttgaacatgaaaatggaataactatagagtattgattcttattctc

SEQ ID NO: 216879 - DNA, 425 bp, Glycine max
cgacagaactatcatcacatgacgctggaaaggcgctgttttgtttcctactaggcaacttgagagtttaacaaaaacactcggtaagtcgccaactaaattagtaagtggacgaccaacacatacttctattttgcacgttacagaggtgcaccatctgtggagaggctcatgaaacaagccaatgtattcccatcgaagataacattctgtactcccattgacagagttcgagatcatgcccactaggatgactttacaacttgatgaccgctctattaccagaccatatggagtaattgaaaatgagctggtcaaagagaaacatcttatcttcctgacagactttgaggtaatggatatctatgatgataatgacattcctgtaataatgggccattcatgttaactgcgagctgcatagt

SEQ ID NO: 216880 - DNA, 374 bp, Glycine max
cgctgcaacttattaagacctgggatagactctgttctgtattgttcattgacaatgacccactctataaaataaaaatctaatgaaacactagcatgacgcttgtacttaatacattttatttgcttgtatttatggccacctgtataaaaaactttttgaataatatgccattgacattatgcctaaatgttcgtaataggctttgatcagcatgctctactttctaaagtaaaagacaactatggtgtgaccacattttaacaagctataatctccttcagacttttttgaaaatttttatcaccataactgtttgcgagatccgattttgaaatctgaaaaggaaacagaacttaatcctccttcaatga

SEQ ID NO: 216881 - DNA, 441 bp, Glycine max
  unsure (1)..(441): unsure at all n locations
tatntgtggaagggacaatcacgaatattgtcatggtcacatatacacaatatcncaatggttgcatagatcacacttgtcattgataacctccctgcatcattttaaaaaataatattgagtaattgtatgactttccactatttcatgctatttggtgtttaactaaccagtcagatcctaatacacagcatcatctgtggcctacttgatatcttttcctcttttgaaaagaaaaaataggtattatcacttatcatgtgatcatcccaggtgaaaaagaatgaagagtacaaaaaaattatcgtgtaatttgtaactccgggatccacataaattacattgatccaaacaatgtgggtcaacctcagataaatgaaataattcatgtggtcaagccaaaggttaaatgtcagtcaacttagttcatatttcacaaat

SEQ ID NO: 216882 - DNA, 272 bp, Glycine max
cccacgcaagtgtatcacacagatatggctcctctctaatgaagcactcgtgccatcataccactctaaataccctagtgctcctatgcaatacacgagaacatggccacaacaaagaacaattcaccaaaatgtgcaaggtaaggccaaagagacaacgaaaaggtcaaccaataataaggctaacaatggctttaggcacaaatgaaggaaataaaacacagaattcatgagatacagcacgcaatccttcacgcaaccgagatactacc

SEQ ID NO: 216883 - DNA, 336 bp, Glycine max
aaattaactttaataatctgtataaaccaaatagtgttgtaatatcaccgccagattattattcattaacttttccgatggatatctccatgtcaaattattggctgacatgtccatgaaaaatcaccgaataatatatttatggaaaactacccgaccgatttttctgtgagagcaccgattgattttttagtgggaaattatcgacagatcttttcagtgagacttttttttttaaccatggcagtttagggggactttagcatgtatatgctacccttcgcactaatatgtataataatttcattctgctattgaaaaaatagtcccaattat

SEQ ID NO: 216884 - DNA, 391 bp, Glycine max
  unsure (1)..(391): unsure at all n locations
ncaagctnganccgccgcgagagngtcaacaatctcatcctccctccagataatgagtttctggtgaagggtagatggcacagccccaactccatgaatccattcccttcctaatagcaagttaaaattagccttagactgtatcaccaggaatagagttggtcgaactatactgcctacagcaacatctacttgaatggctcccaacgaatagccagttttaccctcataattcgaaagcacaatgttgtgggcagatagatcagtgtcatgtttcccgatcttgtagagcatagaacgaggcattaagttgacagccgctcctccatcaatgagcactttgttgattccaacattctcaacttttgccctgatgaaaagaggnttgaga

SEQ ID NO: 216885 - DNA, 450 bp, Glycine max
tgtacctccaaggctccaactatgccatgataatattattatgatgcacaaagcttcctttgtatatcatctttattctcaatgcaacattcaactgcattgttcaagggcgaaggtcgatggaaacttctctttacgtattctgatagagtaattcttcctttgttagaggtgtgcttacactacacccttccacttttcaagagataattcttgtaattcatacaaaaaaattaggatgtaattaatagctaataaattatattatggactgaatataacataacatatatcatcggaatactgttaaaaaacaaaataatttagacacttgtataatgtataaaatgatggagagaatactgttaaaaaaatttctatcattcaactcttctgtatatgtatctttcactactataacaaggacttttaccgacggttaataagtgt

SEQ ID NO: 216886 - DNA, 388 bp, Glycine max
  unsure (1)..(388): unsure at all n locations
agcttntaacacagtaggagtgtgaatatgcttttcatagtatagcgtgcaataattttagtattcaaggggcttattatctttcctatgctgatgcacgctgtccgggtcaattcttttcgaggattcaagtaagctacactcctctatctataacattggctattattccattatgtcgatttttcttacaaatattggacttgattctgcagatgctcactttcatggtgggcctacactattccaatgactgctgcagcaattgctaccataacctatacaaatcaagtcacaaatgtactaactcaagctttgagtgtaatattgagtctcattgctacattcacagaaacagcattgcttgtctcgactatagtgcatgcct

SEQ ID NO: 216887 - DNA, 443 bp, Glycine max
  unsure (1)..(443): unsure at all n locations
tgcgaccctgcataagcagaggtgaaagatggtgtgttttcttatannaaatatatttacgaacttatgatgaaattatgtttgtatctgtaatgcttcctttatcctcaacccaaaaccatgttcataaaatcaaacaactaattatgattcagggaaataaaaacggatcaagatgcatatacaagttataacatatttgcaccacaaagccacaatgctacactgccttgcatacacatcccttataccataattctttcagagattatgagacttgcccttgttacagtacacataattcaacagaggctaaagaaaatcacaaaataataaaatagtcccatgcttggtggcttatcaatccacgagcaaaacacattttttatatttcaaacactcttaccaattattttggtgccataccatcaacaataagcatg

SEQ ID NO: 216888 - DNA, 372 bp, Glycine max
catgattgatatatttattgacgatgaatgaactaattatgtggatgaggaggattttgcattggaggtattttgtcaattttcttttcctcattatttttatcatctaatcctattgaggtggaggaaaaaattgatgtaatctacggtcggctgacactagaaatggtggagctgattaaccaaaagatcactaaggaggaggtggaaacaactctttttaaaatacaccccacaaaggtgccaagactagatggaacatgttcgaacccagcaagaatgaagcatcgaactcttggggaacttgtgttacttggtaaagctttattcagtgaatacgtgtctagtatgaaaagagatgtgtcaactatg

SEQ ID NO: 216889 - DNA, 428 bp, Glycine max
  unsure (1)..(428): unsure at all n locations
tctcaatatacgatgccaagtgtgtgatggttcnttcattggtaaaccatgaaataaattgctctatattagttgcatcaatgaaggtgggcaagttaagtttgtgcctaaacctctggccgagcaacacttgagaaatattgcggcaccgaagtacttgagtaatcttccaaggtcactcatcgaggttgctcttcatccatgacttcggcttcaaattctgctgtttgagattccctggatgtaggtgaattacaagatgttgactcagaaaagtgagcctcttcaaggattgatgctactattctatcgtgcaaaaagcttctttttctctcggtgttgtttcttcaaaaggtggcttcaatttctaaatccgatggaaccaattcacctgtagaagatctacacatgcaaacactaataggaat

SEQ ID NO: 216890 - DNA, 349 bp, Glycine max
tcaaaattagagaaattgcataagaatccaatgtaaataacagatatatatataaccacaggaatgcaatagtcaatatatgtattacaaatagaaccaatagaattcaggttacagtcgcaacaaagcaaatatcctcattcttcacaagtaattcgtgaaagagtaaataagtaaattaaacaatttcatttcttaatgactaattttatcaatttaatgtcaaacttcaaatccccaacatgacatcatggaaaacatgtagatcacagaaaatcactggtaatctacctagcactaatttgttggagaacttggactggttggttgacttgtttcttttgagttt

SEQ ID NO: 216891 - DNA, 441 bp, Glycine max
  unsure (1)..(441): unsure at all n locations
tgatatagcagttgggacagccagaggcattgcttattttatgaagagngccaacaaagaataatccattatgacataaagccaggaaatattctattggacaggaatntcaatcctaaagatgctgatatcggtttagccaagctttgcaacagggacaatactcacataaccatgactggaggtaagggaactccaggttatgctgcacctgagctttggatgccgtttccaataactcacaagtgtgatgtttatagttatggcatgctgttatttgaaatcataggcaggagaagaaaccttgatattaaactcgctgaaagccaagagtggtttccaacatgggtttggaaaaaaattgatactggacaactgggggagttaatgatagtttgtgagatagacgagagaagtaacgagatcgcataaagaatgatt

SEQ ID NO: 216892 - DNA, 407 bp, Glycine max
  unsure (1)..(407): unsure at all n locations
tgaggnatgcaagcttttatatagacttcagagcttcaatccgttgatagattccaactagctgttgtctaatagctttggcacttaacacgaggccgctgctgtggagagaaagagtatggaccacacacactttctgttgcatatctttagagaagtacaatcttccagtgttgcctagtgctagagctgactttcaacatacaaatcaaaagaaacgctaatagcataagacaaaaggagtgacaattactttttgttatgcaacaaaaactattgattgcatgataatagaatgaagcaaaatgccctcatcacttgtctttcacaaagcatgcagttattcaaagagaagaatataatgtatcctgtacaattaattggagctaggcataagacagatatca

SEQ ID NO: 216893 - DNA, 450 bp, Glycine max
tactcaactttacttatgtggcaaggcgggcttacttcactatcttgtctccaacgcgagctctgaccactgttcttccttcccgcgatgcttcttttcatgtccgcctgagtgggcttatagcctaaaccatacttcccacgatttccttgggtctttatcaggctagttatgccgccattgtctttgcctaaacccatcccgggttcataaccgtgtcccaacataactcgggccatcattaccgccgcatcggacagacaaggttgcccaaagagggagtccacggaggaaatgctgaccacctcaaaagactggatagcggtttctaacgattcttctgcggcttccacataaggcatggaggatgggcagcttaccaagatatctttctcgcctgacacgatgaccaagtgcccctccactacgaatttcagcttttggtggagt

SEQ ID NO: 216894 - DNA, 387 bp, Glycine max
agcttggtcagcatgacttgtgtaaaatatattctattttatatgtcattcagtctacttttcaggtacccctttcttgttatttatggtctttatcaatcatcccatcttccccgttaatctggaacttccaaattcgatctttttttttttattaaaagttgaatcatcacgataattgcttcgatgcagatacggggtatgcatactctgatacgtgattctcaaacaacgaaacatgactttgtattttattctgaccgtttgattcgtttggtatgtaaatggggttcatttgttgctcttaatattagtgatggcatggcattttcttcaagcatttaaatttcgcccacttgaccaggttgtagaacatggcctagggca

SEQ ID NO: 216895 - DNA, 453 bp, Glycine max
gacctgcgttcgaaattcatctcgaagaatggtggtgaacacctaattgttcaaatatcattcatcaataaacgtcatatttaaaaattagaatatttaagtactgtgtaaattcaaaagaaaacaagaataggtatatccaattgattttttaattttatattctaggtctacgtattcaattgaataaaacccctaaaacacaaagttacacaacggaaaataaagatagtgaccaaggaagtatattagaaagtcatccctcagcagttttatcaccgatttgtttaaacttatttgttaaaataaatatttattttaacaaaataaaaagatattttttaatatatttgtttaaattattgtttcttaaaaaagtaattttctatttattgtaagattcacttctcaaaaaagtatttatataacaaaatatttatttttaagttattt

SEQ ID NO: 216896 - DNA, 384 bp, Glycine max
  unsure (1)..(384): unsure at all n locations
agctgagatgagaaagatgatttttatacttcctgctnttattgangaccacaaagtggtacctggagatatgtcgcgggggtcaggagaccttggggacgtcaggtggggtgctattgcccaaaaccaagcttgaccaatcccgacccaacccgggcatagtcggtcagtgagaacctgtgatgtacctaaacaggcgagctcctggcagtcaacagataaaaggaacaaagaccacaaagcaagggggcttgtggtggctggccagctgtgaaacttgattgatatgtgagatatggtctctggtaatcgattaccaagggtgggtaatcgattacaaggcttaaaaatgaagacagggggctaagatggtctctggtaatc

SEQ ID NO: 216897 - DNA, 372 bp, Glycine max
tctcaaggtccacttagaccccatttcttccaactacaaaccctaagaaaactatattatctacacaaaatgtacacttctctatattttcatagagggtgtttttcctaaagactgaaagaacttgcctgagatgttctatgtgatcatctaggctcctactgtaaactaaaatatcatcaaaataaacaactacaaatctacctatgaaatcccttaaggcatgatgcacaagcctcataaaggtacttggtctcagtgtgcccaaaaggcatcacaagccattcatacaaaccaaacttggtcttgaaagcggttttccactcatcaccctttttcatcctgatctggtgataaccacttttaagatca

SEQ ID NO: 216898 - DNA, 390 bp, Glycine max
  unsure (1)..(390): unsure at all n locations
agcttgttgctttcttctttcctctaatgtttttgttagccttgntgggttgatgtcgttcaacacactgctcctgctgcttagttaggcattttagctttgcagataaagctcaaaaagttgtacagctgtaaaagggtaatattttctgatcttattcctcttcccttacatttaatttcattactttttccacttactacgctgttgttaccataaataatttattgattatatatatatcaatatgagtactaacaccactccctttttcctctatctccctccacattgctacttacttacctttttttttctttttttttggtgatatgcttttgtcactattcatcagccgccttcttgtctggattagcactgcgcataaac

SEQ ID NO: 216899 - DNA, 425 bp, Glycine max
  unsure (1)..(425): unsure at all n locations
cttggctcaacatgaagagcacggtttctattntatncttgcatactatagaaaaatcattttcattattttattgaggcctcccttagattaggtcaacgaatattcataacatttcacttaatttgtatgttcacccttcattcttctgaaaccacctcctctattgacgcttaactatgatatacataattctgcttatgataaatgagttctgcaattcaatctataatattaaaaaataatctgtatttgaactgtaaggcaagttagtagccattacttgagcacttttgtctgggacagatgcatgtttggcaccatatctatgaccagactagagaaagcttaattgtgctataattagttgtgcaaactgcaccactaattacaaaatgactgggcaatctacattcttctttagt

SEQ ID NO: 216900 - DNA, 390 bp, Glycine max
agcttctcttttcttgattaatgagtatattttgtttctaatccttgtattcaggtatgtttttatgacatttaaatacttagtatttcttttattatttgattagtatgactgaacatgatgattatatttacttgctcttggttgtgtacggttatgagttttaaactcaattattttgatgatatatgactagtggtatgtacttttatttgggtattatgaatgactttctggattatatgacattctatgaagtactatatttttggtgtgatgaatggttatgatatcttgtttgattgttttctattctcatgtattttggctatattattatggtatttgaacaatttactatttccttatttgcatggtatggttgaacaa

SEQ ID NO: 216901 - DNA, 439 bp, Glycine max
  unsure (1)..(439): unsure at all n locations
gattccatttataggggtgaaagtgaatgatataattctattctcctcataagataatgtaaataatcgtttctgcattatgttaagcattcacttagcattggagtgaatttttatatagagcatttaaatttatgtgacataataaatctcacaaaattatgatgaacaactcacataaacaattatgatacttttaatcctaaaaatattgatatgtggatcttgattaatttggagttcgatcgagaagtaagtaaaatctggtcaagaattattttcatcaagaatcgaacttaggtattacccaaacaatttaaccttaatttcaacatattaatcatgtgtgttcaagtcagtgaccctgccctccatcgagagggactttangacctgtcacaaattaaacaatcacaattaaacaaaatggtggccataa

SEQ ID NO: 216902 - DNA, 390 bp, Glycine max
  unsure (1)..(390): unsure at all n locations
agcntaactagccaaataggaggggctttatctatttacacgctgcacacagaacatcttaagcttaattgcaggtttgaaagatctaaccatggattagatttcctgccataacagctgtccagtatattctatcatggcaagttcaacatttcttgttaaccaggagaaaagcttcctgctttacggtcctttctctgatttggaaggaaaggcatccgatcattataactgaaaaaacatgggaactaaaaaggtggctgaagagtttgtaatccacatttgggtgttcaactgctttcatcatcataaaaaaacaacacctctattctagacatgaatatagcgtgtatctcgtatttcacattttacaaagctatactcaatttt

SEQ ID NO: 216903 - DNA, 335 bp, Glycine max
cttgatgaatcccctattgaataccaccggggtcactgcatgagacattgagagatctctagagcactcatgaatattaggcatgcatatggcctagatgctgcacacaacaataacaacacatattgtgggggtgtctttgattggtagaccactatcacacccccagtagtttctggttcatatagctagctacaccaattacactgggggatgataacctatcagtctaggcttggtgcatatagcttactatatgaagtctgatgccttacatcttatgttaacctaagaatttcctataatttattacaatgaattcattcctgtgaaat

SEQ ID NO: 216904 - DNA, 390 bp, Glycine max
  unsure (1)..(390): unsure at all n locations
agctttaggatcaaaatctgttatctctttttctctcagnngntcttcattcttggctctcttttcacttctattcttcctttttctttcacaaaatttgtggcttttccactggtgatgatcatggaaggctaaacactcaatcaatccaaggatctagtccaagcaaggatgaatttgagttctggtttagtatttcaattccgtgtgaatgttcatctttttcttcaattctaatttcaatttttatgattatgaatagtcttggaattgaaaatgaattaggttttggattcatttcttaatttttaaatttaatcacaggttgtttggatgatattccaacctaaatttgcgatctcaatgaatttaggaattaattcgattaaa

SEQ ID NO: 216905 - DNA, 465 bp, Glycine max
  unsure (1)..(465): unsure at all n locations
tacggacctatgaaactcagctatgttaaactacatggcacaaagagtaggtttgtatataggggagagttattcaataaataacaagggatntagtgatttacagaagaagctacattcaacagaaacaagaacaacaatagccttttcaaagcttcagtcactagccttcaattatataaaagttccaaggaagacatagtacaaagaattaaatgaaacagaanaagggtgagttttcctaaatggtgttcaacaagaaacctaaagggtgatttttcctatgcaatcaatttaaagcacataccctattattctttgatccataacatgcccatttctgggcacacctcagtgcttgatgacagattctgcatggtagcttgatgaaacaacagacacaggctaaagggcaacatacacaaagcaagcaactactacaaaggaattgaattagttctcttt

SEQ ID NO: 216906 - DNA, 392 bp, Glycine max
agctttgcactacagtcaaagggttgttttttttatggaatgcctctagtcatacactacattcagcatgcacaactagttgccttctcatgtaaataaaggtgtaggtttgaactatagctaccctcaaatgatatccaaatgacttgcaattttgtgagcaaccttataaaatgatgagaagatagcacataaaatttcaaacaaaaattcaaagtctaactatggaagctaaaaatggtaggttaagaaaaataagtgaagaaaacttgaaaaataaaaaacttttgacagaatcactttttttggacgatggagacctcagcccgcctatggccagctgccatggcataggaaatttttttctaccccaaatacatatataagaattg

SEQ ID NO: 216907 - DNA, 392 bp, Glycine max
  unsure (1)..(392): unsure at all n locations
acaatatgctggtaattgattaccagtgtatctgaacgttgaaattcaagttcatttgtgaagagtcacatcctttcataaaatgctttgtgtaatcgantacatggttttggtaatcgattaccagtgacaagttttgaacaaaaagtcaagagatgtaactcttccaatggttttcaggatttttcttaagattataactcttccaatggttttcttgaccagacatgaagagtctataaaagcaagaccttgacttgcatttcaataacttttacaactttttagaacaacttttgagaaatcttgaagcctttgctattcatctttcttcttctttctttggcaaaagctttctaagttttctgtttccaaaccttgttctttcacag

SEQ ID NO: 216908 - DNA, 387 bp, Glycine max
cagcttccaccttgtatctggattgaagattatctttgcaaagagcagcttcggggtaattgggaagtctaaccaatggcggaaggaggcggctgaataccttaattgcaaaattatgtccttgccattcaagtacctgggcatccccattggggataacccaaggcgcagtgagttttgggaccctataatcaaaaaatgtgagagaaaactagccacatgaaaacatagacacatatccttcgaggggacaatgactctcattaattatgtcctaacagcaattcccatctattttttctcctttttcagggttccctaaaaaataatagtcaaactagaatccattcagtgaagatttctatggggaggaggaccggagcacag

SEQ ID NO: 216909 - DNA, 439 bp, Glycine max
  unsure (1)..(439): unsure at all n locations
ngctacattgaagccttatggctatgacatcttcgtatttttccttaaacnccgnaagcttaaatatgctatcaaaggagaagatgatgagaggactaccctctattaacctgatcaattctacgaaggatgtttacttggcaagcaatttataatgagttttccaaaggagtcaaactctagagctaataaaccacttgagctaatacatgctgacgtttgtgggccaatcaagccaatctcactaggtaaaaataactatttcctcattttcattgatgatttttcaagaaaaacatgggtctatttcttagagcaaaaatcatacgtcttttccgccttcaagaagttcaaagttgttgtggaaaaagaaaatggttaagagatcaaagccatgatgactgactgaggaggagaattcactctcaaagggttctga

SEQ ID NO: 216910 - DNA, 377 bp, Glycine max
  unsure (1)..(377): unsure at all n locations
agctnnaaatagttattgtgattttttattattttgttaancattcattgcatcatttatatatgttcatgtatacatgagatgggacaacctctcattagtccatgtcatttaaaacaaatgaaatacaagtacacacacacatgtatatgaatataggtatgaatgtatgcatgtatataggagctatccctaacctataagaatctttacattacggtccattgcaaggatagtagtcaagcatacttgtctcctcaagaatgttcaatgcatacatacattaagtaatagcaaccctataacgagactgggcaacctcagttcccaagaagtatttgagaggccccaaatattttgttcgaaactgatgaaat

SEQ ID NO: 216911 - DNA, 361 bp, Glycine max
gcatatagagctacagacgctttggaattgatacatacagacatttgtgggccaattcatacaccttcatggaatggtcaacaatatgttagtatattcataaacgattactccagatatgcatacttgtttcttatacatgaaaaatcacaatctctggatgtgttcaaaacatttaaagttgaagttgaaaatgaactcaacaaaagaataacgtgtgtcagatctgaccgtggtggtgaatactatgggagatatgacggctcaggtgaacaacagtcgaggtcctttgccatggacttagaagaatgtggaatacgcccacagtactccatgccggggtcacctagcatgaatggtg

SEQ ID NO: 216912 - DNA, 124 bp, Glycine max
gcacacacaaccccccagacgagccaaaaaagaaaaaacccaaaacggggagcacgccaaatgtaacccccaacaaagccccccgaatcgaccaaaaactcacgcggccgacagaaaaccaaaa

SEQ ID NO: 216913 - DNA, 454 bp, Glycine max
  unsure (1)..(454): unsure at all n locations
tgaggaagtgtngaacggagaaagtgggtgctgttattgttgtaccacagagaggacctggagatatgtcgcgggggtcatgagaccttggggacgtcaagtggggtgctattgcccaaaaccaatcttgaccaatcctgacccaacccgggcatagtcggtcagtgagaacctgtgatgtacctaagcaggcgagctcctggcagtcaacagatataaggaaaacaagaccacaaagcaaggaggcttgcggtggctggccagctgtgaattctgtgtaatatgtggattgtggcctatggtaatcgattaccaaaggtgagtaatcgattacaacgcttataattgaggacaggaggctaagatggtctctggtaatcgattaccaaagggtgtaatctattaccaggcttgtggacgaagacaggacacttacggagcctctcggaatcga

SEQ ID NO: 216914 - DNA, 432 bp, Glycine max
gcttgatgcaacatttggagagggtaatgaaacaatgagatgatgcgctccatgagaggttggatcaaatggagaatagatatcataatgaagaagaaaggaggagaagagggaatggtggtgttcctagacaaaaccgaattgatggtattaaactcaacattcctccatttaaaggaaataatgatctggaggcctacttggagtgggagatgaaaatagagcatgctttctcatgcaacaactatgaggaggaccaaaaggtgaagctttccgccatggagttttccgactatgttcttgtgtagtggaacaagctacaaaaggagagagtaagaaatgaagagccaatggtcgatacatgggcggagatgaaaaagatcatgaggaagtggtatgtgccggctagttactctagggacttgaaattca

SEQ ID NO: 216915 - DNA, 440 bp, Glycine max
  unsure (1)..(440): unsure at all n locations
gtcttaaaggcaacaaaatgagaaagtaattagctagaataatcttagacatagaaagaaggaatataagtagaaaaaagggaatggtgaatggaagatcattacgaatgttcacagtttatgttgcatttagaacaagtaacaattgtttcatcaaatccactagcaccacatatatcacaaactccagcctgcaaggaataacaaacacataaataaatatctactacaaagaacagcgaaattaaaaaaacaatgtttttaataaaaaaatctagaaaccgcccattttcatgtggaataaataagtaaagcgtcttgcaaacaagttaaatcaatgaagggaaaatatgccttgtacatttcagtttcagaagaagtttacattctaagacgcanaacataagataaacctgtaaaatcaaatgtcaaacttcaac

SEQ ID NO: 216916 - DNA, 399 bp, Glycine max
  unsure (1)..(399): unsure at all n locations
ctgcagctgggattagggatgggactgtttttttgtttacgtttgatttggtttgaggttgtgtttgaaaaaaactctaaaaaaagttntgggtttaggtgtatgttactcttcatagagtttggccaacgaaattgttctgaggagtcttgtaggtgattgtgcaatgacatcccttctgatatcaggttttaatcctcccacaaagcaatccaatagagcttcttgcgtaattccttgtactcgattagctaaagccgtgaactgcacgtaatatgactgaactgaaccaatttgagggagtttaaacaactgagatctaggacattcatacggtgatgggccaaattctgtctctaaggctctgcgtaaagcaatccatgttatgaatgaattctc

SEQ ID NO: 216917 - DNA, 449 bp, Glycine max
  unsure (1)..(449): unsure at all n locations
tgtcatcgggagacatcagaggctaatattataataaatttgtttttaaaaatccaccaaattgatagagaaaaatctaaaatcatacatcttagttaaataaggcatgctagcccccaacattattgcattttgattccatctttggacattcaaattgttgattatttttcctgttatcttttcctttgccttagtctaaatttcgaacttacaattcggtatctctttcttcttttgtttctcctcatttcttaataattggatttgcatcacttaagtacaaccaaagtcccttctggattcaacagttgaacttcaatttcaatctttactacttgtgataaaattangacacttgtcaatctattaacaagtatttggcactgttgatggngactttggtattcgtacttggtcgttaccaaatccaatttgagagcaatcat

SEQ ID NO: 216918 - DNA, 396 bp, Glycine max
  unsure (1)..(396): unsure at all n locations
agcttaggngncatatgctaggccgacttgtgttattaatgtatgaagcgattgatgccgcgtttgaatttaacgagcttttccttcgctatatatgcaaataaaacatgtgcatagttgataactatgtccgaattagttttttgtcttcaaaagcatgctagtgttatctgatctgactcatagcgtggtcatttagccaaggacaatgcgattatgagttggttatatttaattttggtaattaataatctatttgtttattatgtgttgtggtaattttcttctgaattgtggtactgtctatatcacctcaaatcttcttgaactgactatcttcggagtacaaacgttaccttgtcggtcctttctctctttattaaatcttacttataa

SEQ ID NO: 216919 - DNA, 428 bp, Glycine max
  unsure (1)..(428): unsure at all n locations
ntagctctaagtggtagatatntataaaataagaagagttttgcttctgttntacaaataaaagggattctatataaaaaaaaatgcaatatacaatggagattggagtaatttacacttatttgaattatctgcattgttttctctctgtaatatgtatttttttcctattgtttaagcgaaaatggttttatgtatgtttaattgtaatccactgagctaataaactaaatgtaataaattttcttttcctgtggcatgattgttgaatatcttattactttctttaacaggtgctgtggattatccatgtttttgtgggctcctgaagcaacttgttggacctttaaccacacaattgtcagacctaagatctaccattgtgaagcaggtgctctaatagtatgataggtctatcatctctctta

SEQ ID NO: 216920 - DNA, 375 bp, Glycine max
  unsure (1)..(375): unsure at all n locations
tgcaagctngcatatgcctcgatgtactcttcattttctgtacctaaaagnntgtggttgtaggggtaagtccttcgcttctcaaatgccacaaacacactgtcataccctaatttcgtccggggaccttggcttggtggcaagcaacttgtatttggtgtttggcacccatcattaggcacattgtgaagttccgtgatgtgccgaaaaccgaaagaaagtattgatgcacaatccgtaaggttccgtgacacaccggaaatcaaaaggaagcatcgttgcacaattagtgaggttccgtaacattccgtaagtcaaaaaaggcgatgattatgtaatccgcagggtttcgtaacattaccgaaagaaaacaag

SEQ ID NO: 216921 - DNA, 471 bp, Glycine max
  unsure (1)..(471): unsure at all n locations
ntagagttagacatactagaatgaagatctaagatgtttttatattcatgagaaatattaacgtgaattgggatagataattcgaacataatgatgattaaaaaattaacatgagtccacacaatattttggtggaatcagtacataggtagctaggaattagtaactcccaacctattggcaaaacgccagtatgaaggcacatgctggtgcgtcaatgtcaacaatttgtcaatatttccttatcaaaaactatggcatgattaagagattatctttggggccaaacaatagggaattagggagatttatgggccaaattattataatttgttgcctccttagcacttaaatttgttgcagctcttttactgccaaanaaatctagcagatgtgtttacttctctaaggtaaggtggaaaaaaaattaacaacaataaaatgagatacattattgaattaaaaagtaaa

SEQ ID NO: 216922 - DNA, 380 bp, Glycine max
aaaatgagtcacactaactaaacaaactagttaaattatgaaattacatcaataccaattaaaaagaaaattccttcaactcaccattcattacaatgtaatatcaaaaataaaaacaatcatcaaaattaacctcaatcaaataaaaagtatgttagatataacaatattaaataaaataaaatcaagtaaaactctctttgatatatatatatatatatatacacatatatatatacatatatatgaaaagagatagcgatatgtgttacaagccatccagtacgacacagatatgaaaaacagagcagtgaaagacatgaaagagaagtgttattggataaattaactctcctgacagctgcgtagagaccacgata

SEQ ID NO: 216923 - DNA, 449 bp, Glycine max
  unsure (1)..(449): unsure at all n locations
accttaagcaccgcggctgcagctcttccatagagggacgcaattgtcttataatntcataccataattgaatatttggtcctgagttttcagcactcctacaatgaaatcaaaatgtgataatttgttaatctgaaaatatagtcttatgaggattgtcctaaaacaacacccatcagcagtcagaaaacttaatcattctatgacaggatttgataatctgacaagcccaaaaacttttcatcttatgataggatagttgaactttttaaagtgctgctctaatcaaaagactagtaaaaaaagagcatacaacaaacatgctgttgtagaattctccatcaactttcacagttaatacagcattgataaccagttaaccattgattttatgattttgtcatcaatagtttgacatttaatataagacatacatatggataactgat

SEQ ID NO: 216924 - DNA, 456 bp, Glycine max
  unsure (1)..(456): unsure at all n locations
tataaaactcagcttgaggctgaacatgagcttgagaagataaaggctattttttggcttaattttcttatacaattgattaagttgtacaaccactttatgtataacaagtcaaacttactatcttcagaaactttacccaaggaagatgaaggtgcatatgatcaagatgcattggttgactctttatatgcgatgcctgacgaggaggaagatcctgaataggctgaattgaagaatgaagctttgaaggttgcacaagaagcagtttctaagcagagaatgttgacaagtgcttttgacactgaatgcttgagtctgcgccaagctggtgaaattgatccactttcaccaaatgttgttggagcaagtaatattgatttgctaaccccgcgagtttcttntatctctctattcgttgctgtgtaaattatttctatacttcatggacatatg

SEQ ID NO: 216925 - DNA, 440 bp, Glycine max
  unsure (1)..(440): unsure at all n locations
ctctaagtcacctgcggcatgcaagcttatcgatcataagagtaataagaccttttnttgnttaatcaaatcgctcacaacaacaggagggacacctgcttactactgcgctctgcagtggttatatttcctctttcaaaagagacaatgtcgtgtttgcactgatcactttgatcacctttgctgaaccatgaaagtttaaatgaagcctatctcgagaataaagaaattaattaaaatcaattcttttaagtaggagtaaatcagagtatatacattgcaattctagcaatagacaagaggaatatgtctttaaagtaaaaatggtagaagatgtcttaccacaggtttctaacgtcaaataaatggcatcataatacaagatgatggaaaaattaatgaggatgtcatgcacatgattcaagcgggatggataaaat

SEQ ID NO: 216926 - DNA, 419 bp, Glycine max
  unsure (1)..(419): unsure at all n locations
ntactttctnttggtttgtgtttctctgcccatcaacattttttttatttggtaaaaactgatttctagtgtttttagtgaaaactgcacacatgaccaaagatgtgttaattacttatcctatcccatgtataagactcattctttagccattttagctctttcattgctatagttctgttttggaggataatttacccttgtactttcttcctgctctttaatgaaattatcttctttctattgaaaacaagctatccttttacattaatgaaactaacattccatttcttcgtttgacagaattgcagctttatcatttgtgtatccatttaatttagtagaacttcttttccctggtaaaactttctggtcccttcatcgtaaactttgatataccaacatgaatcactcatgac

SEQ ID NO: 216927 - DNA, 378 bp, Glycine max
agcttcctctaccggtgaaaaaacattgtctgccagcgcttgtaaaaaaattgcgcaatgtcggctgaaaaacatcagttggggctgtttaactaccgatgctggctactgttttttctattccacccctgaataatacttggacgatgtcgatttggaaatgttcgatcggagtcatccggtcatgcttctttttaagacctcgatctgtcatcttttcctggccgacgtcggctagcatttttttcgatcaatatcggtgaatcatgctttttgccaaggtgggctaacgttttcgtggctgatgaagtgagagcatgccagtgtcggccgaaacacaatctcgcacgaaaaaccctagccgacctacattgtaat

SEQ ID NO: 216928 - DNA, 441 bp, Glycine max
  unsure (1)..(441): unsure at all n locations
ntgagcanattcaaacgacaataacttattagtcggatgtctaattgagtcccgtaatatatcgagacgctgaaaattgaatgctgaaagctctgagcaaattcaaacgacaataacttttaactcggatgtctgaatgagtcccgtaatatatcgacacgctcgaaattgaatgttgatgctctgagcaaattcaaacgataataacttttaacttggatgtttgattgagtcccgtaatatatcgagacgttcggaattgaataccgaagctctaagataattcaaacaacaataactatttactcggatgtccgattgagtcccagaatatatcgaaacactcgaaattgaatgttgaagctctcagccaattcaaacgacaataactntttactcggatgactgattcagtctcgtaatatatcgacacactcgaaa

SEQ ID NO: 216929 - DNA, 410 bp, Glycine max
  unsure (1)..(410): unsure at all n locations
agcttctggagggacatcttgacttgctttccaatctgacattcaccacagattctgccttcttctattttcagattgggaatgcctctaacagcacctttttcaatgattttcttcatgcctcttaagtgcagatgtccaaatctttgatgccatattttgacttcatcttctttggagaatagacatgtggaggagtaactggtttcttgaggtgtccataggtaacagttggcctttgatctgctgcccttcattagaacttcactcttctcatttgtcaccaagcattctgactttgtgaagtntgcattgaatccttcatcacacaactgactgatgctgatcaaagttgcagtcagtcccttcaccagcagtactttgtcagaactaggngtccatcatggact

SEQ ID NO: 216930 - DNA, 446 bp, Glycine max
  unsure (1)..(446): unsure at all n locations
taataggtatggccgngctaagggatgtttgccttgtattgagaccgtagaaagatcgcttaagaaggagtgctatattaatatcacattctgttgctaaatgattttccttggaacaatcttgttggaggaatacttttcctacttttccttacccttggcctttgaacacaaagccttactatccttcattctctttagtttttctagcttttcttcctcatccctcttatctttcatagttaggcgatctttggccacctgtgaaggtgtttgaggatgcaacacacatatagtgccaacatgggtgagggtaataccattagttaggccattgtcaatgatcttcctatcaaattgccatggccttcctaaaagaatatgtcctgcctccatgggaactatatcacacttaacttcatccttatatgtcccaatggagaaag

SEQ ID NO: 216931 - DNA, 358 bp, Glycine max
tgaagaagaagcaggagattcacacgcgcctcgccgccgaacgcaagaaattcttgcacaactggaagatcaagttcttcgagaggaggaaaatcgaaagatgaatcagacgcctcgagaaactgcaccgtgcttaaaatgagtattcaatcatgtttcgagcgcggcgcagggtttcactttttgtgccccatcgacgattgagttcatgcaatccgaatcgcatggagcagtgacaaccgagaacgacgtggagctcgtcacggaagtgggtgatgctggtggccaaggcaagaggaagcgcaagaagctgaagggggctctagggattcaacacgcggaggggaattatgaatta

SEQ ID NO: 216932 - DNA, 334 bp, Glycine max
  unsure (1)..(334): unsure at all n locations
gaccatagaatctcaagctgtaaatccttacaagagaagattcagagggatgtacttttcctngtnctctatgaacaaccaagtggatgttccctccacttgaactgatccacatgagatgtaccctcttttgttctcagcttcaacaacccaagtagatgtatcctttacttgtgccatcaaagatgtgccctccgaaaagatatcatgtgattggtccttgttgaatcctctttggcaaagggagaagagagacacataaagaatccattgtgattagctctagttgaattccttttggcttatggagaagagtatgaaaggatatacacac

SEQ ID NO: 216933 - DNA, 360 bp, Glycine max
agctgcatgaagttgaatcaagatagatttttggatgtttttgatgacaaatataatgacaaaatgcccttgtttatgttttcaagattgagtcctgaacaattcacgaatcaagagatagattcatgagaagtttcaaggcttcagagctttctaatatgtcgcgaatcttgagatttcacgatcatgagtcaagactcatgattcaggagtcctgagaagactcagtcgagataagtactaaaaagtttttcaaaacattgagtagcacatgattttttcacaaaaccttttaccacagagtttttactctctggtaatcgattaccagtttattgtaatcgactactagtggcgaag

SEQ ID NO: 216934 - DNA, 476 bp, Glycine max
  unsure (1)..(476): unsure at all n locations
tcaggctactcaattgctccacgttgctgcatggaagggctaatgtctgtatggnggtcagcagaggagcacaaaccacaaacccttgcgacaggtacagatttctgattcaaggccagctgggttatcaagttaaccaatgcatccagtttgccttcaagcttcttagtttcagatgatgcagatgggtttgtagctacctcatgcactcccctaatgactatggcatcatttctggcgctaaactgctgggagttggaagccatcttctcaattaaatttctggcttcagcaggagtcatgcctctaagggctccaccactggcagcatctatcatacttctctccatattactgagtccttcataaaaatattggagaagaagctgctctaaaatctgatggtggaggcaactggcacatatgtttttaaatctctcacagtactcatacaggctctctccactgagttgtct

SEQ ID NO: 216935 - DNA, 440 bp, Glycine max
  unsure (1)..(440): unsure at all n locations
tggntcctaacatgtggttagacacttttaatgctgaatgtcttcttgtagacatatatacctctacatatgtgtgcattatgcaaccaccaccattagtggaataaaatnttaaatgcaaacccttctatggtatatatcctatataggcattgttagtagtaaataccaaccgtgaaccagaaaattgtggattcaacctttttcgttttccttcttcttcatggcagtgctatatgcaactcatgttcttctcttgatattgtccactgcaacaactctccacttcagtgcaagcaaggcagcaaggctcaatatgacttgcagcgagaatgaaaggaatgcactcctcagcttcaagcatggactagcagacccttcaaacaggctttcatcgtggtctgacaaatcggattgctgtacatggccagtggttcact

SEQ ID NO: 216936 - DNA, 370 bp, Glycine max
  unsure (1)..(370): unsure at all n locations
gcatgcaactgctctaaaacatagagatgttttattgtagaggcgntgccattttggtttaagagacatttcttggaaaactaactttcaatgttgccttccaggaatggccccagaagctgcctcaagaggccaagaaggacaggtaccgaagaacatttccctctcgagtatacagtaccgnttaagagcctgacaccagcacgcttcaggccatcaaggatggtcttttccgagcgaccgtccactcaggacacagatactgattccagagaaataacgccacgggacatactggtactcatggcagtcatcacaaaatcctgatttatccatgctgccaacaagaggcggctacataacctggtaa

SEQ ID NO: 216937 - DNA, 465 bp, Glycine max
  unsure (1)..(465): unsure at all n locations
cctcatgctgcanatatttacaatagacctgctcaacctcagcatcttattcaaccacagcagagcaattatgacctttccagcaacagatacaaccctggatggaggaatcaccctaacctcagatggtccagccctcagcaacaacaacagcagcctgctccttccttccaaaatgctgctggcccaagcagaccatacattcctccaccaatccaacaacagcaacaaccccagaaacagccaacagttgaggcccctccacaaccttccctcgaagaacttgtgaggcaaatgactatgcagaacatgcagtttcagcaagagaccagagcctccattcagagcttaaccaatcagatgggacaaatagctactcaattgaatcaacaacagtcccagaattctgacaagctgccttctcaagctgtccanaacctcaaaaatgtcagtgccatttcattg

SEQ ID NO: 216938 - DNA, 472 bp, Glycine max
  unsure (1)..(472): unsure at all n locations
ccttcttatccaagactcatcttggaggagagagcgcctttttttatggcatattncttaggggatggcgcttcctttcaactcttctcctttgtcttccgatgcatctccatggtggaaaatcaccattaaaggacctcattgaagctcaaatatccagcctccataaaagccccacaaagcaaggttccatcatatccagtggcaacctactatttaaaagttaaaaatgaaaaaattagtgtttaagtcattttagaattgcagtttagttaatttacatgtttgaccatcatttcatgtatgcacattaaatattcttttaattcatagcagatattaaattctttatggaatttttgctaaaagagtttgaaaacatactaaaaaatatctggtgtggttctaataaaccccaatacacaacatgnttttcaaataaaaacaatgttgatgtgtacaaacatcattt

SEQ ID NO: 216939 - DNA, 298 bp, Glycine max
ttcccggagctggtcatcgaggacctgagagaaaatgcctttatgaacaaatgttaaaatagtcttaaactgtttctaattaatataaaacatatgtgtggaggccacaccttttcaatcattatgagatacttttaacaaaaatggactaaggcgtgtctattctcttgatcttgatctggacttgaagtaaacttgtgttgcttctatctttagcatcaccgagaccattatacacatatattcgcacttatggatctagctagattttccacacaaaggtgtaagcttcttcttt

SEQ ID NO: 216940 - DNA, 437 bp, Glycine max
acctatgaaactaacctttatacggaggacaactagagcgatgaggaccattatctatttgaatgacccttgagaaggcctagtgtctaactaaggacaataaactaagcgctggttgggaggcaagccaacatattttgtatgaatggagtcatgtttttgtattcattccacaaaaaacagcccgacagctgcaaatagaatacaggaggtgcataaagtaaaggcccatcaggagaagtcagcaataggagaggtgacagtagcaaaagagaagtgggcttcacgataccacgcgcgtatcgcacgtccaggcgctaagcgcccagatacgtagacaaatctttgaatttaaagttctaaaggaaaaccaagggacgcttaccttggtgcgcttaacggacatgtgcgcgctaatcgcgtgaatcataaaatac

SEQ ID NO: 216941 - DNA, 418 bp, Glycine max
  unsure (1)..(418): unsure at all n locations
agctngaacttgtatggaatttgggcttgtattttattaagaagtttttcaaatttagatctgatatcacactctaattcaaaatcttaagatccatgttcatggatcttctccttaacttatatgaggtttaatcccttatacctgatgttatggtgcttaatctcttctaatcgatgtaaaatccccctccacacttgtattagaaatatgattaagcaaaagtttcaattatacatcagaagaggaagtcgaaaatctaatcctttaacatggtgaattttagttattccaaaatcggaagtgaatgttttgcttagcctgatatgctgtttttttaactcgtttccttaaaattccaagttcccattcttatctctatcatagtcagagcttcccttaatactgaattcaatac

SEQ ID NO: 216942 - DNA, 433 bp, Glycine max
ataattgaatccatatctatgagagtgcggccaaacttttattaacaaacagcttaaagagaggcagtgaaatcaagtcacagaaagcttcagatgaagcccctaatcaaaacgcaagaacatcttatttgaattgttaaaaacagatcaataaatcttgagaaagattcactaataaatccaacctacagacaattccagcagtttgattgctgcttttcaaaaacttagcatttgtcaaacacagtttcctggttctcctcatttttgtatatcaacccactaaaaaaaattataagtgcactacatgtcacagaacttcaggtacctctcattcatcaagaaattgatcttaagtacagttaggcataacatgaaatataattgtaacacagcaatataagtgcactacattggtagtcaacactcacat

SEQ ID NO: 216943 - DNA, 408 bp, Glycine max
  unsure (1)..(408): unsure at all n locations
agcttngcaaaagagaatgagagaattacttactttgttgttgcaggcttttcattataaattataatgttagctttagggggaatgtattttaggtaaaatctgtaataacatattttgatattgtaattgttgttttgctgaagaatttgtagtagaaagaaatantgtgctactgtcagttacccatttcaatgaaatataatttgcagatgaaatttgtcgctatatagctttttgaagttattgaatgagcactaaaccaggtggtcctactccaactccaaatccaaaacattgtgtaaattataaaagaaagagaagaaacatgacattaaatcatgtgattatttttaaaatatcagcaaacactttctataccagagaaccaacatgactcatcaatta

SEQ ID NO: 216944 - DNA, 425 bp, Glycine max
  unsure (1)..(425): unsure at all n locations
ctgttggatgatcggatnggattggatgtgcaatcaatgtgttttataatcatatctataagaactgaggtgcttttgatctttaaattctgctgttatagttcttgcttgtaatatgtaaccatggtgcatttttttttgttataattgtatcttttattcttactatcagtgatttggcacatgggtgcatgttaattcgctttttttattgaaaaattaatacagttgttcttaatttaacaaagatttacttttctttatgtagaagagtaactttaaattactatagtatcatttctcttatcagtaaactaatatatcagtctagttaggtttcgaaaagagaggagaagatatttctttgctcgttgttataagtctctcattattactcttaaaaaaaccctttaaaaatgtatgct

SEQ ID NO: 216945 - DNA, 408 bp, Glycine max
agcttatgctgcagagatgtacaatatacttccttaacctcagcagcaaaatcaaccacagcagagcaattatgacctctccagcaacagatacaaccctggatggaggaatcaccctaacctcagatggtccagccctcagcaacaacaacagcagcctgctccttccttccaaaatgctgctggcccaagcagaccatacattcctccaccaatccaacaacagcaacaaccccagaaacaaccaacagttgaggcccctccacaaccttccctcgaagaacttgtgaggcaaatgactatgcagaacatgcagtttcagcaagagaccagagcctccattcagagcttaaccaatcagatgggacaattggctacccaattgaataacagcagtcccaaaatttg

SEQ ID NO: 216946 - DNA, 434 bp, Glycine max
  unsure (1)..(434): unsure at all n locations
ctataaaactaagctatagaatatatataaaaaacggtgacagggattttttatcatgtnncctncgatgagactaatgccattcttccaatgaaggattttttagatgatatttcagattccttagaagatacacatattcatggaaatgactctatagaaaaagatgaaggatgcaatgaagattctcaagataatggagttagaacaaataatgaacttacaagataatggaaagcctcaatagatcatcccctcgacaacattaatggcgatatatcaaaaggggtaacaactagtacattctcttatagatctaagcaataatatgtgctttcgtctctatgactgtacctaactatataatagaagccatattgatgtattctggtcaatgccatgcaaaaaactgattaatttgtaaaaacaatgtg

SEQ ID NO: 216947 - DNA, 303 bp, Glycine max
gacactatgatagctttaactgcgaggttcagggaacgactacctcattgagtttgaacgtttaacgaattcaatcattggtttttccccaacggcgctactgagctgttatatttcgggccttaaccttgacctccgccgcgaagtccaagctctgtaacctatgtccataccacaagcagatgcgcttgccaatttgcttgaagaaaagattcaggacctgccttgccattcctgcactctatataccccttctggtctactaccttaaccgccaccacccaccacggttcctttcaccat

SEQ ID NO: 216948 - DNA, 442 bp, Glycine max
tgctgaagaagggcaattgctgtagagacttatatttcttctttgaatgctctaagagagggtgctgaaagggtaggtattatgaagaaaaatgttgctaaagtcacacctccaaacactcatggtaatggaagctgcctgtaagacaatagcaagaatagaccttcatcaatttctgatgtcatcccatcattatggccttggcaagattcattgccacatcacttcaatcttaatgaccttgggcttcctgttactgatctgaatacccccagtatggctcctgtttctattcaccgatatggtggccctctagataacactgtattgatatgaatcacccttgtgaatattagtttatttgtttcagatatattggtcattactttaatcgactatcatttatctatgcaagcttgccttacttgttcaagtctatgac

SEQ ID NO: 216949 - DNA, 449 bp, Glycine max
  unsure (1)..(449): unsure at all n locations
agcttgctactacaatcgcccccattttgatgatgacaaacctganatcaagaaacacatacaagctctatcttctaatcgatcactcacataattctcccccttggtttttaagttaaagctttacttgaaattaagttatttaattatatgagttcttgatttaatcccaactttttctcccctttttgcatcaacaaaaagccaaagtgcgtatagagacataaaatcatacattcactgataatcatccaaacaaggaagataataatgcatacataaactaagcaagtatgataataattcattcataaactataatataatgccagataatttaaagagtcatccaagataaccaaattagaaagatcatactaataagtgtttcagaacatagccaaatacacggctagaaatcataatactaataataatagtaatatcta

SEQ ID NO: 216950 - DNA, 453 bp, Glycine max
tgaaaggcattgattcttgctcaatcaattaattcatattctaatgatgtacagtcccttgaatgttaagtttgaaataaatggagcaaatgcttgctcggttaacctttcattttctttaacattttacatgcaacttaccaagatagaatcatttcccaattagtcgataattttgagtaccatttaatttaattttcaaaattataataatatcatttaattctgaaactattgaacaaaaattaacttaattaatctctaatgcaattagatcgtaatctcgtccacttttgtctattcttttaatttcctcttttttgtcttaaaaaagcctagatcacaattattttagtcattaaaattaaaaatataaagctgaaatggcttcatttcaaagtaatcttaaaaaatgaaatgatattcttaaacataaatcgaatgactttcatg

SEQ ID NO: 216951 - DNA, 356 bp, Glycine max
  unsure (1)..(356): unsure at all n locations
aggcngcaagcttgcacccagctcgcggaggggagcttggttgtttgttccanaagcaacagtcttctgaaggaatcttttggagggcccaagtgggcctggatgctatttgcaccctcatttttactaagaatacccctctgccttttattggtgactcttttttcgtaaaggtacggaaacttacgaatctacgaacgatacttgttttctttctgtaatggtacagaaccttgcggattacattatcattccctttttgacttacggaatgtgacagaacctcactaactgtgcaacgatgctttcatttgatttccggtgagtaacggaaccttacagattgagcattaata

SEQ ID NO: 216952 - DNA, 96 bp, Glycine max
  unsure (1)..(96): unsure at all n locations
tctcacatatnttcctataaatagggggagacgcgaacgtttgttttttctgagccctcccggctaaacataattatcgttgacttagtgccccat

SEQ ID NO: 216953 - DNA, 425 bp, Glycine max
  unsure (1)..(425): unsure at all n locations
ntccctttggttgctctactaaggtttcgagagcggtcatatatgtttacgagatggaagccttcattttgtattgttttcatgcgatacactttcctctctccatgaatattatttctcatatcgcaatagtgaaggtgtgaggaaatgaatttcacaccaggtgtatacgatgatccaaccattaacaagtcacggatcatagttctactgaataggtcttgagtctctacgggaaaagagaaagctacgatgcaaaggacatttctcttagctcaaaaattatgtctcaatttccaatgggttagagatccagctgactgaggagagcactcatgaatgaagatattaacaatcggtcaaatctatnttgagtactctacatctattatgtagattaaagatatccatgttccatcaacaac

SEQ ID NO: 216954 - DNA, 454 bp, Glycine max
  unsure (1)..(454): unsure at all n locations
gcttgctctacaggagcggctgtttgatgtatacaaccncngaaaacaagacacacacacacactttntcctagtcgatcactctcatnaaatctccccctctgttgttgaatgtatgcttatcttaaaaataaattaattactcatgtgagttcttgatttaatcccatttctctccccctttggcatcaacaaaaagccaaagtacgtatcaaaatttaagtatgcaaatataactagacattcatacagcattcatgaaaaaccatcaatcaaatcatgaagtaagaaccatgaagcaacaatcataaatagattaactatgatatccatatagccaaataacatacttgttctacataccatgcaaatatggatttagtaaattgttcacataccatagtaatatacagatttattttgataaatcactgacatctattagtcctaattc

SEQ ID NO: 216955 - DNA, 458 bp, Glycine max
taatgacgccttatgggcttacagaactgcattaagactttttatgcctctcatcccttcaaatggtctatgggaaggcgtgtcacttgatggtggaattggaacacagggcttattgggccttcaggctgctaaattttgatgaatccctatttggtgtgaagcggagactgcaactactagagctagatgagatgagattaaacacctatgaatcatccaagatctacaagcagaagataaagacgtactatgactgaaagctacaaaaatagaacttctaacccggtcaacatgtgcttctcttcaattcaagactcaggctcttgtcgggaatgctcaagtcaaaatggttagcaccctttgtgataaaagatgtcaagccatatggagcaatggaactcatagatccaacatcaagtgaaccatagaggagctggatcgtgaatggacaacac

SEQ ID NO: 216956 - DNA, 380 bp, Glycine max
  unsure (1)..(380): unsure at all n locations
ctgaggctgcagctatcaagagtaagagcgcgttgattaattttttcaanccgaatcaatcatataattgactccaaccaatttaagattaagttaccacaaagtgatgtgaagaaatctatcaaacagcatgtagtaaaacacaattatgtcagaactattttcacattaaaggaaacaaaagcattacaaaaatttaaaactatgacagctattggtgtcagtatttttatacatatttaagaagagaaatgatcatatcactttcaaaaaatatcatcactttggaaattgtggaaataatcaagcccacatggaaaagaatctatataacttataaggagggaccctaccctgaactacttgggtgataagcttac

SEQ ID NO: 216957 - DNA, 432 bp, Glycine max
tcgcttaattcatgtgcagaagtttcatgcaatagtgagctatgttgtttcaacattttctatgcatcatcttgattgtaaaatggattatctttcgtattttttttatgtggagaagttcgttggatgtagtacatttatggttctgatgtttcttatggttggatgttgcagtcgcactatgttttgttgctctgttccttcaaagaacaattgctacaacatgtccgggtccatgcaatggaagcattaatggcttgttgtgagttagagcaatcattgcatagtctaacacgtgcacacaaagtgtcttcttttaataattgtcgcatcttataataaatgggaacatttgttgcgcgatagaatgataaattgaaaatagcatgtttcgcattatcttcttaccagttattgatctagtgcatgtta

SEQ ID NO: 216958 - DNA, 375 bp, Glycine max
  unsure (1)..(375): unsure at all n locations
ttttactgggganaaaacggagactgccatcaatattgggtataatactgtgattatgcattcttcatattggcatctgcgtgataattacttatcacagtgtttgaatatgcagtttctcttgtcgcttgcttagacaaggaatgaaacagactataattcatttggagattccagatattcaagcattataaaaggttggagacaagatggctattgccaaggtaaaataaatttcaccctttaatctaggttctctttagaaagatgtagtttgcatatcgaggattctatatacttacagtggacatattaacaaattggttttcttataatatttcaacatcctcataagatctctctacattagaaatt

SEQ ID NO: 216959 - DNA, 445 bp, Glycine max
  unsure (1)..(445): unsure at all n locations
agcttctcaaggaagagcgctcaagatagcttctcanggaagctacctattctataaatagacgcatgtgtaacacttgttgtaacttcgatgaatgagagtcttgtgagacatacttcaaagttccactgatctccctcttttattccttcaatttcgtgctcccccctctctctttctctccctctttcttttccttcattgaagcatccttccaagcttcttatccaaggctcatcttggtggagaagctccttcttgcatggcttattccctagtgggtggcgcctcctctcacctcttctcattcgtcttccgctgcatctccatggtggaaaaccaccattaaaggacctcattgaagctcaaagatccagccttcatagaattcacacaagcaagcttacatcagaactatcatataaattctagtcactgatagtca

SEQ ID NO: 216960 - DNA, 369 bp, Glycine max
agcttctatataagctgaagccatttattttaatcacacgttgagttttattcagaaaattagagtttatctcttttatcttggtgagagtgattctcctaaattcttgagtgattcaagaacaccctgtctgtatcaaaggactttcacaacctttgtgtgttgccctcgctggaaagagtgattctttccttcctatcatctccacccttgttctttcaaaccacaattccagaaaatccacctctgcccaaaattatctcgtgaccataactcccattttacacactcaaattaagtgattcttgagcctaaattgaatttcaaaacgagaaccttcacctcgtttgggaatcacctcatttggag

SEQ ID NO: 216961 - DNA, 428 bp, Glycine max
  unsure (1)..(428): unsure at all n locations
atataatactcaagcttgatattgaacaagggaagctgccgagagacgtaaatgatcatatcttatcacacagatgttcgattcaagcgcttaatatttcgagacgctcgaaagtgaacaaccaatgctctctacgaattcaaatggtcataacttgtcacactgaggtccaattcatgcgcataatatattaagacgctctaaattgaacaactaatgctctctatacattcaaatggtcataactngtcacacggatgtctgattcacgcgcatcatatatcgacacgcttcaaattgaagacccgaagcgctccagaaattaaatggtataacctttacaccgattacgagtatgcgcattaatatcagacgcttaaattgaaaccaatgctctccaaaattaaatggtataactgtcaccggat

SEQ ID NO: 216962 - DNA, 156 bp, Glycine max
  unsure (1)..(156): unsure at all n locations
agctntngaaggacgtgactgatcgatgtcttatcccaatcaaataaacatgaaaatgcagtaactaggaagtgatcctaggtcgtttcccaacgagcagtgacaagccaaatgttcataatatacttgcagtaacagtaacagtaacgatggggg

SEQ ID NO: 216963 - DNA, 450 bp, Glycine max
  unsure (1)..(450): unsure at all n locations
ctcacctttatgnaaaggatgtgactcttcacattagaatttttttttacgttcaaggcactggtaatcgattaccaaaacattgtaatcgattacaactttnttgaaatcaattggaacattgtaaattcatttgaaaactttttcaaatccattttgctactggtaatcgattaccaaagagtaaaaactctttggtaaacatgttttgagaaaaattcatgtgttactcagtttttgaaaagaaaccttttcatacttatcttgattaagtcttctcttgattcttggaagcttgatccttgaatcttgattcttgattcttgaaatcaactatcctcttgaatcttgaagtgctcttgattctatcttgaacatcttgaactcattatttgattgacctttgagctttttgtcatcacctttgttatcatcaaaacatctttgaat

SEQ ID NO: 216964 - DNA, 454 bp, Glycine max
cgcaagctaaagagtgatgtgaagatgaacgattctatctttcaagattccactcaaagattcaagaatcaaatgaagaaatcaagaagcatcaagccaagtcaaagtaggttagtaaaaagtatttttcataaaaaaacatcaaatagcacattttttgttttaaaaatgaatttctaaaatcttctaagttaccagagtttttactctctggtaatcgattaccatttggtagtaatcgattaccagtgaccaagatggttttcaaattggtttcagtgctttgcaacgttccaaaatgattttcaaatagtgtaattgattacactatattagtaatcgactacaagtgaatctgaacattggaattcaaatccaattgtgaagagtaacaactctctataaaatacattgtgtaatcgagtacaccattatgggtatcgattaccagtga

SEQ ID NO: 216965 - DNA, 440 bp, Glycine max
  unsure (1)..(440): unsure at all n locations
gggacactntanatatgaatgtccagatgtagagaagttctttattagaagaagtactacaaatccaaagaaatgaaagatctcatgagaacctaggaggaggacttggacaacaactcgtatgatgaggatgaagagaaagctaacatgtggaaagagtatcaacaaaatgatttgaaacaacttaatgaactttgtgatgatcaaaatgaagaaatatatgatctatggagagagagtgcacaagcacacaatgataattcaatccctaaacacttttgggttaaagtaatgaatattgcatgttatttacaaaataaaatctatataagactacctatgaattgtggaagggacaaaaatccaacatatcatactttcatccctttggatgtaatggttcattcttaacactanagataacttggaacattttgatt

SEQ ID NO: 216966 - DNA, 342 bp, Glycine max
  unsure (1)..(342): unsure at all n locations
aaaaaagatgagcacaaataaaaagttttgggaaaaccttaaaataagtcttttttatttttgttagaacggataagacacagaaacaaaacaattatagactactataatctatggaaacaataacaaactcccttcccatcagcttgtaaacacgtactcataatataatgtagtaaaaaagaacacgtactcataacaattagtgctttttgtagcagaaccaatgactccactgcatagcttccatcttacccaaaaaacttgntaaacatcaatattttgttggggaatgagtgtttttccaccaatggtatcttaactagcttaanaactgatatc

SEQ ID NO: 216967 - DNA, 364 bp, Glycine max
  unsure (1)..(364): unsure at all n locations
tgaantattatgcataggcactatgcgcaggaagttcgttctttgaagntcgacttggttgctagattgatcttactctaatcatatgtcacatacagcttgctaatttaagatcatcttttaaaacagtattctggttgcaaatttcttagatgcagctttatatatgcgttatctgcttatgtgttgaaattcatcgtgttagaaattttttaatattatctttgatttctggtgcaacggtaaagatgggccttggtgacttgttggtcatgggttccaatccggaaacagcctctttcatatgcaaggtaaggctgcgacaatatccctcctcataccttcgcatacgaaaagctctggc

SEQ ID NO: 216968 - DNA, 376 bp, Glycine max
  unsure (1)..(376): unsure at all n locations
agctntgagccaaaatcctgactctctatattccttgacccagggtgagaatgtcaatccttaccctcggaagcaaaaaagaatagaagggaaatttccaatcaaaaaagaatagaaggaaaatttccaatgaaagcaaaaaaagaaaagaaggaaaattccccaatcaaagagtgggagaaagcaaaaagaaaagaaaggaaattcccaatcaaagaatgggagaaagttaaaaaggaagaagaagaaggaaagaaagctcctgatcagggatcgaaggagaaacagataaaatgtgcagagaggtctttatactggacaatatctgaacaatacagaattgtcccaaatgaacaaaaagaaggaaaggaaacca

SEQ ID NO: 216969 - DNA, 456 bp, Glycine max
  unsure (1)..(456): unsure at all n locations
nttggagtagaaacatgggaccaactcattgtatttcattttaggaagtcgtatctagtcaaggtctgagagaccatacaagtttcctaacgatttctaattatgtgggccattaagtctatcatatgctgacaatagccgagaagcccatgaatctcttcgggggcggagtaggtgtctgccatcgccttggccttggctaacaatcggggaagttcttgactcccgttcaaggtaagagcaaaccgatccatccacatggttgcctcttggtgtaaagagtcgatcacccttcctctagcctctttttccgcatatacttgagcatactcatccgcgattctatgctcgtgggccgtggctagacctaactcttcttcgtacttggcgatgatagctaacatgttggtctctgtctcgcataaacgctgagacaagcttcttttggacctgaac

SEQ ID NO: 216970 - DNA, 450 bp, Glycine max
  unsure (1)..(450): unsure at all n locations
agcttattcacaagaatatcaaataagatttatatgcanttntacagcagtcaaatctcatttatgtgattacaaaatctaaaactaattgttctattttgaatgcagaataatttttgaaattatagggtttatgtaacaccacatttttcgtaaaataaattaaaaagggttttatttaaaaataaatagagttttagggaaaaaataatgaggtttttgtaattaaataaataagcagaaatagttttattaattaaaataatgttcgtaaggaaaataaaataaatgtttttttatgaaatgaaaaaacaatatttttttattcatttgataaagagaaaaatagaattctttttatgaaatanataaaaaataaacccacattgggtcatatttacatttacaacacgtntctacgctctctcttcctctcacattcatttttcc

SEQ ID NO: 216971 - DNA, 437 bp, Glycine max
  unsure (1)..(437): unsure at all n locations
ntagcaactctntcttnttgtttagtcgaaacttctaatgctcttaatctctcctcatctaaatcaaccaactcatctgacatcattttccaataatggtcgattggaatgtccatttgtttttgtaccctagctgattgcaaatgtatttcgaccggaagtacagcatcatgcccataagtcagtcgaaatggggtagtattagttgattccttaggagaatttctacatgcccatagaacttgatctaacgttttattccaatttcttggcttttgggcaatgtgttttttaatcaagttaattacaattttattggctgcttcgacctgaccatttgcttgcgcgtaatatggtgttgaggttaataatcgaaagccagtttctttggcaaattcttgcattnttcgtccagtaaaaactgaaccttgatcagt

SEQ ID NO: 216972 - DNA, 342 bp, Glycine max
aacacatttctattttgtgaggatgaaaaacatactgaaaatttcgcaggataaattccaaacattttgatatttataagaacaaaaaatatattctagcctttgttttattgttaaaaaaaaagagaaatgctactaacatactctttaacacactccttcatacacactttctcttatgtgttaaaatgtatttacttgaagaacaagttccacaaaatcttgaacctaccaagtgtgatggttgggattggtatgagtgggatcatttgccacaccctttggttgggcctcttgagaaaatggtcaaaggagctttcgacccatctccaattagattct

SEQ ID NO: 216973 - DNA, 466 bp, Glycine max
tcaccacttccgactaaacttccagctggagctcatatacctctttgtgcttggcctggtacgtataatttttcaaaaaattgctgtctggttttttgtttgcatatcctgtttttaactggcatgttcttttcttctgtaactgcaaaaaaatatttacttgttgagtggcttctaactttaataatctttaacaatttttaattaaggaatgatgcccattgctgattgcatgaacaaatgaattggaatccttccaatcctttgaataacttctcatgctatcatgcatgaggaatatagtgcaattttattcatatgccgacatatataaattcttgacccaatcaaatatgttattaacttattatctattagtatgaagttctggtttgaatgttacatttcatgtagaagagggtggatctgagtatcccagacacatgccaggagctgatcacaagca

SEQ ID NO: 216974 - DNA, 358 bp, Glycine max
gaatgagaattacagttttgaaattcttgaatgcattcgaaactctcatcaggaaagaaatccatatctatgaatatagggtctatgatagaacgagagcaaaaaaggtttgtgtaccgtatacattgttcttcagatgagaacaattaggaggatgaaatgaaggaaggaattggagtatcctgaacctcggaatgtcgttggcttctactctaagaacctttgcgcttctttgatggttccaccatttgagagactttctcaaatattcaatcgtttaaaatgaaagagaatgaacaaagattaattctgggctctgtggggagtgattcgattaagaaatgagtgagttatggca

SEQ ID NO: 216975 - DNA, 425 bp, Glycine max
ttttattctaatcttgagattcaagaaagtaccttgattttatatttttatgggataaggatggtcattgaccaatccctcttctatgatttgacccaattgcctagtgacaatgtaccatttgaaggtgcactggacgatgattggaagtttgatttttctgtacatgatgcccgtccgttggtttgcaccaaccaagcggatatgaccggaaggctgcttgttagttcattggctcttgaaagccatattcttcactatcttatagttcacatcttactccaaagatcttcaaaccttgcacaggtttctgaagaagatcttataggcatgtgggcctttcataccggccgacaaattgattgagcacatatagttcggtatcgcatgcataaggcatcgcgattaaatgctcatctaccata

SEQ ID NO: 216976 - DNA, 423 bp, Glycine max
  unsure (1)..(423): unsure at all n locations
agccttatncataatataacagtgcaggggttatctgttcttctccagaaanatttacgaaggattgtatcattcagcaaagttctgactatctcttctaaagatctatttttcctctcaactactttattatgttgaggggttctaggtgccaaaaaattatgttcaatgtcattctcatcacaaaatgattcaaaatccttattttcaaattctcctccatcatcactcctaatagatgaaattntgagatttttcttactttgaatgattttagcaagttgcttgaaagcatgaaaaacatctcttctatgagtatgaaataatgcccatgtaaatctggagtaatcatcaactataaaaagagcatagtagcttcctccaaaactcataattctagaggggccaaaaagatccatatgc

SEQ ID NO: 216977 - DNA, 458 bp, Glycine max
  unsure (1)..(458): unsure at all n locations
nnttggctaagtggttggttcaatcaatcagtggccgtcattattttcttactcatgcactcattccataatcagatattcatgcaaaaatcattactcaatgctagtcgttctctcacattaaagatcacacactcaccaggtggtggctaatgataatctttacaatcaatctgtcaaactacctaacattttcagtcatgctcttaacccatgtgttttttctctcatctaatcactgcatgctcattcaaagcataggatatgcacatcacaattcactcaattaatgcatccgatcaattcaaatcattcaacaaacacgaatattttcaaaccaaacaaccatgtgataaatgtaaaccgctaaactgttcaacacgctttaaatatgcgacctatttaccttctaaattggatattaaaatctaaacacaaatatacactgacacatagag

SEQ ID NO: 216978 - DNA, 449 bp, Glycine max
  unsure (1)..(449): unsure at all n locations
agcttgctatttcttgtggacatggagtattcttgttagaatgntntccctttatgcattctacacaagtactaaaattagtaaagttaacattcctaagaatttcttcctttactagtctcttaattcttcaagagaaatgtgccctaaatgcttatgtcgaaacgtagacaaattttcatccataatacttcgcttagtaccaatggtggtatgtaaggctacgagacttgtttcaaaaataggatctattgaaagcttaaataaatttaactaaaaaaccacaaccaacaactgtattgtctttaatcaatgtaaaagaaacatcgtagaaaagaaaagagaaactagtatatgtaagcctagaaacagaaaccaagtttctagaagaggacacaacataaaaaagtggtttctaataacatacaaaaaccagaattcatgagaag

SEQ ID NO: 216979 - DNA, 448 bp, Glycine max
  unsure (1)..(448): unsure at all n locations
agcttacaacanaagagaagtgtaaatagtatttttagttaatttagactttanaatacttaagggataaaacatataggataaatagactaaactcaaaactttgataaaaaagagagtcaaatttaaaccttacaaagccttattaatttaatctacacatgttttacccctattcaaactactttaaattagactcaatttgaatttaaaacaacagtaaaataaaaattaatagaaattatccaaataactaaaataaaatacgttataatatagataatcgatataattaatcaattaaaaatatcataaatacatctttcaatataagttattacaaaacttaataatcttatcatatatatatatatataataatttaattcttttggtgaagttatataataattaattagtgcatagatataaaaaaaaacctttacct

SEQ ID NO: 216980 - DNA, 465 bp, Glycine max
  unsure (1)..(465): unsure at all n locations
tctccanatgagatagttatctccaatttcttgaagatattatggaaacacgcaaagtgtcgttccttgtccttcttagacgacaccaaaggatatggtgtttccttccttatacatggaacaacctccttcttcttttctctggtcaactcactctatgtcctttctctctttntctcaatattttcatttttttcttcctcctcttcacatattttttctccctcatctaaccttcctcattttctttttctccctcagcttctaacttcttagcatcactagtcctactttcatcctccaccatggtctccctcttgcttctcgttatgacagccttgtattcttcnttgggattnttctctgtattagctccanaacctccagaagaattcttagctatctgcttagctagctgtcccacttggatctccaggctcttgatggctgactcagtgctcttat

SEQ ID NO: 216981 - DNA, 370 bp, Glycine max
  unsure (1)..(370): unsure at all n locations
agctngctagaggagcatgtatggttgcttttctttgagcctcaatgaggatctttaatggtgattntccaccatggagatgcagtggaagacaaagaaaaagaggtgagaggaggcgccatccactatggaataagccatggaagaaggagcttcaccaccaagatgagccttgaataagaagcttggagaggatgcttcaatggaggaaaagaaagagggagagaaagagagaggggggagcacgaaattgaaggatgaaaaaggcagagaagttgaactttgagttgtgtctcacaagactctcattcatcaangttacaacaagtgttacatatacatctattcatagactaagtagcttccttga

SEQ ID NO: 216982 - DNA, 458 bp, Glycine max
tcacctaataagcactcactcttgtatatgcgtgtatctctataaaaatccttggttcctacgcctaaggtatcactctagtcctcatgaaaactgcctacacacttcaaaatggcaaacattcgcataccacaatgttccataggttattcctcacaaaatcatgcgcatatgctattgagacatttcaacgagaacttggtgggtgcttgtttacgcatgaatagcaagggaacaggggcaatgtagcatgcccaaaaattttagaatacaacttatgcctaaggccattgcctacaaccttccaactcaaccaaaacaagcatcaattcaaagataaagtgcctcatggatttgagcataaatgggcaaatgaagcatcacaatataccaaaggaaagctagagagccaaagcatgaaggtgcttacttgtggagtgagtaggagtaccacatgg

SEQ ID NO: 216983 - DNA, 443 bp, Glycine max
  unsure (1)..(443): unsure at all n locations
agcttanagagtccgcctncatagatgcgttacattctagcttgcatcatggtatggagaaactttcttctaaggttaatgttgaaggactaccgagttttttgggtcacgctggattctatccgcgattcatcaaggacttttccaaaattaccaaaccactgagtaaactgttgaacaacgatgatgtgtgtgcgcttaatgatgaatggttggaagctntaaaacccttaaagctatgttggcctgtgctcctgtgattactacaccacattggggacaagagtttgaattaatgtgtgatgctcgtgattatgcagtacgtgctgagctgggacaacgaaagggcatgaatttctataccatntactatgccagcaaagtgttgatgatgctcatataactatgccaccctgagaaagagactatcaatcggtatgcac

SEQ ID NO: 216984 - DNA, 417 bp, Glycine max
  unsure (1)..(417): unsure at all n locations
acggacctatgatactcagcttctccagaggtgagctcagatatgagagggtgtgtgtgtctatgcgctatcttctcgaggaagttttctcaaggaagcttctcaaggaagatgtctcaagaaatcttctcgacgaagctacctagtctataaatagaagcatgtgtaacatttgttgtaactttgatgaatgacagtcttatgagacacacttcacagttccacttctctccctctattattccttcaatgttcggctccccccttctctctttcttttcctccattagagcatcctcttcaaacttcttatccaaggcaatacttggtggcgaagctccttcttccttggcttattccctaccggatggngtctccactctcctcttctcctttgccttacgctgcatctccatg

SEQ ID NO: 216985 - DNA, 452 bp, Glycine max
  unsure (1)..(452): unsure at all n locations
agctntgatgcaacatatggagaggtttatttaacaacgagatgatgcgctccatgagaggttggatcaaatggagaatagagatcataatgaagaagaaaggaggagaagagggaatgatggtgttcctatacaaaaccgaattgatggtattaaactcaacattcctccatttaaaggaaagaatgatccggaggcctacttggagtgggagatgaaaatagagcatgttttctcatgccacaactatgaggaggaccacaaggtgaagcttgccgccacggagttttccgactatgctcttatgtggtggaacaagctacaaaaggagagagcaagaaatgaagagccaatggttgatacatggacggagatgaaatagatcatgaggaagcggtgtgtgccggctatttactcaagggacttgaaattcaagctccatatactaaccc

SEQ ID NO: 216986 - DNA, 445 bp, Glycine max
tctagatgagttatgtctgcgaatcggagatcctgttatatgttatgaccatttgaatttctcgagtgcttccgttgtttaatttcgagcgtctcgatattttatgtcctcaaatcagacatcggagcgaaatgttatgaccattcgaatttgtcgagagcttccgtttttcaatttcgagcgtctagatgagttatgtcaccgaatcagacatctgagtgaaatgttatgaccattcgaatgtgtcgagagcttccgttgttcaatttcgagcgtctagatgagttatgtcaccgaatcggacatccgtgtagaaagttatgaccattcggctctgtcgagagcttccgttgttcaatttcgagcgtctcgatatattatgtccccgaacggacatccgagtgaaagtattgaccatggacttggcgagagcttcgtgttaatt

SEQ ID NO: 216987 - DNA, 410 bp, Glycine max
agctttcctgcttaggacctgcactttttctatcattaccctttatcccaaaattttctcctttccttatattgtcaagtctagagacaaaaccccctgtctctagtcaactccacattaaatgttgatgcttgctttgaagttccttttttcccttcttttgcttttctcctagggttatgtttgatgagcatctaaggactatacccttctggttgcgttgtctcctagacttcttcatctattgccaccaccttactgtcaaatgtgccaccttctccatcattgacaactattgttggtttttctaggccattacccatctcatgttcttccatagataccatggaaccttacgtgcaatcatccttttttggttcataccttccacactaaagcatatagtatgt

SEQ ID NO: 216988 - DNA, 458 bp, Glycine max
  unsure (1)..(458): unsure at all n locations
ntgacttgagtcatcaagagattatggatatgtgaccttgttatgagtttcaataatcatcaatcatctttgaatcatctatctttcaatctttacaacatcatctctaaacttctttcaattaatctttcaatatctttttacagaattttctgattcatttctctttatctttctgaaagttttttatcaacactttcttttccaagaaaagttctttgttcaaaaacttgtgctattcatctttttcattctcttctccctttgccaaaataacgaaggactaaccgcctaaattcttttgtgtctcttttctcccttacaaaagattcaaaggactaaccgcccgagaattcttttgattcttccctttcccttaagcaaaagatntcaaaggactaacaacctgagatatcttttgtttcccctctacacagatnctaaggactaaccgcctg

SEQ ID NO: 216989 - DNA, 452 bp, Glycine max
agcttccaagtttattgtgagggtgccatatactcttgtcaagaatcaagagtcaaacaagtttcaagaatcaaagagtcattcaatcaagaatcaagattcgagtgaagattcaagagaagattcaagatatgcaagaacttcaagaaaaacatcaagataagtataaaaagatttttttaaaagaatttgtctaaaagaatttttcaaagaaaaatcttttaccatagttttttactctttggtaatcgattaccataaggcaataatcaattaccagaagcccaaatatttttataactgttttacaaagtagtaatcaattaccatggacatgtaatcgattaccaatgtttttcaacgttggatttcaaatttcaagagtcacaacttgtgataaaacattttcaaactttgtgtaatcgattacacaacatttgtaattgattatc

SEQ ID NO: 216990 - DNA, 453 bp, Glycine max
taatctcctcgaggaaagattgagagccgtggaaggatttttggactatccgttcgcagacatgatggatctttgcttagtacccgatgttgttattcccccgaagttcaatgtgccggacttcgacaagtataaagggatgacttgtcccaaaaaccatctcaagatgtactgccgcaagatgggcgcacactctaaggatgaaaagctattaatacacttttttcaagatagcttggccggagccgtggtagtgtggtacactaatttggaagcttcccgtatccgtacttggaaggatctgattactgccttcctaaggcaataccagtataattccgatatggctcccgatcgcactcagctgcagaatatgttcaagaaagagggggaaacttttaaagaatacgcacagcgatgaagggacctggtagcacaagtagctccttccat

SEQ ID NO: 216991 - DNA, 444 bp, Glycine max
  unsure (1)..(444): unsure at all n locations
agcttctgatttctaatgcatatgattttttaaatnctatnatgaatttccatttttccttcatcccctttattcctctaagttaaaattaggggtttagttcaccatagggggactagtttatagattttatgatactatcattattattattgttataagattttgagtagtagtagtactgtgataaggtaatatgtctatatgtgtttatatgttgcaaacagaaataaaaatcatttcagaatagttcaaaagagagagagagaatgggatgttagctcgattcccatctgtattgcacagttatcttcggaagcactatttttattttattttaatatgtcttatcttctggcatgtgtgtgtctgtgcatcatcgatcaccgtcgaagatttcttttccttgttttgcaatgtgtatgcgagggaaatcatggatgt

SEQ ID NO: 216992 - DNA, 449 bp, Glycine max
tgtgcccgaaacactacatcatccaaactgcagagaatatctcaagttcttgaggcttgtcattgcatgtataccgtacaaaacctgaatccaaaatttccttcctaggtagcaactgctgagtatcactcacataagaactgctgccatgagtctttatctgcatcctttttctttatctgtttttcctgatgagcttaaaagtatccatctaaccaagaaccattgaaataataaacaatgggcagataaattaataaattaggatccaatatgaacagcagttaacggatgggatgatattgggctgatattctctttgggggcaatttgcgcaggatgtagaggactaaagctgaaggtaggacctcaaccagctgtattttgaaaagtgaaaagtaaattccaaatgctaagaaagtgcccaatcaaaaacacaaaggaatact

SEQ ID NO: 216993 - DNA, 449 bp, Glycine max
  unsure (1)..(449): unsure at all n locations
agcttccatcaggattatgatattcctcctctttcactggtggctgataaaggaactcccttgtgagatgcccatagcatccataattggaacaaatacggtggatgctctcatattcaaccttgcaccagaaatccttaagccatatgttacctacaactggcttcatcaagtcaatctcaacacatgcaaagtgacctcgccagacacctttggtgttgctatcaaccttaattgatctccccacaacactagcaagagtggataaaatgctttcatcatagtaaaataagttcaatcctctgaagcaaatccacaccataactctatcaatcttagccactagtgagataagctccggtgtctaggtttgcactatcaaataatggtcaaagaccatccaaaggccctccttaatcatctntattcgatcttcttcaagttcaaat

SEQ ID NO: 216994 - DNA, 428 bp, Glycine max
tgaaatgaggaagtgtggaagggtgagacttcctacttttattcgttgaccacagagtggtacctggagatatgtcgcgggggtcaggagaccttggggacgtcaggtggggtgctattgcccaaaaccaagcttgaccaatccctacccaacccgggcatagtcagtcagtgagaacctgtgatgtacctaaacaagcgagctcctggcagtcaacaaataaaagaacaaagaccacaaagcaaggaggcttgtgtggtggctagccagctgtgaactttgagtgatatatgggatatggcctctggtaatcgattaccaagggtgggtaatcgattataaggcttaaaattgaagacaggaagataagatggtctctggtaatcgattaccaagggagtgtaatcgattaccatgcttatcaatga

SEQ ID NO: 216995 - DNA, 307 bp, Glycine max
atgtctatacacagacggaggtcagcactggcataccattgaggcggttcccggcattctgcataaaaccgtgaaagagcatcacaagcccgtaaaaaaggtggacagcacagcggggggaatatcaagactgacccgcaacgcgcatttgaagcaggaaaaaaaggcggtaagagcagtcacgcgcaaagcgacaactagccgggctaatcaatgacgaatgcatctctgtctgtagcttcgcaaatagccatcaacgccggttacccggtggctgatactgatgacacatgtaagcttgagtatt

SEQ ID NO: 216996 - DNA, 385 bp, Glycine max
  unsure (1)..(385): unsure at all n locations
cttgggtttggaaggcatacaccataagaaattaaaaaaatacgagttgggcacaaagaggaatacaggaaattgttagtcttaagaagcagatccaccagctacccaatcttaacctgaacaggatattaaagcctgcatggaagagattgatcgccttaggatgctgattgagtccatgagtaagccttctggattttgtaccttgtccaataagggtaagagttcatccaatacctttgtccttgnttcatcaggaaattggattcttgattatggggcaacagatcacatgacccccttccctgcactctntgcttcatattaaagagagactgataggcaactcattacagtcgccaatggagataatgtgcccataact

SEQ ID NO: 216997 - DNA, 276 bp, Glycine max
ctgctaaggtcgcgtatcctttaatgaatcatcgataaaaacctgagagcctgacgaatccatgcaagtttcgcactgattgtggaggtggccattgctccacggcagcgaccttttctggaactggttccatgccacgttctgagaccaggtgtcccaaatactcgacttattgagtggcaaaggagcatttggatagtttgaggacaaaactgttgtcgggaagagtttgaaagggtttgcgcaagagttctaggtgatcgaaaaaagtcttac

SEQ ID NO: 216998 - DNA, 413 bp, Glycine max
  unsure (1)..(413): unsure at all n locations
gcggcgggcgatggtgcacaacatgttttccacatccacaatgcgcgcataaacccaccatcacctgttgcccacctccaactgagctcacatactctcacgtttcccatattctcttttctctcaacaccgggttcccatcaatcctcccaagcttccacaacatccaagcaaaacaacattcacacagcccaagctatcacagccaaccataacatagcacaggcggataactctgccaaaacaccaaccaaaaatcacagtttttcccactcaaagaccccagtaacaattccttcgatccaattagttaaccgttggatcgactccataatctactggaagtccatagtgcataagcctacattatgaccgttgggatctactagcnaacgtccagagctcattttaca

SEQ ID NO: 216999 - DNA, 462 bp, Glycine max
  unsure (1)..(462): unsure at all n locations
acacctagaaactaagctcttaagcgcgggtctgggagacgaaggtggagtggtcactttatattaagatgatgttccgagtacattggatttggtacgaccatgccctcctgatttccagctgggaaattggcgagtggaggaacgccccggcatttacgcaacgtgcataatgtaaacctttacggttttaaaagctctatagttgggcctaggctttaaagcttttccttttgttaaggctttgtgtcttttgtttttgaatttataatacaaggatctttcttcatctgttcctacgtctctacccattctcattcatttgcatgtttacttctttatttctgaaacggcagatccgatgacgagtccctcgaaggtactaatacctgtgacccgcttatcaacttcgagcaagaaacgaatcanacggaagatgaatggaacgaggatgtgcgactt

SEQ ID NO: 217000 - DNA, 424 bp, Glycine max
agcttgtacattcaattgcgagcgtgccgaatattatgggactcaatcggacatccgagtaaaaagttattgttgtttgaatttgttcagagcttcaacattcaatttcgagcttttcgatatattacgagactcaatcagacatccgagtaaaaagttattctcgtttgaatttgctcagggctttggtattcaatttcgagcgtctcgatatattacgggactcaatcagacatccgagtaaaaatttattgtcgtttgaatttgctcagagctttaacattcaatttcgagcgttccgatatattacgggactcattcagacatccgagtaaaaagttattgtcgtttgaatttgctcagagctttggtattccatttcgagcatctcgatatattaccggactcaatcagacatccgagt

SEQ ID NO: 217001 - DNA, 466 bp, Glycine max
  unsure (1)..(466): unsure at all n locations
tcatgagagagtcaaagatcaaattgagaggaaaaataatttctatgctaaacaagccaacaaagggagaaagaaggttgtcttcgaacccggagattgggtttgggtgcacatgagaaaagaaaggtttccggaacaaaggaaatcaaagcttcaaccaaggggagatggaccatttcaagtgcttgaaagaatcaatgacaatgcttacaaagttgagctgcccggtgagtataatgttagttccaccttcaatgtctctgatttatctctttttgatgcagatggagaatccgatttgaggacaaatccttctcaagagggagagaatgatgaggacatgaccaagagcaagggcaaggatccacttgaaggacttggaggacctatgancagggctagagcaaggaaagccaaggaagctcttcaacaagtgttgtccatactattngaatacaagcccaag

SEQ ID NO: 217002 - DNA, 223 bp, Glycine max
tacattgccttaacatatttttgtgaacattgaactacgtctttctagtaactccaaagattatggcgagatgattatgtttatgatggagcactgatgtgtcaaatataactagagaatggcactgctcaatagatactttaccacagtgttctctggcactccgcttgcatgagaaaggttctgacgtgtatactactgttaccctggctctttctatcta

SEQ ID NO: 217003 - DNA, 341 bp, Glycine max
aactctaggaacacttatccaattcatgtagctcttatttcatagtaatatgtatctgtattatgcctaggcatctacgaaatatagatttaactgtcttattgtattttgtgattttgtctagactcattcatgattaggttaaataattttttgtcaccaccagcttttctaacaggtgagaaaaaagaatctcacctgaagttcctttcccaatgatattcatttcattcagatggttagtggccacatacacttcccgtataggaactctgggaaatgttattttccttaacatgtcttcaaatgttggtgtaaaaagaaataattcttgacacatg

SEQ ID NO: 217004 - DNA, 454 bp, Glycine max
  unsure (1)..(454): unsure at all n locations
agctntaactgaaacattgagtaagttgctaactcaatngcatgttggacaaccttcaccctcttctgttttgcaagttgcaggttgtgttatatgtggtggagcacatgattctggctgctgcattcccacagaagatatagcacatgaagtgaactacatggggaaccagccaagaccaaactttaatgcaagtggatattttggatttcaacatggccagcaatataatcagcaacagggacagtggagaactcaccctggtaattagttcaataaagaccaaggtgggccatctaacaggccacaacaacaagggcctagtctctatgacagaatgatgaagctgaaagagactcttgctcagttcatgcaagcatccatgtccaatcaagagcacagagttaggcatcaagaatctagaagtccaggtgggacaattggcacaacaact

SEQ ID NO: 217005 - DNA, 320 bp, Glycine max
tgcatgtccaagtttcttatgccatacctttattattttctttgatagataatagacatgttaaattctgatttgatagttcactaagattaatcttataaagattttccttcctcataacagagaaagttgggtcacatttttgtgttggacaatacatccatctttgctaaagggaaacatcaagcccactgtcacataattaacttatgctgagcaaattatgtttaaatcctttaacaaatagtacattctcaatgggaggataaggatcaatacttgtctttcctactcctgctatcttccccttctgagtccct

SEQ ID NO: 217006 - DNA, 443 bp, Glycine max
  unsure (1)..(443): unsure at all n locations
agcttaacaagggcttacccactgttattattcaaaacccaagaactcattggaaacatggagtctacttcaggaaatgctttcacctttaagtttaaatttgtaaaatgaatacatcaataataatttgattcttccagcttagacaggaggagggagttaatctttctttggttgttatgcactgaatttacctttattataattntactacattatacaaaatatgcatttgttttcagcttgttcctttgtcgtctttcaggcattgctgagctgggggtgatgatgatgaccactattttagtaactcttgttatgcttcttatatggcagatacacatcattgtagtgctgagttttgctgtactcttcctgggattggagatgactctcttttcatcacttctgtggagagtaacggatggaacgtggattatatt

SEQ ID NO: 217007 - DNA, 448 bp, Glycine max
gttgcttttctgtattatgcaggtatgagtctgattgtttctctgcgaatattttgcattctggttcagtttatgcacatgctgcgattttaataacttttttctttgctattaaaaaaaaaaacatcattcgattttcatttatgtgaatctgatgtgataagtttcatgtctcaaatatcagtaaaaaaaggtttaaaatcatgtcccatagttaaaaacaaaatattgttttataaagattattctagctctctgtttttttttggaaggcaacaaatatagtatattttattaatcatagaaacagcagcaccagaggtactgctggtgacataagtgcaaggcacttgataacatctaccagcatatataaagaccacgcttagaccccaccacacatctagacctgagtaacccaacttaaccaaaatagtccccgatattt

SEQ ID NO: 217008 - DNA, 447 bp, Glycine max
  unsure (1)..(447): unsure at all n locations
agcttaatacaatacttggaaataatgctattatatcccaacaaaangcaatagacacattagtcaaatttgtcacaccagctgaagccaaatttggtcattatatatacttcactctcaaaaccttttaacttactctatttctcttttgtttaggctgcagcatgatggaacaggatactaacagggtgtttttgcgtacatgcataattgaaatgatattatagatgacatgctagctagggtccattgacagtggcaatatagaaagatcacgtaaaattattggctaattttcactactcgctaccaatgacatgttcaaaagaatccataacatgatggataagaagtttgagtgtgttatatagatctcagcataatagtctagaaattcaataaaaaatgtggaaacaaatgagatacaacgacactatattaacattt

SEQ ID NO: 217009 - DNA, 396 bp, Glycine max
  unsure (1)..(396): unsure at all n locations
ntaacctcattgtctctcacagtctgtagatgtgtgttctttctcttcctcgnngccggactctcagccacttatgatagccgccgatgatcccattactgcttaccctaagctctatgtcctttcttcatgccggataccatgccttgcgaactccttggagtaccctcgcgttgtggtcactgaaaccccgtgcgatgaaaggcgtgatgctttcctctgatggcactcctctcatggggtagccaagctgccttatggcgaggacgggattataattaatacatccccttgttcccatcacgggaacatttggacatccttcgcatgaagatggaatcatgattcttccttccttctagcgagggaaccaattaacagactcccctgcatgct

SEQ ID NO: 217010 - DNA, 109 bp, Glycine max
agctgtcaccaaaagtaccataggttctctatgtgttatcagcctaggctatggttgctaatttgttaatctctcccacacccaagtttggaccaagtagtaaaagggt

SEQ ID NO: 217011 - DNA, 459 bp, Glycine max
  unsure (1)..(459): unsure at all n locations
tgagcttaactacacatacctctgtgatagctaagctcactttcttgagatgagaagctagagcttagctacacaccccctataatagctaagctcacccccatgacaaaaaacatgaaaatacaaaaaaagtccttattacaaagacaactcaaaatgccccgaaatacaaggctaaaaccctatactactagaatggccaaaatacaaggcctagacgaaggaataacctattctaatatttacaaagataagcgggctcatacttaacccatgggctcgaaatctaccctaaggctcatgagaaccctatggcctttccttggatctctagcccaatctacttggagtcttctagccaatgcccttgcggngtaggattgcatcatagcctctcatcgaaatctgtctgatcaagagcttaaggacataaattcacttcagcaggagttatggaat

SEQ ID NO: 217012 - DNA, 373 bp, Glycine max
agcttcatcttctatgcgagtatgaagtgtttacgaagacccggaagaagatgaagatctcagtctttttgtcaaaagatttaacaagtttcttaaaatgagaggaaatcaaagatgtcagaacttcaaaccaaaaaggagaactgaagaatcatctcaaactttaagatgttatgagtgcaatcaacccggacatctaagggctgattgtccaacttttaagaaaaggatggagaaatccgagaagaagaactttggagaaaagaagacaaagaagacctacatcacatgggatgataacgacttacaatcgtctgatgattctgataaagaagtgattaatctatgtctaatgggaaaaaactatgaaagc

SEQ ID NO: 217013 - DNA, 465 bp, Glycine max
  unsure (1)..(465): unsure at all n locations
ctcagcttacaaaagttatatggctagaaacaagcaccgatgctgttgtacaagaagtttaatgagttaatgagcaactcgggattcaaaagatgtgacatggaccattgctgctatgttaagaaatatactaatagttatgttatctttgtcgtgtatgttgatgacatgttgattgtaggatctagtatggcagaaattaacaagttgaagcagcagttggcagaaaactttgaaatgaaggatcttggtccagctaaacaaatccttggtatgagaattcttagaaacagatcagaaggaatcttgaagctgtctcacgagaaatatatacacaaattgcttgacaggttttaccttggagattctaagaccaggaatacccctctgggatctcatttgatgttntcaaagaagcaatctctgcatacagatgaagaaaaatgttacatgtcaagagtacca

SEQ ID NO: 217014 - DNA, 449 bp, Glycine max
  unsure (1)..(449): unsure at all n locations
agcttgaagaagttgttttgaagaagtttttgcttttacatgcctaactcccttgagtggcattttatanttgttgttatcttgcgtgttgcatattagtacatttgatatttgttttgcattgtgcatcatcatagtgtgtgtgaagaaaagtttctaagttagaaaaatggcttcataggaaaaaactctttgttttaatcgattacagcgttgtcgtaatcgattacaacaagctagctgcttccagttgttggtatgggattttggcttcacaaagatagttacaagtgattgtgttgtatctatggtgtttaaaaaaaagtttaataattatgaaataaactcaaactttctatcttttgcanagcagatttgtggcttcaagtctctttgtcgcctcatttcttttgtgacaagaacaattgtctttacatttcttctacatt

SEQ ID NO: 217015 - DNA, 440 bp, Glycine max
tgtaccataaattacaaccatgcctgtcattgtcttgatttattagcaataacagaatcatgaataaagtatttgtgcagttgaagccaattaactgaaatgaaagcaaatacaattttctatttttttgttctcatttttttaagttttttcctgttgtagtagttactttttattgatttttggatatcatgatgatgctttgtataaacttgctactatcaggtatgtctatgcctaccatggaacaaagggaggaattgtatgatcccttggcaatggcctggtggaccaagcccgcttattaattattataactcggatgcaatgttttttttattagaaatcactagctacttgactggttgtagtgtaggtgcttaaattgaaacaatggtgtgttatgtaataaaaaaatggattagacatattagaataac

SEQ ID NO: 217016 - DNA, 393 bp, Glycine max
  unsure (1)..(393): unsure at all n locations
gcgatcaggcgatggtgcaaatcaactctcccacatncacaaatcaaacatgaacccaccatccccagttgcccacctttaactgagctcatgtacccccacgtagcccttatcctcgttcctctcagcaccgggtccccatcaacccctccaagcttccacaacatccaagcaattcaatatgtaaacatcataaactatccaaaaccaagaaaacagggcataggcagaaaactttgcccaaaacacattccaatacgacagctttctctacttaaataccccagtaacattttcttcgttccgattcgttaaccgtggatcgactttgaaatttactggagatccctagtacataaatctacattttgaccgctgggatctactagaaat

SEQ ID NO: 217017 - DNA, 339 bp, Glycine max
gattactctagacttgccacaagtcctatggaagtcgactctatatatggaccacataattcgcggcattgagagtaacattttgaaccacgcctctgtctctgaagctgacgaagatgtcacaacatcttccacccctattgttcctgtgcctgatgcctagaaagatgttgctacatctttcggaccatatgctgaagtactctctttcccctgcaaagagagatcatcagaggaagatgatcaagccgcagaggagactactacaccaccggcaccataacctgctccaggtgacctgattgacttagaggaagtcgaatccgatgaagaacccat

SEQ ID NO: 217018 - DNA, 464 bp, Glycine max
gaaactaagctaggacaatgctagcatcttataatgattggtgagtttttttattttttaattttaaccacttaaataaaagttcaattgcgttaattttataaataatttaagtacattgatataataaaaaattatatgataacttaaacaaatataaatattaatttatattaaattataatttttatattatacattttaataaaaatcttaaaaaatggcatataagaaaaagaaaacatttgttttattattatgtgcaaatacacatgttaaaatgctacttaaaattaacttatgcttatttatattctctaattctattattttgaattaattctatttatttaaattattttgttatctattaagaaagatatatttttcttaataaatactagacgaaggaaagatagataaaaatagacagttaagaattcaggttggagaactaaatttta

SEQ ID NO: 217019 - DNA, 454 bp, Glycine max
agcttacctcgaacccaaactgtgagcatgttctttatatcaaacaacatggcatgaaactttaagctttcctcgtacctcaatcaacaatactgcaactgaagacgaattattattattattattattattattattattatcattattatcattattattattatcatctataaaacatgatcacccaaggaaacttagcttacacgaatttgacctacgtacctcgcggagaaagctttgacctttgagcacccacgagtgtttcagcaccctagtatcaacagtgtatgtaaggttttcttcaagccaccacaatgcgggttctgtggggattgagcgacaacaatattggtgtttccaacagagaatggggtcttgtgggttccaaccaagacaatgagggtttccgcgattgtatggggttctgtgggttcgactgacaaccatgtgt

SEQ ID NO: 217020 - DNA, 392 bp, Glycine max
  unsure (1)..(392): unsure at all n locations
tccaataaaaatatttcaactattaatgaacaatgaaaatctgtctaatagaatagctgagttgcatcactataaacattntgaattcaattttatccttttattaataaaatttccctaataaattatttattatattttttatttatagaaattgaagacaatatctaaagatttataataattttcgcaccttattcaaccaaatgaactagactttctgtatgcatagtgacacgggtagagcttcaattattattattcttttggttaaaccatacgtatttttcatcggagataattatattctaatttcctttagaacatgatcatatcatatgaaggtatgagaggtaaatcaagtgattgattacatgtgattaatgtgctga

SEQ ID NO: 217021 - DNA, 386 bp, Glycine max
  unsure (1)..(386): unsure at all n locations
agctaatcataaccatgtatagagtggattattattttttctacgannaggctngccactcttagagataaatagaaaaatcacagaggtgaactgatgcctattcccatataaaggtcggattatgaggttgaaaagtctgggaatcgggtacatgcttggggaggagattgtgattttgaagccactcatatgcattatggtaaacaaatagagttgttcatctaacatataaggattggttggcattaccgtgcagacatgcagtggctgccatacaatttaaaaattttaaggttgaggattatgtgaataattattattcangggatacttatggttgtntgtatggacacaaagtggcatcaatataatggtttggatat

SEQ ID NO: 217022 - DNA, 470 bp, Glycine max
  unsure (1)..(470): unsure at all n locations
aacctctatgtgaaggatgtgactctacacagtggagttagtattttttgtccaaaggcactagtaatcgattaccacaacattgcaattgattacagctctccgaaactaactggaacgttgtaaattcaattagaaaacttttcaaaacaattttgctactggtaatcgattacaacaatctggtcttcgattaccagagagcaaaaactctctgctaaacatgtgttgagaaaaatcatgtgctactcaatttttgagaaaaacttttcatacttatctcgattaaaccttctcttgattcttgaatcttgagtcttgaatcttgatcttgattcttgagatcttgaaccttgaatctncattcttaactctcttgttgagtcttaaatacttcttgattctatcttgaactcttgaatatgtcatgactcacttgagctgctctttgataaactctgattcactga

SEQ ID NO: 217023 - DNA, 419 bp, Glycine max
aacccaagctatctgtaacaagtataaaattacatcacaattaaccgtgttaaactctaactcttcataaaatttaaattcgcactatatttcacacttttgtcattattgccgttgagataatagacacatctattgagttccttataagatatagtagctctggtctcacagtatcatatttcttctcaaatgcgctatgaattctattcgttccaatgtaaatagcagttaacacttgtataaaaggctcaatatgaaataattcattaagtaggctaatagattaagttatgctctcacataggttggcttatacgtactaataatacatatgactaattacaacgttagatccagatctcgagattcttaacatcctagagctatatatttttcaacaagctaagcctattaac

SEQ ID NO: 217024 - DNA, 270 bp, Glycine max
accgggtgcccaaaccgcctcgcaatctcggaaaaagccttgacacagtgaaccttccaccctttggcgctgagcaaacatcggatggcccactgcaccggcaacactcgtgagcaaccctgtgcgacaagctaactacatcgcttgactacactcccatccattaactggtcaaaacttacccaacttacccttggcagtgaactgcagtcatctttgatgtcaacccacctgcttcccttccatcttcacttcaagactgactcagaa

SEQ ID NO: 217025 - DNA, 407 bp, Glycine max
cttgtgttgaaaacatgcttgcagttgttcttgggtcaagaccctgtagacacaaaaggaggcataaagttaggtcataataagacaaacttctccataagcacttgcagaagataaattaaaaagcaaaatgaatcaaacttttttccacaagttaaaacaacttatactgttataaacttctgattccggagacgttagaagagagaacttctataataagttgattataacttatgggaaaagtttaattaattttagacttattttcttctcctataagtacttatagagaagtttatccaaatagtgcaatggcagccatacatatatgtcacaacgcaggtaacagtcacctgaagggtgcgtcgcaaaggcctatccggtccttttgccgcatgagcacc

SEQ ID NO: 217026 - DNA, 457 bp, Glycine max
agcttccaagctgatgtggatgatgtcatttactcaagtcaagaatcaagattcacgcaagtttcaagaatcaaagagtcattcaatcaagaatcaagattcaagtgaagattcaagagaagactcaagatatgccggaacttcaagataagcatcaggtataaaaagatttttcaaagataagattgaatagcacaatttgtccaaaagaattcttcaaggaaaaatctgtagaagcaaagcttcatggtgaatcaaaggtgattcaaaggtgttttgatgataacaatgatgataacaaaagatgatgacaaaggtgatgacaaatagctcatagatcaatcaagaacaattcacgagttcaagataagaatcaagaagaattcatgactcaagaggaaagtctagagacaagaatcaagattcacggttcatgatctcaagaatcaagatcaag

SEQ ID NO: 217027 - DNA, 461 bp, Glycine max
  unsure (1)..(461): unsure at all n locations
tgatcaaaacaattatctaatcattggaatccactctttttatacagntgctcattcaaatcattctcaaacactcatttcatacaaaacaatccactgcatatcgttttcaatcagttctctgttcaaacaagcttttttgtacatgcaaacaactcaaagtactaaaatttaaagaacggaaacataaaaactgaaatttaaatgactgaacataaatcataaaataattcaagtaaactaaaatgttcaaaatgcacaacattaaatgtcctgcttctgtggttgctcttgtgcatgcttattaagatccaacacctgagcaactggtaaatcctgagaggtaggtttctctaactcacatgttggtgaagatggtatggcatcatcacgtatangtgctgaggatggctctgggatctggtctgtggaagtctactcctatagagccatgtgtacac

SEQ ID NO: 217028 - DNA, 411 bp, Glycine max
agctttataagtgcgggtgcgtgggagacgattgttatgtggtcgcgaaatgtgaagatgatgttccaagtaccttggatttggtccgaccatgccctcctgatttccagctgggaaattggcgggtggaggaacgccccggcttttacgctacatgcataatgtaaacctttacggttttaaaagctctatagttgggcctaggctttagagttttcttttttttaaggctttgtgtctttcgtctttgaatttataatacaaggatctttcttcatctggtcctggcctctacccattctcattcatttgcatgtttacttctttttctgaaacggcagattcgatgacgagtcccccgaaggtactaatacctgtgacccgtctatcaacttcgagcaagacatgaac

SEQ ID NO: 217029 - DNA, 408 bp, Glycine max
  unsure (1)..(408): unsure at all n locations
ccgctcgaaactgctctagcatcacacgcaagtggtcacaaggtctcattttttcagccaaaggatgatgaacttattacaaatgcagcagaggcaattgttgtcttgtcatctcttacctgngaagtggatgatggtgtgatcagaccatcagaaagtccaaaggtggacctgctaagttggtttgcatatgttgtttcctcctcatgcaaagatgagggaaagtgtgatgtttcaagggaaaaagatggcgaggacaacgaggggcgttcctctgaaggaatggattactttgaggcaatgacatcgaacttgccggagaccaatgaagaagactacatgcccaagcctcttgtcccttgaaacttcaaagtggatgaaacaactactttgttgccaactccgaca

SEQ ID NO: 217030 - DNA, 428 bp, Glycine max
  unsure (1)..(428): unsure at all n locations
agcttctaggtgtgtggagccggagtctttttttatcccangaaacagaaagagacaatgatggtgctggggaaagtataggaagtcgacaatgatgacatcaatctatgaactgtagaagttgaagaggcagaccttcgcgactcattgtcttctttcggtgatgattgttctcactgtggctaggccactatcggaggtttctcttattttgaaagtcaaagatggaataagccacccttttagatcattcggaaatatgctcaaagggatggagaaagcccctaacatgattggccaggaagctgatgacaaagaacacccatctgaatctccatccatttcttcaatgattattccaaatatggctcataatggaaactagtgacacttggcatatctcttgggtgtgtaatcctatctaaatt

SEQ ID NO: 217031 - DNA, 460 bp, Glycine max
  unsure (1)..(460): unsure at all n locations
taactattaagcanaagttagaactgaagagttaacatgttttcaaaagcatatgtgcttaaccacctaagaaatgccgaatctaaactcaagcaaaatgagactaaacaataacaaaatcaattaaagtaaaaaaaatggaagatgtgaaaggagatgaacatgtgaagttgtgaaagccatgaagatttgacgcgcgagaaggaaaaacaaaaacaaaaatcgtataacatgagatgcaaaatcatgagaaaaaaatgaaaaagatgatcagaaaagtaaagaaaagaaataaaataaacaaagaattatggaataaaatatgaaagagtaaaaaaattccttcaaggtgagtattattagaaaatatggttaataaactcgtactcgataagtactcaatagtattagattaacaaagttttaacaactcaacatatttaactcttcatgcacaact

SEQ ID NO: 217032 - DNA, 431 bp, Glycine max
  unsure (1)..(431): unsure at all n locations
tctccttccatctgaggatcactaanaatgagtgagacaattgtttctctgaagaaaanccaagccgaggcgcttccgtaacgcttctgtgacgtttccgtgggtgatttcgcaaagatttttcaccattcttcatcgttcttcgtccgttcttcgtcgttcttcgagtcttcaaccgataagttcccttaatcaaacttttcaattcattcgatgtacccttagtggtcctcattagtttcgcgtgcttttattttcatttcatttacttttcgtacccccttttgacgtgctttagtcatttatttaagacattttctcacctaatcaaaaataaaatatatgtccaccgatcattcgtatagtaacatcctttaatcttcgtcacaactgaatccgatccgtcagtcatgccgtatccaccgtttaaa

SEQ ID NO: 217033 - DNA, 373 bp, Glycine max
  unsure (1)..(373): unsure at all n locations
taaacctctagcttctttaggaatcttcttaaggaagcttctcaaggaggtgagcttatttatgaaagaagtgtgtgtagctaaactctagcttctcaaggaagttttctcaagaaagcttctcaaggaagctacctagtctataaatagaagcttgtgtaacacttgttgtaactttgatgaatgagagtcttgtgagacacaactcanagttcaacttccctcccttcttcttccttcaatatcgcgctcccccctctctctttctctccctctataattttctccattgaagcatcctctccaagcttcttatccaaggctcatcttggtgggaagctccttcttcatggcttattcctagaggatggcg

SEQ ID NO: 217034 - DNA, 459 bp, Glycine max
  unsure (1)..(459): unsure at all n locations
tctatagaaggttcgntcctaatttctctacgggtgcattttctctcaatgagctggtgaagaagaatgtggcatttacctagggtgaaaaacaagagcaagcctttgctttgctcaaagaaaagcttactgaggcacctgttctagctcttcttgacttttctaaaacttttgagctataatgtgatgcctctggagtgggagttggagctgtatcgttacaaggtgggcaccctattgcttattttagtgaaaaacttcatagtgccacccttaactaccccacctatgataaagagctttatgccttaataagagccctcctaactcgggaacattaccttgtttccaaggaatttgtcattcatagagatcatccatcacttatgtcattagacggataagcacgttaaacaagatgcctgccaaatgggttgagtacctacacaatttccatat

SEQ ID NO: 217035 - DNA, 430 bp, Glycine max
  unsure (1)..(430): unsure at all n locations
ngcttatatatactattatggaggcagggtgtattttttctcactctccacacaatatgtctctaattttcttttcataacatggtatccatagtcttgagaattattttagtgaatgatgtacttcatcgattcatcgctttatgcaccactattctgttatggtcagttggcttcgcagatccctaaacaaaccccttgagtttggtttggttgatttcatattattgcccatcaatttggtatgattcacagtgaaattgataactctatcttcaatcataatacatctcaaggatgcatcaatctcattgtctatgtggatgacactgtcatcacatgccgtgatcaacatggcattatcaacttgaaacaatttctctcacgccaattccagggtgatgaccttggtaagctggaatattttcta

SEQ ID NO: 217036 - DNA, 442 bp, Glycine max
  unsure (1)..(442): unsure at all n locations
ttcttcaatcaccaataagcntttagaggacgtcaatgcttattgtatattgttattcttccatattgcagctgtacgtaacttgtgtcttcttcacagataggggattcacgatgacccttaacattgtatccagtcaaattcctatatgttggaaagttattaattgtacataatagcatcgcacacaacttgaatgtctcattntgatgcaatcaaacacaacaaccccctcgtcccacaaatttgtcaagtcttcaatcaagggacagagataaacatcaatgtcatttcctaggtgtcttgggtccaatatcatcacagacaacattatgtcattttgcttcacgcacaaccaaggaggcaagttctaaattactagcataataggccacaaactcttgtaagtgcttanactggcatagagaatcattccatcact

SEQ ID NO: 217037 - DNA, 442 bp, Glycine max
  unsure (1)..(442): unsure at all n locations
agctttggaacaaatgcgagtctagtcaatgtttttatattacatgnngacaaggaagcataagtacattcaccaggaaaatatagttgtggagggtaattgcagtgctgtgattcacaaaattcttccaccaaagcacaaagaccttgggaatgtgaccattccttgctcaataggtgaagttacagtgggaaaagctctcattgacttgggagctagtatcaatctaatgccactctccatgtgcaaaagattgggggtgctggaaatcatgtccactagaatgactctattgttggctgaccgctccattaccagaccatacggagtaattgaagatcttntggtcaaagtaaaacattttatcttcccagccgactntgttgtaatggatatttgngaagataatgacattcccttaatcttgagaagaccatttatg

SEQ ID NO: 217038 - DNA, 391 bp, Glycine max
ggagatgaggaagtgttgaagggtgaaagtggctgctgtatttgttgaccacagagtggtacctggagatatgtcgtggtggtcaggagatcttggggacgttaggtggggtgctattgcccaaaaccaagcttgaccaatcccgacccaacccgggcatagtcggtcagtgagaacctgtgatgtacctaagcatgcgagcttctggcattcaacagataaaaggaaaacaagaccactatgcacggacgcttggggcggctggccagctgtgaattttgtgtatatgtggattgtggcctctggtaatcgattaccaagggtgggtaatcgattacaaggcttacaattgaagacaggaggctaagatggtctctggtaatcgattacc

SEQ ID NO: 217039 - DNA, 456 bp, Glycine max
  unsure (1)..(456): unsure at all n locations
acctgaggcatcaagcntttttatagttggaggtgacctttttattattaaagctttttaaaaagcttgagcttgacctttatagtaaacaagccgtgttaaacctcaaataggccgagccaaatgcccttgacagttgctcgactcatttccatccctaatctctaccattggttcccagttgttgcatctcctaggatttctcccgattgggagaccaaggaattttaaagggagaacgactaagttacaatgcaaaaagtcctttgctaccctgaggaagggaatgtcaatgtttaccctacatatgttactcttgtggaaattaaccggtagacttgccatcatctcaaaacttataaagatagctttcaaagcccagagattttcatagaacggatcactaaaaatcaatgagtactgtagtaatgagaagttgatttgttatgaaatctt

SEQ ID NO: 217040 - DNA, 385 bp, Glycine max
taagctaattaaatatgtggccttggaccagaatgggcttttctgaaagggtcaatttattataacaaatgtgatgtacataatgtttgacacatttatatatgtgtggcataatgaatatactcgtaatgaaatatactggtttaggatttgtttatttctgcataccttagcaaaggaaacaactcttgtaaatttgcaagttaatatccaaaactttactacttgagacgcacattgatatccaaaatattatcgtttcatatccaaactttagtttctctgtatattagtggaaatcttcagagttgtagctttgaatatttgtcagaagcttaaatcacttttaactgaagaaatattgaataggtcctggtaaaacatc

SEQ ID NO: 217041 - DNA, 416 bp, Glycine max
  unsure (1)..(416): unsure at all n locations
attctgancgccaatacttcaacaacatctcatagggatgaatgactcgggcatactttaagcttatgcacggaaaatgtaattatgaaattgagatgcccgaagaaacaccatttcctagttaaccatgcattaggtaccatgttcaattattttgttttgttggtgcgtgttttttttttttttttagaaatgggtttatgatcccaacatggttggctcatggtgcctaacacatgcaactaagaaggtagtgtgaagtttcacgcttccccttttttgtttctgttttgtagaggaacacgcatggatgagcaaacatgaaaacaaatggtatgcaattttgcagatcataaagtttgttaacgcaatgcatgatgatgcatgacttatgcaaatgtgaggctggaatatat

SEQ ID NO: 217042 - DNA, 402 bp, Glycine max
acacataaaactaagctttagccaatggctaccttgaatgaggccttttttttttttcgaccttgttccctttccttgtatgaagctcactacaagccttaatgaaaaaccatgatattaccatatccttaagaatttggactttgaattgtttgggaataagtggggggtttttgtttcattggacacttgtttgttggtatgcttatgatgtatttgggccatactgatgtacattgatattggtaatgttggacatgctgaatgaaatgttgtttaaaggctaaaaaaaaatcgaaaaaaacaatcagtgaggaaaactcttaatggccagaagagaactctggtctctcttcatgataaattacttactcttattcctatttttaaaagactatccct

SEQ ID NO: 217043 - DNA, 430 bp, Glycine max
tcagacaacgtgttggaattaattacaatgagggtgtaatttactaatacagagagcttttgccttttaagaaatttttctaacttagaaacttttcttcacacaaaccataatgatgcacaatgcaaaaaaagatatcaaatgcactaagatgcaacaaccaagataacaaccaattcaaatgctgctctagggagttgggtatgtaaaagccaaaacttcctcaaaaaagacttcttcaagctcttccttgagcttctagctatagcattacgtagttcactatgttgctccccctatctcaaacataggtgccgctttctatactggttggactatcctccataggaaaagtcacaagcaatggtgttgattacacctctgatgtgttgggcaggttcctgttctggtggagggtctcgcttatgct

SEQ ID NO: 217044 - DNA, 459 bp, Glycine max
  unsure (1)..(459): unsure at all n locations
gtcacctgcggcatgcaagctacttttattaaaatcaattttaatanatatctttcagcaaaaaaaagaaatctataaaatcatattgatttaaaactaattacaagcgcatatccaaacatgtactataaatgattgtaagagtgcatttataatttatctggactttatcacattagtatgtgtaaataattgatatatttataaaattgtcctcttatttcaataagctctcaaataaaacatgaaatatctgataaatatatgaaaataatttaatcatattttctgttttattttttttatctgcattttctgttctatttatagatccaattcatagatacatgtgttctctgcacatctgtaattttgaaaaataccactaacacactatggcatatagtttgaagcatagcagtgaaggaataactatcaaaagtatctaggacctgaaag

SEQ ID NO: 217045 - DNA, 431 bp, Glycine max
  unsure (1)..(431): unsure at all n locations
tatcanaatatnnnnnttctaaacagattagagaatttgtatgctaagcatgcactaattgaaggcctacgtgttattgtttttttaataaaaaaaatacttttttaactaattaataaaattatattaaaaatatccataaaacttttgttgtttttcttatcaaaattatatataaaaaaaactaagcaaaattatactgcaaacttttttataaaaaaaaaaaaaaaaattaatcctaacgtactataagatcaagatgaatggatggactgaccttacaataacaaaaaggcgacaatgacatggattcgtgcccgctgatcacaaatccaaaggcgtccccaccctatattagctacctctaggttcatacaaaacttgcatttgcatgcgtacaaggatgacaatgacaactctattcttctcat

SEQ ID NO: 217046 - DNA, 469 bp, Glycine max
  unsure (1)..(469): unsure at all n locations
accttaagtcacctgcggcatgcaagctactccgacaaggagggcctttngtatttaancggctattcctccttcagatgacgcatggacacttatccctgacctcacatcgatacgtgcgataggtcagccacaataaacatggctacaaaatgaaatgagccggggtaaaccactcttcctcctaacaaaatgtaatatatgtggagccgaagggcataacaggcgtagctgtccaatgcattctgagcgtgggagttgttcaaatcgttgatttatgtatgttagtcgagtgacttgtatttgtttacgttttgtcaatgtattgaatttctgaggttcaatgaattcggaacttaaaaacattttgccttttgacatgacttatttgcgggttcaatgaatttgttagttaaaacctaataataaaccactaactctgaaaataaaccacttaccctaaacccta

SEQ ID NO: 217047 - DNA, 417 bp, Glycine max
  unsure (1)..(417): unsure at all n locations
tctccttccttttcctataaacaggggagaggagggatgttctttttagntcaaccctcctggtatctgatatttacttaaaatcagtgagaaaaatcgtttccatgaagaaaatccaagtcgaggcgcttccgtaacgcttctgtgacattttcgtgggtgatttcgcgaagattttcaaccgttcttcgacggtcttcgctggttcttcgtcgctctttgcggcttaaacggtaagttcccgaaatcgaacttttcaatacattctatgtacccttagcggtcctcatttgtttcgcgtgcttttcttttcatttcatttactattcgtacccctttttgacgtgctttagtcatttatttaagtcatattctcgcctaataaaacataagatgaattttcaccgatcattcgta

SEQ ID NO: 217048 - DNA, 439 bp, Glycine max
  unsure (1)..(439): unsure at all n locations
agcttatgtatgcaaggtactctctttgtgttgattctcctccctccatgacttattccctagtggatggtgcctcctctaacctcttctcctttatcttccactacatctccatggttgaaaatcacaattgaaggacctcattgaaactcaaagatttagccttcatagaagcttctcaagtaagcttcccacacatgtattatttggattgtcaatacatttcaccatgtgaagcatgttggagaattttctcctttcaaatttatggaagaattcctatagttgagaggttatactttcatctaccaaatgagcaatttgtactatttgaagatcatgatgacctagacttnttcctctctagccaattgtgaaagagtcatgttccaacatggttaaagcaatgaatgtccatgaggtaaacctactatgctta

SEQ ID NO: 217049 - DNA, 428 bp, Glycine max
  unsure (1)..(428): unsure at all n locations
tagttctctgcaggtcttggcccaacaaaatctctttttctctctggattcagacccttctctctctagaatctctcacatgcagaagctcttcgagaaattggccaaaatcttctccaaaatctaatttcaggcttaaataggtggctttgtttgtgctagcacacttagcgagactatggacgctcaacgcgcattagtggattttggcttagtgcatgcttttctcgctcagtggatggactaaagcggtgcgcttagcgggataaacccttgctcaacgaacatgcacatctcatccttcttccagattcttcctcgtgcttagccaatggaatggtgtgctcagcgaatggctcgcttagccagtagattggcttagcgagcagatgaaaatccgcacttcacaaactngcctaagtaacctg

SEQ ID NO: 217050 - DNA, 430 bp, Glycine max
  unsure (1)..(430): unsure at all n locations
agctggtcaagccactcagcctgtacatgttttgctcgggntgtgctgaaagtcgctcagagaggacattgatgcaaatcctacccccaagggcatcggatagaagactccataaagattgggccatagatgcaagataagaccctagggttttcatgagccttagggtagatttacaacccatgggctaaatatgagcccacttatctttgtgcatattatattaaggttttattatttttgggccttggatccagggcttcatagtgtagggagggtaccctagaaatgtaggattttttaacccttgtattttagttcacttagactagttnttgtatagggtagtattataattcacatacatcaaataatattatatcgtgatatttataatgacgaatatgagtgtaaacgtgtcgaaatcata

SEQ ID NO: 217051 - DNA, 470 bp, Glycine max
tacggacactataaaactcagcttgatacaaggagaccttgtccactttaataaaactagtatctgccatacttgtactctctcttgccatttctaacaattagctcctttagcagcttgattccaacaatgccttcctcaatggcattcttgaagaggaggtatacatgtcctaacccctaggatatgtgtcttctaacaagcatcaaatgtgcaggttacacaaagttatttatggtcttaagcaagcacctagggcctggtttgataaacttaaagccattcttctcggcttcaatttttcttccaacaagtgtgatccattactctttgttttttttcagaaaaatgcttatgttgtctatatattagtctatgtagatgacattatcataactagaaataacgtaaaaatcattcactcatttgttgcttaactcaattatatcttctctctcaaagaatttggt

SEQ ID NO: 217052 - DNA, 428 bp, Glycine max
  unsure (1)..(428): unsure at all n locations
agcttcctcggggccatctcctgctaatgtctaacattggaaagttagttntacccagaaatgctactcttaaaacgaaaatggcatacaacctcctccaatacaaacatcaatgtaaatttagagcaaactcatgtacatacttccttacgaacattcactcgcacgagatattcttctaactaaggaaaaaaatacacccatgcacaatcaaggcatcctcgttacctagaccacatacatgcacctcctttgcaagatttacatacatgcatactcaaggtattttggctaccaaagattgcacacgtgcacattcgggtatttctagtacccatacatacanccaattcataaggaatttcggccatctacaccataaggtattacatttcatgctcttttaagtgttcgctacctaaagccgc

SEQ ID NO: 217053 - DNA, 378 bp, Glycine max
  unsure (1)..(378): unsure at all n locations
tgcttgtggagcttctatggaggctggatctttgatctttttgaggncctttaatggtgattttccaccatggagatgcagcgaaagacaaaggagaagaggtgagaggaggtgccatccactaaggaataagccatggaagaaggagcttcaccaccaagatgagccttggataagaagcttggagaggatgcttcaatggaggaaaagaaagagggagagaaagagagaggggggagcacgaaattgaatgaagaaaatgggagagaagttgaactttgagttgtgtctcacaagactctcattcatcatagttacaacaagtgttacacatgcttctatgtatagactangtagcttccttgagaagctttctta

SEQ ID NO: 217054 - DNA, 436 bp, Glycine max
  unsure (1)..(436): unsure at all n locations
gcttggagagatggccaccaccattccctctattggtaatntcctntacttatttctactattttaagtaccaactgttctctttatagactgatgcaacggctataaacagaatctagaccgcacattcctaactaattctatagaatgtgggtcttttttccttcaattttactcgacctattcacactagctgttaaatcttctggtactatatacgctttttcgtttctagctctacaattttttaactattatttcatatattatatattggaaaagaagtatcatttatcccttgctctttgtgatgtctactgaggatggacatgtggcaatgttttagccaaaatgagtgttccagcaccatttccgcatgaaatggttggcgccataatacacggacctgagcaatctactaatgatcatttggcgc

SEQ ID NO: 217055 - DNA, 461 bp, Glycine max
  unsure (1)..(461): unsure at all n locations
tgagtgaactcaatcaaaatatatcattcacagatgcaagttgttattacaatgaaaaaaaggttcaggggtcaaccatccaaaatatagaaataccaataaaaatgttatcacatgttattaaacaactaaagttttatcctgctaggtgaggttggctacatatatagcatgatgtcattgggctcggttaaagactaaattctaaagaatattattcatcattagattccttttaagttttaacaatttcctccaatcgcctttttggttttcctcttccccttctcacatggctaaaaaacatgtaatctactctcctcattggagcttccagtgaccttcttggcacgtgttcaattcacttcaattgatattttgtcatctattccttaatcaacaccacagtatataagcatgtgnatcttatcctttcttgtgtcagcatatgttcatcttac

SEQ ID NO: 217056 - DNA, 276 bp, Glycine max
  unsure (1)..(276): unsure at all n locations
ttgtccttgatgttttgatgatgccctatgatcgtgatgatttgatgaaaatagcttctaagttaattcaagacaacgatccacgaatacaagatacaacatcaagaagatctctagtattttaggaagggaattcctaattgaaatagcaaaagacttggccaagaaatttaagttaataagtctttntcaagagatttactctctggtaatcgattatcagagggatgtatcgattaccagtggccaaaatggttataacagctttagaaattg

SEQ ID NO: 217057 - DNA, 404 bp, Glycine max
gaaggtgcgtagcccaccatttatcatagtagaatactgtttatgtgcctactatcatgggcatcgtgttttcgtcattgaggtgccacttgagctgccaagttctccatctttgggcgtattctttgaaagatccgcgcccccttttttgcacatattttgtagttgcatcctattcgaagccattataccgacactgcctaacgaaggcaaccattatgtcctcccatgaatggactctggaaggttccaagttagtgtaccatgtaacaactaccccaataagactctcttgcaaggaatgtatcaacaattcctcatcttatgcgtatgcccccatcttccgacaatacatctttagatggatcttcgggcacgtaatcaccctgtacttgtcaaagtcc

SEQ ID NO: 217058 - DNA, 386 bp, Glycine max
  unsure (1)..(386): unsure at all n locations
agctncatctnccatataatggagaggagttatgttccttgttnatnaattacgcacagtatgtagtgtgatccacaattagaagtaggaaatatgtttacacatacggatcaagtaggaattaggtttgtgcatacggatcaagctgatccatatgacccttctttaatataaaaaaatgtaaaaatggtatttttgttttgaaaaatgtttcttattagggtttaggttactgctgatggtttaaggttactattgatggtttagggatagcgacgagggtttctattgtattatgtctgaattgtctgaactaatagatattggctctggatattccagtttactaaatcgaaattctgatactggggacagatgtctcacaa

SEQ ID NO: 217059 - DNA, 435 bp, Glycine max
  unsure (1)..(435): unsure at all n locations
ttgtcggttgtgtgcagaagttcattattggcgcacatgctctattatttgtcatgngaacttgagcaacaaatggccttgaaatgcgataagggtctatgtggtgaatagtaacaataaaaaaatacgttaattgtttgcacagtctttgtcagttgcataaaatttgtcattatgcgatcacaagcactgntaattggcatgtgaggctgtattgtggctgtattgcacatggcttttgtctgaatgtaaggcctcgaattacaaaggccattaaaatgattgtcttactatcatgcctcgagattctaaagcccattaaaatgtttgtcttactgtaatgcctagagattccaatacctttctacacgactatcttactgtcatgcctctagataacaagcacgactaccattaccctgtgattgatatata

SEQ ID NO: 217060 - DNA, 344 bp, Glycine max
tacaatttttacttctgaaaaaagtgagcttagcggagtcgagcgcttgttaaattatatggagcccccatacacctaggactttaacgcacgggcacgctgcctaagttaaacagactaggtaaaatcatgatatcctctcacactgtgtgcttgcacagtgaaggggatccattatccttccgctgaggggaggaagttccaagattttattttatcatattggatctttaaatattgggcaatcaccaaagagggcacaaaacttctagtgtgtgctcttttcgaattgcggtcgacatgatggctgacgatcggatcacaagttgattaagagattcact

SEQ ID NO: 217061 - DNA, 417 bp, Glycine max
  unsure (1)..(417): unsure at all n locations
tcttgacctaagtcagatattggaagtgtcgcaaccaatgtatcttactatagaagaaagtagctatatatcaacggaccacttatgagtgctttaataaatattcttaacatagaaaacagaaggcatgatggataatgaagcacatgacataacaagtaattgtgtttaccttgtgatgaactccacacaagatttgacaactgtgaaatgtctattgcatcttctataacaaattggcttgactgccaatgatttataaaatcttgtaaggtttttgaaatcagtggttgtgtacacatgacggactcgagtaacaatgaacaaacacatttacgcaccaatatcgtcaaatttgaaacataagcttaaatgattacgagttactcttntttagggctcttagactttacaaca

SEQ ID NO: 217062 - DNA, 296 bp, Glycine max
  unsure (1)..(296): unsure at all n locations
tggagcatangaganctatgctgcgcgagtgttggactctccaatagggaatattacttttgcatactaccacctggttggtagctctatctgctctccttattctgaaggaatcatagcgacgccactgtgatccctacactctctatttggtagactatctacatgactcattctgaatgtaatacaagcgcgacagacagggacgcatgcactgctgctcaccttcatttcagagtgccccaaagcctatttgatgacctttgaaccagaagtacgcctcaatactaactacg

SEQ ID NO: 217063 - DNA, 474 bp, Glycine max
atccttgagtcacctgcggcatgcaagcttctcagatccggtcatggaaagacttgtcgactgccttcattaggcagtaccaatacaatatggatacagctcccgatcggaaccagcttcagagtatgaccaagcgagaacatgagtccattaaagaatatgcccaaaggtggagagatctcgcagcccaagtcatcccgcccatgatggagagggagatgatcacaattatggtagatacattgtctacgttctactatgaaaagctgataggatacatgccagctaactttgcggatctcgtcttcgccggagaaagaattaagtctggactgagaaaaggcaagtttgaatatgcctccaacgtggcccccaacaacaacagaagagccccagtggtgggtgcgaggaaaaaggaaggagatacccacgcggtcaccaccgccccaacatggatgaaagcaccccaaaata

SEQ ID NO: 217064 - DNA, 462 bp, Glycine max
  unsure (1)..(462): unsure at all n locations
tgtaggattatggngtacccatcacatgtggtactatgtgtcggtcgggcgatggtgcacaacaagttntccacatccacaatgcgcgcataaacccaccatcccctgttgcccacctccaactgagctcacgtactcccacgtagcccatatcctcgtttctctcaacaccgggtccccatcaatcctcccaagcttccccaacatcaaagtaatacaacattcacacagcataagctatcacagccaagtaaaacagggcaaaggcagaaaactctgctcaaaacaccaaccaaaatcacagcttttctcacttaaagaccccagtaacaattccttcgatccaattcgttaaccgtttgatcgactccaaaattttactggaagtctatagtacatatgcctacagtttgaccgttgggatctactagaaaacatccagaactcattctgtactactct

SEQ ID NO: 217065 - DNA, 428 bp, Glycine max
  unsure (1)..(428): unsure at all n locations
agcnnngaagaactagagaatagggacgtttttattttgttccataaatnnncggcagtttctattttattcccttaaaaaaatcccaaataacaataactacacatttattcatattaaaagtgaattgaggtgtttgtagaattaattttgaattaacatggttctatagaaatgattgtaagtaaacataagttttgtagatataatatgattattgtttggaaaattgctaccaaaactgatttttggggcaattactaaaatgacttgagttcaagagtacacattgaacaaatagcatgactaataatacgactcaagttagtgttgattcacacgctatttctaagaacttcaaattcaatgaaaagtctaaaacttagattcatgttttaacacaatgtaaattaaatacatagctaata

SEQ ID NO: 217066 - DNA, 468 bp, Glycine max
tacggaccttgaaactaagctcgcatgattacatctccctctttctaagcaaattcttcttgatatcatcaaaatcttcatgatttacattctccccctttttgatgatgacaaccacctgtaggttaggagcaacaacaaagaaaatatctatttgcatatagtttactccgccttggttttacaatgattgcttatatgagacaattgaagatttcatatttttcatatataaaaagtagtctcataaaacaatagataatttttcttactattttatcttttatctttctctccccctttgtcaacataaaaaacaaatcatgaatataaaggagaaagatgttaccacttgttgcaatgtatgagaataagtgataccacaaggcattaaaacaatcattcaatattaatcaagcataaacaagtacaataacacatcaatcacacacaatcaatcatcagata

SEQ ID NO: 217067 - DNA, 392 bp, Glycine max
ctaagagtcacctgcggcatgcagcttacttctgagagagaggttgtttttttatccctacgggcggtgtctgatttgcagcgctcacttgatgaaatcactgctatgaccgtctaggtggggctgcatgcatgagatctcacctagatctctagaccactcatgaatattatgcacgtgcatgacttattattcatatgccaagtgtgacacagtgataacaccacagactgtgggggttgtctgtgattggtcaaccattatcatacgccaagtgttttttcgtcatatagcttgcgacaccaactatactgtgcgttaagttctataagaccaggcctggtcatatagttcgctatatcacgtccaatgcattacatctcatgttaacc

SEQ ID NO: 217068 - DNA, 355 bp, Glycine max
  unsure (1)..(355): unsure at all n locations
ccctnatcatacatgaagagctaattagatggtagcatatatcttatcttttctctaaaacactattcctcttttgaatctcgagttgctacatctttaattaaaccaagtttgatcgtcatatatggttaagttaatgtaaagatataaatgactattaaagtaaatataaaatttaacaatcatatcattcattttatatatttatataaatccaacaccaagattacaacatttaatcatatattctgttcaaccaatngagctagatatatagctatcatttattgtaatctaacattaactggtgatatcaaaatattaaattcactttaatctacctcctttaatatat

SEQ ID NO: 217069 - DNA, 407 bp, Glycine max
  unsure (1)..(407): unsure at all n locations
agctntataagtgcgggtgggggagtatgatttgtcttgcggtcgcgatatgtgaagatgatgttccaagtaccttggattcggtccgaccatgccctcctgatttccagctgggaaattgtggggaggaggaactccccggcatttacgcatcaagcctcatgaaacctttccggttttaaaagctttataattgggcctaggctttagagtattctttttattaaggctttgcgtcttttgtctttgaatttataatacaaggatctttcttcatctgttcctgggctctacccattctcattcatttgcatggttacttctttttctgaaacggcaaaatcgatgacgagtcccccgaaggtactaatacctgcgacccgtctatcaacttcgagcaagaaatg

SEQ ID NO: 217070 - DNA, 406 bp, Glycine max
  unsure (1)..(406): unsure at all n locations
gacctataaaactcagcttgaactgctctagctcaccgatgtggacaggtctctttgaacgccaaggatgatgaacttattacaaatgcagcagaggcaattgttgtcttgtcatctcttacctgggaagtggatgatggtgtgatcagtccatcagaaagtccaaaggtggacctgctaagttggtttgcagatgttgtttcctcctcatgcaaagatgatggaaagtgtgatgtttcaagggaaaatgatggcgaggacaacgacgggcgtttctttgaaggaatggattactttgacgcaatgacantgaacttgccggagaccaatgaagaagactacatgcccaagcttcttgtccctgacaacttcaagtggaagaacaactactctgttgctactcgga

SEQ ID NO: 217071 - DNA, 415 bp, Glycine max
  unsure (1)..(415): unsure at all n locations
agcttgtatagttccccaatntattgttattttgtagngatttttggaaataaatcttgttttatggttaatgctgtctctagaacatttccattggatttaatgatgaaatatgtgcattttcgggtgaaaaagaggctaagttttgaattgcaaaatgtagcagttgggctaagctcaacagttgggctaagcgcatatccaccgctaagcgtagtttcagtgcgcttagcgcaaaggagaatctggcagagcatcatcatcaaagctgcgcgctaagcgcgagatcaatgcgctaaccgcagtaggtgccttcagccaggctaagctcgagactggcgctaagccctcgcgctaagcgcgagggtcacgctaagcacangcgtgcgaattcaaagcctatttaaagcctgtc

SEQ ID NO: 217072 - DNA, 459 bp, Glycine max
ttcaccgcataattcctccaatcttgggcaaattttctttgaaccaagatttccttttatgaataatgctctcctacaacctaagacaaggtagaaggagattaactatataggctcaaggttcaatcaaacaatcatacttccagctcaaaataggtgaaagggataaatcaatcatgcacaaggtaagctttttagctaagtggctctcctacaacctaattccatgttctttctcttctaatgactgcatgctcattcaaggcatatgatctacgcattccaattcactcacatcataatattgatcgattcaaaccaatcacatacactgaattccaaaatcaagtatcaaccactggatgatataaatgcactgttcaatcaagctttgtacaagctatcaaccaaaataaaaactatgaactaaaatttaaagctgaacatagacataaatct

SEQ ID NO: 217073 - DNA, 436 bp, Glycine max
  unsure (1)..(436): unsure at all n locations
agcttctaaactatatacagaaatgaagctctgataccacttgnagacaagnggcctcagttatcttaagaaagaggggttgaattaaggtacaaaaactattccccaattaaaaatttcactctctctttttggattaacaatgcacccttaatatgaattactcaaaagacaattcaaaataaacttctttaaagcaaaagataaatagcaataaataaaagaagtttaagggaagagagaatgcaaactcaatttttatacttggttggccacgcgttgtgcctacgtccaatccctaagcaacctgcttgagattccactatcttgtaaaatgtctttacaaagtctgaaccacacagggacaacccttcctttgtgttcagaaatccttacatcttaagagactcttgtctcttaaccaatctctttgata

SEQ ID NO: 217074 - DNA, 454 bp, Glycine max
ttgatggtgttgagaagaaatcacatgttggtcatcatcttaaagggggagaatgtgaatgtatgtatacatgattttgatgatgtcaaagaagaatctaacaaggctgcttcaaatgataagcatttgcttcaagaatgattcaagattgcttcaacaaacaaagccttgtttcaagattcactaaagaccaagccttgccttataacaaagtgctttcgagacaagcaaggctctggtaatcgattaccaggaagtgtaaacgattaccagaagacagggttgagaaatagctattgaaaaatgttttgaatttgaattttcaacatgtaatcgattaccatatgtctgtaatcgattaccagcaacggaactttggaaattcaaattcataagtcataacccttcaaattataattgtgtaatcgattacacacacattgtaatcgattac

SEQ ID NO: 217075 - DNA, 422 bp, Glycine max
agcttgattctacacgtgaattagatgattttatacgcgcacaaaagagaatgtctcctaacaaaaatactcatgtcggtgggccctcttctactaattctgacttacagcaagcctcatatgacctgttccattcccacctagaggcaattccaacaaaaagagggatgatagtggaaaaggagatcttggagaccttctggatagtaaaggggaacatacctctgctatatgtcatgacacatattccaagatatgccatgtttataaaggagtcgtgcgcccactaaaggatgctctaaggcaatgaaaggattatcatgggtacaaatgtgccagcattgatagagaaatctggtcctcactttcctgacacaaataacgacacagagactttctatataacttgcattattgggaac

SEQ ID NO: 217076 - DNA, 364 bp, Glycine max
tcaatctgataacgctacgtggcagacaaaagctgacatttaaatgatcattattgacaatgcggcaagtattctgcacttcactatccatgttcacacattattgctgcttgcggctacgtgagcatcatctacctgcactatcttgatgttgtttacacacatgagcacattcttacaacttactccactcaatggtggcctgttggaaatgaaacttccatttctccttctgatgactcatggacactgatcccttatccgactacaattcctgcactatgttggacacagcaacatggatcatgaatgagatggattgctcgaacatctgacacctacaaaatttttagatgttgacaga

SEQ ID NO: 217077 - DNA, 305 bp, Glycine max
  unsure (1)..(305): unsure at all n locations
agcttgtatgttctacttctagagcggctttatgttnttaacatcttagggacctatgagggtgacattcagtgccgggagaagcttctctgaattaagcctattagtgctagagggctacttacacaattaagaatgtcaccgtgcgtaagaattctacggcaacagagtgcctttgattaccatcttagtagtggtacatcactggccgatcgcacaacagagaggtgcgctatctaccacaccctggaaaattgggatggtactgaaagagaggaaggaactcttaaaacaagagggggggg

SEQ ID NO: 217078 - DNA, 295 bp, Glycine max
  unsure (1)..(295): unsure at all n locations
gtggacctggagatatgtcgcggnggtcaggagaccttgntgacgtcaggtggngtgctattgcccacaaccaagcttgaccaatcccgacccaacccgggcatagtcggtcagtgagaacctgtgatgtacctaagcaggcgagctcctggcagtcaacagataaaaggaaaacaagaccacaaagcaaggaggcttgtggtggctggccaactgtgaattctgtgtaatatgtggattgtggcctctggtaatcgattaccaaaggtgagtaatcgattacaacgcttaaaat

SEQ ID NO: 217079 - DNA, 383 bp, Glycine max
agcttggcatgctcctacctttttctctcagaagcaacaaattatagcaactccatgagcctgtttcacaacaagaaagatatttgttcctagcttctagttttactagatatggcatacttcaaagggctacgtgacaactataattaagatgaccctaaagccaaattgattgttctttctgttgaaagctcaaaaagattactttatctaccatacttctgcataactatataattacaccaacttataatttattataaattgctgaagggcttcattttatgaagtctatatgcagatgagaataatttaacctgcgaaggacatggaacggtcaaacagaagagtatgcacaataatagcccaacattccatgaaat

SEQ ID NO: 217080 - DNA, 282 bp, Glycine max
aatttgaatctcaacgctcaatggcactggtaattgattaccaaaacattgttatcgattacagttctttgaaattaattggaacgtcgtaaattcaatttgaaaactttataacaacaatttgctactggtaatcgattaccacaatctggtaatgattaccagaaaatacaaacttcttggtaaacattgtttgagacaaatcatgtgctactcaaatttggagaaaaactttctatacttaacttgattcaccctctcttgaatctcgaatcttgaatc

SEQ ID NO: 217081 - DNA, 266 bp, Glycine max
  unsure (1)..(266): unsure at all n locations
agctngaaggggagtaacccagcatgtttcataatataacactagtaatatgtctactatcattgctattatttctttcttcgccattaagggaaacacttgagctgccaggtctctctacctttgggcgtatttcttgaaagatccgtgccccctttttttgcacatgttctgtagttgcatcctattcgaagccattatactgacactgcctaaccgaaggcaaccatttggtccttccaagaatggactcaggaaggttccaa

SEQ ID NO: 217082 - DNA, 254 bp, Glycine max
gatcatctttactaccaagaaaaactcctgcattcctcattaattagctggaatctgtgagggaatcacctaccactcttccttccatgtatagtgtcacttgacctgaagatctccctattgagtgatataaatgaacatcccaccattgtaaggccaataactatcactcattatcacaagcataacacaccgcgcttgagtgatggatcccatgagcatgtcaacatttttttctttgccaagagaactac

SEQ ID NO: 217083 - DNA, 127 bp, Glycine max
ctgatatgattcagatggtcagaacattcagaatcagagaagatcagagagttcagttcagtttcagatcagatcagatttcagacagatcagatcagatcagatcagagaaactcatcagatagta

SEQ ID NO: 217084 - DNA, 207 bp, Glycine max
agcacataccactaacccttgcgacaggtacagatatctgattcaaggccagctgggctatcaagatataccaatgcatccagcttgccttcaagcttctatgtttcagatgaagcacatgggtttgtagctacctcatgcactgctcttatgactatggcatcatttctggcgctaaattgctggagtttgaagccatcttcttaa

SEQ ID NO: 217085 - DNA, 274 bp, Glycine max
atacgagctgcagctgtttgagaagaacacttattgttctatagggactcctttggcacataacttggctccaatagttcctacctaagttaaaattgtatcatggcagtcggtcaaacggacaaaacctttcaattacaccttgatatggagcaaaacctgatttggacatgtattttggtacccaagtctacaaaagtatatagtgatgtatgaagaaaccttacaaaaccttttattaagcattttttcaaaaatcttgattgctcccttg

SEQ ID NO: 217086 - DNA, 234 bp, Glycine max
  unsure (1)..(234): unsure at all n locations
agcttgcctaantcgcctgaaagtgagagattattgttttttaaacaccacaacacgggaatactataagttttattacactatacttaaacagataatacttattacactacaaaattattactaatcggaaaaagtttgaactatttccacaaatcttatacaccaaagttaatttatttaccgaactaacaaacttccccaaatttataaattggcttgccttaaaaaaaa

SEQ ID NO: 217087 - DNA, 388 bp, Glycine max
  unsure (1)..(388): unsure at all n locations
tagacgctccannattgaaatgaaagctctagcaaattcaatggcaataaatttttactcggatgtccgcttgagtccggtactatatcgaaatactcgaaattgaaaacggaagctcgtagcaaatgcagaccgcaataacatttaactcggatgtccgattgagtcccctaatatatcgagatgctcgaaattgagaatagaagctctgagcaatttcgaactacaataactntatactcggatgtccgattgagtcccgtaatatatcgagatgcttcaaattgaaaacggaagctcgtagaaaattctaacaacaattgcttttttctcgggagtccgaatgagtgccgcaatatatcgaaacgctaccaaatggaaaacggag

SEQ ID NO: 217088 - DNA, 415 bp, Glycine max
  unsure (1)..(415): unsure at all n locations
tgcagctgcaagcncacgagaaaaggaggtcgggaccttcatgtcatananccgacgcaaacaagcacccttataaaagtattcactctcgaacaagagaaaattagggaactactactccttatcatgaaaaagcacataacttctcctcgtacaaggatgtcacactaatctactcttaagacttctatatcaccctatcggtgacaactattctatctccactcaactatgaagtttgaaccttaaaatttgatacattatatcatatgtgatacacactacagaacaatatgtatttattttaacaaatttgttgactatgtggtcatagctaaaaaattgcagagcttaaaacttctaactaatgccgaagtggaaacaaattggaaaacaaaaattgaacctactggga

SEQ ID NO: 217089 - DNA, 337 bp, Glycine max
  unsure (1)..(337): unsure at all n locations
tcacttaatcaaaatcaacttgtttgtgacaaagttgtttaaaggtgggtttcataaaaaagtaacatgaatccaacctaccttctcaaggaggaagctacagggtacaaattcaataaaagggacaacatttttttgtgtgtgtgtgcgtatgtgaagggtaaaaaagttggccaaatctatgttatcttttttagttntaagtaaaggtttcatagataaaaaattgaaggtaaagaaattttgaattccatcaaaactacatttttatttggtatagataaaagatcttcctatactatgtactatttaaatttggatgatgaatcgatttggt

SEQ ID NO: 217090 - DNA, 287 bp, Glycine max
  unsure (1)..(287): unsure at all n locations
ccgtcaaattaaatcactcatacttaccactnttgaagaactacgtaggtctgatttcctcatcgcaattgaggacacataggagcaaaagcctcgctnttgtcgaccaccccaagaaattgttaatggtccaatgccttaactgttctcttctttcaaaatcaaaagatcgtttaatggtccaacaccttaaatgaccttctgttcggttaaatatatcttgcgaaaatagataaaaacaacttaaccaacgtttagttctctaagaactacgtaggtgttgattt

SEQ ID NO: 217091 - DNA, 306 bp, Glycine max
  unsure (1)..(306): unsure at all n locations
agcttgaatactatgagagtgtggagcgtatcaatgctaanattaatncaaatcgctcaagtttctgtcgtccagtggattaacaacattacgcaacgagggtttgagactttagagacttgatatattgagactttatagccttgatctattgagagatcccagctagtcatggtttaatagctttggcgcttgacatgaggttactactatgcataaagagaaagagagtggggcgaccagggtttcttgcaccatgtcttttaagaacattttgccagtgtcgcctaatgcttatagaagact

SEQ ID NO: 217092 - DNA, 292 bp, Glycine max
atgtacaccaacgctgagaaaaatctatcttacaaaactgaggatggagatcatttgtcgtatcgactaatacactagcactgaacaaaatttaggatatgaaaagtccctgcaaacttaggcaacaccgacataatatacaattcatgaatagtctttcatttctcacattccagagggaatgtctcgattgtatgaatgtcaagcttatattatcccacaccgagctatgtttaagtaatgatttatgggttgtactataccccgtctataccccctaaaatagaatata

SEQ ID NO: 217093 - DNA, 284 bp, Glycine max
  unsure (1)..(284): unsure at all n locations
ttaacaccgagctgcagctgcctggattttacttttatanctttggaaataatttattaaagtcatttattttggggatcccactctgattataataggatgcacttttcttaccgcatgttgactggggtaaaggtggtacgatgcctttccctccctaaatttctgacaatttgaaagttgctgaagccaatatttgcccatgttctcagaaacatattagtttcatgcaactccttgtgtcttttttataaataactattttgttttcattcccccagact

SEQ ID NO: 217094 - DNA, 349 bp, Glycine max
  unsure (1)..(349): unsure at all n locations
actcagcttaatgaaagaaaacttacctcgacgacgacnattgngattacgacgcgacagcatgaccggcggtggtggcaagacgaaacaccaatggngatcaacatgcgcggagtagaagcaacccaatattaccgaaagtactgtagcggcaaggatgggggaattccaagagcttttaatataagggtgaagggcattttttccatttcaccaaatatgttgggtgtaccaccagttgggcaggggcccaaagccatgatagagtcaactttgaggcccactccactccgacagacaaacccatttttttgtcagcaccaacttgttttatttttctaattaatta

SEQ ID NO: 217095 - DNA, 438 bp, Glycine max
  unsure (1)..(438): unsure at all n locations
taagtagngatcaaacttgctctgtggaactgtctttgttatcatatcagcaggattgtacagagtactaatcttatgaactttgattcttctttctggtcgaatgaaatgatatctaacatttatatgcttagttctatcatgatgaacctgatccttggccaagcatatagcactaaggttgtcacagtagatgttaacatattcttgattaattccgagatcatttattagacctttcagccgaattccttcctttgcagcttcaataagagccatgtattcagccttagtagttaagagggcaacagaatgttgaagtgttgcctttcaaatcaccaagctgccaccaagggtgtaagcatgccttgttatggaccttctcttggcacgatcagcaccacaatcagcatcaaaatagccagtgagacaacaatc

SEQ ID NO: 217096 - DNA, 325 bp, Glycine max
agaaaatgtttgttatgcgatgttaatgtttcaaggcttgcaattaataagttccgttttagtcttctatatagaaaaattgggtattagctctaatatatctgttttatgcaagtgtatccggcttgcttctatatatgtattttctcaaactatcatgcctcatctttgtcacaccttgtactactgtgggagtctaataataaaatttcttgcatataatatctggaactagattttgaaagaagtataaatatatgtgtgatcaacttggttcaactctactataattaatttgaaaaatgctgggatacaagatgaagct

SEQ ID NO: 217097 - DNA, 389 bp, Glycine max
agacctatctcaatcgaatgggccacaacccacaatcactgatcttgtaaggcataagtgcttaagtgtcatccttacaattgtccatcttgagatctatcttgaacgaacagtccacaacccctcaagtgtaggacctaaaaggcgagagtgcttgttgtgcttagtcacctaattcatcgggtagtctacaatccctcaattcctacttagccaaacttggttatgcaagtgatctcataactttgtaaggatttatttgatatactatggtatgtcatttggttgcttgatcatcgattacatatgcattcaactgagagatacattgaacgaatataaccaacaggtgattatatgagtaatcaaccaagtgatacacaatagta

SEQ ID NO: 217098 - DNA, 129 bp, Glycine max
tatatttattaatctctctctttaaataactccgcactgtctctcatctatgcacctggtgtgctcctttaaatggcacatgctgttctgccacgtttctaatgaaccctattgcgtctatattctctc

SEQ ID NO: 217099 - DNA, 287 bp, Glycine max
  unsure (1)..(287): unsure at all n locations
agcngngagggaggcaagaggattcatatgtgtcacaacagaacccaacggtttctaattatatgggccattaaatctatcatgtgttgacagcaaatgattagtccgtgaaacatctctggggctgaacacacttcagcaaaggccttttctttggctaatatctcgcgggaggtcttgactttcattcaaggacacagggaacctatccatccacatggtcgcttcttgatgcaatgcatcaatcaccctacctcttgcttatctctccgtgtccgctcgtgcga

SEQ ID NO: 217100 - DNA, 318 bp, Glycine max
ccaaccaaaaagggccgtatccattaagaacctcgccaccactttctcaatcaaaacatggtaatcaaatatctcgatcatcagagaccaatcaaaactctctatgaattactgacaatcgcctatgatatatggtaaccgattatctcaactcttagagaattccttaagttgtttatgcagcgtaagcacttacaagtagtgactatcaattatctcaaagcataaagccttccttcatttgaaacatgtatggtaatcaattaccaaaacaccgttatcaataatgtcgatgatcttacccaattttcaaataaa

SEQ ID NO: 217101 - DNA, 353 bp, Glycine max
  unsure (1)..(353): unsure at all n locations
aatattataaacatggcagagaacaataaatataaaaaaatgggaaacgaataacaatgtacctaanagtaatatcttaagaagttccaatactagtagtcccaatattagcaggatttaaggacaaaccaaacaactctaaaacttttgatcggttcagntcgattttgatcggatctataaatctaaacccgtgacccaacccgtacatgaatgcttttgattgattcggttttgacccaaatacataaatgacccaacccaaactgttcggatcggtttgggtcaattcgtggtcacggatgacctataaccacgaacacacctaccggtaaagttgaggcttttcaatt

SEQ ID NO: 217102 - DNA, 205 bp, Glycine max
  unsure (1)..(205): unsure at all n locations
agcttgaacttgtggctgtgcaatactattgatataatggggcacaatanaacttgaattattctccagggttactctttttggctcttcagccatgagtggatcttcaacagattctatatgagaaagccctcgaataagaaaactataagatgccctcaaagaaccaagttcttggtagtgtctactcttctgagctttaaag

SEQ ID NO: 217103 - DNA, 400 bp, Glycine max
  unsure (1)..(400): unsure at all n locations
gctggtcagaactacccgtgagatcgaaattattgttaacgaatgatgaacgttgaagaatggtcgaaacctttgcgaaattcttcacggagaacgtttcggaagcgcctcggcttagattttcttcacggaaacaatttttccaagcaaattcgaaagagagaaaagcgcctaaggggctgaacccttttccttctcacttcctcccctatttatagcaaaataggggagatggttgccgcccagctcgcccaggcgagccaggttgcatcctccagaagcaacagccttctggaggaatcttttggaaggcccaagtgggcctggtttgctattgcacccccatttttactaagtacacccnctctgccttttttggtgattctttnttcataaaggt

SEQ ID NO: 217104 - DNA, 423 bp, Glycine max
  unsure (1)..(423): unsure at all n locations
ctaagcttaggttgctaattgctcaggttgctcatggaatgtctttgtctgtatggnnggcagcagaggagcacaaaccacaaacccttgcgacaggtacaaatttctgattcaaggccagctgggttaccaagttgaccaacgcatccagtttgccttcaagcttcttagtttcagatgatgcagatgggtttgtagctacctcatgcactcctctaatgactatggcatcatttctggcgctaaactgctgggagttggaggccatcttctcaattaaatttctggcttcagcaggagtcatgtctccaagggctccaccactggcagcatctatcatacttctctccatattactgagtccttcataaaaatattggagaagaagctgttctgaaatctgatggggnggcaactgcacat

SEQ ID NO: 217105 - DNA, 262 bp, Glycine max
ccacgctaagagaatatgtggggcattttagatttcccgctcacgctgactcaagtgcctttggttttacatcataaccaataatcctcacagtccccctgtttcattaattcttttgcgccatgcctttgtatattctatattcaactttattttgttcggaagttggaatccaccttacttttgaaattctgtaaaatttatgtccaggttacctgggaattgggatgaccgaataactcaacattgctcgttaatggat

SEQ ID NO: 217106 - DNA, 330 bp, Glycine max
  unsure (1)..(330): unsure at all n locations
tgctataaatgtgtggcaggaattgatcctactcaatcnatttcctctatgctgggcttttatttgctcttgtctaacttcatataaagaattatgtagtcctttggaattccagtgaaaagaagttgggaatggagaacatctaactttcatcaatgcttccattcgaaaattaccacactcaacgtaatctaccacctatgctcaataacttggggtattcatgagtgtaattgctgcctagattattntaacttttgagttctggtggacactgcagtgaggaacaattcatttgatgagatgttcctgctggtgggattggtactc

SEQ ID NO: 217107 - DNA, 449 bp, Glycine max
  unsure (1)..(449): unsure at all n locations
aactaagctggtgatggcctaatatgactntacgattttttgtctctatatgantaaggagacatgatgtagaaattatgaaaaattgttatgttttgagttgtaagacctactgagtgtgtgaccacttggcaatgaatgttgcataattatgactataagctttattgataatatattattgtgtgttgtcacgatttgggattgggcccaggggtgtctgaccctcgacaaagtatatctattgtagagtttgattgatgttgaatgggtgtgttgtgcggtaccgtgatagaaatttgaagtaggatatcgtgagtggtgtatgccagtgaaccacacgtggtggttacataggttatacatgtgacttaatggttgtgtttgtggcttctgagaagatggagtattcacttcctttgttccattttacggatctaatttcacat

SEQ ID NO: 217108 - DNA, 329 bp, Glycine max
agcttgttcgcacatcgttcgcgtgtatgatatccactcgtcaagggttgaagtagaggagaccttcaatcctataacgcaacgtggcggacaaaaatgggcagttaacttgaatggccattattgtcaatgcggaaggtattctgcgcttcactatccatgttcacacattattgcagcttgtggttacgtgagcatgaactactaccaatatatagatgttgtttacaccaatgaacacatcttaaaagcatactctgcacagtggtggcctcttgggaatgaagcggaatttcttcttctgatgaggcatggacactaatccctga

SEQ ID NO: 217109 - DNA, 398 bp, Glycine max
  unsure (1)..(398): unsure at all n locations
ctctctngntttgggcctagcccaattttgttaagtcacaaaataaaaaccattatttaaacacccctcttttacacatgcaccttatctcgttttaggcctagccctttttacacatgcaccatcttccattataggccttacccttttgggcctagcccatttttgttaagtctgaaataaataaatattgctagtcaaggtccctcaattacacatacacctccgtttcctttgggcctagcccatctttgttgattttgaaataaaataaaaaaatctattcacaccttttctgttttatatatacatgacccctcgtcattttgggcctagcccattttctttgtttgaataaaaataacttcttactacaccctttttcctgttgccccctt

SEQ ID NO: 217110 - DNA, 161 bp, Glycine max
  unsure (1)..(161): unsure at all n locations
agcttacgaaactaagtagtctatttttgttataaaangatagcacacatttctgaacaagatgcacacacccttattcttctgagtttatctcttaaggtaataattagatgcctggcttcttatgggaaacgaaatgattgtgtttgggttgcctgggt

SEQ ID NO: 217111 - DNA, 412 bp, Glycine max
  unsure (1)..(412): unsure at all n locations
ntacaagctngacatcattatcctatctccgattgcctttgtgtgagtctcgtccaggtagtcccgaagaaaaccagcctcaccgtgataaaaaatgagaaagaggagttgattcctactcgggtgcagaacagttggagagtctgcatcggctataggaggctgaaccaggttaccaaaaaggaccatttccccctgccattcattgatcagatgcttgaacgctagcaagtaaatcccactactgtttccttgatggttnttctagttatatgcaaatcactattgctcctgaggatcaggaaaagaccacattcacctgcccctttggcacttttgcctataggaggatgcctttcggcctgtgcaatgcccctggtaccttccagcagtgcattgataagtattttta

SEQ ID NO: 217112 - DNA, 220 bp, Glycine max
  unsure (1)..(220): unsure at all n locations
agctagccgccaatggtatttgaggggnatttataccattatctcctttagatataagattaatactgtttatcgatgtatgtatctgaacgtcagtgggagtaaggttattctctaattctgtatattgatgatatcttgcttgcagctaacgaccttagtcttcttcttaagactaagaaatttctccttataacctctgaatcgaaagatattgggt

SEQ ID NO: 217113 - DNA, 309 bp, Glycine max
agcttcccgcatccgcacttggaaggatctgattaccgccttccttaggcagtatcagtacaactctgatatggctcccgaccggacttaactgcagaacatggttaaatgggaaaacgagtcctttaaagaatacgctcagcgttggagggacatggcagtgcaggtagcccctcccatggtcgagagggagatggttaccatgatggtagataccttgcctgtgttttactatgagaaattagtaggctacatgccctccagcttcgcagacttggtattcgccggggaaaggatcgaggtgggctt

SEQ ID NO: 217114 - DNA, 404 bp, Glycine max
  unsure (1)..(404): unsure at all n locations
agcttngattctaatatatgagacagtcaacatatattattagnccaccactacttcataataacatgaacgcttcgtaatgaaacaaatgtgatgcttggcgtgacctttttctgtgatggttgagtacgtacaaattgattattgttgaatgaatataactctataatgatcgggaaaaaatctatatacttatttatatactgatggttttggtaaataaactgaagtggtaagaactgtatttgttgccctgcattattaattcaatcactggctttttattccttttcggcttgtgggattaagtctgaagaaaatggaaaacaattttatggctatgaattatacatgagtacatgcttggaaaattgccaaaatatagcatagcctgagagatgata

SEQ ID NO: 217115 - DNA, 453 bp, Glycine max
  unsure (1)..(453): unsure at all n locations
actaagctccgtggaaactccntgaaagctggtgtggaaattatttttttaagctagagcttanctacacacacccctcttataactaagctcacctccttgagaagctttcttaagaagattccttaagaagctagagcttagctacacatacctctataatagctaagctcacctccttgagatgagaatctagagctttgctacacaccccctataatagctcagctcacccccatgacaaaaaacatgaaaatcacaacaaaaagtccttattacaaagacaactcaaaatgctccgaaatacaaggctaataccctatactactagaatggcccaaatacaaggccttagccaaggaattacctattctaatatttccaagaatagcgggcgatacttagccataggctcaaaactacctaggctcatgaaacctaaggcctctcttg

SEQ ID NO: 217116 - DNA, 295 bp, Glycine max
  unsure (1)..(295): unsure at all n locations
tactaagttggcacaataacatgatcactgccctatatggngaagaggagactcttggtgttattattaaatgccacttcttactctcagtgaatacacgatacccatgagatgaaagaaagacccaaataacacctaaaactaaagcctaattacatctttactgctttattttagggtcacatataagaccccaatttaactattaccaaatgggcctgatattctttcctagctgaatataatgactatcattagtcagacagtgaaggaataccagtaaagccaccttgac

SEQ ID NO: 217117 - DNA, 427 bp, Glycine max
  unsure (1)..(427): unsure at all n locations
agcttcaaaagtatagcctcataagaggatcttntctagctgncatatcaagatgattcacttgtgaagcttgccagaaaggaaaacaagttaaaagttcttctaaagccaaaaatgttngttctacttctaggcccttagagctcctacaccttgacctatttataccaactaagacaacatccttctatggacgcaaatatggtctggtcatagtggatgattacactagaaggacatgggttaggttcctaacccacaaggatgagtcttttgatacctttctataattttcgaacaagaattaaaatgaataaggtatttgtatctcttcaatcaaaagtgaccatgagggagagtttaaaatgatatttttgaaaaattgtcagagaagggttcaccaaattttcactccagaacacacaca

SEQ ID NO: 217118 - DNA, 442 bp, Glycine max
  unsure (1)..(442): unsure at all n locations
tgatttaataaatcgtactcttacttgcaatatcatccacataaactaacagagcaatgatagtgttgaatccatgcttgagaaacaaagaatgatatgaagcacattgcttgtacccatgtgagattagaaagaaagacagcctggcataccactgcctgctggcttgtttcagtccatatagctaataacattcttatgctgaggcatataagttaaaaccttaatctttgcattcattgcctctatccatataggatccttagaagcttcattataggattgaggttcaagactttgtgtaatggataaaatgatattgtgataagaaggagacaatttgctatatganagaacaaaattaaaaggatagagacaagtacctgcagaataactggctaaagttgaagatgggtatgaaacatggaaagtcctatacttg

SEQ ID NO: 217119 - DNA, 337 bp, Glycine max
ccatctgatgtaactcatagtcaaaatgagctactaaagccataattactcgaaaagaatctctcttagatgtaggagaaaatgctcttgtatagtcgattccttctctctgagtgaaccctttgacaacaagtcttgccttatgcctctcaatgttgcctagtgagtctttctttattttaaagactcatctacatccaatggcttttacaccattaggcaactcgacgagatcccagacttggttagatgccatagaatccatttcatctttcatagcattgtactacaagtttgattcattagaactcatggcctatgaaaatgattcaggaac

SEQ ID NO: 217120 - DNA, 408 bp, Glycine max
actatattgaaagactatgaagatcaattatctttgacacataatcagttcattctcaaacatatcaatatgaattcctttttttttttaacttaaggctacttggtagactggatgtgtacgtgtgtgtatttgaaaaacaatgaaacaatgtgtaaaattttaaaaggaattatacattaaaagtttaaacatatatttaaaactaattttaaaattattatataattgtaataaaaagtaatattgccatattatatatatatatatattatgatatcttaatattatctgatttatctcaaatataaaatagaatagcttatacactatctatcaaactattttatgtacattacatattaggagagtataaaatatatactcttacaatatcttagaacttat

SEQ ID NO: 217121 - DNA, 398 bp, Glycine max
  unsure (1)..(398): unsure at all n locations
ctatgaaaccctggtctgcaccatcangattttctctcccattccgtaattcatgaaccatgtncttgaacacggccattgatggctgccaatatcaaataattagaaactataaaatagagataatcaagtgtgtgtttggcttcatgtgtaattgcttttaatatgattttagataaatgttctcatgtttaattttatattgaataatttttttttcttatgacatattcaacaattaattttgattcagaattaattttaaattaaaataatttcgataacttttatatttatactaaaataaaaatatacaaatatagataacatcactttcaaaattaattttataaaattaattcattcagagtcgaaactctccgaaacatttaacacaa

SEQ ID NO: 217122 - DNA, 340 bp, Glycine max
  unsure (1)..(340): unsure at all n locations
cagctgcgttgagaaaactttcttttattgctagagcntcacaacacacaacccctctcataaactatctcaccttcgtgagaagctttcttgagaagattcctaaagaagctagagcttaactacacacacctttctaatagctaagctcatgcacggtgcccctcattgccccagtgtaaggctttgaggtaccaattattgtctttcgtcatgaccttgtagcagggaacctattgtgagagaacttctattctgaccctaggttcgcttaaggtttatgcatggtgcctttcattgccccagtgtagggctctgaggcatccatcgctgttttgtt

SEQ ID NO: 217123 - DNA, 383 bp, Glycine max
  unsure (1)..(383): unsure at all n locations
ntctcccttctcctcacgttgattgttctttcttctttattctccattgaaactccattaaagctccaacctttggtgcccatttctgctccaaatcgcgaaaggaaggcattttctgagtcgtgaagcacatctctacgtgtgggacctcgaaatttcaagtttgggtagacttctttctcacttgattttcgcgggtattgggagatatgatgggtagttctgctaggtttctacttcatgatagttatttgtgaagaaatttgttgaaagcatgttgaacttgccatgtttggatgagttaagcttacccattcagttttagggtttttatgatgatgcttgtgatgttgatgtgctgaaatcgcttatggaaaactgtt

SEQ ID NO: 217124 - DNA, 371 bp, Glycine max
tcgcggccgacagcctgttgacacgtggagatttacgtcatcttccgcgctcacaagatctgtcatactgacttttgagtcacgctgacgggcggaaatacccgagtggttatccgtataaactttttggtgtctgtaagacgaaaagccttatagcacgcagagactaacgtcgtcttctgcgcccttcgtcaatcgcggccgacaagcccgttgacacgtggagatttacgtcatcttccgcgctcacaagatctgtcatactgacttttgagtcacgctgacggccggaaatacccgagtgggtatccgtataaactttttgctgtctgtaagacgaaaagtcctgttacacgcagagactaacgtcg

SEQ ID NO: 217125 - DNA, 400 bp, Glycine max
agcttgccacccagctcgcccaggcgagctatgttgctttctccataagcaaccgccttctgaaggaattttctggaaggcccaagtaggcctgattgctatctgcacccccatttttactaaatacacctcccttgctctttttttggggattttttttgtaacgttacgaaactttacgaattttcgaacgatgcttgttttctttacgcaatgttacgaaaccttacggattacgtaatcatcccttttttgccttccagaacgttacggaactttacggattgcacactaacaacttcttttaattctcggcatgtcacggaacttcacggattgtgctacaatgctttcttttgacttcccgcatgtcacggaactttacgaattgcctaacgat

SEQ ID NO: 217126 - DNA, 380 bp, Glycine max
tgcctgcccttttctaccaacagttttggcatgtcattggagagtgtcagaccctaatatcatttggggactatcgttcactgatgatttgattctcgctagccgagctgcattgttcgacactagttactgcacaaaacaaaatgatcattcaatgttttgatcaagaatgcaaaagataccaagaaaggggggaaaaagggtcttttccttgagtttcctggaccctagcttgcctaggctagcctctggctcgcctgggccgccaaacagctttagggttaaggaaccaactcgcctacgtgatttgatgacttcatgaataagccttagctcacctgggcgagctccaagtgcccaaaattccactttttctataa

SEQ ID NO: 217127 - DNA, 430 bp, Glycine max
  unsure (1)..(430): unsure at all n locations
agcttgncaaagntcgcccttatcgttacctttatttttagaaacacganatngaagccccagttgatgccatgttgtaaaaagggctcatncgacctagcactagccttttcttctcccctgtcctcttagtccaaaagcatgatgacacttgatgattttgtgttgattatcacgccctaaatgtgataaaaatcaaagattgtttttcgataacaaccattgatgaactccttgatgaacttggcggtgccacttggtttttgaagctggatcttcttcaagttatcaccaaattctgatgcatgaagatgacgttttgtaagacagctntttgcacacatcatggtcactaccaaatcaaggtaatgtcctttggctagtgtaatgctccattcttcatttaagtgacaatgaacactatttttca

SEQ ID NO: 217128 - DNA, 342 bp, Glycine max
  unsure (1)..(342): unsure at all n locations
tactccgatgtgcgatncagtggacgaatatatcgggacgctcgaaattgaatgttgaacctctgagccaattcaaacgacaaaactttttactcggatgtctgaatgagtcccgaaatatatcgagacgctcgaaattgaatgttgaaccttctgaggcaattcaaacgacaataactttttactcggatgtctgattgaattccctactatatcgagacgctcgaaattgattgttgaagcttgatcctattcaaacgacaataacttttactcgcatgcttggtgagtcccgcttatatgagacgctcgaaattgatgttgagtcttgacccaatcaaa

SEQ ID NO: 217129 - DNA, 236 bp, Glycine max
  unsure (1)..(236): unsure at all n locations
gactgacaccctctacatcattagactaccgtcactgttatacaaacctatgataacgagatctcaaccgtttaccttaaaggtttgcttactttgtcactataatcctgatttgccagacaagcgctctcataagtctaaatgacatttagactatgatagctcccttaacctncaaactctcactagatccaaaaatggccttccaactctaaaggctccctctttttccactc

SEQ ID NO: 217130 - DNA, 281 bp, Glycine max
  unsure (1)..(281): unsure at all n locations
agctagccgtagtgagagaggattgacttattttatcncacgaaacagctaacactgtattactggacagtacatattctacaactgggtttccttaatctcacatgcaccaacccttcaagtacattcaagacaaagctctaattttatggcatcaactgggcaagttcctttaaagaaaaagactgccctccggctggtgctggtacagtggtgagattggtggtgggtatatcaccaccggcngtggcccactcgagggatgattatgatcggcggga

SEQ ID NO: 217131 - DNA, 424 bp, Glycine max
  unsure (1)..(424): unsure at all n locations
agctngactaggcgagttgattntagccttattttcaccttagntattagncaattcggttaagaatgagaaatcccaaagagaaaatgtcctgttgattttccgctttattttactaaaaagtatatttttgatattatattattattttatctcttttttatttccaacgtggttacggcacgacagaacggtcggaattcattntaaccgaagttatcggataatacaattcaaacgttcggtggaaatttattttatttttaagttaagcgagaaatgacttaagtaaaatggtttaagcacgtcaaaagggggtataaaaagtaaatgaaacgagaatagaaatacacaatacacaatgtggaccaccatgggtacacagaatgaatcgaaaagctggttcgaggtacttacccgttga

SEQ ID NO: 217132 - DNA, 247 bp, Glycine max
ctgaaaagagtatgatgaactaagggacgtcaatatggccaccgctgaagccttggaacgagaaaccaagaaggctcgaaaggaagacatgtgccaacaagtttgaggggctttataggcagcaatagtaagctaagctccgaaagggaggaatatcacggtcaaggctgacttgaagacactaggttcttagcgaaagaatgtccacgtacgaatgaggaatggccgctagatgaaagactattac

SEQ ID NO: 217133 - DNA, 253 bp, Glycine max
tgaaaaaagggaggatttttttgacacgtggcatgagggtggctgctaattaaggagcttggcagtaacgcattttttattgtgtcatgatttgtatttcgggcttaacggaaaaagcctgtatttttaaaaaatattttttgatgcgatggtcttgatagtggctctattaaagggttgcaagtcaaatgaaaattccggagtgataatggaaatgaacctatgtgaaggggtggaaagttaaaaaaacttt

SEQ ID NO: 217134 - DNA, 389 bp, Glycine max
gtcccgaatatatcgagacgctcgaaattgaatgttgaagctctgaccaaattcaaacgatgataactttttactcggatgtctgattgagtcccgtaatatatcgagacgctcgaaattgaatgttgaagctctcagcaaattcaaacgataataaatttttactcggatgtctgattaagtcccgtaatacatcgagacgctcgaaattgaatgttgaagctctcagcaaattcaaacgacaataatttttttagtcagatgtctggatgagacccgtaatatatcgagacgatcgaaattgaattctgaagctctgagctaattcaaacgacaataacgttttgctcggatgtctgattgagtcctggtatctattgagacgctcg

SEQ ID NO: 217135 - DNA, 355 bp, Glycine max
  unsure (1)..(355): unsure at all n locations
ctacatacacctctctaataggaaagctcaccttcttgagatgagaagctagagcttaactacacccnctataatagctaagctcacccctatcccaaanatacatgaaaataccaaaaaaaagtccctactacaaagactactcanaatgccctgaaatacaaggctaaaactctatactactagaatggccaaaatacaaggcccgaaagaaggaaaaacctattctaatatgtacaaagataagcaggctcatacttagctcatgggctcgaaatctatcctaaggctaatgagaaccctagggccttcccttggatctctggcccaatctacttggagtcttctatccaat

SEQ ID NO: 217136 - DNA, 358 bp, Glycine max
  unsure (1)..(358): unsure at all n locations
atttatacgatgctgcatcttgttacagccactattgtacctaaagatgatacctcaaaaaccacttaccgttcaagtttggcagctggttttatttttcagttctttaacccacttcttgacgcttccgcaataaacaatggttattntaatggacatactaatcttccttatgctaatgattntgagttaaaagagaatcagaagcaggttcgtcatgacaaagttccaactttactgtcatctggtaagcaaatccttgaagcaggctgtgactatcatcctgttggtgagccaattatgaaatctggagctgcactacaagcttcaggtttggtttatatcattgaagtttgga

SEQ ID NO: 217137 - DNA, 178 bp, Glycine max
cacttaccacagaggtgagactttaccttccaactctcaaagccccactcttattccactcataacaccacattctcactttccaatcctagggtaactctacattacatctctgacaggtttccatgggcaaatttcagcgtacaaacatcacaaacttcatcactaaacccctaaa

SEQ ID NO: 217138 - DNA, 356 bp, Glycine max
  unsure (1)..(356): unsure at all n locations
gcagctgncaaagntcgcccttatcgntactcttatttttagaaacacgaaattgaagcccaggttgatgccatgttgtaaaaggggctcatccgacctagcactagccttttctcctcccctgtcctcttaatccaaaagcatgatgacacttgatgattntgtgttgattatcacgccctaaatgtgataaaaatcaaagattgttttccgataacaaccattgatgagctccttgatgaacttggcggtgccacttggttnttgaagctggatcttcttcaaggttatcaaccaaatctgatgcatgaagatgacgtttgtaagacagctttttgcacacatcatggtcacta

SEQ ID NO: 217139 - DNA, 375 bp, Glycine max
  unsure (1)..(375): unsure at all n locations
atgtccggctcaagatgttaaagaagcactcctaggaggcaacctagtacctcttgtagaagcaagtttcatgatgatgaaccaatcaattttgatgatgccaaaagcccaagtgattgattcaagacttcaagatcaagcatcaagaatccaatccaagattcaagattcaagagaagaaatcaagaagcaacaagtcaagacttcatataggataagtattaaaagattttntcaaaaaccaaatagcacatttttgttttacaaaagaattttctcaaattttctaagttaccaaagtgattactctctggttatcgattaccagntatcaataatcgggtaccagtgacccgcttggttttaaaatgtttc

SEQ ID NO: 217140 - DNA, 365 bp, Glycine max
tctggcttcaattctttagtgggctttccttctgagtccagcaatcttgcgatgtccccagccttagatgacagcttttcaggttctgctatccagtgatttgaggaaggccaccattcttgctctccaatattcatagttgcttccatcgagaattggtggtctgttcactggtccgccttctttctccatgttcatcagaatttatctccctagatctcactctgtgatttcgagtgttcgctctgataccaattgaaattctgataccaggggacagatgtcgtacaggatgtcacgacattacgctttagaacatgccgaatatatgtgtccggtttgacagattaacaagttaataacac

SEQ ID NO: 217141 - DNA, 218 bp, Glycine max
agcttcacagaagacttactggttttagtattaagaacgatgaaaaacagaccaaggaagacgaagaacggtctcccaaattgaacacagaaatgtttccgaagcgttaccaaagcacctttaccatgaatttttttttcctttttccttctttctaactattttagagaaagctttttataatgatgctgaacccctttcccttagccccttacgcc

SEQ ID NO: 217142 - DNA, 143 bp, Glycine max
  unsure (1)..(143): unsure at all n locations
gcgatccttaagtcacctgcggcatgaagctttatctaacacttagcatgtttgatggncanaggtgaatctagatagaattttgaaatttggtttccttgaatcaaatctccaaattttttttttggtggggaccatttttt

SEQ ID NO: 217143 - DNA, 168 bp, Glycine max
gccccaacggcaacgcggaaaggacgacaatagaaaacctgaaacctccgaggcaacccagccgaacaaaaaaaaccccgaaccgccaccggggaaagtacacccttgaaacccaagacccggggacaaaccaaaagccgaaaaaaagccgccaaacgacaccgggaa

SEQ ID NO: 217144 - DNA, 368 bp, Glycine max
agcttactaaaacaggagcagacttcttcttatatcctactcattatagagcacgaggtggagctcttcaatactccactataacctcacctgaactaatttttgctgctaacaaagtctggcaattcatggacaacccttttgaatctcactggacagcagtgaaaacaattctcaggtatctcaaaggctctatacaccatggtctacttctcaaagctggcactcctaccattcccattaagggcctttgtgatgcaaactgcgagtctgaccctgatgatcacagaattacttcaagagctgctatttattttggtcctaatcttattatgttggtggtactaaaaaacaacagattggtgaaa

SEQ ID NO: 217145 - DNA, 240 bp, Glycine max
ttttctctttatttacactattacatctctaataaaaaatatctgggggacagatcatttttagggacaaaaaaaaattattaatatatcagaaaaacttcttgagggcaatgcccccattaccccctgtaaccgcattgcactacttcttcgcttacaacatatcaaatcagctacaattcttttctcagatatcaagggttcgaaacctttttaattgaaattgcgagaaaatttaag

SEQ ID NO: 217146 - DNA, 310 bp, Glycine max
  unsure (1)..(310): unsure at all n locations
atgcaagctnttgactgggcagagaaatgaactttacatattgatatcgcataccgaagggaaggcctaattgtaccactccccctgaccttccacctgaactgatagaagttggcttgagttgagcgtctcttacaaaaaaagatgccctagtcgcctcagtggaatgcattgaagaaaggaatccactctcaaccctttcattttatttaatagaatgggaagcaggtcctattcttttatatatatgagtaaacaacttatgctctaactccttgaagaaaaagtcttgcatctcgcccaactccca

SEQ ID NO: 217147 - DNA, 249 bp, Glycine max
tcccttgtggattccgactacttttgttcttttttcatcaaatgtcaaggaatccgctgtggaagctaccgggcgtaagatttaaaattaaacggataattcggtatcaactagggaacagtgtagatagggtaaattcataaataaacattgctgaagaaacattgatctttgatgatttataacagaatgaaactcagtctacgcttatcaaatactcaaattgctagtcagtgagattgacagcag

SEQ ID NO: 217148 - DNA, 382 bp, Glycine max
  unsure (1)..(382): unsure at all n locations
ctagctnntcattggtgtattgagatctccttttggtgtctctaaatgtgggaatgtgctcaaatatgtggggcaattntggtttgttttcttgcttgattaagttgaattgggggtttgtatgagatggccctaggcctataatgcattttgaagtaatggggcatgccacattgtccccgttctcttgctattgatgcctaaacgcgcgcccaccaagtgttcggtgaaatgcctcaacggcattagcgcgtgattgttgtatggaaacaacccatggggcaatttggtttgcacatatttttgggacatgcattcattttcgaaagagctagagtaatagccccgcatatgttctangcctagaaactaanattttatg

SEQ ID NO: 217149 - DNA, 442 bp, Glycine max
  unsure (1)..(442): unsure at all n locations
cagtatatnnngacggaaccatgtacccctgttttttatataattaaaaaaaattggcccacaaaatttataatatatcttttatatatatatatataggggtattaataaataagatttgtgatatcttcaaaaattatttaaaaatattcttttattattattattattattattatcattattgcaattttacgtcaatattacattttaagatattgtttttgataacatcaacccttacgactaaggtaataacatatttatacattaactatttcattaattaattgcactcttattatatctgttttcatttatcaaacttatctctctatgacttttatatcctccgttactatgagagatctcataatatgacataccacgatcattcgtgttaatcttttctttaaaaaaccatataaattatttttcaaat

SEQ ID NO: 217150 - DNA, 290 bp, Glycine max
gcaagcttatttgcaagtgctcttaattcatcttttggagaggggacaaagggggcggcggacctttttgaataattcgcctgacattgcaacaataaccactaatgcctggagtaactaccaacaatgaaggcttaaatgtttttttttttttccatataaattagcatttttttttccatttttatccttgcagaaaaaaaaactgtttgtccttacaaaatgggtatattttatttttcctccttataatgcctaacacagagggcgagccctgttgcaacggtaaa

SEQ ID NO: 217151 - DNA, 363 bp, Glycine max
  unsure (1)..(363): unsure at all n locations
tgtatactgaattgagtatggcacacgccatgcatgtattatatgccttttagaggcttgaaaagtgcgagaaaacgagctgtgttttctgcgttttctagaaaacgcgatgaactcgctaagagagaatgctaagctaagcgagttcatcaatactcattgtatataagctttatctgaagaactcgccaagcgcacttactgcgctaagcgagttcatcctttgaggataaacattcatcctcttgctgaactacctatggctaagcaagggtgaatcgctaagcctaggtaacttaaccaaatttcgtatcttaagccttgcgctaagccgactntacctgagctaagcgcatttcatca

SEQ ID NO: 217152 - DNA, 331 bp, Glycine max
taaattatttgtgtagttatttgagaaaccctcatattatttctcttaaattgagaaagtttgtgcctcagctatttggatttattaaaaaaaatcttccttatttatttttttagaaattcttttagaatatcttgctcaaaaatgtacttaggacttggtttccaacacagggaaagggaatgcgtcctttgaactaataatttctttgttaatactgttagaccagtggccctcaatatcttaagaaggggggggtgaattaagatattccacactaccttccccaattaaaatctatctcacctttctattcaagctcttgaattcc

SEQ ID NO: 217153 - DNA, 168 bp, Glycine max; identical to SEQ ID NO: 217143

SEQ ID NO: 217154 - DNA, 385 bp, Glycine max
agctttacagcagatgttaggaatgaccctctaacctagaattaaaataacttaatgccattaacctaaggaattaaaaaaaaacttaatggctgagtgtaactgaaaatgtggcaaccaaaagtcaccctcaacagccaataagtcagccaccatttggtctcccaaaaggctgatgcctaggttgccaattgggcccttattacaacttgaactaaacctaactaaagcccttttagttgattaacccaaaacatatgtttggtcagccaactttaaagggatggtgccattatttaaacacactaaacactcttaaattgaaacaaagtggtgtcatttactcctcctccatttagggcatggaacaactcacacctttgac

SEQ ID NO: 217155 - DNA, 340 bp, Glycine max
  unsure (1)..(340): unsure at all n locations
cgctatgcgcacactnncttacgaacgttcactngcacttatttattcttatnactaagaaaaatgcacgcatatacaatcaatgcacctttcttacctagattatttacatgtactttcaaggtgtatatgttacctacattacacacattttctttgctaaattcacatacatgcttactctaagcactttggctatcaaaaatagcatacgtgcacatcttggtatttctcatacctatacatacacaaacttcatgatgaatcttgactatctacacaataaggtgctacttatatgcttttttaagatgttttactacctaaagccgcatgcaaa

SEQ ID NO: 217156 - DNA, 257 bp, Glycine max
accagaacccaggattcattcctgtgggaaaattggaaaaacttttgaaaaacacatttggtcaaccattcgaaagggcgatgagccaaatacaggtgtctacttcaaaagtagagagagaggtttcacagagaacttatttgcgaaagctctctaaacacatctgggtcaacacttgcgaatctaataagaaatcatctaggaaccttcacttggattaatatcttctaaagagagaaattcccctatgaacctca

SEQ ID NO: 217157 - DNA, 430 bp, Glycine max
agcttataagaacaaaagtgcctcaatctattccaaatatgcatgtgaattaggaagcatcaacaagaatcaagccaaggctattgagcaagcaatcaatggggcaaaacacaccaaatgattatgatgatggatggctcaaattctcacaaggtaaactcatcactttcaaattgagctttcaaaactatcatgacatgtagaggagaatcaaggatttcaagtcacaaaatgtcaagaacttttattttcaaaacaattacccatttctagaacatattctataattcaaaagaaaacatgcatatgccgtccacccaccacaatattgactccataatatttatactaaaattccgacgaaactaacaactttaacaaactaaccccgctaacatattaacaaaaccaacctatactatcaaaactg

SEQ ID NO: 217158 - DNA, 287 bp, Glycine max
aattcaaaaaactttttgaaagacacatttgttcaaccattttaaaaggcacgatgagcctatatacatgtgtgtctaacttcaaaaagtaagagagagagttttcaaagagaacttaattgtcaaatgctctctaaacaactcttggtcaaacacttgcaaatctattaagaattcatctaggaacttcaacttgtattatcatctctaaaagagagaaattcctctaggatcttcaatctgtatcatctactctaaaagagagaaatccttctgttcatctattg

SEQ ID NO: 217159 - DNA, 278 bp, Glycine max
  unsure (1)..(278): unsure at all n locations
aagcgattgaaagctcgttagttgcaacttaaacccaaactcgactagtgtacatagctcccagagacctcaccagccatgagcacagacgcatagctgatgtcttacataagaatacaaactttgttgcttggaaaccatttgacatgccgagaattcaccccagcattatctacacaagctcaccattngtccctatgccaaaccggtatcacataagaagagaaagatgggagaataatgacataaagcggtcagagaagaagtggactatctta

SEQ ID NO: 217160 - DNA, 408 bp, Glycine max
  unsure (1)..(408): unsure at all n locations
gcatgcagcttgcaaacgctacttcgagccttcttgattctatatcatganggaaacgtagcttatcatctgcagttgctgaaaaattcaaaaattcacttattcttttattattcactccttccaccacaccatggtccactcattcctaatccagaacctttacttcttactcgtggtgaaaatcaacctgtgctggagcctctctccataccatcctccaaaactgattcctccactgatcctccgacccacttggttttggtacagtggctctgtttggctccaaaagaaacaacttgggagaaatgggacgagtttcgcgacatttatcaccttaaggacaatgtgactttcttaagcggaggtaatgatagcaacacatatgatgacatacctgatgcccat

SEQ ID NO: 217161 - DNA, 430 bp, Glycine max
  unsure (1)..(430): unsure at all n locations
taccttacatttctttcttggattctagttagttgatttttaatgcctttaatctcttgttgtctgatgaagagaaatcaaagttctgatcaagcttgtaatcttgcagattaaagccaaacatccaggaggttggtctttgactacatgaatcaccctgaggtatgcatcaatgacatcttctatacgaactgattcttttctgaccttcatcacccatgtccttattccattgttggtgtttgcttcatctgcaacaacccttctatttacatctttgaggaaagctngaatgctttctagttcatctttaatgtctgaaatatgtttgtggatgtgtcattgcagctttgtttcttcttttaagatttggagcagttcctccaatgccaaagatactacaatttctaccatatcattggaatctcat

SEQ ID NO: 217162 - DNA, 433 bp, Glycine max
tctcgagtccctagaattctgttggagactttatcgcacttttttttctcacgacaagaggggcggctctcatcctcttcgtctttctttcaaggaatctcaaccttggtcagaatattgctctcttactcgcatccatgttgtcgggggtttattcacctggaataatggtaggagggggaaagcattcattgacatgcttcttgatagagttgtctataatgatgacaatttaaaattctggaattctatatcctacactctgttggctatgattcattctgatcataatcctttttttccgtgcctacagatggggcctaagacgtttccatccccctttcattttatgaagatgtggatttgatgatctatattgcacatattgtcttttgaatatggaatcatacattgtttgccttccatgttttgt

SEQ ID NO: 217163 - DNA, 377 bp, Glycine max
agcttcccagatccgatcatggaaggagcttgtctttctgttcttattaggcagcaccagtacaatacggacatggctcccgatcggaaccagcttcagagtatgactaagcgagagcacgagtccattaaggaatatgcccaaagatggagagatctcgcagcccatgtcgtaccgcccatgacggaaaagggagatgattacaattatgatagatacgttacccacgttctactatgaaaagctgataggctacatgccagctaactttgcggatctcgtcttcgctgaagaaaggattgaatctagattacggaaaggcaagttcgaatatgcttccatcaacaacagataatacccagtagtgggcgcgagga

SEQ ID NO: 217164 - DNA, 424 bp, Glycine max
tttggcaaatgaagaagaagaagttcatagagattcaaatgttgtttatgttatattaaaatttattgaaatgcaagtcaaggtcttgcttttatagactcttcatgtctggtcaagaaaaccattggaagagttataaccttgagaaaatcttgagaaaaccattagaagagttacatctcttgatttttatgaaaagcatttaatcgattacacaataccatgttatcgattacacaaagcattctatgaaaagatgtgactcttcacaattgaatttgaatttcaacgttcagatactctggtaatcgattaccaatatattgtaatcgattacaccatttaaaaaacaattggaacgttgcaaattatgtaaaagcttttgaaatcaaactttgccactggtaatcgattacaggaaact

SEQ ID NO: 217165 - DNA, 477 bp, Glycine max
  unsure (1)..(477): unsure at all n locations
atcctctgagtcacctgctgcatgcaagcttatgcatggaatatgtaattatgaaattgatatgcccgaagaaacaccatttcctagttaaccatgcattaggtaccatgttncaattatttgtttttaagtgaaatgggtttatgatcccaacatggttggctcgtggtgcctaacacatgaaactaagaatgtagtgtgaagtttcacgcttcccccttctttgtttttgttttgtagaggaaaacgcaaggatgagcaaacatgaaaacaaatggtatgcaattttgcagatcaaaaagtttgttgaacgcatatgcatgatgatgccatgactcatgcaaaatgtgaggctgaaatatgataacggacaaatgcaggatatgtccattatgatgttatgaagagatgcttatgcgatgcatgatatgaatgcattntacggacacgagagcccggaatatatctcttttactc

SEQ ID NO: 217166 - DNA, 464 bp, Glycine max
ctaagcttctaaggaagtttgtcaaaaagcttctaaggaagctacctagtctataaatagaagcatgtgtaacacttgttgtaactttgatgaatgagagtcttgtgagacacaactcatagttcaacttctctccctttttcttccttcaatttcattctcccccctctctctttctctccctctttcttttcctccattgaagcatcctctctaagcttcttatccaaggctcatcttggtggtgaagctctttcttccatggcttattccctagtggatggcgcctcctctcacctcttctcctttgtcttccgctgcatctccatggtggaaaatcaccattaaaggacctcattgaagctccaagatccagcctccatagaagccccacaagcaagcttcaatcatcttgcaagggtcatgactactggaggagacatgtttttcttttcttaattctt

SEQ ID NO: 217167 - DNA, 470 bp, Glycine max
  unsure (1)..(470): unsure at all n locations
atcttaagccacctgcatgcatgcagctttngcagataagttgatccttattcttttgcggancaacttgannccgaagaagcatgcagatcaacttgattcgtatgtaccttattttaaatatataaaaaagtgtagatgagtattttgtgtttttaaaaatgtttgttattaggatgtagggttattgttgatggtttcgggatactgatgattgtttagtgtatttgttgaggattttaattgtattatgtttgaattctttgaactagttgatattggttttagatatcttagtttactaagttagtatggccttaaaatgatggaatctattaatatctctgacaataatttccctcgaaacaatttcacatacgaatatgataaaggtgtggcaatcaacacaaattcgtagatataagagcttctccttttacttttgtcacattgtgtattcatgtcacaat

SEQ ID NO: 217168 - DNA, 149 bp, Glycine max
actgaaggattctcataaacgcttcgcgccgaatctgactactccatatggagtacctggtgcaccacttgttatgactatgatgattgagagtcctgtgcgacacgactcttaggacaacttcattaccttcgtattacttgaactga

SEQ ID NO: 217169 - DNA, 419 bp, Glycine max
  unsure (1)..(419): unsure at all n locations
atccttaagccacctgcngcatgcagcttaacattcatgtaagcgtctcgtatatatctggactcaatcanacatccgagtaaaaagttattgtcgtttgaattggctcacagcttcaacattcaatttcgagggtctcgatatattacgggactcaatccgacatccgagaaaaaaattattgtcgtttgaattggctcaaaggttcaacattcaattttgagcgtctcgatttgttacgggactcaatcatacatccgagtaaaaagctattgtcatttgaatttgctcagagattcaacattcaatctcgagggtctcgatatattacgggactcaatcagacatccgagtaaatagttattgtcgtttgaattggctcagaggttcaacattcaatttcgagcgtcttggtatat

SEQ ID NO: 217170 - DNA, 277 bp, Glycine max
  unsure (1)..(277): unsure at all n locations
attccgacgacaataactgtgtactcttatgtctgattgagacccgtaatataatgagacgctcgatattgaatgctgaagctctgagcaaattcaaaagacaataactttttactcggatgtctgattgagtcccgtcatatatcgagacgctcgaaattgaatgttgaagctctgagcaaattcaaaagacaataactntttactcggatgtctgattgagtcccgtcatatatcgagacgctcgaaattgaatgttgaagctatgagccaattc

SEQ ID NO: 217171 - DNA, 408 bp, Glycine max
  unsure (1)..(408): unsure at all n locations
tttatagataacacatcttgaggcatgttctggttgaattgattgcatgaccgacacattgtgtactggttattaatgttgggaaatttctgattattgagtgagcacgcgttgttgtagggtgatggttctgtgaattaaatgcgtgtgagtgagttggctagctcgcatgacaggaaattgtggatgaaaaactaaatgcttcacattaccgngtgagttgtgtgcaccttaatggcatgagaacaactgatttcatnttcttgactttgcatgattcttgaatntcttgggtgcatacatgatgtggatatgatcaaggccttgttgntatattaatttcagccacttaaccatatatataatcccattgtaaatgaatgacttaatcccttgcaccctcttgag

SEQ ID NO: 217172 - DNA, 400 bp, Glycine max
  unsure (1)..(400): unsure at all n locations
tgtagaattatggggtacccatcacatgtggtactatgtttgtgtcgggcgatggtgcacaacaagctttccacatccacaatgcgcgcataaacccaccatcccctgttgcccacctccaactgagctcacgtactcccacgtagcccatctcctcgtttctctcaacaccgggtccccatcaatcctctcaagcttccacaacatccaagcaaaacaacgttcaaacagcacaagctatcacagccaagcaaaacagagcaaaggcagaaaactctgctcaacacatcaaccaaaatcacagcttttctcacgtaaagaccacagtaacaattccttcgatccaattcgttaaccgttggatcgactccaaaattntactggaaagctatagtgtata

SEQ ID NO: 217173 - DNA, 460 bp, Glycine max
atccttagagtcacctgctgcatgcaagcttggatatccttatgagagggatatcatctctttctatgatggagccatacccagtccctcctcattaagaactagctcctttcttcctctattgcctttagatgaatagacctttgtttggttctctatttggttcttaaccctctcatgcaacttctttacaaactctgacctatattccccttctttatgtataagtgaagtgtcaagcgggaggggaataaggtctaagggtgtcaggggattgaacccatagacaatctcaaaaggggattgcttggtgagtctatgaacccccctgttgtaggaaaattctacttgaggaagatactcatcccaagatgtatggttgcctttcataagagctcttaaaagggtggattaagacctattcactacctctgttcgcctatctatttgtggatgacat

SEQ ID NO: 217174 - DNA, 391 bp, Glycine max
tgtagaatggctatacacgatacatgtcaaggattggtttgtttcattgataaaagggatgccccacattatttccatgacacaaatgcaaaaatgatgatttggaaattttatgcaaaactggtcatgcatgcacctatgtggacgctcaagtgtcaaatttttatggtcatgtgatgctatggctcatgattcatttcctctattttaaatcaacccaatgtttccaaaatatgttcttttatcaatttgtgcattcattcaaatccattttgggcgtctgggaaaatcttcacagcattcacccttcatgtgtatacacattttttcaaaaactagttatgatcagtgaatctttgcaaagaaaaattggaagtcatcttttttcaaa

SEQ ID NO: 217175 - DNA, 451 bp, Glycine max
  unsure (1)..(451): unsure at all n locations
agctntcccattcatggaacgnngtatttcatagttcattnactcataaatctcagaaacaaacttgttaattgtctctctaaaataccattaactgcttagctcataactcagtttgaatattttcgtccgcaaatgatgaagttttttgttatttgcagtgtggttattatggggataacattggagttagaagccgtgcctacagcgtcgcagcttcaattggaagaaaatgctataatcaatagtggatggtggaatagatcagagtcagtagcttcgcgcaatatctgttcatggtatggtatgtcttgcaacgccgcgggaagcgtaactagaatcaactatggctcttatacacctgggattcgattatcaacactaaacctctctgcttcaagaattataatggctcgggtctaaactgggactacaagactatcctctgatt

SEQ ID NO: 217176 - DNA, 420 bp, Glycine max
tgtattccaccagcttcagcaatggcaccctatgatggttttcttcaaactctaagcattaaatttcaacaaatgaaaaactaaataagatacaaaatccaaattccaaccttgtgctcttctccaacagagagattccataatcctccagcagcctcttcagccactagcttgttcattgacctggccaacccagcaagaatctcaatcccaccctcttctgcaacagctttggccacattggcattgacggacaaatttgcaatggcctacgcaaatttagaaagttgggaggacaaatacacattgattgtgtcagatttttcttaactcggatttctagtgaaatatgcatgtaaaaggcatcaaatattaagagtacctcaacaaaatgcaaatatcaatttttctgacaaaagt

SEQ ID NO: 217177 - DNA, 385 bp, Glycine max
  unsure (1)..(385): unsure at all n locations
gtcaagaaacaagactctagcaagnttctagaatcacagaatcattcaatcaacaatcaagattcatgagaatacttaagatatgcaggaacttcaagaacaacactcatgattagtataacaagactttttcaatagaaagattgtatagcacaatttgtccaaaagaatttttcaaagaaaaatttttgacccgagtttttactctctagtaatcgattaccataaggccgtaatcgattaccagaagcccaaatagttttataattgctctacaaagtagtaatggattaccatgggtatgtaatcgattaccaatgtttctgaatgttggatgtcaaatttcaagagtcacaacttgtgatataacatgttcaaacttttg

SEQ ID NO: 217178 - DNA, 260 bp, Glycine max
gaagtgatcaagaaataacactgtcaaataacacattcaagtttcaacttgccgaggcacatcactacgacttactagtgatactccaatctaatgtcatattaacattttatttgatactccaatctatatgtattaaaaggtcaaagacacatctaaaaatgaaaatcatgaaatataagcgaaaagacaaatcagtagaatttcatacatgataataattcccacacaataaatgaacactttcccacaatgttatc

SEQ ID NO: 217179 - DNA, 442 bp, Glycine max
  unsure (1)..(442): unsure at all n locations
atgcttggctgcgcagcttctctatttttgtaggtattnatagacgaggacgagttgtaatcaattacaaggcttggtaattgattacatgagtaacaagccttctggtaatcgattatagaatgttgtaatcgattacaggctgcctgttcttgtgtaatcgattacactggatggtaatcgattaccagagcacaaactaggctagttgctctaaaataacctatgtttatgctaaatacatctaacactatcaatcatcatcactaatatgtatttagttcattcaaacaagtattaatcaaacaattaacacacaccaatcaaatataatcaaatacttacaattaaacacaatcaaacaaaagcaatcatcagaacataatcaaaaacaattatcaaagacaatcaacataactattcagcaaaaacattaatgaca

SEQ ID NO: 217180 - DNA, 439 bp, Glycine max
  unsure (1)..(439): unsure at all n locations
gtgttgtagagccataagagacagaaaaatttcttttatctttgttcnaagctactaaaaacctggtggattatcaaaaaatcgtgataatcccaatggtagagacgaactagtataaatctcattatgtcttatcactatctcttatctatttaattgactaagggtttgaattttatcttgtttctaaaaagtgtttatgaaatttgctaagtattgtctatctttgtctatttgcaaaaacctcattttctatcttaaaactcttttagatgatagatttcttttatagagaacgccttggaaatatattataatcacaattcaatcctccttcttgtgatatctgtctgtttaatccatatactgaagataattttgcttatatcataacttggactttctcccacaaattgtaactttctcatcttggtaattt

SEQ ID NO: 217181 - DNA, 480 bp, Glycine max
  unsure (1)..(480): unsure at all n locations
tcttacagcacctgcggcatgcaagcttggttntctagcattgatgacagcgctgtgtgacattcatggggttgtctctgataccctggtttttgagtcactcagtcttgtgattaaccttgcttatatttgaaagaactgttggaaccccaccgacccatctatcacattcccaagggtccgccgcacatgcaccagagccccagcatcaacatcagaggctcctctccctcctcagcctccttctcagccttcctctccggcacctattcctctgccggcatccacttcaacaccgctggatatgcatggacagatgctcaggtctttgtatcagggccaatagatcattattcaggacctacatcgattgtccctacacctgaagatggatccgcctctcatgactccagaggcctatattcagcaggtcgcatgtccaggagcccagccctttattgataggaggagagccttctg

SEQ ID NO: 217182 - DNA, 374 bp, Glycine max
acccggtgttgagagaaacgatgatatgggctacgtgggagtacgtgagctcagatggaggtgggcaacaggggatggtgggtttatgcgcgcattgtggatgtggaaaacttgttgtgcaccatcgcccgaccgccacctattaccacatgtgatgggtaccccataatcctacaagcttgagatgaggaagtgttgaagggtgaaacttcctgcttttattgttgaccacagagtggtacctggagatatgtcgcgggggtcaagagaccttggggacatcaggtggggtgctattgcccaaaaccaagcttgaccaatcccgacccaacccgggcatagtcgctcagtgagaccctgtgatgtacctaaac

SEQ ID NO: 217183 - DNA, 483 bp, Glycine max
  unsure (1)..(483): unsure at all n locations
tcttaagtcactgagctgcagctatgctganatattacaatagacctcctctctctcagcagcaaaatcaaccacagcagaacaattatgacctctccagcaacagatacaaccctggatggaggaatcaccctataagattttcattaaattattcatatattattatatatttataaaattacttttaaacatgaaaaattttatttgtgtcaaaaattagtatattataataatttttaattataatttctaaattttattcaatgaatgacacactttagataaaaaaaaaaattaaaaaaactgggaataaaaattaattccttgggactntgtaccgtacttataccatttgtaatggcataaaaagtcaactctactgggtaactgtccaccccctcccccctccacaacaacccttctttaattattctcattcccaatttcttcgttggggataaatacataattgtaccatac

SEQ ID NO: 217184 - DNA, 461 bp, Glycine max
  unsure (1)..(461): unsure at all n locations
tctaaactntatacaagaatgaagctctgataccacttgttggtcttttgcctcagatatcttaagaagggggggttgaattaagatattacaacttatttccccaattaaaaattctatttcactttctattcaagttataaattcccttaataatgaatttcttaaatattgattcaaatagaacaatttgaatatgaatataaaacaataataaataaaggagtttaagggaagagaaaatgcaaactcagatttatactggttcagccacacccttgtgcctacgtccagtccccaagcaacccgcttgagagttccactatcttgtaaattccttttacaagttctaaacacacaaggacaacccttcctttgtgtttagaattctttcacaacaagaaaccctcggtctcttaatcccttttcagaatgaagaagaagagaagaagaaatctctc

SEQ ID NO: 217185 - DNA, 437 bp, Glycine max
  unsure (1)..(437): unsure at all n locations
agcttctacttatgtggcagggcgggctnccttcttctntcttgtctccaatgcgagctttggccactgctcttccttcccgcgatgctgtttttcatatctgcctgagtgggcttatagcctataccatacttcccacgatttcctttggcatttatcagactagttatgccgccgttgtccttgcctaaacccattccgggttcgtaaccgttccctaacataactcgggccatcattactgctgcatcggacaggcaaggctgcccanagaaggagtccacggaggaaatgctgaccacctcaaaagactggaaagcggtttctaacgattcttctgcggcttccacataaggcatagaggatgggcagctcaccaagatgtcttcctcgcctgacacgatgaccaaatgcccctccactacgaatatttactt

SEQ ID NO: 217186 - DNA, 404 bp, Glycine max
  unsure (1)..(404): unsure at all n locations
taagcttaatggaggaaaagaatgagagagagaggggggccactttttttttgttaaaaaaagggaaagaagctgaactttgaagtgtgtctcacaagtttcacattcatcaaagttatgacaagtgttacacatgtttctatttatagcctatgtcacccactatatgaaagctctcttgagaagcttccttaagaagctggagtttagctacacacactgctctaatagctaagctcaactccttgagaagctagaccttagctacacacgcccctcacaagcatcatgggaaaagcttcgcaaagcaaaaggaagcatcaccagatgagtgacaagacatttaataaggttgaaatcaaacctaagatgatttcttgtcatctacttctctatnttatgca

SEQ ID NO: 217187 - DNA, 412 bp, Glycine max
  unsure (1)..(412): unsure at all n locations
agcttctcgccaatggtatgtgaggnnnaatatttctctttttnccttagatntaaggaaaatattgtttatcggcgtatgtatatgaagggcagtgggagtaaggctattttctaattctgtatattgatgatatcttgcttgcagctaacgatcttggtcttcttcatgagactaagaaatgtctctctataaactttgaagtgaaagatatgggtgaggtaagctatgtgatatggatagaaatattccatattagatcacaaggattgttaggcttatctcacaaagaatatatatcgataaagcgctttagagattcacgatggaaaggtgtttaacatccgctattctaatgtacaaatgagacagagttagtctcgcacaatgtcctacaatatgattggaacca

SEQ ID NO: 217188 - DNA, 207 bp, Glycine max
aatctaagctttttgaccttgacaacaatactccttgtagaacctgtctttgctccgactggctctttctcccttcgcacttggttcactatgctacccataagctccggaaattggtcggcctactcttcttgcgaccctctaatccttgtcaaaggctctgcggtaatgcatttcttcccgtacccgcacactccttcgacgtgt

SEQ ID NO: 217189 - DNA, 431 bp, Glycine max
  unsure (1)..(431): unsure at all n locations
agctnngaccnngccgctcctcacacgatgttatttttatnttcgccaaacagatctccatttcattttttcaaccaagccaccactaacgtctctctttacccgctatctctggctttggttgacacttctacctcactcattctctgcacatatttttttttaaatttacctactggtgtttgatattttacctgagattggactatgtaactgaccggtgttactatatataggtaaaaatcgtggtaaagcatggaaaatatctccatccactacgatgataaccaacaatatgatgctcgcttaattattatttctctctggctgatagggcactcattcataccttttattcgtttattgggtcgcaaagaacccctcagctggcggtgttgttgatagaatgatggaatgactctatccctgag

SEQ ID NO: 217190 - DNA, 409 bp, Glycine max
gtgacactttatactaagcttcatagattagctcctgtcttaaataatagcctgattttattatattactagaaactagagttaaggaaactaatgctagtatcacacgagaaaagcttaattgtcataacatctatattgataactatcagtctaatgcttatggccaaattcgggtgtcctgagatgatatgatattgactgtgcagaaaattacctacacagatcaatctattcatcgtggcatttatgataatatgggaaagttcaaataatggctgactgcaatatatgctcataaccaattagaacacaaaagagtgttatggaaagacctgaagcatttgcatactactattcaaggtccatggtgcgtattgaagacttaataatgtgcttgtgctaatga

SEQ ID NO: 217191 - DNA, 466 bp, Glycine max
  unsure (1)..(466): unsure at all n locations
agcttgtagtgaggctgggctacattattattgtgtttnctaggattcaaaggttntagattctaagagagaacaaatcctacacttatccaagtgatctttgtaatacaattagcttgctcactagctcttcactgtcattgcttttgaccttattacatcagcacacctttcctattatgggtttttttatatacaacttatgtgttgcatgtgatgatgctttatctctttctttgcatcccaattagttgcactcccccaaatttggggtaaattctccttgaaccatatgctctcctataatctaaacatggcatcgggagagaattatttaagttcagggttcaaattctgtacgaactcattcagcttacaaagggtgcgaatgatagaattataattcaaggtaagttttctgggcaatagactgttgtatgcataatcatggccttcatcatgtcct

SEQ ID NO: 217192 - DNA, 364 bp, Glycine max
actaagcttgcacgtgtgtgtccaccatctgttatagtagatttcttgttatgtgtctactatcattatcattgtttctctgtcattgaggtgccacttgagctaccaagtctctacacctttgggtgtattctttgaaagatccgtgcccccttttttgcacatattttgtatttgcatcctatccaaagccattataccaacactgcctaacaaatgcaaccattatgtcctcccaggaatggactcgagaaggttccaagttagtgtaccaggtaacaactaccccagtaagactttcttggatggaatgtatcagtaattcctcatctttgcacatgccctcattgtccgataatacatc

SEQ ID NO: 217193 - DNA, 471 bp, Glycine max
  unsure (1)..(471): unsure at all n locations
agcttcatgatgatgaatcaagntgtttcttttgtttttgangangacaaacagcccaagagaatgatttcaagattgagtcaacaagttcaagatcgagattaatttcaagtttcatgagaagaaatcaagaagattcaagaatcaagagaagtttgatctcaagattcaagagaagatgaattcaagattcaagagaagaaatcaagaagacttcacaagggaagtattgaaaagatttttcaaaaaacaaacatagcgcagttttgtttttcaaaagagtttttttctcaaacttttctaagttaccaaagtttttactctctggtaatcgattaccaattacctgtaatcgattaccagtggcaatagttgatttcaaaagcctttaactgaatttgcaacgttccaattggattttaaatggtgtaatcgattacaatatattggtaatcgattaccagtgtatct

SEQ ID NO: 217194 - DNA, 444 bp, Glycine max
  unsure (1)..(444): unsure at all n locations
gtgcttctacaganaggaataaatgctgtanaaggtactctggttacatggatgtaaagagacaagtaaatttggagtttgcaaatttttctgatggaagagaaggctctgatgatgttgactctctatgggatagaggtatattcgatgaaaaatcttggtcgctagttcatgatgttcatgcaccaactcttcaaaagattgtccttaagatacttggacaaccatgttcatcttcttgttgtgaatgaaattgaagcacttactctttcatacattctttgaaaagaaataagatgacacctcatagggtagaggatctagtatttgttcatatcaatctttctctcctttcaagaaattctccataatatgatacaaaggaaacttaaatgtgggatatcgcaaaagatgattgttcacttgacgacaatgaattcttga

SEQ ID NO: 217195 - DNA, 449 bp, Glycine max
  unsure (1)..(449): unsure at all n locations
agctngccacattgatgcatcctgtttatttgcatcttgatatgggtacttaaattttggaggcttaagtttattattaaagggggagatggggagaggactaccctttattaaccaccctgatcaactttgtgaaagatgtttacttggaaagcaattcagaatgagtttttcgaaggagtaaaactcaatagctaagaagccactcgaggtaatacatgctgacgttgtgggccaatcaagccaagctcactaggtaaaaataactatttcctccttttcgaagatcattgttcaagataaacatgggtctatttcttaaagaaaaaatcagaagtctttcttgccttcacgaagttcaaagctgcaacaaagaaagaaagtggtcgagagataaaagtagtgaggactgactgaggaagagaatcacttccatagagttcaataat

SEQ ID NO: 217196 - DNA, 448 bp, Glycine max
  unsure (1)..(448): unsure at all n locations
ntagaanaagtgctttcgtggaatagctttgcatttttctttttaaatcttccttctttaattgattcaggtagagcattttctgggaattaagaggaaagctgaaccatcaagctcggataccccaaaatagcctaaatcataattccttggtctactaattgtaagcattttaagctaatatccctgcaagcttagaagtttagcccaatagtgttcatctattctgttgccgactccagataatttgcagcagaatgcgggaaaattggatttcctgggaagatgtatttcagtggttatattttttctgaccattcaacgcggtccataatgtgggaattcctttgtacaataagagttgtttttcaatatattacataaaattttgaatcttcattaacttgctaatcctagaacttgattagcatgttcttcaatatgcatg

SEQ ID NO: 217197 - DNA, 437 bp, Glycine max
  unsure (1)..(437): unsure at all n locations
agcttgagcaaattcaggcgacaatatcttttactcgtatgtctgatngagncccgtcatataacgagacgctcgaaattgaatgttgaagctctgagccaattcaaacgacaataactttttactcggatgtctgattgaatcctgtcatatatcgagacgctcgaaattgaatgttgaacctctgagcgaattcaaacgacaataactttttactcagatgtctgatatagtctcgtaatatatcgagacgctcgaaattgaatgttgaagctctgagcaaattcaaacgacaataactttttactcggatgtctgatngagtcccgtcatacatcgagacgctcaaaatcgaatgttgaagctctgaggaaattctaacgacaataactctttactcggatgtctgattgagtctcgtcacatatcgagacgct

SEQ ID NO: 217198 - DNA, 349 bp, Glycine max
  unsure (1)..(349): unsure at all n locations
actaagcttaacattaantttgagcgtctcgaatattacgggacttcttctgacatccgagtaaaaatttattgtcgtttggattggctcaaagattcaacattcaatttcgagcgtctcaatatattacgggactcattcatacatccgagtaaaaagttattgtcgtttgaattagcttagagcttcaacaatcaatttcgaacgtctcgttatatcacgggactcaatcagacatccgagtaaaaaattattgtcggttgaattggctcagagctgcaacattcaatttcgagcgtctcgatatatgacaggactcaatcatacatccgagaaaaaagtattgtcg

SEQ ID NO: 217199 - DNA, 418 bp, Glycine max
  unsure (1)..(418): unsure at all n locations
agcttttattttaagataaattcttttttgaaaatattntttagaaaatttaatatttatggttatactctcaattattttatccaacttttaatttaaagaatgtttaaagtaaaaaaataataaataataaacaacttctacttattttttattttaacttaagtaacttttaagaaagaaaaaaaaaataaagctgggccaaacggtatcttagtattaaatatggaatgagctataaatgcatgttggtatttaacaaggatgggccaaattccataaagataagaaccgggtgaaaacaactataaaatatgttctgtctaaagaagagaatgaaattctctttgtctgaaagggagaattgatgcaatcctacccgcaaagacattggataaagaactcaaatagattgggt

SEQ ID NO: 217200 - DNA, 448 bp, Glycine max
tgtccaaattgagctaagtttattcttcgtggtgatgctcctttcgatccccaccaaattcaattcaacatcctttgaatctcatcctttagagttgctggaagcaagtagatactcattgtgtatgaaggcatttgctcttctccaagtcactatttttcttaaaaaacagaccttttccaggatttctctttaaatacctaaaaatttggtagaatgcctcaatgtgtttttcataaggagaatgcataaactgatgtacaacactcactgaaaaagcaatgtgttcgggtataagacaagtaaataaatttgccaactaacctttggtatcttccaacatcaacagaaacacttcctttgtcccacaatttcccattgggatcgataggggtatctgctggtctacaaccgctcattccagtttcttccaagaggtctagaatat

SEQ ID NO: 217201 - DNA, 243 bp, Glycine max
aaagtctaaatctacaggaagagacactgctactttgagttggctcttgaggttatattaactaacttgtgatcaggatacaaaaacactctgcttgtttttttaccgagacatataggaaatcaaaatcgtgtgtgcttccatgaactgatcgacatgttgagctcgcagctatgctataactttttcgctgaatatcatagatgcaggtgatagatgaaacttgccattttcttaacacag

SEQ ID NO: 217202 - DNA, 359 bp, Glycine max
  unsure (1)..(359): unsure at all n locations
actaagcttacctgantacagtacatggcttcatcttttttgtgttaaaacagaaagggaacaatgaaaatccaattgctcatatatgccatagcagaaggaaaaatgaaaatggcacttctcctttactaagaaatctatcaaccaattcaccagcacagactgttgttggagtaaaggaagtgtcaatatagtttggcttattccatcctcaaccaatttcccagtagtatttcaactgcacagtggtgaagtgataatatgctatcaacattcagaacataaaaactcttcattttgaacatgatgtgggaagtaatggagctgtcttcacaaaacaacgagctcaataatgctgt

SEQ ID NO: 217203 - DNA, 476 bp, Glycine max
  unsure (1)..(476): unsure at all n locations
agcttctactgatgtggcagagcggngccctcttcttcttgctgtcccaaccacgggctttggcctttgttcttcctttccgagatacttttccttatgtcagctggtgtaggtctatagcctaacccaaacttcccacggtttcctctggtgcttaccaggctagttctgccgccgttgttcttgcccaaaaccattccgggctcgtagtcgtaccccaacatcacccaggccaccatcattgtcgtatcaaacaagcagggatgcccagagagggaatctacagaggcaatgcttactacctcaaaagattggaaagctgtttccaatgactcctccgcggcttccacatatggcatagaggaagggaacttaccaagacgtcttcctcacctgatactgtgaccaaatgtccctccactatgaacttcagctnttggtggagttgagagggaacgactcccactgagtggatc

SEQ ID NO: 217204 - DNA, 471 bp, Glycine max
ctaagctgtattaagaatttgcatactttgtgtgattctcactctttatccaaagaccatgtttacttatctttaagtccttatgatctttgtgagcttgtgcacattcgttccaaagatcatacctctatttagtaaggtgatcttgaagttcattaagttcttttaactctttttgtagaacttcaattttagcttctaaaatgttaaagcccttcattagagtatctcgttctttggaatctttttcattttccagacaaagccctttttccaaggtgtcataagcttcactgttttcagtattttctatcaaagaactgatatccttagattgatggacttctttaagtttaatatgatctttggatagtttcttaaattcttttcacaagtttttgtaatcttttgaaagaatagaagaatttggaagtagtatatgatagggctggtctaatgattaaatgtcat

SEQ ID NO: 217205 - DNA, 433 bp, Glycine max
gcttgaaaatcctttacaagccaaagattctcttggatgtaccctcccttgttctctttgaaaaaccaagtggatgtaccctccacttgaactgatccacaagagatgtaccctctcttgttctcagtataacaacctaagtagatgtaccctctacttgtgccacaaaggatgtaccctccaaagtgttaggacaaataattctcaggtggttagtcctttgaatcattgtaaggggaaacaaaagatatctcaggcggttagtcctttgaaatattttgtttaaggggaagggaagaatcaaaataattctcaggcggttagtcctttgaattctcttggaaagagagaagggagacacaaaagaattcaggcgggtagtccttctattcttttggcagagggataagagaatgaatagatagcagcacac

SEQ ID NO: 217206 - DNA, 469 bp, Glycine max
  unsure (1)..(469): unsure at all n locations
tgttcttctccatccncccacagtagtgtaggaggtaaactttctcttattagcacatatgtgcctggtagccccaaagtctaccacccattttcttacattggtgacaacattcacttgagaaatgaccggagcaataatgtcatctccttcaactaggttagccctaggcttaagaggattgtcatttctcacaattctatacctgcactgaggagcaaaatgtcctggcttcccacaaacaaaacaaactcctttttttcttgaaagaaggattataagcaagagcacgtgggatgggattagaaggaacaacacatgggttattatattggacttattcttgttattgtgatcagttttgttggcatacctcttatgaaatggtttgtcttgtaccatgtctactntggcagacattgctttggtccttgctgcaacactttccttcctatttgtatcttcaatg

SEQ ID NO: 217207 - DNA, 449 bp, Glycine max
  unsure (1)..(449): unsure at all n locations
caagcttatgttcccactcaacaggtaggtgactagattntctctagnccaattagaagggagtaagtcttatatgagctctgcatgttgttctgtattcccataaagcttcatctagtttttgggaccaatccttccttgattgagcaactattttttctaagattttcttaacttccctgttagaaacttcagcttgcccattggtctgagggtgctaaggtaaggctaccttgtgtttgacactgtagtgttggaggaattttgtgagttaggcattaaaaaatgagatcctccatcacttattagtaccctgtgtgtgccaaaccttgagaagatatctttctttatgaagcgaataatgatctttgcatctgcatgttgtaccactattgcttccacccatgttgttacatagtccacaaccaataaaatgtattcatgtgagt

SEQ ID NO: 217208 - DNA, 377 bp, Glycine max
tttctttctcaatcaatctgtctactgactaacatttctttttgctagctcacattcttgttctttctttgtctagcatacacacttgctcaatactcatgataaaacacaagcttcatttcaatcatacattcattccataatcaattcacaacaccaatttcacaaaaagattaagtggttgcattgcatactcaaagaatcaagttaagctattcagtatgcttcaaaacatgcacactaattatccataaaaaaaacacaagtatataattataattattaaccaatatcacaaaaaaaaacactgtactaaaacaaaatagttataatcatttcgaaaaggcaagatcacgaatttacaattcccatgactg

SEQ ID NO: 217209 - DNA, 475 bp, Glycine max
agcttcgtgtttggctaatgaatccgcatcttgttttgtccctcttagcacatgcatccaatagataaatcctccatgatgatggatatcatgaatacttctcactagttgatagcaaggatgaatcatgtagcaccctttcataagcaaactgacaacattcatagaatcagtataaattctaattctacggaagcctctctcccaagcttttttcaaaccatgatagatttcccacaattctgcaaacagaattgaacaagaaccaagcttctttgcaaaagcccaaaggaattcaccataatcacccttgatcacgcctccacaagtttctaaggctcccaactgagacactgtaatcaatattaatagcaatctccccttgatgaggcatcttccaagaaataagctcacttctaccattcaaaatatttctaacaaaataatgacaatcatgacctatagagatggacat

SEQ ID NO: 217210 - DNA, 425 bp, Glycine max
  unsure (1)..(425): unsure at all n locations
ngctctanantacattgatgtttgtatttatgggaggatgtttatgccatttttgctttaagagtaatgtcccacaaaaactaactctccaaatgtttgccttcgcaggaatggcaccgaggaagcttgcctcaaagaggtccaggaaggacaatgcggccgaatgaactatttccgccccggagtacgacagtcaccgctttatgagcgttgtacatcagcagcgcttcgaagccatcaagggatggtcgtttctccgggagcgacgcgtccagctcatggacgacgagtatactgatttccaggaggaaatatggcgccggcggtgggcaccactggttactcccatggccaagtttgatccagaaatagtccttgagttttacgccaatgcttggccaacagatgaatgcgtgcgtgacatg

SEQ ID NO: 217211 - DNA, 437 bp, Glycine max
  unsure (1)..(437): unsure at all n locations
agcttctaccttnntgttcataaatggtgtttgttgttcgttttcggcttggctcggcatgtatgatggcatttcaagccaaaaggtctgatccttttgtattttatcatgagtttgttgttttgtatacaaagctttttgatttttcaagccaaaaggttcgaccattttgtattttatcatgagtttattattntgtatacgaaccttttcaatttttcttgggtggtttgttgttatatagcagcacaaaaacaaagcaaaagcttctacctttttattcataaacgttgtttgttgctcgttttcggcttggtttggcatgtatgatggtatttcaagccaaaaggttcgacctttttgtattttatcatgagtttgttgggttgatacgaagctnttagattnttcttgggtanggttgtgatatataccat

SEQ ID NO: 217212 - DNA, 427 bp, Glycine max
  unsure (1)..(427): unsure at all n locations
ntatacatattttactagggaagaagtccaataaaagggataacttgtttccccttgccgagtgaagtatattggcatcgactcctttcagggatgcactcggaagaaatgaccattaaaatccttataagaggtactataagggccaataacgactctcctgaaaataccagtaagagaaatccaaccacccttgttattttctttaacattttagtggtggaggaataaatgagcaagagttatgaaatactcatcacacgaaaccctaaaggcacagatgcccactcaggcattcaaatgcaactcggtgaaggtgacattcagctctcgaccaacgtccacccgaaacttttcaaaaggaaataaggtgaaagtaaaaagagggggagtcatatactgaatgagtctagccagtagccacatg

SEQ ID NO: 217213 - DNA, 354 bp, Glycine max
gcccatcctttctaaacgaactcaaagaccttacgatacaaaagaaaaagtgaaccacctgatatcctgatacaccaggcattacctgatgccttaccaagcatgaagtaccgatcggaatacgattacgagctaacagatggattgaacgcaactacgaaacaagaatgtagcacaacagcaaaatactaccaataatatcataaaaactactggatagcgaagatgattcttacgcacacaggggctgttggctccacatacatgagagaatagactgagaacccaagtgcctctatgcctgaaatgaaatataggtctattggacatgaaaactcacgtcgataagcaatt

SEQ ID NO: 217214 - DNA, 336 bp, Glycine max
tcgacccacccgccaacgcgccgagcagggaccgctcctccccaagcaaccaaaacgggactgcgggcccttcacaattcgcgcgaaggcgggagaaagggcttatcgactagccctcccggcggaagcacgcatacaccccgtcgtccattgctcactgcgacgccgtcagcatggaccttcccccgcttccactgaaccccggaacacagagatagttgggcagagacccaagcaacgaccaccacgcatcctggacaggaggctcgacacttccacttaccccccgacgaaacgcgtactcggcaacgggctggcaacccccggaggacaacc

SEQ ID NO: 217215 - DNA, 426 bp, Glycine max
  unsure (1)..(426): unsure at all n locations
catangcactaagataggaatatctatctgtcgagctgacagatgctggagccttgcttacttttggttggggactttatggacaggtaaagtttaaagtgaactagaatattgctttgtactactgcaagttcatattctattngacaatgaaacttgctgaattagtaattatatactgtcacaagcatattccgaaatcccaatttattttcatggctctgtaaaaaaggcttttgatgtatcagcctatcttgtatgttataacagatcaaacttccagagcttttccattttagcaantttgtcagtatctattgtaaataaaatcttctgatgtgtgcaagcctgtacgttgctcgcatggttcctaaatcctattattagataatcccattctaatgcggtattctagtaagccactga

SEQ ID NO: 217216 - DNA, 452 bp, Glycine max
  unsure (1)..(452): unsure at all n locations
ntatcagcatgcttaatgttcgtaaatcgtaaactttttttttttgtcaatataacattctcatgtcctctttttataattgacttttaataacgttgttcaaacaaaaatcaacaattaaaacaatcttatattataatataaattatttatcctaaatctaaaatataatctatatgttaaaaaatatctattgattacgtattctaattataatacaatttatatctatttattatgaatgttagttatataaaagtaacatttctcatgtgcattccacgtgctaaaatagtaatatagagagattcttgaataaccattttgcaaaagatggtttttgaaaatagaaagtttttaaaaaaataatagcctacaactaattaaaaagttaaaattattcatcatttctatttctaaataaactataacacaattaattatactttata

SEQ ID NO: 217217 - DNA, 451 bp, Glycine max
  unsure (1)..(451): unsure at all n locations
agcttgaagctagttgtatgagttttattantatttaaataatnnaaagncctcaactctgacttcgctattgtccagtcaagttcgagtgttaattattggtctggttgtagtcgaatatgagagcgatgtcctctttggctaagtttttttaacttagtcattaagggaattgaatagttagtgatgagtccaaatggttaagaatttagagcgacatcttatcaattgttatggtcatttagacacatttaaagctttcacacatcttcaagaaaggcatgatgattgtgtcctttgaaattcaaaacatcattgggatacccaagggttttgtctattcccagtcgttgatctatctcctcaaggaaggatcttatgcgtccttttggcactataagtttccaaagactatagaaagattgagaaagcttttcttctctcactcttt

SEQ ID NO: 217218 - DNA, 427 bp, Glycine max
  unsure (1)..(427): unsure at all n locations
tggtaatggcgtcctccatcctatcggaataggttttggttctagtggactctgccatggaagcaactcaatgagagcaccaaattgttagagcacaatttctggactttgagggccagttcctctaagaagaaaaataaagagtaagaaggataattttcatttcatgtctgccttattacattatgctagtatttacacaacaaagagaaatagttggaagctaaggtggggaaagggagacaatttgtctgctcatgttgggttggatacttggtttcatgatggagatcaaggaaatcctttaagagaagaacgaagagcatggaagagggagaatataattgggctaggaggcccaataacaagggtgagacctaagaaagaaaggagatgttgcttgaanaaaagatctacttacaagctc

SEQ ID NO: 217219 - DNA, 434 bp, Glycine max
  unsure (1)..(434): unsure at all n locations
agctngccgccacggagttttccgactattctcttgtgtggaggaacaagctacaagaggagagagcatgaaatgaagagccaatggttgatacatggacggagatgaaaaagatcatgaggaagcggtatgtgccggctatttactcaagggacttgaaattcaagctccataaactaacccaaggcaacaagggggttgaggagtatttcaaggaaatggatgtgctcatgattcaagcaaatattgaagaagatgaggaggtaactatggctcgatttcttaatggtttgactaatgatatccgtgatattgttgagctgcagaagtttgttgaaatggatgatttgcttcacaaagcaatccaagtggagcaacaattaataatgaagggagtggctaagaggagttntaccaacttaggttcttctagt

SEQ ID NO: 217220 - DNA, 451 bp, Glycine max
taataaatgaaaagtaacttgtttgagaaaactattagtttgtttttacaacttttttgctaacatggagcctctcaataacaagtttgatggtatgacaacttcaattgaaatacctaaggtaatccaaactaaattctttaacggaatataatatgaaatatgtgtgtttcatcatcgattgtatacaattttcaatgtattcaaatgccattcaaccatccttatggcatgatacttgatgaaatacaagcattggtagctgcatacatctttggtgtcaataaggataactcaattgatgggtaaacaaaatttcttatatgcaacacatttcattaactcttgtaaaataaacagacaatagtaaattcttttatatacactgacttcacttatttaacatggacaagattattgttagtaccacatactcaataaatgctaacag

SEQ ID NO: 217221 - DNA, 472 bp, Glycine max
  unsure (1)..(472): unsure at all n locations
ggcagcaagctanaagatatgacggaacttgtctatatctggggcaggggtgtaaaaaaaaaaattgatttgaattgaatcaaattataatcaaatcaaaattgaattggttttttttttctaattagctcaagaaaaaaaataagtatattattttataaaactaatttggttaactaaattattttgacaaaaccaatctgattaatccaactcatttttatttaaatatttttttatttgaaaaaattagttcgaaaaatagtttgaaattaattctactcttagaactagtcaaaattagtgtaaaattgattaataattaattcaattaacaattaattttctaaaattaatttaattctaaatcagttcttaaatcaattttaattatttaaatataaaattgaactaattaaaacaattcaaatataatttaatttcgaatttcatatcacactaatttcttcat

SEQ ID NO: 217222 - DNA, 466 bp, Glycine max
  unsure (1)..(466): unsure at all n locations
ctcagctttatgtgcaatgcctgagatacaatattggagaatcattcttttggntncgacacggcaattcgacatgtgagatataagtttgagatttggaatgatgttgcctttgatatgttgatggatgtctatgaagggaacttggtctctattcaagacattcctagaatgactccccgattctcgttctgcgacccccggtacctttcatcttgctatgcctcataccgataccctaatgacgaatactgatagcgttgatgatgatactaggaatcaaaatgagggtgaagagaacaatagataggttctatatattaattgtggttgtttgggaagtattctgtgttggtcgtttaggcttttattaacttttttgtattaatgcctggaaatgaatgaaataagttgtcctcgatgtcggctacaaacagaactaatattttggtcagaatatgtatat

SEQ ID NO: 217223 - DNA, 352 bp, Glycine max
  unsure (1)..(352): unsure at all n locations
tctaacacttnggtggtgnctggcctcttaacaaactgggctaagtacccagtctgtataagttcttttatcttgtcctttagggccaatagttttttgtgtcatgaccaatactgcggtgatatctgcagtatttggctgcgtctaaccccgtcctaagaggttttgtctgggggagccggatgggtacctccagattgaatgcttcctcgagaatcatggtgtgattggtcattaggggtgtgtaatgtcatacctgagacctttaaagaaaggctggcgcttgtctggtttgtgcctcttgttcgacttgtgtaagtcgagcttggtgtttccttcgtacttgtcgtgc

SEQ ID NO: 217224 - DNA, 456 bp, Glycine max
caattatggaggaatctctaataatatactttatttattatggacagaagctcatttaaattgataattgtgtacatcattctaactcttataaaagtgtttttcaaaaacatgtatttgtatataacttatatataatctaaataagatattaagaataaaaaatatctttaattatattttgcatattgaatcttagaaatatatatttccatttttaaagaaagaagcgaatgacgtaaattatagaataaaatagaggaatagaaaatttcgcgtatttaaacttatttatctaaaaaatttattaaacttattctattttgatcatgaacatctgagagatctttagttctttaaaataaagtaatcttatcacaaaaatcaaataaataatgtttaaatgttctgtaacattattattctctataacaaaatgtaactcttccggctaat

SEQ ID NO: 217225 - DNA, 447 bp, Glycine max
  unsure (1)..(447): unsure at all n locations
ctgcagctttatttgctnttttgttaactttttaacctaatttcatgcatataaacaaagtaaagcaaaggcaaatatttgtacgtatagtttttagacagaaaaggaaagtaaattatagagataatgaagtttgctctttttaattcgcagtaatgttatccatcatatctaaatgcttattcctgtttttgtccttttctcttttatcggagttaatttattttatataattaaagttagcctatattctttttcatagattattcatcttctatggaggcacatcaatccttaatcatattgagttttgagaagcattatcgctaaagctccgtttaattatgtccaataaacgatattggtgtatgatgttatgatagcaaatagataatctaatataatctaatctatacgtgccacaaaaggggcatggactctatctca

SEQ ID NO: 217226 - DNA, 445 bp, Glycine max
tatagtatcaatatatcagtaagttaagtacgttgcggttatcttctacatccaaagacattgtttttgcacaatgaaaactttctagaagccaagtaggattgcaacatatgtcatttgttatgagataaagacatcagtccttacagtgacattgacattcaactaattgttaagaaaatgattgatgtcttcaataatctaataacagtagaaatactagaattaaaggcaaatggttcagttacaacaagagttatgacttgggagagggggagggcaaccctatgatgagatgattttagaagttacaacttgttaacttacactttccttggattcatctaataactgtatcactcttctaccaataaagattaatcaattacaacatgcatattattcgtgatgtatgaactataagcccatgacaagcaacacaaca

SEQ ID NO: 217227 - DNA, 161 bp, Glycine max
  unsure (1)..(161): unsure at all n locations
gagcagcagcgngagaaaggagggaccaactcttcagcttatcccagaaaagccgcggcacggaggccaaccccaaaaccgaacgccgagcggaagacaagcccaaggcaaaggccaaagacagaagacagcaagaccaccaaacaacgagatcgagaaaa

SEQ ID NO: 217228 - DNA, 460 bp, Glycine max
tctagaggaagcctcttaatgaagcttctagagaaagcttcttgtttctgcctcggtaaaaacgctgcccatccttcattaaccgttggatcttctcgaaatttgctctgcaacttcacaagacacttttccatgatctgaccgttgggatctttgagaagatgtctggagtgtgctaaaagcctcctaatgaatctcttagaggaagcctcttaatgaagcttctagagaaaactacatggagcttcatcggttaaaatgctgcccagccttctttaaccgttggatcgtctcgaaatttggtttgcaacttcataagacacttttccatgatctgaccgttgagatctgcgcgaagatgtctggagtgtgctagaagcttccgttcccgagagcatatattatgtaaacatttcagcctttgctttcttgtacttaagaaaatgcctttcttttcttt

SEQ ID NO: 217229 - DNA, 470 bp, Glycine max
  unsure (1)..(470): unsure at all n locations
agcttcggttgttcaatttcgagcatctctttatgtgatgttcctgtatcggacctccgtgtgataacttatgaccattttaatttctcaagagcttccgttgttcaatttcgagcgtctcgatatattatgcgcctgaatcggacatccgtgtgaagggttatgatccattcaatttctcgagagcttccgttgttcaatatcgagcgtctcgatatgtgatgttcctgaatcggacctccgtgtgataacttatgaccatttgaatttcttgagagcttccgttgttcaatttcgaacttctcaatatgtgatgttcctgaatcggacctccgtgtgataacttatgaccacttgaatttctcgagagctcccgttgttcaatttcgagcatctcaatatatgatgtgcctgaatcggacactcgagtgaaaagttatgacaatntcaatttctcaagagcttccgtg

SEQ ID NO: 217230 - DNA, 469 bp, Glycine max
  unsure (1)..(469): unsure at all n locations
gtcaacaagtttcttcacaaataactatcatgaagcagattactagctagactacccatcatatctcccataaccccatacccacgaaatttaagagagaaagaagtccacccaaacctgaaatttcgaagtcccactcgtatccacgcacttcacgactccgaaaatgccctccttttgcgatttggggcagaaatgatggccaaaggttgaagctttgcttggagcttcaatggagaatgaagaagaagaaaatggcaacgtgagggagagagagagctgtctgaaaagtgcggnggctgagtgaagagagagaaaagctttttggttntaaataaaagggttttctctttttctattattttatttaagctatgccacatgtctccgtttgagtggagcaaaaagggcccactttcccttttgactgtgacccatactcagccacaaaagtggtgaaaatctaact

SEQ ID NO: 217231 - DNA, 385 bp, Glycine max
gaaatatggattgttaatttattggctcttacagttagatatattaatactccagtctttagataaaacttggtccataaaaaaagaaaaagaaagtttgttctaatttatacaagtgtaaatcttttagtggcagccaatattgacttttcatccttgcgactattatttgagcagtttaagttcttggtcatctcctttgcttgttccccaaatatagtagcagctgcagctattagagtagccaatactctggaaggcacttatatctcctgcctaaacttagtgtaatggcacgcacatcttcatccacatgtagtatctcctttggatcacgttgtcaaagccaatctactgtatagaaagataagattgcaccgtgcat

SEQ ID NO: 217232 - DNA, 455 bp, Glycine max
  unsure (1)..(455): unsure at all n locations
tcanagaaagatattagtattttactgcatcattctagagtctagatgtttccatttccacccaacaaaagagctatcatgttcactatacttggaaagccgtcaacgtactaaagtattcaagtctaattttctacaatgctaaaaccatattcggccgttaatatgatacgtagtagttttttatttgagaatcatacgtagtaaccatacattataaaataactataaatttctattctgtaggaattaaataacaaattaaagctctgccgttttatctctaattgtaaattgaatatacaatgactaaaaaaaatgaagaatttaaagaataagtcagagtttaaggtaagataagaacaaattctaataagtatcttgtttatatattctttaacctaattgccaagcctttattggactctgtatcttatgaaacattaaaatctaaa

SEQ ID NO: 217233 - DNA, 292 bp, Glycine max
agcttaaggcacactgggtgttgcttcgttgtattatagtcgggcgagacgctcataacagctccacttgtctccatctatcttacttgaatggtgtgctactggcgcacgagacgactatttttactgaccttgatcttgatgaacacttataccattctgtcaattctataatccaatgcgaaagctgggaggagaatcgactaataacatggccaacctcctgatgtatactgccttcgttcaggtactaccccttgtactctggtgaatctccgtggaggtatatatc

SEQ ID NO: 217234 - DNA, 364 bp, Glycine max
  unsure (1)..(364): unsure at all n locations
tctacttgcacggcttattacgtagcggaaggcacctnttttcttctgttctacttgatattccatagcaactcgctcgatgggaacatcatatgtatgaccctattgaagactgtacaaccatccaccgtaaaagcctattgaacgagcttaactaactttggccttaacatctatgagcgtgagattcactcgttacatgcacacactcatttcatgacacgtatagccatgcacatagtcaaatgatacaacatgccctaacatagtgctatcacagtcactcttaagcatgacttgactaatgacacactatatggtgaatccagatgatgtatgattgaccaattacaacaattatgta

SEQ ID NO: 217235 - DNA, 476 bp, Glycine max
  unsure (1)..(476): unsure at all n locations
agcttacttcaaaagtttctatgaaggttgttatcttgatcttcaataagggctntcaatgtgattttcgtccatggagttgtaacggaagataaaggagaataggtgaaaggaaatgtaattcactagagaataagccatgaaaggaaaagctttaccatcaagggagtgttttggataagaagcttaaagaggaagcttcaatagagcaagagaatgagagagagaaggggggcgtgggaattgaaggagattaggaagagaagttgaactttgaagtgtatcacaagtttctcattcatcaaaattatgacaaatgttacacatgcttctatttataacctaagtcactagctaaatgaaagcttcctcanaaagctttcttgagaagctcgaacttaactacactcatccttctaatatgtcaactcaccccatgccanaatacatgaaaatataaatattcttactataaa

SEQ ID NO: 217236 - DNA, 444 bp, Glycine max
  unsure (1)..(444): unsure at all n locations
agactntccaaaacctgttcttgttgaagctnttttcctaacattntacatttataattataatagggggataatgtggcatatgtaatattccaattctggaatattattttattgcattgatgtttgtatttctctcttttgttccatccctaactgcctttttataatggagaataattatttcatacagaaacaggaaagggggatggataaatattatcacgtaacatgatatataagaaaaggaaagaaaagaaagagacagaattaaaatattacgagggtatgaagaggttgcaaacaatctatgtgagcaaaaaccagaacccttactacaatatgccatgtccttaatggttggntagggaaaaattagtctctagtctctacacatacctgacttcttgaaaatttcccattgatgtacaagtaacggttcta

SEQ ID NO: 217237 - DNA, 454 bp, Glycine max
  unsure (1)..(454): unsure at all n locations
agcttgancatgatttgttgaacgattaagttttatnttacacaaaatatagcgcatgatacgacattcaaaagtgaatgaaccaccaaacaattgaccaatcatatcagcattttcattgcaaaccattttgcaggcatcatgatttgaataaatatgcttccggtcatcaaccaaagtgctctctaaaggtacaccttgattgcttatatttgtaaatgaataaaataaagactgatcaaccacaatgggatatttatgcacctcagaatagataacatcatcccgaattgtcagattattataaaagatacggactaactcatgatagtatggcagtttgagagtcatataatcgattaattcagaattttgaaagacttgataacaatataaaatatctctctttccagaatataagtctaatattgggatcagaatgactcattggaaa

SEQ ID NO: 217238 - DNA, 408 bp, Glycine max
  unsure (1)..(408): unsure at all n locations
taaataagttgaaacaatattaaacttgggaaatattgtttgcttcccatacttattatacaggggctcccttccagacatatcagacaggaacatgaccacactgcatgctagcaaaagatatgtttaatatggataaattgtgcaagcgaaaataaaaggaacaactgttataagaatacaattcaaaatgatgcatggaagagaagacaattgtggtaaaatgggaataaaattagaaaaaaagggattagagaaataatgaacactaataatttaatacatattaaacacaataacttgtggccttatactgctgatagatttaagatggaagagggatattgatgaatgatatttatatcanaaagtgcatctttcttgatttaaatgtacaaatgtatattt

SEQ ID NO: 217239 - DNA, 454 bp, Glycine max
agcttcataagtgaaattaggggcatccttctccctatgagtcctctcgcgagggggaggttgagccatgttctcagtataaaaattagtagtggaatgctcaaaatcagaatattcaaaatcaccctcaacagaatgctcaaaatgcacagaatgaccaggatgcacactatgcctaacaaatctatgaaaggttccatctatttcaggatcaaagggtcgtaaatcacctggattgcccctagtcatgcgctatatgcagctaataatgtgtttctcaactagcacctaaaaagggtgtaaaactacaactatagtcaaacgatatccgaataagcttaatatttgtgagcaacaccctaaaatcatgaaatgatagcacaaaaaatttcaaacaaaaattcaaagtctaactatgaaaaatacctaagaaaagttagaataataagacaat

SEQ ID NO: 217240 - DNA, 432 bp, Glycine max
  unsure (1)..(432): unsure at all n locations
gtgganaatgatttctatacaaaagttagtcgtataaagcgactgtcaaactcccccaaatttacagttttgcttgtcctcgagcaaagaaagaacagttcacttgtcctcaagtgacaaagacagtggccaatcaaaagaaaatggtgtttgattcatcaaggacatcaacgatatgaactgaatatcatggaatgcttaaatcaattacttctcacaagcatgcagtttttcaaagataagagcacaactattagagtcatagctgaaataagcaagtaagcatgacataaatcaaggaaagatcatcaaccataaccacacaatcattgtttcacttaaactcaagtgtttatgcttattccatcataaacaaccaacacaagttccaacctttgcatttcatctcatatcatacaataatgaacacac

SEQ ID NO: 217241 - DNA, 441 bp, Glycine max
  unsure (1)..(441): unsure at all n locations
agctngagaacttaccttaactaaattaatattctacttcttcccttgctatttcatttgcttcttcttcctctaactctcgctgcttttctgctttttattcttcggaggccatgtttgtctcaaacaatggcctctacataagtcacaacattttcagattaacagatatggttcaggttgaggcctgcatgtttcgataatttggtgtttgggtcaacggatatcatatcctcttgcaagctgtaacacacggtattattatggttgacaatttgtttatcaatattttgctcgggacataagaactgttttttcaataaattaaattagaaatttatcaggatgtaactggataacattactttttaactaataaataaatatgattactattttttgatattttntaaagnctatgtcaaaaattctatattcaat

SEQ ID NO: 217242 - DNA, 453 bp, Glycine max
  unsure (1)..(453): unsure at all n locations
nntctaaattttctggttttctaaaccttgaaaactaatgtgtgctattcatctttttcattctcttctccctttgccaaatagaattcgccaaggactaaccaccgaaattctttttgtgtctcttttctcccttttccaaaagaacaaaggactaaccgcctgaattcttttgtgtctcccttttcccttgtcatagaattcaaaatgacacagtctgagaattcttttgattcttccctttcccataaacaaaagatttcaaaggactaaccgcctgagaattcttttgtttccccattcacaaagtttcaaaggactaactgcctgagaactgtgtcttaacacattggagggtacatcctttgtggtacaagtagagggtacatctacttgtgttgttgtgactgagaacaagagagggtacatctcttgtggatcaattatagtgga

SEQ ID NO: 217243 - DNA, 495 bp, Glycine max
  unsure (1)..(495): unsure at all n locations
tcgaccggatcttaagcacctgctgctgcagcttataaaagttatatggctngaatctatcactgttgcagngagacaagaagtttaatgagtttatgagcaactcaggattcaacagatgttacatggaccattgctgctatgttaagaaatatactaatagctatgttatccttgccgtgtatgttgatgacatgttgattgcaggatctagtatagcagaaattaataggttgaagcagcagttggcataaaactttgaaataaaggatcttggtctagctaaacaaatccttggtatgagaattctttgaaacaaatcagaaggaattttgaagctgtctcaagagaaatatatacacaagttgcttgacagggtttaccttgaagattctaagatccacgaataccctttgggatctcatttgaattgttcacagaagcaatctttgcagacagatgaagataaatgtacatgtcaagagaccatatgca

SEQ ID NO: 217244 - DNA, 441 bp, Glycine max
  unsure (1)..(441): unsure at all n locations
ntactattcaaagaataatcaaggagtataccttcgttcttctttgtcataaacttgcccaagttgtcttttccattatttaacacaaagcatttacatataaaaatatgaagatgtgaaatatttggttttctgcccttatataattcatatggcgttttatttaagataggtctaattaatgctatattcattatataacatgcaatattaatagcctcaacccaaaaatatttaggaagatttgtatgattaagcatggttctgactaattcttctaatgatctattgttcctctcaactactctattttgttgaggggttctatgagcaaaaaaattatgctctatcccatttgtatcacaaaataattcatagtctttattctcaaattccaatccctgatcacttctaatggatgcaatgttgaaaattttctta

SEQ ID NO: 217245 - DNA, 432 bp, Glycine max
agctttataagcgcgggtctgggagacatttgtcttgtgttcgcgatatgtgaagatgatgttccgagtactttggatttggtacgaccatgccctcctgatttccagctgggaaattggcgagtggaggaacgccccggcatttacgcaacgagcataatgtaaacctttacggttttaaaagctctatagttgggcctaggctttagagttttttcttttgttaaggctttgtgtcttttgtttttgaatatataatacaaggatctttcttcatctgttcctggtctctacccattctcattcatttgcatgtttacttctttttctgaaacgacagatccgatgacgagtcccccgaaggtactaatacctgtgacccgcctatcgacttcgagcaagatatgaatcaaacggaagatgaatgaaatg

SEQ ID NO: 217246 - DNA, 432 bp, Glycine max
  unsure (1)..(432): unsure at all n locations
ngagtttgacttgtttggttcatttatacattgattattttctttccctttatcaaagcttgagtttgagcttgagttactcatatacactactcatatacacttacacctaatgggtcaaggggtgggttgcagtcaatgcaatcttaaaaaacaggtttaacccaatctaacccattttttggtagattgggttaacccatttgacattcgtactcactgcaaaccaagtgaacttttgtgtaagccttgatggttttttgtctacttggataaaatgtatagtaatagtccttggatatattttccatgtttagtttctgaattatctacttatgacattgtcaattccctagatatctgcaacaataagcattattgacaaatagattgttatttgactaccattttgttaatacatatttctacaaa

SEQ ID NO: 217247 - DNA, 447 bp, Glycine max
  unsure (1)..(447): unsure at all n locations
agcttgtcgttctcctaattttctcttatttaatttgatccaagncccccttcatattcaggtacatagtcttcatcatcatcgttggccttctttatatcctttntcttagcttttcgaattttatccttgaaaatgatggccaatttggacaaccctataaactttatttttttcttgattctctgtaattatttgcattctaagttccttgtacttggaagcttcaacctttgacattattttctccttcttcactatgagggaaggtaacttctttgtgtgggtgctttnggtttggtttacacgcactaggtgcaaggctataggtgagttttttttatatattatttttacacaacttgttgagagaattgatgatctactataagagtgggtgagagagggtaattaataatggggaagttataactttcttctctatct

SEQ ID NO: 217248 - DNA, 437 bp, Glycine max
ttaaaactcagctcttattcaatgagcagagagttgttgtcttttgcctccttaagactatagcatattttggtgctaactgtatgagttggaagccatcttctcaataaatttctggcttcaacaggggcttgtctccaagggctccaccactggcgcatctatcatacttctctctatgttactgagtccttcataaaaatattggaaagaagttgtcagaaatctggtgggagatcaactggcacatagttttaaatctctcccagtattcatatagactctctccatgagttgcctaatgcctgaaatatcctttctgatggtcgtggtcctggaagcagggaaaaaattttctaagaatactctcttgaggtcatcccagctcgtgatggaccttggagcaaggtaatatatccagtcctttgcactccctt

SEQ ID NO: 217249 - DNA, 464 bp, Glycine max
  unsure (1)..(464): unsure at all n locations
agcttaattataaaggtaataaaaattatcttatttagagtccaattctagaaatattgtcacatttttacaactttaatttcatcccaaattaaatacaacagtttggaaagcacaatggaacctaacatttaatactcattatacatatatgtgttgaagtttaaaaattcaatacttagtgagatttcattttctagtgagaattaaatttatagtagaagtttagagggaaacttgcatataaacaaggaataatttgttattcataaataagttgaattgaaatgaaatatgatntttttagagcttttatttgttttggacataattaaatttgatcttacgataacaacttgtggtaatcaatatcatantaattaacactcatcttttcatgatcaccaattntttagtgcggcattaaatcacttacgaatatttatctattcacaagttatata

SEQ ID NO: 217250 - DNA, 347 bp, Glycine max
tgcaatgccattaaagagttgtgcgaagtctctagcttatctatggcatcctccatgcattccgatgaagacgacttcgatcgtgtaccgtgccatggccaagcaatgaaagcatcaatgttacttgatggttcaagactcaagcaatccccagaatcttccttcacaaacctgagaaagaagagagaattcgagaaagggagaaaactcaagagagaagaagagaaaattctcgtttttattattaagatgactctacatggttcaacttttatagacatggctagctcctaaccgcctaactaccataaccgcttttgcaactaactcatatattacaatacaac

SEQ ID NO: 217251 - DNA, 459 bp, Glycine max
  unsure (1)..(459): unsure at all n locations
ataagtcacctgaggcatgcagcttaaattccatatagaagttacatttatatttcatcaagaaagataatcaaaacaatatcagaagaataccttctttcttcctttgttcccaccacacttattctttttactggcattatccaactgaagcagatgatcaaacgtagcaaatagagaatcaatgtaactagtcttataatcattacacggtccacattatggagctccacacaaggtgtccaaagctatggttgaacatataattcttatcatgtatctgatttttaggtaattgtgccataaagctaaaataggaaaaataactgggaactganatataaagacatatagacatacaacaatgtgacgacacttttttttttttctataattattggtaggggaagggagggaacttggtaaacatgaatgctatctaaatatttgactcctaac

SEQ ID NO: 217252 - DNA, 408 bp, Glycine max
  unsure (1)..(408): unsure at all n locations
cgcatatcgttcgcatgtatgatatccattcgacattgtttgttttanaggagaccttcaatcctataacgcaacgtggcgggcaaaagtatgcagttaacttgaatggccattattgacaatgctgaaggtattctgcacttcactatccatgttcacacattattgcagcttggggttacgtgagcatgaactactgccaatatatagatgttggttacataaatgagcacatcttataagcatactccgcacattggtggcctcttgtgaatgaagcgacaattcctccttctgatgatgcatggacacttatccctaaccaaactacaattcgtgtgaaaggtcggccataatcaacaaggataacgaatgagatggattggctggaaccatctgaccaccgac

SEQ ID NO: 217253 - DNA, 418 bp, Glycine max
  unsure (1)..(418): unsure at all n locations
agcttgcttctacatctgtgtgaaggcatgttattttttctgtagagatagagcacaaagcctacttggctataaacacttgaaacttctctatggaccaggctagagaggaaaggaagttgcaactaagtgagctagatgagatccgtttagtagcctatgagaattccaaattctacaaggagaagaccaagaagttccatgacagcttgagagctaagaaggactttgtggttggaaaaaaagttttattatataactctaggctcgaactcattagtggtaagttgaggtcaaagtggatcggtccttttgtggtgactaatgtntttccttatggtacagttgagatcaaaagtgaatccacagatacangcttcaaggtcaatggacaccggctgagaccattcctcacaaa

SEQ ID NO: 217254 - DNA, 440 bp, Glycine max
  unsure (1)..(440): unsure at all n locations
ctttatccatggcttatatggtggtgagcttgtgcttgactcatcttctacttgaagaggcatctccaatcatctttcctccttctccattccactgccattcatcttcaagaagaaaaggactccattgatgaagaagacccaatgcctacaagctccacatggagctacatcatgtggtatcaagagcatcttcgtctatgtgatgttcttttccttcctctatctttttgtttagtcaattcactttaactccttgttcttcatcttattctccatgtatatcctccattgtcttgtggtttggtgttgttcggagtatattccaaaatataaaccgattaaatcttatatctacacttgttcttgcatttctatggtgtcaaatttatagatctactattgaatcatgttcttgtgttgactntaggatctatcat

SEQ ID NO: 217255 - DNA, 467 bp, Glycine max
  unsure (1)..(467): unsure at all n locations
agctntantcaaacagattaatccttaattttttgaatngggcgttgaaaatgcataacacaactttctatgattggcttaaagatacaatctttgcagatgataatgcttcataaacattaagaaaactagccgatgggcctataagaaatgttataacctggcaaggatacgacatatataggtattcattttacacaaaagcacaagatgactaaagtacaatgcagaacagtggggtcaccctatgggctgaatctcaacactgtgcaagtgtcaatgacgccaatccctgtgtagcttccatcccttactgtgggttcattgatgaaattcgggagcttaattatgtgaaatctacagtatgtgttgtcaaatgtaaatgggttgacagcaacaccggtgtgcgcactgatgatatangatttacccctggagatctaaaanaacttggttaccacaatgac

SEQ ID NO: 217256 - DNA, 302 bp, Glycine max
  unsure (1)..(302): unsure at all n locations
tgtatataatgtcgatgctgagtgtatactatntttcttttatgtatcaatagtacatagcttatgtcttcttcacaaatagtgcatgcatgatgaaccttaacactgtatccactcaaatttccgcatgctggaaagtcattgatgatacaaaacaactttgcacgcaacttgaatgtctcatttcgatacctgatgtagctccatgtggagcttgctggccttggttcctcatcatcaatgagaaattatgctgtttgaatatcaatggtatanctaatggaaaatgacgaaaggagatt

SEQ ID NO: 217257 - DNA, 340 bp, Glycine max
gttcgcacatcgttcacgtgtatgacatccactccacaatgttggaagtaaaggagaccttcaatcctattacgcaacgtggcggacaaaagtgggcagctaacttgaacggtcattattgttaatgcggaaggtattttgcgcttcactatccatgttcacatattattgcagcttgtggttacgtgagcctgaactactaccaatatatagatgttgtttatacaaatgggcacatcttaaaagcttactctgcacaatggtggcctcttgggaatgaagcggctattccttcttctaatgatgcatggacacttattcctgacccaacacaattcgt

SEQ ID NO: 217258 - DNA, 440 bp, Glycine max
tatagtcattacttgttgagaaccataaaccaaagtcgattgtttctttgatgtaacaaataattcattctatggccttgggatgagtagtggttggagtctacatgtattaactgatgagtctagtagcatatagaatgtctagtctcatgcacgtcaaatatcgcaaactacccaccaaactcttgaaatttgtagcatcaaccttttctgctttgtcaaactttgataacttcattttgcagtccatcggtgttccaattggcttgcaactgtacatctcgaatttcttgagcatctctttcgcatagttgtgctatgaaatgaagattccatctttcttttgctttacctcaatgccaagatagtatgacattagtccaatatcagtcatctcgaactctttgattattgctttcttgaacatctcaaacatactt

SEQ ID NO: 217259 - DNA, 497 bp, Glycine max
  unsure (1)..(497): unsure at all n locations
ctcgtcccgggatccttaagtcacctgctgcatgcaagcttanagcataatgtgacaattactatatctatcatgactctacgacaacatggattaattgatttacactctagattttgtgtttttttttctaataaatattttggaagaaaatttagatctaaaggttcagcacacgaatattatgaatgaaaaaagatagaacctaaaatcaacacaaaaacatgattcaagagtagatctacaaaatttgaaccatagatataagatctaatcggtttttttttttttgaatctactataaaaagcaccaaaccacaagacaatggaggatatacatggagaataagatgaagaacaaggaattaaagtgatttcaccgaacaaaaagatagaggatgcaaaagaacatcacctaaatgaagatgctattgataccacatgatgtaagctccattggagcttgcacgcctatgaccttcttcttaatggattcc

SEQ ID NO: 217260 - DNA, 431 bp, Glycine max
taagaagtatgacagtgctaagggatgtttcccatgtattgataatgtacaatgattgtttaagaaaggtgctctttcgatatcaccttttgttgcaaaatgattttccttcttaacaatcttcttggcaaaatccttttcctctttttccttccccttggcctttgatgacaatgccttactatccttcttattcttttgtttttctagtctttcttccttatccctcttatctttcatagttagttgatctttgtccacctgtgaaagtgtttgaggattgcaacacaaactttgttcctttacttgaggaataacctcaagcttaagatgtatgacagtgctaacggatgtttcccttgatagaagaaagtagaaggattgtttaagaacgagtgctctcttgatatcacctcttgttgcaaaatgat

SEQ ID NO: 217261 - DNA, 371 bp, Glycine max
  unsure (1)..(371): unsure at all n locations
agnncttcaagtgttgtggctnctatatccttgttttttcacaaaaaacaaaagtgtgctatatctcttcattctcttctccctttgccaaaaagaattcgacaaggactaaccgcctaaattcttttcgtgtctctattctcccttgtccaaaagaacaaaggactaacggcctgaattcttttgtgtctcccttcccccttttcaaagaattcaaaatgacacagtctaagaattctttggattcttccatttcccttatacaaaagatttcataggactaaccgcctgagatatcttttgtctccccttcacaaagcttcaaaggactaaccagctgagaactttgcctgaacacattgcagggtaca

SEQ ID NO: 217262 - DNA, 375 bp, Glycine max
actaatcttaacaccaactcctgaagatcatgcctgatgagtgcattttttttattttcacaaagtgtttccccctcttccacaacaactggggtcttcaaaaatgtgttaagcgtatcctcataaaatttaatcaaatgacctctcaccctctgggtcatagaaggtggcatataattccttcacaatggcaacattaatgttgccgtcaccaaaatcagtcaactcctcatcctaatggcgtctatcgagttcctccttgaactcatcaatctctatataatagaccaccacgtttctctcaagcaaaagcttctcgagcataataacatcagtatatctttcccaagcctcttacgaagtgaatctggatct

SEQ ID NO: 217263 - DNA, 462 bp, Glycine max
  unsure (1)..(462): unsure at all n locations
agcntttaacatatgcagataaagtgttctcatgatgcacaactagggngaatctagtttttttttctcttggagttgcttttctatattatgaagcatataataggtactttataacattcaaatcattaacaaaaaattataaacaaagcaagccgtttttactaaaaaaaactgtatttttttccctattatatatattggaaattaattttttgtatttagttacatattgttgaatcattcaattgatattaaaatttaagacataagaacatatatcatatacatgttaagagaatgaaacttgatttttttaccaaattaaactaggtgatttcataaaacaatatacgaaacaagtgtttttgaaactattatctatcacgacttggtgttggcacatatgattaaagaggtgttaatcaatgtgacatctcttattattcatttctatgctag

SEQ ID NO: 217264 - DNA, 436 bp, Glycine max
tacaacaccaataaatgcccgccaggaaatcaatattctctctcgtgcatggttttccttgctagcccacgcttgccccttttttatcctttagtacctcacgttgaataaaaagatcactacataaaagatatcattcggtgtcctggtttacatgatcttccatgtacatgctagcatccaacctttcgtaaatacaactttgaggggcttcaccagcaagcaaacttcgacttcgtagtaactctagcagttgaatttctataacgggcttcaatctaaatacagaatttgcttgtgcaattaactgtgagacatgcaaacaataagccatcaatcaacatttcgcccaaccttgtatgatataacaaactgcacctgtgtatttcttattaatgttattttataattgtattacaacatactgctcaatatt

SEQ ID NO: 217265 - DNA, 406 bp, Glycine max
  unsure (1)..(406): unsure at all n locations
agctatagtatttatatattaactnngccttcttctnannagacngaccnaaataacggtcaaaataaatatctttaacttatttngaaaaaccgattcttattctttgtagtcaacgtttgataaacatgtaaaaatatttatcttttattggacgttgaccggtaacattgaacaactgattcataggagacattaacaatatttatctttaattggacgctgactacatgtaaaaatatttatctttattaatagtactaatttcaatgaataactgagtcttattctctaattgtgttttttaacgtcttacactcttactcattagataaacctcttaatttatcatcgatttaattatgtactgcgggcctatagatataataatctctttattttaacc

SEQ ID NO: 217266 - DNA, 455 bp, Glycine max
  unsure (1)..(455): unsure at all n locations
taaaggagaataatatgccatgccactagtgtctggatttatttntattttggggaacatgaacattcattatgggtgccattacacctgctaagtcaataatcaatacaatggctgagaaaaaccatcagatagttgcaggaggaaagagagctaatccaaggtcaacagaggagattggaattacattgtcgagcatggcacccagaaacaacataaatgtagtatatgtagttatatacatgcataaagttaaataattctctattccccatgttaaatgaaaatttgggggtagaagtccacaaaataagatgtttttatcaatattagaagatacaaatgaatgttggcaagaactgaaagctaacccagaaatttaaaatagtaagctttgaatgaatactgaacatcacacaactgcaaaataattgatactgaaagccatgcttcat

SEQ ID NO: 217267 - DNA, 467 bp, Glycine max
  unsure (1)..(467): unsure at all n locations
agcttgctactcatagagtactcttccncattatctnnaagancatangccaagtcatgccagagattcaaacttactctagaccacctatccctgtgtcttaaccatatccatgcacattctattcacatatagaaaataataaatgcgtcactttggatgagttcatgatacaacagaggtgaatgcctcatgcctcaagtataataataagcctccacatcagcattgaggctcctcatgtgatgataagctatccaagaaacctgccttgtctcattaaatctccatattttttcaagaaataattacaaacacaagcagttgaactagacaagatttaagagacattacccactgtatctccagaatttcgtgcatatagtaccttatggtgtcagacgcacatatgaaacatcaatggctgcaatcattcgtcgtattagtcatttggccgtgagacacat

SEQ ID NO: 217268 - DNA, 384 bp, Glycine max
actccgctgcccatagctctatggccacggctctctcattttctagggagatgtgaaccgtaagtctttcctttaagtatattgtctattttgtttttggcacactttaatatttatcaacagaatcaatatgcagatatcgtatagcttcctcctggaaagcctaaccatacttgtggggggcaatattggcagatattcaagtattgtgaggtgtctgtcacagggcattttgtcctctacaatgtaaaaaccttgcataaaggtataatatctatacctaacttcagtttaaacttacttttaaattatatatacccttgattctcactgtcataacgattgaaaaaatcttgactttgtttgttattgttgtccatgcat

SEQ ID NO: 217269 - DNA, 451 bp, Glycine max
  unsure (1)..(451): unsure at all n locations
agcttcatgatgaatcaagattgattcattgttttttgatgataacaaagatgatgacaaaaagctcaaaagtcaagatcacttcatgataacaaagatgatgacattcaagattgtgttcaagattgagtcaagaacacttcaaggatcaaaagaaaatttgatttcaagaatcaagattcaagaattatcaagatcaagatccaagattcaagaatcaagagaagacttaattaagataagtattaaaaaaaaaatttcaaaaattgagtagcacatgaattnttctcaaaaaccttttacaaaagagtttttactctttggtaatcgattaccaaattattgtaatcgattaccagatgcaaaatgtttttcaaaaaagctttcaacttgatttacaacgttccaattgatttcaaaatgggtgaatcgattacaatgatttggaatc

SEQ ID NO: 217270 - DNA, 460 bp, Glycine max
tatctcatgtcagacaccctaatatcagcagttgcaaacattcacagtttacttggtgccaacttaaagtggaattaaacaaggaatatgcttaaagtgcataaaaaagttaaataatgctcaaaataggcaatcctatttccttgatgtcacccaaagtgggcaagtacaacttatagaattcctctctgaatgcaatcacaaacctaaataaagtttagaaaccaacaagaataagacaattagaatctgtttgatttgtataaatttaagggacaacaagatacatctactatattatagtgttttgacttttaaaggactaaagacgaattattgaccataattgatatattagcatttgtatatcactaactcgttacttaatctgtctctcaacttgcaattacaacttcattgcaactcagcatttgcgtatgctgtaaatacctgatacaat

SEQ ID NO: 217271 - DNA, 460 bp, Glycine max
agcttatgcatggataatgtaattatgaatttgatatgcccgaagaaacaccatttcctagttaaccatgcattaggtaccatgttcaattattttgtttttaagtgaaatgggtttatgatcccaacatggttggctcgtggtgcctaacacatgaaactaagaatgtagtgtgaagtttcacgcttcccccttttttgtttttgttttgtagaggaaaacacaaggatgagcaaacatgaaaacaaatggtatgcaattttgcagatcaaaaagtttgttgaacgcatatgcatgatgatgccatgactcatgcaaaatgtgaggccggaatatgataacggacaaatgcaggatatgtccattatgatgttatgaagagatgcttatgcgatgcatgatattgaatgcatttacggacacgagagcctggaatatatctcttttactgcgcattggg

SEQ ID NO: 217272 - DNA, 443 bp, Glycine max
tgttgagccaaaaccttagctcatcgaccataaaccttgtactatgatatgaattgctacccttaccctcgaaagaaggaacagaaggatctcccaagaaagaagatccatttgctgttaagctgcaagtgcacttcaaaagcgaaaaaaaaggaaaggaaattcctaatcaaagatcggaagaaggcaaaagaaaagaaaaggaaaagaaattctcaatccaagattggaagataacaaaagaaatatacagaaaggtctttggaccagacaatatctgaataacatgcagaattgtcacaaacaagataaggaaagagaggaaaccagggcctgcgacacatgaagcggtccccttttgattaccaaccaaaatcctttgcgacaacgactctttcgccatgcaatatacacaaacaataaaggaataggccgaaacaccc

SEQ ID NO: 217273 - DNA, 310 bp, Glycine max
  unsure (1)..(310): unsure at all n locations
atatggatccaatgtacaccactcacactatatttattgcatccttcctagcaaccttctgataaccatttgctgttgtcgaagacaatttctggcaacagaatttttttaaatcttttccttaccacctttgttcctttctctcaccatcaatcccttgtcttagatgcaacttgttttacaaaatattggcgcccctataatttgaaattaacgccattccataattgaatagtgatcnctacatatacatccaaagtgatgcgtatgatcgaaagtgcattctacatactaattttcaacacaaaat

SEQ ID NO: 217274 - DNA, 332 bp, Glycine max
tatatagatttgaatattacgcacttaccatcaaagttgacaatgtcatcgggctaagagtactcatcatctgaacttgtgtccagtgctagttctactttaccggtggacgcatcaaccatcatacacaagttggcttcttcctctgtgtcctcgtcagacgatgatatttctaggtcctcccaagtgctcatgtggtattccttttggacttgaagaatatcttcttcttatactttggctgtttaagggcatggcattctggcttgaagttccctggcttcttgcattcataacagatgaatggacttttctttatcagtggaaagatc

SEQ ID NO: 217275 - DNA, 475 bp, Glycine max
  unsure (1)..(475): unsure at all n locations
agcttcttganaattctgttctgcctcaatatcttctttgtttgngtctagatggagcttctttgcatgctanagaacatggagaaaaaagacagtacaaaaggaatatagaaagaattatttcagacaaataaatcacttgggaataagtgattgcatatgtaagagcaccattatataaaacaaactcttccttatccaattcaaacaattatttttaatctcccacacttgggaaatgactacaatatcctcatacaagaaggaaaaagggaagtttgctaagcatatggggaagacttgaaatttaaaaacaatgcgggaatgtgaacattngatcccttgtaaccataaaacatataagatattgaaaaggtttaccaagatataagtcagatatttacctaacaacgtttttttaaaaattgtttcttgacaagtggacccaatcccatatgaggaaatgaacttacat

SEQ ID NO: 217276 - DNA, 445 bp, Glycine max
gcatcatgtgatgtgtcttaaatgtattctacttctctgttctcgcaggtgaagaaaatccatcaagagaagaaaattgacttgttggttgacaaggacctgaaaaacaactatgataggattgagcttgatgaaatagttcaagtggctcttctatgtactcaataccttccaagctacagaccaaagatgtctgaagtggttaggatgcttgaaggagatggtcttgcatagaaatgggaggcctcacagagagctgaatccacaagaagtagaggcaatgaactctcatcttcagagcgctactctgatctcactgatgactcttcattactagcccaatcaatggaactttctggaccaagatgattcacatagtcactgtgacactgaagttggtgaagattaaagaaagtggaagtttcttcatatgcatgtgcctgag

SEQ ID NO: 217277 - DNA, 288 bp, Glycine max
aaaagacacacaattctaagataccctacatcccatcaccattcagggtcatgtgatcaatcacttcattcctatgaacactatgaagatatcctagatacagtaaaccgtgcgtgcactagctaaacactgatgacatgatcacctgcgttaacaatgcagactatgggtgttctctcataacgcacagtctaagtggtccacttcggctattcgcattagaattttaatccctataattatcaaagactacatcggcgatgcatgtcctcactgataaataatact

SEQ ID NO: 217278 - DNA, 443 bp, Glycine max
  unsure (1)..(443): unsure at all n locations
agcttataagcgcgggtctgggattcattgtcaagcggccgcaatatgcgaagntgatgttccgagtacattggatttggtacgaccatgccctcctgatttccagctgggaaattggcgagtggaggaacgccctggcatttacgcaacgagcataatgtaaacctttacggctttaaaagctctatagttgagcctaggctttagagcttttccttttgctaaggctttgtgtcttttgtttttgaatttataatacaaggatctttcttcatttgttcctacgtctctacccattctcattcatttgcatgtttacttctctgtctgaaacaacagatccgacgacgagtcccccgaaggtactaatacctgggactcgcctatcgacttcgagcaagatatgagtcaaacggtagatgatggatacgaggatggtggac

SEQ ID NO: 217279 - DNA, 459 bp, Glycine max
  unsure (1)..(459): unsure at all n locations
tccaatacctgaatccaaaacggcgccggcttctgttctgtatactcaatagtaattgatcgtgctttcgtgagttcactttgtttttattttccttaataaagggtttatgtatagagcgccctgactgtgtttcgaagctgatgatctgttctgtgtgtaatgtatgtgacactgttattattatggagactgttgatcggttatgtaattctacgaataaagattaaagactcataccggttgctgatttaagaaaaaaaagagtttaaaaagttaccgttaaagcttgttctttaagtttaattatttatttattcttattaactaatggaattatgagatacactattttcattaggatggtaagggaatgagtgaacttcataaccaaccaaactcatgtatattaagntggatgtttaagatatttgaatagaatctaattcagtccaatct

SEQ ID NO: 217280 - DNA, 441 bp, Glycine max
  unsure (1)..(441): unsure at all n locations
agctngcattagttctactagcaaagttattcatatatttaaaacattaatgcggggtgctaccaacaactaatataaatattatcaacataaattgttagtacctggaaatgaccattttgccctcatgtcactacaagaaaatcatgttttccgacggactacttcccacgaacaaaattgtcagaatgttttgatttttcaacggatattatcgaaggaattaattccgttggaaattttgaaaatactgacggatttgaccgatagacaattattctgtgggaacattaatatttccaacggattatacacatggaataaggatccatcgaaaaataaaatttctcgaaataaacgagctntaccctagccgtctgagtcatntatggggtttcgtattcttcttctcctcctcccccatttgcgctttcctcgctc

SEQ ID NO: 217281 - DNA, 431 bp, Glycine max
  unsure (1)..(431): unsure at all n locations
ntagttggattagtgttttagttgcctgatcatgatggacttctatggttntgtaactagtggtaggtgatcatttaatttgtaaatattttatgcttaagtaagatataagtaaatttacactggtgtatgtggttcaattagtaaaattatgctttctagcgtgtgtgagtgcatcatatcccgcaccatgggtaaggaattttttcaccatgaacggttgatttgatgcaatcaacgttatgttatcacaccagattataggaccgcaactccttgggtcgtgtaatcctttgaggccgcgaagccaagcgcatgtaacatactctcaatctcaaataaaacataattttgtccctcgacattgttgagaggatcatgtacgaccccaatgatcggtttcttggtttaggttactacagatcttcatg

SEQ ID NO: 217282 - DNA, 391 bp, Glycine max
  unsure (1)..(391): unsure at all n locations
tccttaagtcacctgaggctgcaagctntgagcatacggtgccaatttttttcttcttcttccagacaccanctgacttcaatccatcaaagggcattccttctgcgaccatcatcttgggatgctcccagccttcgatgacagctttccaggttctgctatccagtgatttgatgaaggcctccatccttgctttccagtatccatagatggttccatccagaattggtgtgctgttcactggacctccttctctctccatgttcatcagaatgtatctccctatatctcactcaatgatctccagtgcctgctctgataccaattgaaattctgtatctggggacagatgtcgtacttgatgtcactacatctcgcttcacatcatgca

SEQ ID NO: 217283 - DNA, 400 bp, Glycine max
  unsure (1)..(400): unsure at all n locations
gattcattctatgcacccatggtggtccacattgtgtttttttcattnttatactacggaggcttactttttataccccctgttgacgtgcttaagccattttacttaagtcatttctcgcttaacttaaaaataaaatcaatttccaccgatcgtttgaattgtattatccggtaacttcggttaatatgaattccgaccgttcggtcgtgccggaaccacggtggaaatcaaaaagaggtaacaaataatattaattattaaagaaacactcttgtagttaaatgaagctgaaaatcaatcggacgtcttttctctctgggatttctcattcttaaatcgaactgatttataactaaagtgaaactaaggctaatatcaactcgtctattcaagctcg

SEQ ID NO: 217284 - DNA, 427 bp, Glycine max
  unsure (1)..(427): unsure at all n locations
agcttgaataatatcctgagcatataaatccttttctaacagctggcacaattgttttctttttgtgcaaataggttttaatcttactatcgagaacgggttagatgtgagtaaaaaaaaagtgcttttgatatcatatttaggaaacaaaaatcgttttttaattaaaaaataaagnttatctgtgtagaatttgcaggatctttcttttgccattttttacaaaacaaaaaatagtttttttatcccaaaatgtcaaaataaataattacacaaataatacaagtgttaaaatatttgccaaagtgaaataatggtcccctcaaactgatgtctcanagtgtatgaaattctttnttttgctttcaatgttgggaaatcgattttccatgcaccgatttctcaacatgtcnnttttttaatttat

SEQ ID NO: 217285 - DNA, 449 bp, Glycine max
  unsure (1)..(449): unsure at all n locations
ctaagctagcaaatagacctgtgtgttgcccagtttcatcatatctttcgtaatacttaccacctctatcatatccaataattttcacatttatgtctaattgcctttttatttcattgtgggaaatttctaaggcatccattgcctaagaaatctcgggcagtaagtagacataatcgtaacgtgaataatcatcaataatgatgataaagtatccttcctttccgaaagaactaacatgaaaaggtccacatataccaatatgcacaatttcaagaagctgagtgcttcttgtagctcctttctttgtatgttatgcttgttttccctcaatacaacctacacaaatatttagatcccgtaaatctagataagggagaatttcattctttattaatactttcataccttctctaanaaagtgacctaaacatttatgtcacaagaaa

SEQ ID NO: 217286 - DNA, 418 bp, Glycine max
  unsure (1)..(418): unsure at all n locations
agctatcaagcttacctctttcatttttaatgaagaatgtgagagccaactctattttgctccttctagactntgttgctagtctgccattccataatnttgtatcctctgaaaccatgatatagtctggtgtgaagattgngatgcacaataatgtctggctgcttcttaacaggcgatcttgatggtaagatccactatatcactcgttgttcttctggcctcattagtattttatcaagcctattaaaaagttgtcactttgataggctcttctgttaacaccattattttccttttctctagacgctcaatcatgacctctatggagacagattttggtgctccatatatttcctttagcatctgagtgtgacgcatccattgtatataagaagttgtcattagcatcaacatt

SEQ ID NO: 217287 - DNA, 448 bp, Glycine max
  unsure (1)..(448): unsure at all n locations
tctatccaaatggacttaccttgaattaattcctttgtttctcttttgagccttgtttccctttccttgttctgaagctcactacatgccttaagtgaaaaaccatgatattaccatatccttaaggaattttggagctttggaattgttttgggaataagtgtggggggtttttgtttcattggacaacttgttttgttggctatgcttcatgatgtattttgggccatacttgatgtacattgtatattggttaaatgttggacatgctgaatgaaatgttgtttctcaaaggctaaagagtaaaaaaaaaaaaaatttcggaaaaaaaaaattcgaaaaaaagaaaaagaaaagcaataaagttgagtgaataagatcttaaatggcacaagaatgatgaaactcttggtctactcttcatgtnntaatttatccttacttcttt

SEQ ID NO: 217288 - DNA, 463 bp, Glycine max
  unsure (1)..(463): unsure at all n locations
agctttatatagctgaccatttatcttattcacaagnngagttntattcagaaaattagagtttatctctnttatcttagtgagagtgattctcctaaattcttgagtgattcaagaacaccctggctgtatcaaaggactttcacaacctttgtgtgttgccctcactggaaagagtgattctttccttcctatcatctccacccttgttctttcaaaccacaattccagaaaatccacctctgcccaaaattatctcgtgaccaaaactcccatttcacacactcaaattaagtgattcttgagcctaaattgaatttcaaaacgagacctttcacctcgttntggaatcacctcatttggagccctgtagcttccgttattggcatttctatatttctgtccagccaccacttaacctacgttntaccatcccattcatccattttatgtcagaaaccac

SEQ ID NO: 217289 - DNA, 450 bp, Glycine max
  unsure (1)..(450): unsure at all n locations
tagtaaagctaggcactaacaatctcccnacttggcaaattttgtctaaaacatacttagacacttcctgagcatgtacgagcagttatgcaagtgggatcaacaactttcattatcagagtaatcaagcacagcggaaattctgcaagttgcaagtcgtttccaggatgtcaagacatctcacatgacatcagctttctgcttctgctccccctgtctccatgctcttactccagcatcttctatcagctactaatcttttccaggatgtcaagacatctcatgtgacatcagctttcccttgtctccatgctcttactgcagcatcttctatcagctactagtagcttacatcagtcatcatcagcagcagcagtctccccctcaaaatcatgtacatacaactccccctcaaaatcatgaatcatgcatacatcgtatgctacttct

SEQ ID NO: 217290 - DNA, 444 bp, Glycine max
  unsure (1)..(444): unsure at all n locations
cgtgatcctaagcaccgcggctgcaagctgattaaaatagtttaaaatacttntatttaatattngaatntttattcctttattaatatatatgtgaggggtagagggtgtcacatacttcatatccaatgcctgaccactttttatcttttacttaaattggtcatccttaagctattcctttattagtttcaaaagcccatatatttccagttaaaatggtctgaccatgaaaattctcccatcatggatgctggcttacatattctaggcaccaaggaagtcctcaaaatgtcatgatattcatgcaatgaaataaaggtcttggttactaaaccaatggcggagcatcaatcatgtcaattatgggaaattttcataagttcttctataatattcatgcaagtggttcaacttactacatgaatcaagactcactgattt

SEQ ID NO: 217291 - DNA, 457 bp, Glycine max
  unsure (1)..(457): unsure at all n locations
gcccaacaggtaatagattaaaatgatgtagtaattgattttttcttcaatctngaaccataacaccacatacgcataaatggtaatcgattaaaccatggggtaattgattaaaataaaagatttcaataactaataaacacatagcaacatagtgtaatcaagaaacatgagagggtacaattaaaacaatgaaaaatacgaaatgaaacagtaaaacatgtattattagagggggaaaaacaactacatatcaacatactaagacatttagacacatacagagcattttaaaacaagctatatgtactaagtgtcataccctaatttcattcggtgaccattgtttgtcggcatgcgaccttcgtttgaccacctcataatgtttatcacccatcgttgtggaatccgtaaagttctgagatgttgtgagaagaaactggtcaaaaacacgaaa

SEQ ID NO: 217292 - DNA, 462 bp, Glycine max
  unsure (1)..(462): unsure at all n locations
agcttaatgttctagctaggtctcacactttaatttgaaaggaacctttatatcttggaaattagtgggccttatattgtcttatgggcccaatggcttatgaaattgggagtggtgttaatggattttcaagcattaactatgaagtttgttcatgggtctggctagggtgttacttggtgcacccagcatttttgctagggcacccaacacccgtagtgaaatggcaattcaccctaatactataaatactcctacttatccgtccgtacaacatatttccttatcctctgcatgcaaccgcttcttcgtcttcctcgcctacagttgagtcttactcttgctctttcggacttcctgtcaccttgttgctttgtcctctttcagtcttccgttggtggttgtcctgttccggtgttcttccgctgttcacttcttcagttcttgttgntggtcattgtg

SEQ ID NO: 217293 - DNA, 417 bp, Glycine max
  unsure (1)..(417): unsure at all n locations
acttgcggatntggtcttcgccagcaaaaagatcgaagtggatccgtttttatgcaaatttgatcgtcctactatgacgactgagaaaattggggcaaatgaagagggtgagaaagagggagaaacccatgactgtgactgatattcctatacggccaagtttcccaccaacccaaaaatgtcattactcagccaataacaaactttctccttacccaccacccagttatccacaaaggccatccctaaatctaccacaaagtctgtctaccgcacttccaatgacgaacaccacctttatcacaaaccataaacaccaaccaagaagtgaattttgcagtgagaaagcctgtagaattcaccccaattccagtgtcctatgctgacttgctcccatatctacttgatgattcaatg

SEQ ID NO: 217294 - DNA, 212 bp, Glycine max
aaaggaaaaacgggacacaaaccccccaaaggcaacacacggagacgggacccaaagcacggcagaagaaagagaaaaagcccgaaaaagagaaacacaacaacaaggaccagaaaaaaaacagaacaaagaaaggccacacccggggaaaggaaaaaggaacaaaaaaaaaagggccgaaaaagccaaaagaccccccaaaacgaggaaaa

SEQ ID NO: 217295 - DNA, 352 bp, Glycine max
catggcggactatgtttggttaaggaaattcatggggggccggatccttgatgggaattatatggcctagatgggcatcttcttcatcgtcttcttgcaggggatagtcatcataatgtgggagttgccccttgaagtaggggcttggctcacatcgtctggaacggtactgtgagtgatgtacggatgcaagccatatgggttagcttgaggactattccttcgaccgtacaccatctgtgtttctatcttggcccaattttattgcgggctgtaacaccagatccgcttccctatctgtattgtaagctatcaacggtggcattatcctctatatgtttctgaatcttta

SEQ ID NO: 217296 - DNA, 478 bp, Glycine max
  unsure (1)..(478): unsure at all n locations
ctgcacgctgcaagctngaatggagaacacatccttttgactatgtttngcaagcggcaaccatnttcttggatgatatcttgcggngtcatattgatcgtaggacatcaaactgctgggtttggaaaccagaacctaatggccagttgtctacaaggagcgcatactgtatgctactagaaggagcagctgatcagactgtggatgaggctntagaggacctatggcagctcaaaatccctttaaaaccaacaacattcgcttggcgattgatcaaagatagaatcccaactaaagggaatttatggagaacacagctggagaaaggctttgcccatccctacaactattggtctagttatttatcaacaacatctttttattagggtagcagcgcatggttattgtattctatttagattggctcatgattcgaggacctatggtatgctagtctgttggtcctaccttgatatta

SEQ ID NO: 217297 - DNA, 316 bp, Glycine max
aaatcagcgacaaaatctccctcccagtgataatacgctcaaatctgcggctaaactacatgaggtttttccgacttatcaccttgatgacaaggtgagtcttttatgcgcgggtattgatatgcatataccacacatcaccaatgtgtacacccgctaacaacgagcaagataatcaataaccatggaccaccaccatctacatggcgcacaacacccaaggggtgctaaccacccaacagttacgactcacccaaatgatgcaaagtcgagaaatgtgaatcaatgggacatgatccttgtgaacagttacaac

SEQ ID NO: 217298 - DNA, 317 bp, Glycine max
ccacacggaattccttatcccgaggatatcatatctctaatgtcaaaatcgaacaacagacgctctcgacaaattctaatggtcataacttttcaaacgtgagtccgatttaggtgcataattaaaccgagaagattgaaattgaacaaccgaaactgttataaactcaaatggccataacttaacacacagatttccgactcaagcgcataatatatcgtgaccctcttaattctacaccggaagctctcgagaaactcatatggtcataactttgcacacggaggtcccatctcggccgatatgttatcgtaaag

SEQ ID NO: 217299 - DNA, 451 bp, Glycine max
  unsure (1)..(451): unsure at all n locations
gcataatatatgagctagctagctaggtttgtgtagtttggttaaattngngaaacggngaagggcagagaggaactaatatcacagaccaatcaccaatcttaatgggctgccacaagggcactaaaaagagtaaacaaaattggtggtgacgtaatggaacagccaacccctctggcttttacaaaaaaggcacacaaatgatgcatggtggcccccaccttcattcttagtccctaccatttccacccccttcgattctcaactgtaattaaattgtgatgatggtctttggaaatgacattggatctcatggatgttctacgggacatttggccctcatatatatatgccaaatcttgaaaattaaagctaggctatgcttggctagctaatggtttctcttcttgttcctttcatgttaattcgatctttatcactagctagtgat

SEQ ID NO: 217300 - DNA, 425 bp, Glycine max
  unsure (1)..(425): unsure at all n locations
agcttgtnaggttaaagtctcacgattgtttcatgctcatgtaacaattggtagccgnggctatacgagacatcttgccaaacaaagtcaggttaacaataactcgcctgtgctttttcttccattctatatgtagtaaagtcattgatccagtcatgtttgatgagttggaaaatgaggccgcaattatactgtgccagttggagatgtatttcccccctgctttctttgacatcatgattcacttgattgtgcatctggtcagtgaaatcaaatgttgtggtcctgtttatctacggtggatgtacccggttgagcgatacatgaagatcttaaaagggtatacaaagaatctatatcttccagaagcatctattgttgagaggaacattgcagaagaagccattgaattttggtcagaatac

SEQ ID NO: 217301 - DNA, 453 bp, Glycine max
  unsure (1)..(453): unsure at all n locations
tgtgattgcatttgngcatctattgtgactttcctatgctttcttatttaacagccccaccatcccaatttgcaaaatcatattcatatatcattggggcatttcaccgagcacttggtgggcgcacatttggacacaaattgcaagaggatggggacaatgtggcatgccccattgcttcagaatacaacctatgcctaaggccttttcattcaaatcctcaattcaagaaaacaagcaccataaacataccataacttccccacaaatataagcatgttctcacaatttagagtaccaaaagatgaagaaaatgtaccaatgggaagcaaaaacatcaaggatggaatacttactgtgtggagtgaacaatatcaccaataatgaatgcaaaaggcaaccaaaagtagcttgatgtggcaagaaccgcaagccttcgtgttctttctttta

SEQ ID NO: 217302 - DNA, 425 bp, Glycine max
  unsure (1)..(425): unsure at all n locations
ggaccttaatccacctgcagcatgcagctngcacattgttataacatatcatttttctattgcancatgaataagacaatcttgttctcatccagaagagtcttcgcatgagaaggctttaaataggacaaaaattaactttcatgagaaataactgttgaaaaaaatatatgatgcacaactaacctagttgaatatgtgccagaattttttccaaattattataaagtgatatcataatatttagaaattatcttgtgaaaatactgtcgtagggcaacaaaggaacaataattatgaaatatagatacttgtgattttttggctgggaaaacatatgacatatttcaaagttaagaaactcctattaattttataaattagaggtgctaagtgtttttttaatttaaataacattgcaaacg

SEQ ID NO: 217303 - DNA, 416 bp, Glycine max
gacactattaaactaagctttaatatgtatctattgaaacaacggatgagctgttattgtggaatgcagagttaccatatactattagggaattagtgcatagccaacacccacatgggcaatagggatgcccatcatggtgaaattttaaaatccaactacaaggtatgaaactcatgctgatatttggaaatatggaattttggcatgatgtgtacaggtcctagggctcttttactcaaactacaacaaatagcttttgcagtgtggttctcccaattatcaatcatggatagcgacatgtagtagccgactttgaaaacactatcgcgggaagcaagattgctagtatgctaaatgtgttaagaactaggtaagaagtctcaagagtacttgattacaaaaaaacaatcatg

SEQ ID NO: 217304 - DNA, 450 bp, Glycine max
  unsure (1)..(450): unsure at all n locations
agcttgaatgctctattcaatggagttgttcttaatatctncagactgatcaacacttgcacagtggccaaagatgcatgggagatcctgaaaaccactcatgaaggaacctccaaagtgaagatgtccagattgcaactcttggctacaaaattcgaaaatctgaagatgaaggaggaagaatgtattcatgacttccacatgaacattcttgaaattgccaatgcttgcactgccttgggagagagaatgacagatgaaaagctggtgagaaagatcctcagatccttgcctaagagatttgacatgaaagtcactgcaatagaggaggcccaagacatttgcaacatgagagtggatgaactcattggttcccttcaaacctttgagctaggactctcggatagggctgaaaagaagagcaagaatctggcgttcgtgttcaatgat

SEQ ID NO: 217305 - DNA, 453 bp, Glycine max
tcaagataaagatggcctcagcaaattccttatttccagtttgttattctatcaatagacctccaatctttaatggagagggttaccactactggaaaacccgaatgcaaatttttatcgaggcaatagatctaaatatctgggaagccattgaaatagggccttatatacccaccacagtagaaagagtttcaatagatggtagttcatcaagtgaaagcataaccatagaaaaacctagagatagatggtctgaagaggatagaaaacgagtacaatacaacctattagccaaaaacataataacatctgccctaggaatggatgaatatttcagagtttcaaattgcaagagtgctaaggaaatgtgggacactcttcgattaacacatgaaggaactacagatgttaaaagatctaggataaatgcactaactcatgagtatgaattat

SEQ ID NO: 217306 - DNA, 358 bp, Glycine max
  unsure (1)..(358): unsure at all n locations
tgacctgctccaataacaagtcaatgaggcatcgggccattgtgggtgttcaatatgttctantacgatcagtgccacttgggttgcgacttccttttgtttcaccttcagaaagatatacgaccacagagggaactactcatttctccaaagatcttatggcctaaaatatgaattataacatatccaagaaatgacatgtgcaccaaggggatcacaaatacaatctacccatgctaattatgtacgccattcaaaaatttacacatctcataattagattcataaacataagcctctatgaagttaacaattatatatctagatacaatcatgtctatgtattccatgctataac

SEQ ID NO: 217307 - DNA, 438 bp, Glycine max
tattatgtttccctcctcctttaatagaggttactatgtcttcaaaacaaaagctggcaacaatgtctcatgagataagatctccattgtctggggttgttagcatggctgaaattctttctaacacgaaactcgattgggagcaaagacaactcctggatgtcatgctatcttctggagatttggttcttcaacttataaatgacatactcgatctttccaaggttgagtcaggttggaaatctatccttgttttgtttcttactaatgagatataacatgtgaataatataaagaataatgttaatcatttggagagcaacttggaagttgcttatgaattatgattaagacaaaaaagttctttagaattttcattctagatgccgatattacacaatctccaaaatactgtttctatgtacgagtgatgaaatt

SEQ ID NO: 217308 - DNA, 481 bp, Glycine max
  unsure (1)..(481): unsure at all n locations
gatccttaagcaccgcggctgcagcttgacggaagaagttttcattnacttgtgtacacaactnnttaaatttaagtgaagggcattttcgctcattcacttaaaatgttgggtgcacttatgttagtcgatggaaacgactaacttttgtgtctacaacttgtgtaaattgtatcaaactttcccaatttatggttgttttgtagtattacaagtactttttgttaagtattgactatagatacttaatgcatctgttttgtatgtttaataatcaaattctctcaatttcatgttaattaggcaatttggcaaagctcgaacagcatccactaagcgcaacactcctatgctaagcgcgaggaagactctggaagaagatgagttgtataggttcgctaagcgcaccacttcatctcactaagcgtactactntagttcatccgctaagcaagaaaggcgtgctaagccatatatcact

SEQ ID NO: 217309 - DNA, 398 bp, Glycine max
agatgatgacaataagcccaagagaatgatttcaagaacaagattcaagaatcaaaagaagtttgatttcaagattcgagagaagatgaattcaagattcaagaaaagaaatcaagaagacttcacaagggaagtattgaaaagatttttcaaaaacaaagatagcatagctttgtttttcaaaaaagttttttctcaaaattttctaagttaccagagtttttactctctggtaatcgattaccagtttcctgtaatcgattaccagtggcaaagtttgatttcaaaagcttttaactgaatgtgcaacgttccaaatgatttcaaaatggtgtaatcgattacaagatattggtaatcgaataccagtgtatctgaacgttgaaattcaaaatcaa

SEQ ID NO: 217310 - DNA, 333 bp, Glycine max
tcttaaaagatacacggtgagaggactaaatctaaaatataaatatgaatgcactaaatgtacggttatttacatattacataactactaaaaaaattacgacattatgattctaatgctaatcccttatgatcatatatgcgtgcgagcaaatgattgctattctgatggagcataagactcttattctattattaaaccataaattattatgtataataattctgctaattcttataataattatttcaaaaaccataatcttcataatttctcattgattaacaatattattctatactaatgcgtgagaaatgaatatctattcctata

SEQ ID NO: 217311 - DNA, 445 bp, Glycine max
tcaagattactcgtcaaattatgtttatttatatttgcttgcaagtattttttaactcataatatttaacatgaacaagatcaaaggttaatttatacgccattcaatactaaaaaaaatgtttttataaaagatcaaagttaaacaaggaggccactataaaaaagacaatttttctatagataaaaaacttattatcatataaataacttttaatctaaataaattacttatgattgcataatcaacatttattcttctagttcttaaaaaaaaataaaaaaaaaactcctctgctatacataaactagattgtaaatctagatatttttacgagagaaacgtcatgtcatattatacaattttctaaaacatacaagctgtggtccaagtatacctaccagttcagaaataaatgttcatgccatataaatattataaatac

SEQ ID NO: 217312 - DNA, 417 bp, Glycine max
  unsure (1)..(417): unsure at all n locations
agctngagataaggaagtgtagaagggtgtttcttctacttttattcngtgaccacagagtggtacctggagatatgtcgcgggggtcaggagaccttggggacgtcaggtggggtgctattgcccaaaaccaagcttgaccaatcccgacccaacccgggcatagtcggtcagtgagaacctgtgatgtacctaaacaggcgagctcctggcagtcaacagataaaaggaacaaagaccacaaagcaaggaggcttgtggtggctggccagctgtgaaatttgggtgatatgtggattatggcccctggtaatcgattaccaagggtaggtaatcgattaccaagggtaggtaatcgattacaaggcttaaaagtgaagacaagaggctaagatggtctctggtaatcgattacca

SEQ ID NO: 217313 - DNA, 456 bp, Glycine max
  unsure (1)..(456): unsure at all n locations
tgttggagattgctgaanatcatgggaggtctggtttgtgttactgcttactagngctgataaaaggaggattcctttggaaagaaaagagaaatgctttgctcgtttacaagggctataaccgcaggtggagagggttcctatttgtcacatcaatgagagcttttgagtgtanggtggatttacgaagattgtggtgctatgttggataaagagaccaaccatgatcagccgaattgggtgcagccatgtcctctggactttgaattgaaaaattggcagcaaccagatatttttgtttttgatttgatgtaattaaacagttgtagatactattactatgcctaaggctntagaattcacatattgtcaagcgtactttccttttcaattctagtgattattaataaaatgcatttcgaagacatattccctgtttgaatctttgttgctttc

SEQ ID NO: 217314 - DNA, 325 bp, Glycine max
  unsure (1)..(325): unsure at all n locations
taacttaacaacaatataaacttgcaccgagcgtttgaatagtcttatccggtaacttcagttaaaataaattccgaccgttcggtcgtgccgtaatcacattggaaataaaaaaagaggtaaaaaataatataataataaaaaaaacatcattctttagtaaaataaagcagaaaatcaatcggacgttttctctttgggatttctcattcttaatcgaatngactaataactaaagtgaaactaaggctaatatcaactcgcctagtcaagctcgtccacaanaatagggttttgaagtttgtcatttcaatctctcactaag

SEQ ID NO: 217315 - DNA, 301 bp, Glycine max
tcggaagatagtgatgaggtacaagccctatatgcagagcttgttttattccgagtagtcgaagagaagtcaagtccatatccatcaaagtctgaaaagagtatgatgaactaatggacatcaattttgccaccgctgaatccttggacgaaaataccataatgcccgaaatgaataacacgttccagcatagtgtttaagggctttatatggcagcaatagtaagctcaagctccgaaaggtgaaaggaatcatcacgggtcaaaggcatgatcttgaatgacgagctaaaggcttacct

SEQ ID NO: 217316 - DNA, 221 bp, Glycine max
accagctcaggaagaagacgcagaatgaacaacaactcgggagacttcaggaggcaaggaaaaggacaaaaaaagccgagagcacggtccaccggattactgcgcaggcgcatccgaaccagacaagactgacggcatgaacgaccccgacctagccacggaaaaatgtgtgcagcaccaccgaacgcgggaggccgcacccgggaaagtccactgaaaaa

SEQ ID NO: 217317 - DNA, 280 bp, Glycine max
  unsure (1)..(280): unsure at all n locations
aaaaatgagagcacaagagggaaaagaatgaacaaanggggcaagcaaggccaataccccccacagaagagcaaccacagaaccgacaccaaccaaaagaaccgacaaaaaaggagcgaaaaaaccaacgggacaacgaagcaaccgacaagaggggcgaaccacgacgacaacaacacaaactaaacagcgcgcatcagaaaaaaacgaaaaagaaaaccacaacccccccacgaaaaaaggaaggacgaagcaaaaggaaagaacctccacgaaaaca

SEQ ID NO: 217318 - DNA, 423 bp, Glycine max
agcttctatggaagctggttcttttatcttcaatgagggccttcaatggggattctcatccatggagatgcagcggacaataaaggagaagaagtgagaggaggcgtcatctactagagaataagccatggaaggagaagcttcaccaccaagagagtgtcttggataagaagcttagagaggaaggcttcttggaagaaacgaatgagagagaggggggtggatttgaagtgtgtctcacaagtttcacgttcatcaaagttatgacaagtgttacacatgcttctatttatagcctatgttactaactaaatgagagcttccttgagaagttccttaagaagctagagttagctacacacccttctaatagcaaactcacctccttgagacacctccttgtgaagctagtagttacctaca

SEQ ID NO: 217319 - DNA, 374 bp, Glycine max
ctcagcttgcttcacataagcttaacaccagaatgtgtttgttaacaacttatgaggaaactcaatggaggaagagaacgagggagaaagagatagtggcatgcaaaattgaaggaagaaagggagagaagttgaactttgaagtatgtctcacaacactcttattcatcaaaattgtgacaaatgttacacatgtttttatttatagcctatgtcactaactaaatgaaatgtgaatttcatttacatttcatgtgaatctaaaaggaatattctaagaatatgtcaaaggcatcttatcatattctctgtatatgccacaaaaatgaaggtgtgactctatcacattggaaatgaatatttcacaataatat

SEQ ID NO: 217320 - DNA, 424 bp, Glycine max
  unsure (1)..(424): unsure at all n locations
agctntaacctcatcgtccctcactttcttttatattgggagccaatccaatccttgtgttctgactctcatccacttatgatagccgccgatgatcccattactgcttcccctaagctctctgtcctttcttcacgccgcatcccatgccttgcgaactccttggagtaccctagcgttgtggtcactggaacctcgtgcgatgaaaggcgtgatgctttcgtctgatggcacttctctcatggggtagccaagctgtcttatggcgaggacgggattataattaatacaaccccttgttcccatcaagagaacatttggacatccttcgcatgaagatagaatcctgattcttccttccttctagcgaggaaaccaattaacagacgcccctccatgctagccaagagntggtcccaattcg

SEQ ID NO: 217321 - DNA, 426 bp, Glycine max
  unsure (1)..(426): unsure at all n locations
tganatgatgaagtgtagaatggtgaaacttcctgcttttttttttgaccacagagtggtacctggagatatgtcgcgggggtcatgagaccttggggacgtcaggtggggtgctattgcccaaaaccaatcttgaccaatcccaacccaacccgggcatagtcagtcagtgagaacttgtgatgtacctaagcatgcgagctcctggcagtcaacagataaaaggaacaaagaccacaaagcaaggatgcttgtgtggtggctggccaagtgtgaatattgtgtgacatatgggttatggcctctggtaatcgattaccaagggtgggtaatcgattacaaggcttaaaaatgaagacatgagactaagatggtctctggtaatctattaccaacgtgtgtaatcgattaccatgcttgaaaacg

SEQ ID NO: 217322 - DNA, 452 bp, Glycine max
agcttcggaagatagtgatgaggtacatgctcctaaattcagagcttgaaagagcctgtgtagtcgaagagaagttcaagtccattgccatcaaagtctgaaaagagtatgatgaactaagggatgtcaatatggccaccgatgaagccttggaatgagaaaccaagaaggcccgaaaggaagaacacaaccaaagcaaagttttgaggggctttatagggcagcaatagtgagctcaagctccgaagaggtgaaaggaatcatcacgggtcaaaggcatgatcttgaaggacgagctaaaggtttgccttatgtcgaaaagaaatttgtcccaacagttaagcgagactgaagggaatatgtgggccatcatcgataagtgcaaagagaagctaaatctatcggcgactcacgggcataggctagaggatgagtacgccaagatatcagca

SEQ ID NO: 217323 - DNA, 455 bp, Glycine max
  unsure (1)..(455): unsure at all n locations
tgcatgatttacattctctcccttgtttatgatgacaacctcctgtangttaggagcaacaacaacaacaaaaaatatccatttgtatatacttttactccccatttgttttgcaatgattgcttatgtgagacatgaagatttcatacatttcatatataaaaagttgtctcataaagatttcatatttcttttatctatctctccccctttgtcaacatcaaaaacaaatcatcaatagagaagagaaagatgttaccacttgttgcaatgtatgagaatcaagtgataccaaaaggcattaaaacaatgattcaatattaatcaagcaaaaacaagtacaattacacatcaatcataaacacaattaatcaaacacacaatctatagcaatcaacataacaccatcaaaaacaattatcatagactatcaacataactatcaatcataatca

SEQ ID NO: 217324 - DNA, 474 bp, Glycine max
  unsure (1)..(474): unsure at all n locations
agctntngtcactccacccaaatcttgctttcttattcaccaaagctaacacccttgataacagtgtgaacttagtgcatccgatatacaatggtttcttcgaatcatgatctaacttttcataataaggtgcatatgcttgcctaaaaccttcttgtccaagatcacgtagcatgtcttctatatgatcaccgacttgttcatcaacaggaccagtcggaggggttgatgagatttatggtaactcaccatgccatatccattttgtataagtaggacagataccatcacatataagatgtgttctaatgtcatccaaagattatcgtcgcccattctatacatttaacacatggacagaagtatactccacccatgtctggtgaattttgtttgacaaattgcaagaaatccttaaccccattctcgtagtcttcagttatgcgtggtctattcatccaactttgatccatc

SEQ ID NO: 217325 - DNA, 440 bp, Glycine max
ctaagcttccatgagtctccttaccatcaaagatctccttcttcttgttgaagaaaaccatcatcctctgcttcactagaggaattatgaaaactcttagatgactcactatccacctctccattctccaacacaatcatcatccttttccttttgcactttggcccctcatatttttctcttttaggactagaaactttttatatttgcaaaaacgccccaacactctccaacaaattttttttggatcaaactcacaatttttccagcagtgctatgaatgtcatgaagaacatgaagaacataaagaacaacccaaactcagattatgaccaaatcaactccaaattcaacaaaaagataggggaatcgaaggcacatgcaaaattaactcaaaaacacacaagcaaacaataatcaaatgagaatcagtttctcat

SEQ ID NO: 217326 - DNA, 463 bp, Glycine max
  unsure (1)..(463): unsure at all n locations
ggaccttaagtcacctgcngcatgcnnagctagnggttagttccacaatattngttctgttataatacactttttctctaaatgtcttctcttcctttacttataaaaaaattatttctttggttgaaagcaagagcattggtgttcaaaaggtttggggatctttctcgctgcacacgatcggaaccaatgggttatcgtatcttgggagagaagtggaatcagatttttctcccactgcagtggggcattttctctctaaggataacgtttacgcgcttcaacccaagctatttaaaatctatcccttaaaattattttcctgtgtgcttattatatgttatattgcattgttaatccatgttttagtatattcttatattactatgctactgatgtgtatgtatttagttaagacttccattttcctatttattctttatctgattgattcctacagtct

SEQ ID NO: 217327 - DNA, 356 bp, Glycine max
  unsure (1)..(356): unsure at all n locations
attactgcttcttacatggatactgtagggacaactttttctgttgggaccccaatgataacgaaatgatggccttcacgtgcccttatggtgtattgtgctacaaacggatgccatttgggatatgtatatgcacctaccacatttcatatgcgcatgttggccattatccgtagatatggaggacaaaagtactgacgtattgatggatgacttctgcatatttgggcctgaacttgaatgctgcttgaagacacntaagacgacgctacatagatgggtggaaacacacctaattctggactgcgagatatgtcatttgatggttcgagaaagcgtactcctgggacacaaaa

SEQ ID NO: 217328 - DNA, 413 bp, Glycine max
agcttcctagaatcaagatcaatattcaataatcaagagaagacttaatcaagataagtatgaaaaagttttttcaaaaactgagtagcacatggatttttctcaaaatctgtttaccaaagagtttttactctctggtaatcgattaccagattattgtaatcgattaccagtagcaaaatggttttcaaaaagctttcgactgaatttacaacgttccaattgatttcaaaaagttgtaatcgattacaatgttttggtaatcgattaccagtatgcttgaacgttgaaattcaaattcaattgtgaagagtcacattctttcacaaaaaaagctttgtgtaatcgattacactgatttggtaatcgataccagggaaagtttctgaacaaatcataagatgtaacccttc

SEQ ID NO: 217329 - DNA, 452 bp, Glycine max
  unsure (1)..(452): unsure at all n locations
ntaaattgaagtgtgtttntggattcaaccgtaactgtttatgtttgatatgctattttttgtttgtgtgatacaattattctctgtgaacaaggatggtgatgttgatttgaatgcttcaccccaagcacttgataagctcctgggttatgaacttgctttcaagataaaggtgcaacccaagttcatgaattttgctgctttgaagtgttcagctgactcgagcttaataaatgttgtgatggatatgctagctgatgctgaggtaatgttcaatgcaagttatttgacattacctattggtgaaagtatgtattctattcatatttattcgttctgcatgggttgtgttatcttcaatgtatgtcttatttagacatcttctaaaatgaatatcccagtttctgattccaatcattctgctcaacatgaatctgtgaagtttgatcact

SEQ ID NO: 217330 - DNA, 438 bp, Glycine max
  unsure (1)..(438): unsure at all n locations
agcttaagcacaaatatcaatgtcctntgttattcgngccaananngcaagcttaagaaacaattcatgtcgaacactctattaaatggcttttaaaagattgttgacttatgtatgaggactatgatcaacgccacattcggattttagaactatgttgggtaactcttattttctaagaattgatcacgttgtgagatggatgaatgatggctttttataccaatgatcttcctgagaggtatttattgtacaagaggacgtataattgctattgagaagagtattgtgctttgaatatcttggtgatatgtngatgatgacgcatatctcatatgagaaccaaccctatgtattgaatggatgtatctatagccttcgtgaatattcttagctgttcaaacgatattcttgggagagtgattctcatctaagact

SEQ ID NO: 217331 - DNA, 409 bp, Glycine max
  unsure (1)..(409): unsure at all n locations
ttttttctttccaccaaancaccacaattaattaattattaaacttatcatgtcgtttaactatatcttgatgaagtccacaatatgtaaaacattgactttatggcatcaatatttatcgaaattctacatttagagatagagatactgataattaatatggataaagaagcggaaaagacgtggcaagagcgtgggcacaaggcgtgattagagcttatggctaaaatagatcatatttctttaaattgaatataacatgcttgttatctttcagtatatggttttattaaatagaatattattcttataaatggaattgagagtgttatgctatctttcttaacaacaaaattatcattgaatgctatctttgaacgacttatctttcaatggtatttgtatacca

SEQ ID NO: 217332 - DNA, 392 bp, Glycine max
  unsure (1)..(392): unsure at all n locations
agctatctaaagttttctgttttctaactcttaaaacttgngctattcattcttttcatctcttctccctttgccataaagaattcgccaaggactaaccgcttgaattctttntgtgtctctcttcccccttttccaaaaaaacaaaggactaaccgcctgaattcttttgtgtctcccttctcccttgtcaaagaattcaaaacgacatagtctgagaattcttttgattcttccctttcccatatacaaaagatttcaagggactagtcgcctgagaattcttttgtatccccattcacaaagtttcaaaggtttaaccgcttgagaactttgtcttaacacattggagggtacatcctttgtggataagtagagggtacatctacttg

SEQ ID NO: 217333 - DNA, 451 bp, Glycine max
gacactattatactcagctgctggcagccttaaatcttctttacaagactgtgttcttgctctgaagtctcaaggtctataataaacagtgtaactgataacaggggaatataagtagccaattcctaaaacggattatttaatgtactttatccgcctgctgggttacgtgtgggtattttaccagaagttttgattgtatcaaatctacccatgcgatttttgttgaagcatatactctttggggagggtacagtgcggacgatttcaaaacagattactcattcattcgatagagaagatcaccaagatttcgtgattcgctgcagaacttattctaattcaataagagagctcaatattatgccctgaagaggactcgaacctccacgctgtttatcacgagatattagaattcatatgtctcacaaattctctctctctctctctc

SEQ ID NO: 217334 - DNA, 352 bp, Glycine max
actaggtagcttccttgagaagctttcttgagaaaacttccttgagaagcttctttgagaaaacttccttgagaagctagagcttagctacacacacccctctcataactaagctcacctccttgagaagcttccttaagaagattcctaaagaagctagagcttagctacacatacctctctaatagctaagctcacctccttgagatgagaagctagaacttagctacacaccccctataatagcttagctcacccccatgacaaaaaacatgaatatacaaaaaaaaaaagtcctactacaaagactactcaaaatgccccgaaatcaagggtaaaccctatctactag

SEQ ID NO: 217335 - DNA, 417 bp, Glycine max
  unsure (1)..(417): unsure at all n locations
agcttctggtttcaattgtgagcatctcgatatgtttcgggactccatcagncttccgagtgaaaagttatggtcgntcgaatttgctaccagcttcggatttaaagttcgagcgtcttgctatattacgcgactcaatggaacttccgagtgaaaagttattggtcgtagaatttgctacgatcttcgattttaaatttcgagcgtctaattatgttacgagactcaatcagacttccgagtgaaaagttattgtcgttcgaatttgctacaagcttcgattntaaatttcgagcttcacgatatattacgcgactcaatcggacttccgagtgaatagttattgtcgttagaaattgctaccatcttcgatttttaatatcgagcgtctcgatatattacgggactcattcggac

SEQ ID NO: 217336 - DNA, 335 bp, Glycine max
aaattatattccatatcattgaaaattagaaagagaattttaacgacaataacatttcactcggaactccgattgagtcccgtaatatatcgagacgctcgaaatttaaaaccgaagctcgcagcatatgctaacgacaataacatttcactcggaaatccgattgagtcccgtaatatatcgagacgctcaaaatttaaaaccgaagctcgcagcatatgctaacgacaataacatttcactcggaaattcgattgagtcccgtaatatatcgagacgctcgaaatttaaaaccgaagctcgcatcatatgctaacgacaataacatttcactc

SEQ ID NO: 217337 - DNA, 457 bp, Glycine max
  unsure (1)..(457): unsure at all n locations
agctngngaggcttatgtactacttggactcttctatcctctatnntggggttagcctattagacaactcggattcagagaatctagtggatttaattaagggaagaggaaaactctatctcctaccagaaagatagagatatcccctanaatcatatattatctattattataggaaagataagataaaatatattttcccctatttttcattatcttagaaaggaaattgagatcttatcgtccaatttcatctctataaaagggaatcatcaaggttcaggcaaatcaactcttaatccaacctatattctaatacatgtatacttttacgtcgttaacttgagtgtcagagtgtctntgcaaatacaccccattatttatggagaagctcagagaagaacgccactgtgagaagattctaccaaatccgataaaaacacatgtgctaataaat

SEQ ID NO: 217338 - DNA, 354 bp, Glycine max
atgctggtcatatttattcctttcaaagatattaaatggtatttttttcattcaatttttaattcaaatcaatattattctactatgtaagtagattatattgtattattcattttattatatttatatttaattattattttattaaatacaaacaatttaatttttgtaacttttattcttaataacagaattttattctatttttggaatttttattcttaatgaatatttcattcctcttttaatatttttttaataagattctaatattatttaacgtactacgaaaaattatcgaccaatttattttatgtttgttaatattctctaattaacaatatatctttttta

SEQ ID NO: 217339 - DNA, 240 bp, Glycine max
ctcaaggaagtttctcaacaaaagcttctcaaggaagtttctcaaggaagctacctatgctataaatataagcatgtgtaacacttgttgtaactttgatgaatgataacattgtgaaaaaaacttcaaagttcaacttctctccctctttttctccttcaattttgtgatccccccctctctctcacattcttcttctctattgaagacttctctctaagctttatatccaatgcattc

SEQ ID NO: 217340 - DNA, 320 bp, Glycine max
  unsure (1)..(320): unsure at all n locations
gcagcaaaatcaaccacgggagagcaattatgacctctccncaacagatacaaccctggatggaggaatcaccctaacctcagatggtccagccctcagcaacaacagcagcagcctgctccttccttccaaaatgctactggcccaagcagaccatacattcctccaccaatccaacaacagcaacaacctcagaaacaaccaacagttgaggcccctccataaccttccctcgaagaacttgtgaggcagatgactatgcagaacatgcagtttcagcaagagaccagagcctccattcagagcttaaccaatcagat

SEQ ID NO: 217341 - DNA, 299 bp, Glycine max
  unsure (1)..(299): unsure at all n locations
accttggggacgtcaggtggggtgctattgcccaaaaccaagcttgaccaatcccaacccaacccgggcatagtcagtcagtgagaacctgtgacgtacctaaacaagtgagctcctggcagtcaaccaataaaagaacaaagaccacaaagcaaggaggctngtgtggtggctggccaactatggatcttgagtgatatatggaatanggcctcttgtaatcgattaccaagggtgtgtaatcgattacaaggcttaaaaatgaagacaggtaagtaagatggcctctggtaatcgat

SEQ ID NO: 217342 - DNA, 324 bp, Glycine max
ttatctcttgggtaatgttaaggaggatacccatctcacaaatgaaagttctcatctcaaaaaaatttagacgatctttgaagaagatgagagcctcatgaaacttacctgcttttgagccttggaattgaaataagattggtgtcacaactcacaatgcccattctaatgacataatccacaaatatcatgccttaaaggttatgtgtgcataatccagagctaaacggcacgctcttgccttattaaacctaatgtcaaactcatcttgctgaactaactagagatatgtgcgattaatctcataattatctatatttatca

SEQ ID NO: 217343 - DNA, 142 bp, Glycine max
agagcgtgtagagcaaccttcatacggatgttccaagagagtggttgaaagtgagaacccgctgatccagaaacataggttgataagagatcttgaagtgcgtgagggactaaaaaataaacaaaggggagccacaaagaaa

SEQ ID NO: 217344 - DNA, 436 bp, Glycine max
  unsure (1)..(436): unsure at all n locations
agcttcaaaccaaagcaacatataatctatgtctccgannacccccaatttaatggattttcaaggtttgagaactgaaattgagaatgaggtaaatttggagcaaactctcacctcacacaagtctataacatcaatctaaactttctcaaactggatttacacctaatattccaccgaatcaatattggacttctcaacacccaattttaccctaaaaatggctctttgttcactttgggcatttgtttttctctcttgcacaacccaagcttgctcataagttctagatgacatgttaaactatgattaactcactttaacctccaaataccactaaatccagatttggcctttcaactgtcaaaaccttactctttttcactcatacaccatattccactttctaacctatgtaactctcccttagtattac

SEQ ID NO: 217345 - DNA, 345 bp, Glycine max
tgattggagggagagagagagaaagagagagggaaacgaaattttgagagaagagggagaataatgtctaaactttgaactctaatttctcacaatgatcaaatgatgcaaaactgcacacataatgtctctatttatagcctaagggtcacacaaaattggagggaaatttgaatgtctattcaaatttcacttgaatttgaatttgaatttgtggagcaaaaatttcactcattatgattagtgaatttcagctatggttcaacccactaatccaagatcaattccaagattctgcactaagtgtgcttaagtgtcatgaagcatgttaagcatgaaagacat

SEQ ID NO: 217346 - DNA, 401 bp, Glycine max
  unsure (1)..(401): unsure at all n locations
ccgggatcttaattcacctgangctgcaagctgctgggatgcagaaatgttttttctcataaaatacccnggtaaattaatataaaaataaaggaactatttcaaaaattgcaaacaggaataaagtttgtatgatggatactttattatcaagagaaaatatagagaaaaaatcctgttccgatccccaattaattcaaaatgacatgtcttcatcttaatgaaaatgcttttttttcttcttttatgcaaccatcgatcgattcggaatagtaaaaatatgaatatttgagcacacaatattttttaattatcaaataagattatcataattgaactgaactcctataaataaaaaatttatacaatcatcaacgtttgaaggaacaaccaatactacg

SEQ ID NO: 217347 - DNA, 355 bp, Glycine max
ggaaggccatcttaaaagaatggttaaatttgttgaagctgatgaaaaatcccaagtcattttactgtggccagtttcttaaggatgttctgcatcatatgttgatgtgcaattcaattatgtatcttatactgcaatgtttctttcacatggtcttctattttaaacatacttttttttcctttctgtttttgggtatttggcaggcttttataaaaaaatggatactgaatacagatgaaaattttggattgcctgttaatctggaaagatgattatattctaccatatgttgaacatttataaaactcgattaattcaaaaaattaatggaggaactgacacatggagttat

SEQ ID NO: 217348 - DNA, 244 bp, Glycine max
  unsure (1)..(244): unsure at all n locations
agctggtcgaggacttacctgttgttatctaagaacgangaagaacgaatgaagagcgtcgtttaacggttgaaagctttgcgagattcctcacggaaaacgttacggaaacgtttcggaagcgcctcggcttatatattctttacggaaacaatttttccaagcaaattccatagagagagaagtgcctaaggggctggaatcccttccttcttcatttcctcccctatttatagcaaaatag

SEQ ID NO: 217349 - DNA, 341 bp, Glycine max
  unsure (1)..(341): unsure at all n locations
gctctgagcaaattcaaacgacaataactctttactcggatgaccgattgagtcccgtaatatatcgagacgctcgtaattgaaaacagaagctctgagcaaattcaaacgacaataactcttaactcggatgtccgattgagtcccgtaatatatcgagacgctcgtaattgaaaacggaagctctgagaaaaatcaaacgacaataacttttgactcggatgtccgattgagtcccgtaatatatcgagacgctcgtaattgaaaacagaagctctgagcaaattcaaacgacaataacatnttactcggatgtccgattgagtcccgtaatacatcga

SEQ ID NO: 217350 - DNA, 441 bp, Glycine max
  unsure (1)..(441): unsure at all n locations
agcttctccgaagggcatggatatttccagtttcctgaaaatatctaaaaatctcgccaaatggaagtccttctccttcttggaagtaccacaggatatggtacttccacaccttcattcacagcttnttctcttttcttctctctagctngntctcttccactcctctcttcattcttatttttttcatttttttcattttatttttatttttctacttctttttctttttcttggtcatttagtttctttttcttgaccattagttgtttttctttttcctgattgctttcacctctcacataatctttcttttcatcagtacctttcttttcagcagctttcttcttggatgcaacactatcttcaccctccgcctccataaacgtcttactctntatcatcacagctttatattcctccttgngattcttttctgta

SEQ ID NO: 217351 - DNA, 350 bp, Glycine max
ttcttcatttttctccatgtatctcctcacatgtcttgtgataaattttgttaacatgattctttagagtttccaccgattaaacttgctataaaagctagatttgattttctatggttcaaatttcttgttcttgttcttgaaccatgaattgtgttgagtttaagttccttttagttttgtcttgttattttttgtggctgaaacctaaaccgtaaaattcttacaaaaatattaaagtagaagaaaaactcaaaaatctagaatgacttgttcacctattgtagttgtgtcatataagtcatgtctagtcatgaaacttgtcacatacgaattcttatgttgtgctg

SEQ ID NO: 217352 - DNA, 405 bp, Glycine max
  unsure (1)..(405): unsure at all n locations
cttgcggattggtcttgctggaaaattatctatgtgggtctaaaaagaggcaaatctgatcatcatgctttgataaatgcaaaaactggggcaaatgaagagggtgagaatgagggagaaacccaagctgtgactgccattcctatatggccaagtttcccaccaacccaacaatgtcattactcagccaatatacaacccttctccttacccaccacctatttatctacaagggccatccctaaatcaaccacaaaatccacctaccacacaaccaatgctaaacaccacctttagcacgaaccanaacaccaaccaaggaaggatatttgcagcanaaagcctgtagaattcaccccaaatttggtgtcccatgctaacttgctcccttatctacttgataat

SEQ ID NO: 217353 - DNA, 348 bp, Glycine max
ttttgttaaggccagctgggttaccaagttaaccaatgcgtccagtttgccttcaagattcttagtttcagatgatgcagctgagtttgtagctacctcatgcactcctctaatgactatcgcatcatttttggcgctaaactgctgggagttggaagccatcttctcaattaaatttctggcttcagcaggagtcatatctccaaggcctccaccactcgcagcatctatcatacttctctccatattactgagtccttcataaaaatactggagaagcagctgctctgaaatctgatggtgagggcaactggcacatagttttttaaatctctcccagtattcata

SEQ ID NO: 217354 - DNA, 484 bp, Glycine max
  unsure (1)..(484): unsure at all n locations
tgcaagcttcanaccacagcaacacagaatgtaggtgtccttatcccctcaatttaatggaatttctaggcttgagaagtgaaatttagaatgaggtaaatttgaagcaaactctcacctcacacaagtccataacatcaatctaaacttgctcaaactggatttacacctaaaattccaccgaatcaaaatttgactcctcaacacccaattttgccctagaaatggctcttggttcactntggtcatttgtttttctccctagcacagtccaagatttcttataagtcctaaatgacatttcaagctagaattaactcactttaacctccatttaccacaaaatccagatttaaccttccaactctcaaagcctcactctttttccactcataacaccacattctcactntctaaccctagggtaattctacccttcatctctaatnagtgtccataagcaatttcagcacataagcatcac

SEQ ID NO: 217355 - DNA, 261 bp, Glycine max
ggacgtcacgtggggtgctattgcccaaaatccaatgcttgaccaatcccgacccaacccgggcatattcggtcagtgagaacctgtgatgtacctaatcatgcgagctcctggcagtcaacagattaaaggaacaaagaccacaaagcaaggaggcttgtggtatctggccagctgtgaaacttgactgatatgtgagatatggtctctggtaatcgattaccaagggtgggtaatcgattacaaggcttaaaattgaag

SEQ ID NO: 217356 - DNA, 472 bp, Glycine max
  unsure (1)..(472): unsure at all n locations
agctntggcgtgttgttcagtaatcctcaactttctctaattcagctccttgggattntctccttccttgcctttgatgagtagtccatccttgatccttttgatcatctcttcttgtagaaggttgactctagatcttatcattggtcccttcaactaatgtagtatttctaggtccttaagctctttgaataaccctctatcaaatactatacaattaacaatacatatacgctagaaactatatgattgataaaaaaatatacattagaaattagggttattagattattgtaatcatgtacataaaaaaatcaagctgaattagtttgttacccagctttatgttattagtttattgtaaagaggagaaaaaaataaatgttagaaactgaaatgaaagacatatagtatatatagntnnagtataatagtttcttttttggttaattttatgctaaaatatacaaaa

SEQ ID NO: 217357 - DNA, 388 bp, Glycine max
  unsure (1)..(388): unsure at all n locations
tttatattcctctctctcttcnnnnttttatagtttgaatcaaaaggttatagacataccatttcttatagccaaatcttgatatttgcttaaaattatgttaatttcatgatttaacaactaatccaagagttggttctttactcttgcatgtacttgggaatgccaaagggattgtatagtagtagtttcaattctgatattatgttctctttggcattatatggtgtttcaattccagtctttttacaccattgattatttcccctatccattatttttaggtgtatgcaatatgagaaaagaatgggatatatataccacgggatcgctaccttcacgaagataaggtttccttgttagtgtttaaatatatatatatatactt

SEQ ID NO: 217358 - DNA, 263 bp, Glycine max
ctgcagcttatcctagatccctatgttggactttgcttttttatacagccctcatatgtttagactaacttaaactaagcttcatcctcaaatccctcttgttggactatgctcagcttaaatagcttacgaaagtttatactaatttaatctaagcttatccctggctaagcgtgacttattgtcgccaagccttttgcttagcgcgagcctcgcactaagcgtatctttgatcatgcgctaagccgcgagtctcaagcact

SEQ ID NO: 217359 - DNA, 326 bp, Glycine max
aacatcaatgtaaatttaaagcgaactcatgcgcatacttcctttcgaacattcactcgcaccagatattcttctaactaagaaaaatgcacccaggcacaatcaatgcaccttcgttacctaaatcacttatatgtacttccaaggtgtatttgctacctacatcacatgcacttcctttgctaaatttacatacatgcatactcaaagcatgttggctaccaaaaattgcatacgtgcacattctggtatttctaatacctatacatatatcaaacttgtgatgaatctcggctacctacacaatatagtgctacatttcatgc

SEQ ID NO: 217360 - DNA, 366 bp, Glycine max
  unsure (1)..(366): unsure at all n locations
ggatcctcagagtcacctgaggctgcaagctgangatatggagacccatacatgtggttctattgtggcggcgggcgatggtgcacaacaattctccacatccacaaatcacgtataaaaccaccatcccctgttgcccacctccaactgagctcacgtactcccacgtagccctcatcctcattcctctcaacgccgggtccccatcaatcctcccaagcttccacaacatccaagaaattccacatcccatcatcatagactaacaaaaccaagcaaaacagagcaaaggcagataactctggccaaaacacaaaccataatcacaactttttctcacttaaagaccccagtaacatttccttc

SEQ ID NO: 217361 - DNA, 423 bp, Glycine max
  unsure (1)..(423): unsure at all n locations
gcctgcatatgaacatgagaagattcaacttccttttctcaagaacacaccaaaaatataggaaattttnnnnnaatatttcttcaaaggatcaatgcataaatagctctggtaatgatgaaaattcagaaaatttaagcttgatggtgaagaagtttggaaatttatcaaaagatccaaagacagaaaattctctaaaccttcaaagaagatagaaagtaacaacaacaccttcacatgcttcaaatgtgggaagcaaggtcacatcaaatatgaatgtcctatctaccttaaaaaacaccttgcttaatagaaaggaaagaaggatagaaaacagaaaaaagcctacatggctagtgagaaatacttatagtgttagtaatggatacgattacggtgcgagtgagaatcgatagacaacca

SEQ ID NO: 217362 - DNA, 301 bp, Glycine max
taagctctagcttctcaagggaagtttctcaaagaagcttctcaaggaagttttctcaagaaagcttctcaaggaagctacctagtctataaatagaagcatgtgtaacacttcttgtgagagtcttgtgagacatacttcaaagttccacttctctacctcttttattccttcaatttcgtgctcccccctctctctttctctccctctttcttttcctccattgaagcatcctctccaagcttcttatccaaggctcatcttgggggtgaagctcctttctccatggcttattccctag

SEQ ID NO: 217363 - DNA, 298 bp, Glycine max
cagctaaggaaatattcagcctgaaaagctacatggcctattgcaatattaaacatttgtcttctatgattttttttaaaattcttttattagcattcagtgttagtatgtttttttaaaaggaaatgtcagaatgggccttcctgagaatccctgctttccttttttttaatttcaaaacaaatatgcaactatactgaggctaagagattggtccataattaatcaaaatgttgcctatattccacaaatctttttctcatccacctcaagagctcaacagccctacatcttacaa

SEQ ID NO: 217364 - DNA, 451 bp, Glycine max
  unsure (1)..(451): unsure at all n locations
agctntgaaatttgaaagtactagctttttttattaaanncgngntncataaactncatgattactcttatcttaagtgtccaatcacatttagaagacatatattaatgcctcgatcattactcttattatatcatacgtgtaatcatttgcagaaccaattgtgaattatgtaatgagaagaatcatttcccctgtcccactttggactaattaataccgatcgatgaagactcatcattattttctatggatccgaacaagttgatttctctttctgtatgcatgcgtactaacagaaaccacacagcagttttattgatcttaattcgtccttttttgttctcacggaatcttaactcggcttttatttaatgtgatgcttatatattacatatactctatatatacgggctgtaaatggtcttctcttattaagagaccgtgtatc

SEQ ID NO: 217365 - DNA, 298 bp, Glycine max
  unsure (1)..(298): unsure at all n locations
attatacattttatttccatcttacaatgatttatttaatttaaatcattaatctaccttttattgtgngttttttgttaagcctactaaatgcttacaacgcccctgtttattttctaagcggagaacatcttatcttacctgatatcatgttccccatgctattgtttttgtccaatcctatgcattcatttatctgtaggtaattataaaatattacagtgtctgatattttgtcatatttcttgtttcagcgtgtgtattattataattgtaatatgtacctatcattttctct

SEQ ID NO: 217366 - DNA, 266 bp, Glycine max
  unsure (1)..(266): unsure at all n locations
aagcctttcagttgtgttggngtcgggaagtgattcctaggtccttatttcttcaaaaatatctcaaattatctctaggaaaatctctcatacctcatcaaagttatcttttcacgtcaggatactatatcgagattggcacatttgatgccgtatgttgcttgttattatatcttgacaattctaaaccaaagaataattgcattctgtttaatgggtggcaatacactcatacaaaatatgctttgttccccggatatgtatga

SEQ ID NO: 217367 - DNA, 253 bp, Glycine max
gttccagagagttctgagatgatttgttgtgtgaagatctacaaagatacgaaagccgctctgagagcttgagatgagtctgtgagttatcgtgagatcctataggcgaaggagacatcctcaccacttgtgtttttgcagactttcatctctgtcttctatttgttgtaaagcaggtttcctgactatgaaaagctaaatcctctgttggatcttccctgtaggtacctgatgcacacatatttctatctat

SEQ ID NO: 217368 - DNA, 322 bp, Glycine max
  unsure (1)..(322): unsure at all n locations
aaatatggaagtaaccgtcttgcaaaattggggcaaaagatgaatcgagtcacatcactgcttcgtctactgccaaacatatttaggattattgatgtccttgttacttccagtttcaccttgacaaagatgtcatggaccatgttgaaaatctaaattgattcaaccccatatcttgcataaaaattcgcaatacttcaactgtacatcattcgcatgcatccatgcttttcattggntgcatagctcgttgcattctttccttgaaaataaaataaaatgaacttaatcattgttataaagaaaaaagggacacgcttta

SEQ ID NO: 217369 - DNA, 222 bp, Glycine max
  unsure (1)..(222): unsure at all n locations
cccattctgttgtaaggtgtttgtgatgatgtttgtgatgtctgtatgccgaaattgctcatgganaactgttagagatgaaaggttcagcaaacctatggctggaaagcgacaatgtggtgttatgagtggacaaagagtgaggctttgacagtaggaaggctaactctgaatcctgtgcgaaatggaggttaaagtgagttaatactagcttcgaatgtt

SEQ ID NO: 217370 - DNA, 310 bp, Glycine max
ctgggaagcatttttaccgaggcagctcatgtagcttcctcaagaaagcttcattaagaggcttcctcaagaagcttcatcgtggcttctttgataagttttctcaagaggcttctttgataagctagacccttatctacccacacctctctattaattaaactcacctccttgaaaataattacggattaaaataacacaacgaatataatcaaacatcaaacatatttactaacaatatatagatatatattagggtgttacaactggtcccttcctatggagaatcgcatcacacctcatgtggatg

SEQ ID NO: 217371 - DNA, 340 bp, Glycine max
  unsure (1)..(340): unsure at all n locations
gcttcattgataaggtggagtttgtctatatatnancngcctgaatcggacctttgagttaaaatgtatgaccatttgaatttctcgagagcttnncgtgctcaatatcttgcgtgtcgatatactgtgcgcctgattcggaccctcgagttaatacgtttgaccattggaatttctcgagagcttccggtggtcaatttcatgcgactcaatatattatgcgcctgaatcttaccttccggtgaaaagatatgaccatttatattgctcaagagcttcgattgttcaatttcgagcatctcgatatatcgtgcacctgaatcggacctcccgagaaaaa

SEQ ID NO: 217372 - DNA, 304 bp, Glycine max
catggacggagatgaaaaagatcatgaggaagcggtatgttccggctagttactcaagggacttgaaattcaagctccaaaaactaacccaaggcaacaagggggttgaggagtatttcaaggaaatggatgtgctcatgattcaagcaaatattgaagaagatgaggaggtaactatggctcgatttcttaatggtttgactaatgatatccgtgatatttgtgagctgcaagagtttgttgaaatggatgatttgcttcacaaagcaatccaagtggagcaacaattaaaaaggaaaggagt

SEQ ID NO: 217373 - DNA, 402 bp, Glycine max
ctatttgctataaatatggggaggagtgaagaagaagatgttcaacttcttaggcacttctctctctctcgaaattgctggggaaaattatttccgtgaaaaaaatccaagccgaggcgcttccgtaacgtttccgtaacatttacgtgagtaattacacgaagattctcgaccgttcttcaagattcatcgttcgttcttcgttttcttcagtcttcaacgggtaagtacctcaaaccaagcttttcaattcattctatgtacccgtgggggccacattttgttcatgtattttattctcgtttcattacttttacaccccttttgacggctaaccatgattaagcattctcgctaattaaaaaaaaaaattccacgatgttgaatgataccgtatttcgt

SEQ ID NO: 217374 - DNA, 358 bp, Glycine max
tttccagctggggaattggcgagtggaggaacgccccgacatttacgcatcgagcataatgtaaacctttatggttttaaaagctctataattgggcctaggctttatagtttttcttttggttaaggctttgtgtattttgttttctaaatttataatacaaggatctttcttcatctgttcctacgtctctacccattctcatccatttgcatgtttacatcttttctgaaacggcagatccgatgacgagtcccctgaaggtactaatacttgtgatccgcctatcaacttcgagcaagaaacgaatcaaacgaaagatgaatggaatgacgatgtgtgacttcccccacaattg

SEQ ID NO: 217375 - DNA, 396 bp, Glycine max
cccggaagatttaagccaagcccctactttcgaggggcaactcccactttatgaagactatcccgggcaagacgatggggaaggagatacccatcttggccccctgctccacctcatagatccatccccgcatgaactaccccagccgaacatatgccgccatatcccggcctcacccacgcccgtaaaagaatcttttcccttcgcggaagataggggaaagattgaggcgcttgaagaaaggttgagggcagtcgagggcctcggcaattacccattctcggagttggcagatttatgtcttgtgcccaacatcgtcatccctcccaagttcaaagtaccagactttgataagtacaaagggacgacatgtccaaaggggcatctccggatgta

SEQ ID NO: 217376 - DNA, 217 bp, Glycine max
cttatcgctttatgcaaagcgcttttcaattttagcaagaatctctttggcactaattatttcatgtgtgacagggccttttaagacctcttgaatgccgcgctcaatgatcattagactcatgactcatgcgatttgagtgatcccagttctcatgatagtttcccctcatttagaggtattaggattcacccggaaaaaggtgtttctcaatcct

SEQ ID NO: 217377 - DNA, 480 bp, Glycine max
  unsure (1)..(480): unsure at all n locations
agctngtcaggttcaactataattaagcgcttgttgcatcctatggactgagcgaaaaggctcaggacatcaaacactacgcatcttttaaagcacatagcgaggatcagaacctcaaccctatgttcatttaaaatactgcgatgagaaaattatagaggacaggaacccttgggggaaaccaagaagaacatacaaaagataaaaacatgcagcaacttctttaattgccccagatcttaagcgtagtatcgcttgacaacgtcggagttcatgggtgaaggtagctcctcgtcatccatgttggcgagcaccagggcccctccttagaaatgcccttttacaacgaaaggcccttcgcagttcgaggcccactntcctctattgtcctttagagcttgggagactntcttcagcaccaagtccccttcgctgaacctgcgcgagcataccttcttgcaaaagtgtcttcactcgttc

SEQ ID NO: 217378 - DNA, 331 bp, Glycine max
tctaattatgtgggccattaagtctatcatatgctgacaatagccgataagcccatgaatctcttcgggggtggagtaagtgtctgccattgccttggccttggctaacaatcggtgaagttcttgactcccgttcaaggtaagagcaaaccgatccatccacatggttgcctcttggtgtaaagagtcgatcacccttcctctatcctctttttccgcatacacttgggcatactcgtccgcgattctatgctcgtgggccgtggctaaacctaactctttttggcacttggcgacgatagctaacattgtggtctctgtctcgcataaa

SEQ ID NO: 217379 - DNA, 376 bp, Glycine max
  unsure (1)..(376): unsure at all n locations
agctnnctaccttttgttcataaatgtagtntgttgttcgttntcggcttggctcggcatgtatgatggcatttcaagccaaaaggtctgacctttttgtattttatcatgagtttgttgttttgtatacaaagctttttgatttttcaagccaaaaggttcgaccattttgtattttatcatgagtttattattttgtatacgaaccttttcaatttttcttgggtggtttgttgttatatagcagcacaaaaacaaagcaaaagcttctacctttttattcataaacgttgtttgttgctcgttttcggcttggtttggcatgtatgatggtatttcaagccaaaaggttcgacctttttgtattttatcatga

SEQ ID NO: 217380 - DNA, 309 bp, Glycine max
ctcggaagaaatgaccattaaaatccttataagaggtactataaagggccaataacgactctcctgaaaataccagtaagagaaatccaaccacccttgttattttctttaacaatttagtggtggaggaataaatgagcaagagttatgaaatactcatcacacgaaaccctaaaggcacagatgcccactcatgcattcaaatgcaactcggtgagggtgacattcagctctcgacaacgttcacccgatacttttaaaagggaaataatgtgaaaagtaaaaagaggtggagtcatatacatgaat

SEQ ID NO: 217381 - DNA, 422 bp, Glycine max
  unsure (1)..(422): unsure at all n locations
cttaagtcacctgatgcatcaagcttaacttaataattataagccttgtgttttgttattccacccaaacgcacccttcttcaaacattcggtcataggacttgctatagtgctaaaattctggataaagcgtcgataaaatgatgcaagaccaaggaaagatctcacctccgaaactgttgtagggctcggccaagtcttgatagcatccacttttgtttgatcaacggatactccatctttagacaccacatatccaagaaacaccaccctttcaaccaagaaatcacacttttccctcttcccatagagtttttgtgctcttaaggtctncaaatatttgttcaaatgagtgaaatgctcctctatagatttgctatacaccaatatgtcatcaagataaacaacaacaaacttaccca

SEQ ID NO: 217382 - DNA, 356 bp, Glycine max
atacctcacccactcaagtgtatcacacaattatggcttttctctaatgaaacactcttgccttttaccactcttattccccttgagttcttatgcaattcaagagattatggccacaacaaagaacaattcaccaatatgtgtaaggtaaggctagagagacaaggaaaaggttaaccaagaaaaggctaacaatgtttttatgcacaaatgatggatataaaattcagaatttatgaattcaagtaacaatcctgtctgcaaccaatatattaccttaaagagattttttttaaagttctgaagcatgaaccattcagcccaattgtttttttttctttgaaatttgcttatat

SEQ ID NO: 217383 - DNA, 223 bp, Glycine max
aaaaacattgtcggcacgcaagcatttttaataaaatattgcgcaatgtcggctgaaaaatatcagtcggggctattgtacgaccgatgtcggctattgagttttcaattcaatccgagaatgaaatatgcatgatgtcggttaggatatgttcgatcgtcgtcatccgatgatgcttcttttttatacctcgatctgtcatctttccttgccgacgtcgaat

SEQ ID NO: 217384 - DNA, 317 bp, Glycine max
tagctccgactgatttttgtcagccgacattgagcatattttttttgtaaaaatctcgccgggagataattgttcttttacggcagaagaagttttcttgttttggtgttgcatataatatgtacaatgtatgtcggttaggattttctgtgcgagctcaaccgacgttttgtttcggctgaaactggcatgttgccatttattcggtcaggaaaacatttacccacctaggcaaaataatatttgccaaccgacattatgcctatttcatttagggattgaatagaaaactcaataggcgacaaacgtcgtgaaat

SEQ ID NO: 217385 - DNA, 409 bp, Glycine max
  unsure (1)..(409): unsure at all n locations
agctttaacanatgtcttacaaataatcatttctcatcaganaactaacaaaactacccctcatatctnccaaaaccctatacccacgaaaatcaagagggaaagaagtccacccaaacctggattttcgaagtcccactcgtagccacgcacttcacgaccccgaaaatgctctcctttcacgatttggggcagaaatgagcaccaaaggttggagctttgttggggtttcgatggagaatgagggaggagaaaatggcaacgtgagggagatggagagagaaggcttctgcaattnttctgctgagtgaagagaaaagagagagttgctntttggttnttaaaggctntttcctcttttcttanttatttattcaagctctgccacatgaccctatttgattggagc

SEQ ID NO: 217386 - DNA, 368 bp, Glycine max
atcccgggtggaggaatcatcccaaccttaaatggtcgaatccttcacaacaacagtaaaaacaacaacagccttatttctagaatgctgctggcccaagtagaccatacgttcctccaccaatccaacagcatcaacaacaatagcaacagccccagaaacaacaaacagttgaagctcctccgcaaccttcccttgaagaacttgtgaggcaaaggactatgcaaacacatgcagtttcaacaagagaccggagcctccattcagagcttaactaatcagatgggaaaattggctacacagttaaatcaacaacaatcccaaaattctgatagattaccttctcaatctgtcctgaataccaaaaa

SEQ ID NO: 217387 - DNA, 443 bp, Glycine max
  unsure (1)..(443): unsure at all n locations
gatcttaagtnacctgcagctgcagctgagcaaagtgattgaaagtcatantttcacaagaatgcaacatgtgtatgagatgttgagataaactatacagactacgagaagaattatgacgaanaaaatgagacgaaacagtttggagttatgattatgatcatgtcaagctgtgcacaagttaacaatgtacctattaaattgtggttgtgattccaaatgtcgagaaaaatgtctagattcaatttccatttttccatatcaagtgtgtttttgcatgtgtatgaaaaaatgtcatataaagccgaataagaatggtattcattctctgaccactttttaaggttgtgtgattattcatttataaccgaattaatcatattcttacatgatgttgtatagcgactctatatcctgagatgctgatcattacattagattct

SEQ ID NO: 217388 - DNA, 286 bp, Glycine max
gctgatctacatacaacaggtgtgctggactcaactttctattctgatgaagaatcatttgacatgaaagaaaacataatttctaatacacatatcattttggttgaaatcataatagatgggctgtgaattatacttatgtatcctgtgctcatattacaaagatataatcttgttgcccagtcactgtgaatccatgttgaaaactatatacaataaattaatcatggagcatccaatgttgcggattgttatagcctggataatgtttttataagcacgtctc

SEQ ID NO: 217389 - DNA, 177 bp, Glycine max
  unsure (1)..(177): unsure at all n locations
aattgattattaattttaatatgataaatataggatatcaatataaatntgaagcggctgtataagtgaccattaaaaggatttaataagtactataagggacaatatcgaatctactgaaatatcgcttaatataaatgctaccaaccttgttataatctataacattttagtggt

SEQ ID NO: 217390 - DNA, 244 bp, Glycine max
tgacacttcacgttgatgccgatactgagcctactccaatttcagcccctcatgttaagtgcttactacagacccactccactttcgccatagtccacctttgtgtgctatccaccaccaaacccgtgccatgttcaaacccgacaagcactatttccgcaatcaaaactcctttgtccaaattcatgggcatttttcagtcccccaccaatctccctgcaccacaccatactacccaccatat

SEQ ID NO: 217391 - DNA, 224 bp, Glycine max
  unsure (1)..(224): unsure at all n locations
acttatgtttcaattataatactgtccacacctcagaccgttatacaacatgtatttaaaattatgaaatgtgagtcaattgaccttctaaacacgcttacacttttcacaattttanatatctgttgcacatacaacgtactattttacacactactattcagttatttgaaatccctctgatcacacttctgtaatattctaagcatataacctcacataac

SEQ ID NO: 217392 - DNA, 343 bp, Glycine max
ctggtactatccttatataaaatatgatattctggtcgctcaaaaaaaataaccataacaaaaggaatggaatacctctttcagttgcctgtttcttgttaaaactacagcaatattgtattaacaagcaattatgtattttaatccttcaacttcaatccatttgctagcaatgatctgattaattaattgtttgctctcctgaaacagggacaaaaacctaattattatcttttaaaaacacaatatccaataacattctggcattctggtaatagttcagaaattcaataatttattgcttagcgggaaaaccatttcatgggaaccagccaaacctgga

SEQ ID NO: 217393 - DNA, 346 bp, Glycine max
  unsure (1)..(346): unsure at all n locations
gcttatagtgcctttaatatgtgtaagcatattttatgattgaggtgatttgattaaaaaaattagtatatctgcttgttttgttgtttgttggtgttatgatacataagattaatttgttttctaatattcctggaacagaactgaatgcttaagcctataacaaccaaaaaatacatttgacttgttgcagctttaatcccataatttccaatctctgtcttgccacataatctcttgttatgagatctccttgacttaccacgtcttatcccccaagttctcctaatgcagagttaaaataatcaaattcatgtataatgtngttctagttgtgcatatgaaa

SEQ ID NO: 217394 - DNA, 433 bp, Glycine max
  unsure (1)..(433): unsure at all n locations
agcttatncaggataggggatgtcactctgcttatgtttgggaacggaagcttgaatggagaagacacctttttgacaatgaggtgcaagcggcagccaatttcttggatgatatctcgcggggtcatattgatcgttggacatcagactgctgggttgggaaaccaaaacctaatggccagttttctacaaggagcgcatactgtatgctactagaaggagcaacatatcagactgtggatgaggctttagaggacctatggcagctcaaaatccctttaaaaccaacaacatttgcttggcgattgatcaaagatagaatcccaactaaagggaatttgcggagaagatagctggagaaaggctntgcccagccctacaactatgggtctagtaatttatcaacaacattnnttgattanggtagtagtgc

SEQ ID NO: 217395 - DNA, 267 bp, Glycine max
actatagcacctgacctagctcttcctgacctttctaatacttttgagctagaatgtgatccctctacagtgggagtcgaagatgtattattacaacgtggacaccctattgattattttaccgtaaaacctcatattgccaccctcgactaccccacctatgattaagagctgtatgccttaatagatagccctccagacgtgggaacattacctagtttccaatgaatatgtcattcatagtgaccatgaatcacttaagttcat

SEQ ID NO: 217396 - DNA, 431 bp, Glycine max
  unsure (1)..(431): unsure at all n locations
agacacaactaaaagttcaacttctctccctttttcttccttcaattttgggctcccccccccccccccgtctctctttctctccctctttcttttcctccattgaagcatncctctccaagcttttatccaaggctcatcttggtggagaagctccttcttccatggcttattccctagtggatggcgcctcctctcacctattctcctttgtcttccgctgcatctccatggtggaaaataaccattgaaggacctcattgaagctaaaagatccagcctccatagaagccccacaagcaagcttccatcatcatgatttgcacacttgattagaggctgtcgtcccttgagacggacacgtagggtgctaataccttcgccgtgtgaaaaacaactctcaaaccctcattttaaaatacacaaaccat

SEQ ID NO: 217397 - DNA, 346 bp, Glycine max
aatgaccttattgaagctcatagatccagccaccatataagcttctcaagcaaagcttccatcactatggcatccacatctcatacacatatagaatcacacattacatgtcacactcatttcaatatacataaagtcatgttcatagtcaaaagaaacaacattccctaacataattcaatcacaatcatgcttaagcataattgactaagtagtacactatctggtcaatccaaattatatatcattttcctattacaacaattatgtattaacacctatagtctgtatatcatgtcttaagttcttggggtattactttcttcatttaattttacgctccttc

SEQ ID NO: 217398 - DNA, 345 bp, Glycine max
  unsure (1)..(345): unsure at all n locations
tcatttaatttatctttcgtaccatgtgaatccttcacaacatttcattataggaacactcaaaaatgatattaaaagttgatagactaaattacatcacctttagaaacgataattatcaaaattaatatttccaaattaaggctgtctaatttgattgattactcgaattgttttgactactaatcaaggatntaaattacttgtctccatgagtgtctcaattcatgtccgaccaataaaaacatgccatgtaatttaaaatatcctactagacttatatgttgttcctatcttgccccanaanacttcctttatagtgtatccttctcctcaacactaact

SEQ ID NO: 217399 - DNA, 252 bp, Glycine max
catacatgacctattgtacttacatgcatcaacatggagcaattgatcagcctaaagcttatgctgcatacatttacaatagaccccctcaacctcaactactaaatcaaccacatcagaacaattatgacctgtccagcatcatacacaaccctggatggaggaatcaccctaatctcagatggtctaaccctcaacaacaacaactagagcagactgcttcttcgctgcaaaatgctgctggcacaatca

SEQ ID NO: 217400 - DNA, 293 bp, Glycine max
  unsure (1)..(293): unsure at all n locations
agataagcgagtttcattatttttaaactgattttttntttcattctctcacatatcaaacccaatttccttattcctgtcggtgcaatattatttgatttatttccacctctcgttctatacacaacgaaaaaagaaaatagcctagaaataaataaaagatagaaagagagataagttgaaattagtacgaactagtacgtgcaggattcattggtttaaaacttatntttactttatttctccttcactaaatactcaaaattatttgcttcatccttatattatttcct

SEQ ID NO: 217401 - DNA, 171 bp, Glycine max
cgtatgaattcttcctgcgtatatatcttcccttctaccttccatcacttgactctccgcctcacttattttgtcgtctcctttttacttatcatatatttcttgacgtcacagcctgagaattctatagaccctttcgtttaccttgtgccaacaattctcaatgactag

SEQ ID NO: 217402 - DNA, 427 bp, Glycine max
  unsure (1)..(427): unsure at all n locations
agcttcttcgaagggcatgaggatgtcttattttttctgaaanancnaagaatctcgccaaatggcggtccttctctgtcttggaaggcaccacaggatatggtattttcgcaccttcattcacagctttttctcttttcttctctctagcttgttcacttctactcctctcttcattcttattcttttcatctttctcatttttttctttgtctacttctttttctttttcttggacatttaattcttttttcttgaccattatttgatttcctttttcctgaatgctttcacctctcacatcatctttcttttcatcagcacctttcttttcaacaacattcttcttagatacaacactatcctcatcctccgcctacacagacctcatactccttgtcatcacaactttgcattcctccttggg

SEQ ID NO: 217403 - DNA, 347 bp, Glycine max
ttctcactcgtagtttcaaaatcttatttttgcactcttgaatgttggaaagttgaatctaaactccctcattcttgtttttgaatttcatggaacatcatcgaggtatgggggtctttccaactcttgaacccttttcttgttgttaaacttacttgaatatattgttgtcttgaaaattttgtattgctatcgtgttctggatgtgtgtgctgaactatttttcttgagattttgacgccaaagatgagttctttggagttatgagtaaaacaagtaacgagaatttttggaagccataatctcagaacgaaattgaactggttagcgctgttgatggacttttt

SEQ ID NO: 217404 - DNA, 459 bp, Glycine max
  unsure (1)..(459): unsure at all n locations
agcttctaaactntgtacgagaatgatctctgttccactngntagacaagtggcctcagatatcttaagaagggggggttgaattaagatattccaaacttttctcctaattaaaaatctatcttactttttacttaagttatgaattcccttaatgacaatcttcttaaatattaattcaaatgaagcaacttgaattatgaatataaagcaataataaataaaggagattaagggaagagaaaatgcaaactcagttttatactggttcggccacacccttgtgcctacgtccagtccccaagcaacccgcttgagagttccactaacttgtaaattccttttacaagttctaaacacacaaggacaacccttcctttgtgttagagatttttacaacaagagactcacagtctcttaatcccttagagaatgagaagaagaagaggaacaaatctc

SEQ ID NO: 217405 - DNA, 331 bp, Glycine max
aatatgttcaagaaagagggcgaaacctttaaagaatatgcgcagcgatggagggatttggcggcacaagtagctcctcccatggttgagagagagatgatcaccatgatggtagacactctgccagtgttctactatgagaagctagtgggttacatgccgtccagctttgcggatctagtgtttgccggggaaagaatcgaggttggattgaaaagaggaaagtttgattacgtttcctccacaaacgcgaatgccaaaagaatcggggcaacaggggcaaaaatgatagaatgagatgcccatgccgtctcttaacacccgcgtgggt

SEQ ID NO: 217406 - DNA, 440 bp, Glycine max
  unsure (1)..(440): unsure at all n locations
agctccttggggccatatgctagaattttttcattntgggaagnnagnnncaccaagaaatgctaccttcaaagcaaaaacggcatgcaacctcctccaataaacacaaacatcaatgtaaatntaaagcaaagtcatgcacatatntcctcacgaacatacattcgcacaagatattctgctaactaaaaattgcactcatgcacaatcaaggtatcttcgttacctagatcacgtatatgcatttccaaggcgtatttgctacctaaatcacatgcatttcctttgctaaatttacatacatgcatactcaaggtattttggctaccgaaaattgcacacatgcacattcgggtatttctaatacctatacatacacaaatttcgtgaggaatcttggctacccacacaataaggtgctacacttcatgcttattcaa

SEQ ID NO: 217407 - DNA, 371 bp, Glycine max
  unsure (1)..(371): unsure at all n locations
cctttnccctatacggtccaactgaacgatacaccaatgatgattgctaatctcctaaattctacattgctgacatgcataacatgaacaaggttctggctccaaacatgaaattcatagattttgattaggtgctatttgttcctaatgaatccaatgggctactactactacctagtgctactaacaaagaaagtggtttctctgccctatgccctcaacgaaaaatgattcccttatgtatggtatctacttatttacttatgtaaattttgtgtcaaaaaatatcattcagctatatgctgctatctgtaacaatattatgatataccacttcatgattcataacttcaaagcttaaacctacattg

SEQ ID NO: 217408 - DNA, 232 bp, Glycine max
attcttgtattatatgttgatggcatccttctggcttgtagtgatgtggattttctactcgagactaacaagatgttgacaacttaattcgatatgaaagattttggcgacgcttcttttgttttggggattgacattctctgtgatagatctctgggtggtcttgcattgtctcaaaaaaataatgttgaaaagttcatgaacaagtctaatatgaaattgtgtaatcctt

SEQ ID NO: 217409 - DNA, 349 bp, Glycine max
  unsure (1)..(349): unsure at all n locations
cacaactctatttttcttttcgtcaaccaaaactttcagagaaatttgttcctcgggtgcacttgaagccatggtataaagcaaatacacactagacacgatgataanttctttcagctaagcactaatatatacaaagccttccacgtaggtaaagcaagtaccactactgaacatgtttaagaaataaaaagggcaaataattaaaacactagtttgcaaaaaattaaaaactattaaaaaaaagtattagaattaatacatctttgacaactcttgatgcgtgtaaatgtgatttatagnanaaaaaatatttatgtatgtattctttcataattctttggacatc

SEQ ID NO: 217410 - DNA, 271 bp, Glycine max
  unsure (1)..(271): unsure at all n locations
acataaaacatgtattcattntacatataatcacatgatgacaaaagttcaatgcacaacaacggtgtcaccctaaaggctgaatctcaacactttgcaagtatgaatgacgccaatccctgtgtagcttccatcctttactttgggttcattgatgaaatttgggaacttaactatgtgaaatttaaaatatgtgttttcaaatgtaaatgggttgacagcgacacccgcgtgcgcacagatgatataggatttacattgggagaactaa

SEQ ID NO: 217411 - DNA, 352 bp, Glycine max
  unsure (1)..(352): unsure at all n locations
agctntacaagataatgcttatcttaatgcaaaaaatgtcatgctaatctctctgattntataatgaactgacccctcacccagaaacagctgaaacacgtatgtgtggaatatcctactatttatatcaacatagaggccatccaacacattttaattgtcatacatatatgcatttgaaaagaacatacattctcatgcctaaggcattgcgtcaaaactcacacttaatttatatcctaaacattttctatttacaaactacctacatatgtttgaaatatatatcatacaaatttttattgtttcattcacatttatttattatggcaagctattacattatgcacac

SEQ ID NO: 217412 - DNA, 362 bp, Glycine max
atgttcttctgaagatcaccatacagatctttgtccttctttgcagcaatttggaatcaatgagcaacctgaagcttatgctgcaaacatttataatagccccctcagcagcaaaaccaacaacagcaaaataattatgatctttcaagcaataaatacaatccaggtttaagaaatcatccaaaattgagatggacaagtcctccacaacaacaacagcttgtccctcctttctagaatgctgctggtccaagcaagccatatgttcctcctccaatacagcaacaacaacagtcacaacttagacaacaagcaacggaggctcctcctcaaccttccttagaagagttagtgaggcaaat

SEQ ID NO: 217413 - DNA, 341 bp, Glycine max
  unsure (1)..(341): unsure at all n locations
atgcacttttgattgaaatttgcttatcgtggtgaactgtcgcattgtgtccttcaacgtacaagaattttcggttaccatcactttgcatatcncaataatttcttttcttcttatcaatccccggcgatggatgccaactaggacttcccaattatgatatgaatccaagataacttaccatccaacttccctcaccactggttccacaacctgaaggacaccactttctactccgggttttttaacaatttatttaccttgacgaccatctttaacccataaacaatgaactttcttgtacggcttggcaattatatactgacaatcatttatgcact

SEQ ID NO: 217414 - DNA, 330 bp, Glycine max
cattaagacattcatttaataactatgtctaaaattattttatgcagaaaacattctcctaggatctatcaaaatcctatgaagaataaacgaagcccatagtctagaagacattgattctcattaaaaggcatgctttattatcgcagaccaactattatgaaagaagtggcttctctattgaagtataaggcacactaacctatctacatggactttgcatgaagaaaagatgtgcatttaatgcaattattaaatacctcaacggactcaagacctcagacatagaagaaagtgaagtatccaaccatcgagagacaatgaatactt

SEQ ID NO: 217415 - DNA, 422 bp, Glycine max
  unsure (1)..(422): unsure at all n locations
ttaagcactgagctcagctgtaaaccgactctatgtcgacttttttttgntggctctaatataaattagaatatttttttgtttgtttgcacactaactaactttcatttgtcttacaaacagatatacaatcttagcacgtaatcttttctctcaagatattcaaagtgttntgagagttgttataaaatttacaagaatttatagaaagctttttatagaaagaatttgaataagagcactttagttagttcttcatgtcttcaaagcttttggtgtttataggccttctttaacaaatgtatgttggctctaaatgaataatttttttctctttagcttgcatctgaaaaatgtggccattggagcatttaatatttgcattaaatgcatgtacttcttcatactagaaaaccactttt

SEQ ID NO: 217416 - DNA, 354 bp, Glycine max
cccagctgaaaatggacctgggagcaatgtattatatccaatcttttgccactccctccagagaatgaggaaaagcctttataaagatatgatcttcttggacatcagggggcttcatagtggaataaacaatatggaaatccttaagatgcttatgagaatcttcacctgcaagaccatgaaacttgggcaacaaatgtattagtccagtcttgagaacatatggaacacccccatcatgatattgaatgcacaagcttgcataagtgaaatcaggtgcagctatctcccatagagtcctctcatgatgtggaggttgagccatgttctcagtatgaaaaataatatcggaat

SEQ ID NO: 217417 - DNA, 390 bp, Glycine max
  unsure (1)..(390): unsure at all n locations
tctcacactattaaaggtccctaaattattcatggtgttctgtttattctagtcttggatcaaaatttgcttagtgttgctcagttaataaagaaaggatattcacccttatttaaaaataatgggtgcatcatattggattcaaatgattatgaagttattaatggtgaaatgtgtgataatgtttttccaatcaatttgaatcaagtgaaacaagttgcacttgtttctaagcatgatgattctacattatggcacaaaagggatgatcatnttaatatggatgcattgaagttcttgtaaactcgtcatatgatgagagacatgcctatgatgggttatnttgatgatttatgtgatccttctccattagggaaaatgcacagaaag

SEQ ID NO: 217418 - DNA, 322 bp, Glycine max
tacttattaaagatgacaattcattaaatattgcctacttataatctacatttttgacataatatggaagacatattctctatctccctctgcctccctcaacgctgtggtaacttgtttaacctcattgtcaatcaccatgtactttgaaaagagagctttatgtcattggaacaaagaaaatagtccaaattaattttgccacatatgtttatagaacaaactctttgaattatatataaagtttaaacaacctaaataataagttaaattaaattgccaatagatcattcaaaatcttttaactcaaatatatatcact

SEQ ID NO: 217419 - DNA, 453 bp, Glycine max
  unsure (1)..(453): unsure at all n locations
agcttgcctgtccgatgcagtagtaatgatgtgtcctatttatgttgnggaacggttacgaacccggaatgggtttatggaaagacaacggcggcatgactaacctgataaatgccaaaggaaatcgtgggaagtatggtttaggctataaacccactcaggcggatataaagagaagcatcgtgggaagaaagagcggtggtcaaagctcgcggttgaggcaagaaagtgaaggaagcccgccctgccacataagtagaagctttataagcgcgggtctgggagacgaaggtcaagtggtcgcgatatacgaagatgatgttccgagtacattggatttggtacgaccatgccctcctgatttccagctgggaatatggcgagtggaggaacgccccggcatttacgcaacgagcataatgtaaacctttacggttntaaaagctctatagt

SEQ ID NO: 217420 - DNA, 316 bp, Glycine max
acttgaatggtcattattgtcaatgcagaatgtattctgcgcttcactatccatgttcacatattattgcagcttgtggttacgtgagcctgaactactaccaatatatagatgttgtttatacaaatgagcacatcgtaaaagcttactccgcacaatggtggcctcttgggaatgaagcgactattcctccttctaatgacgcatggacacttatccctgacccaacagcaattcgtgcgaaaggtcggcctaaatcaacaaggataaggaatgagatggattgggtcgaaccctctgagcaccgtacaaaatg

SEQ ID NO: 217421 - DNA, 383 bp, Glycine max
  unsure (1)..(383): unsure at all n locations
caccaatgtctcttctatcaccattagtatcatntattattttattatcattattgatcatggccactatcattgatagagacaatgatggtgatggtgatagtaataaaggtgatgatgatagtgacaataataataataacatatgaataatttacatataaaaaaacatattaatgattccttaaaggttgtaacaagtatatcttaatctcaatgatatattatttttaatcttgatacatacattattaattattaattattcatgtattctcatataaataagtattcacatatacaagtcactctttctatttatatacatattaaattaagaaataaatagaatattatttaatcttaaaatttgttaacataaa

SEQ ID NO: 217422 - DNA, 365 bp, Glycine max
  unsure (1)..(365): unsure at all n locations
tttcttttataaatcgctccctcaaccaccattctacaatctacctnctgtcctctttcatcgcttcctgcaattattcattaacttgggattcacgttttgttatggagcccctcttaagtcttaattcttcaatgtacaatttcagattgtccgaacttcgactgctatgagaaacaatggggtgaattccatgagatatgtgtcaccgtataacattggtatctggcagttcatttgcattttttgagagattgaattgatctcaaaaaatccatgcaagacctattttccattgtgatgttggttccttctccccgatacaaaattgcatttaactctaattcagccgttatgttgctccc

SEQ ID NO: 217423 - DNA, 435 bp, Glycine max
  unsure (1)..(435): unsure at all n locations
agcttaaagatccagcctccatagaagttcctctttaaagcttccatcatgtgtggccttaggaacaattagcggttttgttgtcaatttatgtcaattggtagtatgtaagtttcgtgggtgttttggtactgctcatgaaatctgctcattgtgtgcaaaatatgaatatgtgctttttgtcacttgcatggaagtggagtatgtaagttatttgtatcactggattgattgattaatgttttatctttctatgatatgtacatgtacttttatctcgatggcattgataacatggagttattaaaagattaattaattntagtagccttttcctaaacaatgtatatatttgtctataaagacattgaataagataagtgagttacaataaacttattggtatcnttatattttatcgatacaaaatgcata

SEQ ID NO: 217424 - DNA, 337 bp, Glycine max
ttaatggtgtagaaatggttattgaagctgcagttaggaaggcaatagccagactagacatatgtggagtctgcaagtttgaagaatctattgatggttacagtaagatgcaaaattatagaggtatgctccttgacctagtaaggaatgtgaggaatcacctacgtgtatgtggtttaactattgaagacagaatgctcatgtacctcataacatacattctcacaccaaggtccagcaaccacgcacatgtgactgacaacgatttataaattgtgtatggtctaaaatctaatattcaactaaattgtgtacttttgattgaatcatcatgttg

SEQ ID NO: 217425 - DNA, 249 bp, Glycine max
actttgcaatgttctatctaatggagacagcaacaaccaaagtgagtagcttccgtatcaaataaaagctcgccatcagactttaaaattttggggaactgcgtatatgaaaatgctcgcgtgaaatatatgaatactatactcaataataagaaggaaatctcataaagctgttaaatgacttaatagcgcggggtaataaaaaggaaaagagaagatcgattgataaaatactttatcacattcata

SEQ ID NO: 217426 - DNA, 350 bp, Glycine max
  unsure (1)..(350): unsure at all n locations
atttatttctgtatggagttcgtgattgttatttaatgggttacgattngtaggttgtgctatttattatattgaaagcaatactatgcccactaattgtagcattcattaatagtgattggatatacttttttagtacaaagtttatacaatgaacttttttttcacaaatgaactttttctatttgataaacaaaccaacccagttgtactttttattgataacaaacatgtttggtataagattattttactgcccatggtttataagctatttcaagaagctagcaaaattctcctgtataactgaattaaacatgcactaagatgtgattccatgctgctactgt

SEQ ID NO: 217427 - DNA, 338 bp, Glycine max
  unsure (1)..(338): unsure at all n locations
aaatcatcctactatatctatnttaatcgacgggcgattaacaaaaccgtatgtaactatatatgaacaaatataatttttataaaaccgactttgtaacatacacatcataggcggtcgtatacaaattgtgctaatggctctatatagttggcatcaaattcaaaaatgtcaccacgtcatgtactacatacgtttttaaatataccgatgtaaatatcaccataaagaaacttacttttgttaagtgaaagcctacctacgtatgtataataaacttatttaacatcgatgccaaatattgttaatcacaattattactcctagacccatattta

SEQ ID NO: 217428 - DNA, 423 bp, Glycine max
  unsure (1)..(423): unsure at all n locations
agcttcataacaccatgattgattgtccttattatttctcgnngagngaccaacagtaacttaaacaaactcctgcaggaaatatgagagtcataaaattcagcaggaggcagccaaagaagcgataaacaggtaaacatatataagacaattacttcaccaaggtgtgttatctcagaaatggtctttgcctctgacttcaaaatgaatgtttcctttgatgataactgaggagaacttgaaggctgtgaactccactgataacgacgtgtcaaaactgaatggatctcaatgcccaattctgaaagcctatacatactaaatcaataacagactgaaggaaagataaacacacatatattaataacaacatcaggaaaatacttcagattgaattcttcaattggtgccactggctgatta

SEQ ID NO: 217429 - DNA, 423 bp, Glycine max
  unsure (1)..(423): unsure at all n locations
tactcataccgctctacaatctctccacttgtggtgatgacgaccctgatatcgataaacacatacacattctctttactagttagtcacccgcnnggcgccatattctccccctttttttttgagtttaagctttacttaaattaagatatttaattatgtgagttcttgatttaatccctattttctctccccctttggcatcaacaaaaagccaaagtgcataacaaatataaagcatacataaatgactaaccatacacaagacattcattgaagaatctaaaccaatcatgaagcataaacatgaataacccacattataatataaaccacatagtcatataacataattcatagatgttcagctgtactatacgaataataaaagaaatactaaatgttcaaatgtcataataatat

SEQ ID NO: 217430 - DNA, 393 bp, Glycine max
  unsure (1)..(393): unsure at all n locations
ggcgcccctctacctcttttcttatctttgctgaactccaggctanaataccattgaggaccttattgagctaaagattagcctcatagaagcttctaagcaagcttccatcaataatgatattgagatagatgatgttgatgttgataatgacattgagatgagatgatgttgatgctgatgactcattgagaagatgtatgttgtgtatgtacatggggggtgcagtgaccatgctggatatccctggagggagaaatagagtgttatagactcttaagcatccttggagagagaaggaaatggcttataatcttatctatccacgtcagtgcattgtagtgccatgtcatacttatattcatggaatagtataaaatttcagaagactct

SEQ ID NO: 217431 - DNA, 355 bp, Glycine max
ttgcgacaggtatagatttctgattcaaggccagctgggttaccaagttaatcaatgcatctagtttgccttcaagcttcttagtttcagatgatgcagatgagtttgtagctacctcatgcactcctttaatgactatggcatcatttctggcactaaactgctgggagttggaagccatcttctcaatcaagtttatggcttcaacaggagtcatgtctccaatggctctaccactggcaacatctatcatacttttctccatattactgagtccttcataaaaatattggagaagaagctgctccataatctgatggtgagggcaactagcacatagttttttaaatctctc

SEQ ID NO: 217432 - DNA, 274 bp, Glycine max
  unsure (1)..(274): unsure at all n locations
ttgagcttatctgaaatatcttggttntaatgtgacagaaattgatttgggatttttagtcttcatcatttaatttattttgaccagtgttaatcctcgatatcattaacaaatcaatttccacgtttatttaaaattatgttaccgcttttactaatgagtttaattgccaatttaattctctgattcttttttccattntttatctcacctcacatactatatgatgtagctccatgtggagcttgtaggccttggatcttcttaatcaatg

SEQ ID NO: 217433 - DNA, 357 bp, Glycine max
ttgatgtcattgcatatactaatagatattcatattttattatgaaaaatttatagaaaaaattaaataaatagggtctgattaaacaaaacaaaaattaaatgttttttgtgttaatagcttaaaaattatataacggaaatagacatttacgagtgtgatatagctcttccaaaatattgttgcaatcattataaaattttctaaattataataattagtcacaattaactattaacgttcgaatatatttctcggattttttacatttttggggactaaattttatattttcatctatcaaggacgcatttatcaacggagtgaaaagatgaaaagtcaaaataatattacatg

SEQ ID NO: 217434 - DNA, 308 bp, Glycine max
atgacgcaaagctcataagtcaagatcacttcatgataacaaagatgatgacattcaagattgtgttcaagattgagtcaagaacacttcaaggatcaaaagaaaatttgatttcaagaatcaagattcaagaataatcgagatcaagatccaagattcaagaatcaagagaagacttaattaagattagtattaaaaaaaaaatttcataaattgagtagcacatgaatttttctcaaaaaccttctacaaaagagtttttactctttggtaatcgattaccaaattatgtgaatcgattaccagta

SEQ ID NO: 217435 - DNA, 362 bp, Glycine max
gtgcataaaaaagttgaataatgctaaaataagcaatcctatttccttgatgtcacccatagtcggtatgtacaacttatagaattcctctctgaatgcaatcactaacctaaatatagtttataaaccaacatgaataagacaattagaatctgtttgatttgtataaatttaagggacaacaagatacatctactatattatagtgttttgacttttaaaggactaaagacgaattattgaccataattgatatattagcatttgtatatcactaactcgctacttaatatgtctctcaactttgaattacaacttcattgcaactcatcatttgcgtatgctttatatacctgatacaa

SEQ ID NO: 217436 - DNA, 96 bp, Glycine max
  unsure (1)..(96): unsure at all n locations
cattattaaaccctaaatcaacatgggtagttntgcttacatcaaacatgtcaagttagtataanttcaacaagtttcttcacaaacaactaccct

SEQ ID NO: 217437 - DNA, 360 bp, Glycine max
aatacttgttgtataatacatcctactttttatcacgattttttttttggttggtcaagcatgcattagaaccttgtattttaaggttgatggaccgaaatcgatgtccttttgaacctctacaccaataaataaaagggtttaatgttacttttggttcgttctgttttgcatttgtttcatgttgttacattaaactttgaaagtttcattatgatagtttaagtttttaaaagtgtctcattttggtccttacgagttttgttagcaaattttagtgtcccgttaatattttaattgtaaaacaagtaattaaaagagtgacggttaaaaactgtcactatctaatacctaccttta

SEQ ID NO: 217438 - DNA, 415 bp, Glycine max
  unsure (1)..(415): unsure at all n locations
attctaaatctacgagagtgtctatggaagttactgttagatcaagtagcctcggaataattaagaatggggggttgaattaattattaacgaacatttactaattaaaaatctatccttcttaatattaccaaatgtaaaaacaataattaaagtgcacagcggatattaaaagagtagggaagaagaagacaaacacaagagatttatactggttcggcaataacccgtgcctacatgcagtccctaagcgacctgcgatccttgagatttcttttcaaccttgtaaaaatccttttacaagcaaagatccacaagggatgtaccctcccttgttctctntgaacaacctagtggatgtaccctccactagaactgatccacaagagatgtaccctctctttgtctcaatcac

SEQ ID NO: 217439 - DNA, 272 bp, Glycine max
ttccctctaatctaaagggatggacactacaccttttgagatgctttctattgagacttctggcaagaacatgattatagacactcttacatatttaattgtactttgactccatctagagtgttttggctaaagaagtttcttgttgttggagttagccctaatgaccaatccatttcagactatatttgttatagggatattgttttatatatgttatatacatgagacatgtcaactattaatgtattatgtttataacataataatgt

SEQ ID NO: 217440 - DNA, 396 bp, Glycine max
  unsure (1)..(396): unsure at all n locations
agcttggctcagcgnttatgcgagacggagactatcttgctatctatcancgccaagtaccaagaagagttatgtctagccgcggcccacgagcatatgattgcggacgaatatgcccaagtatacgcggaataagaggctagaggaagggtgatcgactctttacaccaagaggcaaccatgtggatggatcggtttgctcttaccttgaacgggagtcaagaacttccccgattgttagccaaggccaatgcgatggcagacacctactccgcccccgaagagattcatgggcttctcggctattgtcagcatatgatagacttaatggcccacataattagaaatcgntaggaaacttgtatggtctctaagaccttgactagatacgacttc

SEQ ID NO: 217441 - DNA, 323 bp, Glycine max
tgacaaaccctatctaaggtggtgcggccagaggatgtcgtataccatgagagggccaaatgatgatggtaggtctgaaatttctatgaccgacatgtagggatgtgaatagttgccaacgattaaaacagctagaaaaatttaccgtcataaattatatgcatgacttcattacttaacgtcaacatttaatgatatgaatcggaaatcattgacagacaaaaatatgaacgataagataggttaattttttttgtcaaggactaaagttaaaaaactaaaacatttgaaaacaaagtatagtatccaaaatattgttatgt

SEQ ID NO: 217442 - DNA, 328 bp, Glycine max
gccctgtacctcctgaaacgagaaagaaaccactctcgcggttgacagaagaaaaaaattaataatatggacaaaatatatattaaaaatcgaaattgtggggaaagtcaatttcaatgtcagagagtctattatgggttctaatcgactagagactctgaaaccctaatccgtaattcgcgctcgggatcttcgataatctgcgggacgaatcgatatttcggtggcatgtcgggtgaagtgagtatactttcgaataattgtattttttcggtggtataaatttcaatatctttgcttggaggtggatgatacaatgaccgcatgc

SEQ ID NO: 217443 - DNA, 228 bp, Glycine max
ctaccaaggatattttttgaagactatagcatggacccaaaattgaccccctttaatcgataatcttcaggactaacaagagaaccttatagcaatctttaaggaggaatctctctagagctatccacctgacaagtcaattagtacttaaagctagttaacctagattaccaagcagtgccctttgaaaaagtttttttccgttgcataagtagtaccgtttgctta

SEQ ID NO: 217444 - DNA, 405 bp, Glycine max
  unsure (1)..(405): unsure at all n locations
actctttactcattctaatttcttactctcaacctcatcttctcactcacctatcgaaccgcctgcggtnggctcacataacgcactggagtttacaaaatggtggtattacatctactaaaatccagaatttaaagaaggacctgaatgctctggaggctggagtcaatgggtcaaacatgtctcaagctgatatggagctcaagatagccttgcaagaacagctgtggacagcagctatagcttatgaatctatgacgaggcagaaatctagagtgaagtggataagataatgggatacaaattcagcttattttcacagattgattaaccatagaatgagggtaaatgcttttccaggcttgttcatggaccgagagtgggtccatgaccccaatattatta

SEQ ID NO: 217445 - DNA, 403 bp, Glycine max
  unsure (1)..(403): unsure at all n locations
tctctcttatcttagtgagagtgattctcctaaattcttgagtgatncaagaacaccctcgctgtatcaaaggactctcacaacctttgtgtgttgccctcgctggaaagagagattctttccttcctttcatcttcaccctggttctttcaaaccacaatgtcagaaaattcacctctgcccagaattatctcgtggccataatctcccatttacgcactcaaattaagtgattcttgagcctaaattgatattcaaaacgagaccttttcacctcgttttgaatcacctcattnggagccatgtagcttcagttattgccatttctatanttcntgccagccaccacttaacctacattntaccatcccattcatccattttatgccantaaccaccttat

SEQ ID NO: 217446 - DNA, 363 bp, Glycine max
ggaaatgagctttcagaccttaccttgcttcaacatactaaacaccactaatacatatgtttttgttctttttacaggtgttgaggaaaaaagcccagcgtttcaagaacctcgggatttgaggtcaaatccttttcaagggggagggaatgatgcaatcctaccccgcaagggcattggatataaaactccaagtagtatgggccatatatgcaagataaggccctaaggttcttatgagccttatggtagatttcgggcccatgggctaagtacgagcccacttatctttgtaaatattagattaaagtttcattatttttgggccttgtatttatggctccataatgtacgtatggtacc

SEQ ID NO: 217447 - DNA, 316 bp, Glycine max
  unsure (1)..(316): unsure at all n locations
acgcatcaacaagaatcaagccaatgctattgtgcaagcaatcaatggngcanaacacaccaaatgattatgatgatggatggctcatattctcacaaaggtaaactcatcactttcaaattgagctttcaaaactatcatgacatgtagagaagaatcaaggatttcaagtcacaaaatgtcaagaacttttattttcaaaacaattacccatttcttgaacatcctataattcaaagaataacatgcaaagtcgtatgtgcacacaaaatngacccanaatatttatactataatgcgacgatactaacaacat

SEQ ID NO: 217448 - DNA, 288 bp, Glycine max
ttatcatgaaataaatactcatagtatggagatcaataacccaacttttttcaaacattaaaacaacatttaatgcacttaaagtcaccaaatctcctatgtttcgtatcaacccgaaactatgataaaatagaaccgacaatggcttataatgctataaacattatgaatttaattccaaatggtgtttaaatccaaatccaacataccttgtatttaaccctatatttttaaccatatggaatccattttttaaataaaaaatacttaattttgtaccaaacactg

SEQ ID NO: 217449 - DNA, 449 bp, Glycine max
  unsure (1)..(449): unsure at all n locations
agctnngtaatattatttaagtaaaagactatgtntttatcttcnttatcaagaagagcaaaacaaacgttacttaattgtgtaatccacatctccaagataaaccttgcatccaaaataatgattgagtaaaggaaaagtaagcaaatggagtatagtattgtagcttgaacttgggtttaagggtgttgagtaagttataatgattcagacttaacttttagtttcaatggacatatgtaaactagaattctctagcataaggtgctaaggtaatctttggctaacacattattataaagagatatttttcctaaaataaatattagcaacatattctttggccaacacattattgntaattgaaatatatagaagaattatattataaatcctactcttatttacgaaacttgttattttataacaaattgtcccgccaagtgaat

SEQ ID NO: 217450 - DNA, 333 bp, Glycine max
gtcacagacatgattttgaacataaaggcagctgaagttgataggcgactttggaatatggtaaagcatattgttgcttctatcttcatggtgtcttctgttacttttaaaagaaacccatttgaaataatgattttatcccttatgagaagcaactgtgaaaacctgtcctttaaaattcaggcattcattgttatcaatgattgccatttgccaatttacagcctacatgatctactgcactcctgtacagggcttgttccatacatctcttaccaaaaccttggaaatgacattaaaaacttaaatttgttatcaaatgcatttgtaaac

SEQ ID NO: 217451 - DNA, 414 bp, Glycine max
  unsure (1)..(414): unsure at all n locations
agcttataagaacagaatagcctaaatatttttctattatgcatgnngaacaggaagcatcaacaagaatcaagccaaggctattgtgcaagcaatcaatggggcaaaacacacccaaagattatgacgatggatggctcaaattctcacaaaggtaaacttatcactctcaaattgagctctcaaaattatcatgacatgtagaggaaaaacaaggatttcatatcacaaaatgtcaagagacttttattttcagaacaattacccatttcttgaacatatcctataattcaaagaataatatgcaaagttgtacatgcaaacagaattgacctaaaatattatactagaaaacccaacaaaactaacaaaactaactaatttaacacaaacttacttaaatataattactat

SEQ ID NO: 217452 - DNA, 255 bp, Glycine max
  unsure (1)..(255): unsure at all n locations
tcacctccttgagaagcttccttaagaagattcctaaagaagctagagcttacctacacatacctctctaatagctaagctcacctcctcgagatgagaaactagagcttatctacacacnctctataatagctaagctcacccgcatgataaagtacatgaatatacaaaagaaatatccctactacaaagactactcaaaatgcctggaaatacaaggctaaaaccctatactactagatatggcaaaataca

SEQ ID NO: 217453 - DNA, 318 bp, Glycine max
gttgaaattcagtgaaactttttcaatccattttgctactggtaatcgattacaataatctggtaatcgattaccagagagtaaaaactctttggtaaaaaggttttgagaaaaatccatgtgctactcagtttttgaaaaaactttttcatacttatcttgattaagtcttctcttgattcttgaatcttgagtcttgaatcttgactcttgaaatcaaattttctctctgaaccttgaaatgttcttgattcaatcttgaacttattctatgattcttgagatcatcatctttgttatcatgaattggtcttgatc

SEQ ID NO: 217454 - DNA, 470 bp, Glycine max
  unsure (1)..(470): unsure at all n locations
agcttatccccacaagtggatggggagtctgtttttatgctgannatcggggnatagagagaagcagaaaccttgcataattggatgaacaatcaagaacatgcatacaaacatatatgtataaataaatatatactattttagaacaaaaaaaaagaataaatgaagtgatcttatgtcttagaagtacatgattataataatgaaaatccttgaatttcatagctgtgtaggtaacatagtctccacttgtgaagcatcattaaacaagtggcacggagtggttgagtgtgaagttctcttatcaacgngcatggcttttgtgtatatagatnngaaatggttgatattatcattttattcaagagaaaaagggacagactcagctcaataaaaagaatgagagtgagagatacactccatagtctnttattctgatgcggctatcgatttaatattagttcagaaat

SEQ ID NO: 217455 - DNA, 359 bp, Glycine max
ttaccaagataccttgtacaaatgcatttaaaatccacaaaacttagatgcaatcactttggtgttttaagcattttgttctccaatcaaaattaaaattttacttcaatatatcccagggctcaaccctggacagaaggtggaatatgctagcctttaatagaaactttattacttacattccaattctgataagagaacagtacaaaatttggtaagaaacttcatctaagttctgtgataaaaaaaataaaattaaggatatagtcctagacttaggaaatcattatttgatcttaaaaatgagatcttgtgttgaattgagttagtaaagcaagatctgtattctagcacataaa

SEQ ID NO: 217456 - DNA, 380 bp, Glycine max
  unsure (1)..(380): unsure at all n locations
tcgtcctttgtcacgggaagccggaaggtccatatcaccttcttaattgtacacatggggcactgcgcccccaaatgcgcaagtaagaagagataattttccgggctctcgtgtccgtaaaatgcattcatatcatgcatcgcataagcatctcttcataacatcataatggacatatcctgcatttgtccgttatcatattccagcctcacattttgcatgagtcatggcatcatcatgcatatgcgttcaacaaactntttgatctgcaaaaatgcataccatttgttttcatgtttgctcatcctttgcgtttcctctacaaaacaaaaacaaagaagggggaagcgtgaaacttcacactacattcttagtttcat

SEQ ID NO: 217457 - DNA, 347 bp, Glycine max
tgaaaagttatgaccatttgaatttctcgagagcttccgatgtttaatttcgagcatctcaatatattgttagcctgaatcggacctcagtgtgaaaagttatgaccatttgtatttgtcaaatgcttccttggttcaattccgagcatctcgacatattatgtccccgaatctaacctccgtgtgaaaagttatgaccattcgaatttctcgagagcttccgttgttcaatttcgagccctctcaaatattatgcgcccgaatcggacctccgtgtgataagttctgaccatttcgaattctcgagagcttccgttgtttaatttccaacccctctatatattata

SEQ ID NO: 217458 - DNA, 361 bp, Glycine max
  unsure (1)..(361): unsure at all n locations
aaccactcacatgctttaaattaagttaaatttcagagaaggtagagtgggttcgatactttattcatgcttcaacgaatcaacccaaagaacttttaccttggtcaatctaacaatttaagttttcttgatagttagttccttattatttagataaaagaacaaacccatcattttcagaattgccctaaattgtcagattcctcagcaagaatatttatcgtcatgcaatatgttagaaaattgtgtatttgaaggaacaacattaaaactaaggatccgtttggtagctatgaagcaacacaatatcactactagaaaacaagttaacatanttatctctgctctatttctagttcat

SEQ ID NO: 217459 - DNA, 302 bp, Glycine max
  unsure (1)..(302): unsure at all n locations
gataattatctctgctatgaccatgttgccggcaaagtccacatttntttctacttgctcgttcattttcgtcttcgtccatctcagtangaatgcgagttgaaacgggacgaccctttgcagtcctctttctccttggatcaagaccccactgatctccttcatattcttgccacattgattcgtgtggcaataaaccaaaggagttgtcgtagatgtgcaaaatgtgttgtaaagtgaatatcatcggcacatatgtcatgggatcaacattgacagatttacaggcagccatgacgtga

SEQ ID NO: 217460 - DNA, 276 bp, Glycine max
aagaaaaagagaaggaaaatttccaatgaaagcaaaaaagaaatgaaggaaaattccccaatcaaagagtgggagaaagcaaaaaaaggaaaagaaggaaaattccccaatcaaagagtgggagacagcgaaaagaaaagaaaggaaaattcccaatcaaagaatgggagaaagttaaaaaggaagaagaagaaggaaagaaagctcctgatcaaggatcgaaagaaaccagaagaaatgtgcagagaggtctttggaccagacaatatctgaaca

SEQ ID NO: 217461 - DNA, 466 bp, Glycine max
  unsure (1)..(466): unsure at all n locations
agcttataagaacanaattgccttattcattttcatttatgcatgngaattaggacgcatcaacaagaatcaagccaaggctattgtgcaagcagtcaatggggcaaaacataccaaatgattataatgatggatggctcaaattctcacaaaggtaaaatcatcactttcaaattgagctttcaaaactatcatgacatgtagagaagaatcaaggatttcaagtcacaaaatgtcaagaacttttattttcaaaacaattacccatttnttgaacatatcctataatttaaagaanaacatgcaaagtcgtacgtgcacacgaaattgacccaaaatattaaactgaaaatccgacgaaactaacaacattaacaaattaacacaacttacaaattaacaaaaccaacaaaactatgcaaaccanagaacactcccccccatacttaacaacacattgcctcat

SEQ ID NO: 217462 - DNA, 353 bp, Glycine max
ctcacctccttgagaagcttccttaagaagattcctaaagaagctagagcttagctacacatacctctctaatagctaagctcacctccttgagatgagaagctagaacttagctatacaccccctataatagctaagctcacccccatgacaaaaaaaacatgaaaatacgaaaaaaaaagtccttactacaaagactactcaaaatgccccgaaatacaaggctaaaaccctatactactagaatggccaaaatacaaggcccaaacgaaggaaaaacctattctaatatttacaaagataagcgggctcatacttagccgatgggctcgaaatctaccctaatgctcatg

SEQ ID NO: 217463 - DNA, 405 bp, Glycine max
  unsure (1)..(405): unsure at all n locations
agcttcagaccaaagcaactcataagctaggtttctttttcccctcaatnnagaggattntcaagggttgagaactgataatgagaatggggtaattttggagcacactctcatctcacacaagtctataacattaatctaaactcgctcaaactggttttacgacgaaaactctaccgaatcaaaatttgactcctcaacccccaatttaccctagaaatggctcttgccctcactttggtcattcattttcctcctttgcacagcccaagctttcccacagtcctaaatgacatttcaaactaggattaactcactttaacctccaattacaactaaatccagaattagctnttcaaatccttaaagcatcgcatttttccactcatatcactacattctcac

SEQ ID NO: 217464 - DNA, 357 bp, Glycine max
atggactaactgtctgaattctttttgtgtctctcttctcccttttccataataacataggacttaccacctgaattcttttgtgtctcccttctcccttttcaaagaattcaaaacgacacagtctgagaattcttttgattctttcctttcccttaacaaaagatttcaaaggactaacggcctgagatatctttttgtttccccttcacaaagtttcgaatgactaaccgcctgagaactttgtcttatcacattggagggtacatcctatgtggtacaagtagagggtacatctacttgggttgtttgtactgataacaagatatggtacatctctttgtgatcaattcaagt

SEQ ID NO: 217465 - DNA, 302 bp, Glycine max
cgccttaactctggacaaatagaaacaagcttaatggataatatcagtaaagcgttggagtcctatgaattctctgcgaatgaaaagtttcttctcttgacatatcctagtgttcttacactgagataaaacctagaccatgattcctcacatgaatgagcctaactcttttagcttttgctcttgattcatcaacaaactcggtctataagagttgcactaagcacacagtgtaaaatatactagatcactgcactccatttctagacatactgatttctagctcgctctatcaagttcta

SEQ ID NO: 217466 - DNA, 409 bp, Glycine max
  unsure (1)..(409): unsure at all n locations
atttttaatcataacaattatttaatacattactaattattttctcgtataaacttctattatatataattcaatttattactnnntaaataattatttaaacacagtatgtttgtttacaaacatgttgattccaataacaataataggatctattgaaatttctatttatgaaaaaacaataataatcgtttacttttatataatgctcttggatgatcttaacttcttttttttatttcaaagcttgacaataactaagtccaaaatatatcatctacttcatcttctatggatttgactaataaaaaatgatacaaattagtggtgcatttaccttgatgcatacatgttattgtaatatggatgaacaattttcacctttgatggaacttgaaaaaactgctgt

SEQ ID NO: 217467 - DNA, 484 bp, Glycine max
  unsure (1)..(484): unsure at all n locations
ttaagtcacctgcggcatgcaagcttcacatgaagctacatcacttacaatgttgtgagtagancattggctataagatggaaagatgaactatagcctacgtgacatctgctacactctagtggcaacatgaactttgtcacatataaccaagatttggtaagctcagccttatttgttggatggacgaaacttagagagttctatgggctcactagaaatcattaggtcgccttgacccactatggatagagtgttttcctcctcaccatcttcaaaagcagctttgaaccaaaagtttttcctaaatggcctccttgtaccaccaagttcctaactcagtcacttttaaagtcctactcactgagtacaaagtgactcgcatcagtttggtgagtaattaagcactcctatttgatgtcnattttgatatcataaatatctaatataaattcttttgatttcaaatggctgagaccatgac

SEQ ID NO: 217468 - DNA, 328 bp, Glycine max
tccactatggaataagccatggaaggagaagcttcaccaccaaaagagtgccttggataagaagcttatagaggaaacttcaatggaggaagataatgagagagagaaagtggcatgaaaaattgaaggaagaaagggagagaagttgaactttgaagtgtgtctcacaagactctcattcatcaaagttgtgacaagtgttacacatgcttctatttatagcctatgtcactaactaaatgaaattcacttgtctttcattttatgtgaaacttagaaaaatattccaaggatatgtcaaaggcatcttatcatattccaagaatat

SEQ ID NO: 217469 - DNA, 426 bp, Glycine max
  unsure (1)..(426): unsure at all n locations
agctttacgcgccatgcatgactactatccttttngtacgtanacntccaggaaaatgggtatcttcttcttcctcttgggcctaacttcactctcctcctgatgatcctttgctaattgcagacccctcgagttattcattacactcttgtgcccatcaaacaacaccttgtcctcaaggaggtgaaactccttaaagtctgaccactcttcccacgatgtttcttcaggtggcaggccttgccactgcaccaacaccataagtcttggccttgactaagagggaattagtttggacgctactatggctaaaggagtgacgacagggtgattgtcaaagccataggtggaagatcaacagtgcctctcggacatgcaatggccacatatggtttaatgagagaagaatgaaaaacggaatgaatg

SEQ ID NO: 217470 - DNA, 352 bp, Glycine max
aagacatggctcttcaataattaactgtgtaattgattgccacaaatctgtaatctattaccagcgaggaaatgtcaaaaataactctgaaaagtcatatcccttcataagtttttaaaaagctaccaaaggcatataaatatgtgacttgcgtttgaaaatctttagagcctttacagaacttcattgtcttattctctcaaaagaaaacctttggccaaacacttgcaaaaccaataaggattcttctaagttcttcaagctgtattattcttctcttaaagagagagaaacaccttttgtatttcaaaagcaaattggtgttgtaatcataagcaacgggtctcttgat

SEQ ID NO: 217471 - DNA, 277 bp, Glycine max
actctttttttttcgactttgaaaacttgtgcaaataaagagggtgaggataaatgagaaacccatgctgtgactgccattcctgttcgaccaatttttccaccaacccaacattgtcattactcatccaataacaaaccttctcctttcccaccacccatttatccacaaatgccatccctatttctaccaaatagtctgtctaccgcacttccaatgactaacaccacctttatcacataccaaatacaccaactgtctcatcctacccttctgc

SEQ ID NO: 217472 - DNA, 263 bp, Glycine max
aaccaaaacacatgcggtctccaaattgaggctaactaacacaaacctcaattcctgcatgaaatgtccccacttctctcgcaacttcattctcatcatccatcacaatgttcacagctttgcttacactctccatcgtgaaccagacatcttcttcacccttctccacttcaaccccaatacttaaggtttccccagcaaccctgcgtaactaattggcaccaccacctgaggccgaacctctttggcactagataccagcg

SEQ ID NO: 217473 - DNA, 330 bp, Glycine max
actgccgtcgtgcatccatcaatttgtcacgaggcttacagttgctccttttcagttagggcaagatttttccgttacaaaatagttaatacattaaaagttcataagaattttgttactgaataggacacaaattttcttttagacaaattaaaattaaaactcattattattattattatgcttttttattacctaaaagttcattatttttttatttagttcctcatttttaattttttaaatatataaaaacaatttttttattaaatgatccctttcatttaatttggttaaatatcaaaagacatatattttatttcttaaatg

SEQ ID NO: 217474 - DNA, 209 bp, Glycine max
ctctttctcttatgaattatgtgtataatggggcaaatagcttgacaaaagtcacatgatggttcaattgctctgcatttcctccgtgtggagatctataagtgtccccatgaacttttcttgttctgaataatgaagtatgctagtaccactagaaaatgtatgggtattaaaactccaaactgtgaattgtagcttacccgactata

SEQ ID NO: 217475 - DNA, 275 bp, Glycine max
gtgacaagaaggtctcgccttctgcactggcgacacaggccatgtatgagagacgagaatgtctcgccttctgcattggcgagacaaccacgtaggagaaacgagaatgtcttgccttctgcattggcgagacagccacgtaggatcttgccttctccattggcgagacaggctatcccaagttgtagctcacgtgaagattctcaacccatcatggtcacagggttgcagtcttatggcttcagctttgcagtgttagggttcatgtttgcagt

SEQ ID NO: 217476 - DNA, 289 bp, Glycine max
tgtgtaaaaagaatagtgattgatatcatatcccttccaagttggaacattcatatttggacccacagctagcaatcttaatgtgtctaaagcactgtcatcggcaaagattgtttgtctaaagcactgtcatcggcaaagattgtttgtctaacaatctatgtaagggattacctcagctgtgttgtgtaatacatatagatgagcttgtgccagctgttggcgatccatggttacaacattgaacccccgtgtgcccctaacttccatggtggagccatgacgactt

SEQ ID NO: 217477 - DNA, 339 bp, Glycine max
  unsure (1)..(339): unsure at all n locations
aagcatcaagaggcgcctgaaagaatggtggccactaaaagtcaacggttccgatcaaggataccgcaacattcaacatttgaccctaaaaaacggaaaagaaggttgcatgaggagaaatcgagaaggactcttacaagaggatagcaagaagaaatgtgcaccgatttatattcaacaaaaccatattcatcattctttntggtgtggggataatgaatctcagcaagctcctttgaataggaggggatatgagagctcacaattctaccaattgctctcccaaggtcacactgcactcagccgcccttaaaagcaaattttgcaacgaaaaccaac

SEQ ID NO: 217478 - DNA, 248 bp, Glycine max
ttttgatggttcctctttgaccgaagttggttttgaagacattttgcatacccttggcggcattgatgttcatgtgaagtgaccgcgatatgttcatcacttctgagctaaggttcatcactcgcatagacatcttctacataaacaaaatcagtgacgaagtgcttatttagaacttgaacggagctattgatagagagaaagttgggtattttctacgtgtttcataagatgcaactctgaatgaa

SEQ ID NO: 217479 - DNA, 469 bp, Glycine max
  unsure (1)..(469): unsure at all n locations
ctgcagcttaccaactggattgtactgagtataacagcattttgtaactctnncgaatcgcgttaacggtatgagtcctgaatccaattaaaattgaatgaaaaatagacaaaaactcaaccaaccgattccgggtgggtcactcacacctctacccataagactgaacttaaaagaacttaatcagtataagtaaatcaccaaaagcatgtttctaataaaaacgaaccattacaagttgaaccaaggttgtacatccaacctggaaagaaaaacctctaccaaaataaaaccttgagaatttttaacgtaactcctatcttaatgcaaatatgtcatcataaatgtggtcacagcatcccatctagaaccaaggttgtacatgcaaccttgaaagaaaaaacctctactaaaatatagcctttagattttttcaatntaanaattcatccgaatatcatattatata

SEQ ID NO: 217480 - DNA, 317 bp, Glycine max
  unsure (1)..(317): unsure at all n locations
atcctctctgcaaggttttaagaacaattgaagactatacagaacaaagcaaggcatcactcatagttcctgttttcaatttgaatttcttctctaagacacaatctgagcaatctatttttactgtaaaaattgttgaaaattcaatacaaattctatgttctacatttcattggtgctttcattgtcatcaatggctgacactagcctcataacgttgcaagaccaaattactacacttacgagctggatgaatgatcaaatngaatgagatcagattcaacgtgatctccaggttcaagtttatacatcgcaca

SEQ ID NO: 217481 - DNA, 433 bp, Glycine max
cctgaggcatgcagctaatgtttgggatggtgttagcttgttatgtttacttgaatgagctcatgagccatatgagtcatgtatgtaaagatcattttacacgaagtagtaatctaatcttggaatcaccgttagttcacatttgtgatctaaagctttcaaccattgaattaatttcacacaacaaattcaacaaacttgatcgaataacacatccatcatcttttccaatcatacgagacctttgaagaagaagaattttcaaaaatcaaactctgattgtgaatgcaaacatgaaacgattatcatccgaattgcttgaacacattgtaagattgaattcccactttcattgtgatgtgagggttccaccaagaacattactctcggagaaagaaacaagaaggatagatagactaagaatcttaaaaca

SEQ ID NO: 217482 - DNA, 362 bp, Glycine max
atgacttatttgttataagattaatagaaaggactttttgttgtgtgtgatggacatatcataaaaacttataattagaaattcttttttcaaagaagaaactatttatttatataaaaaaatacaaaaatcctttactagtttttaaaagtaatttaacttcccaagatatatagaggagaacatactagctcctaccattggttggtatacctgttcctttcatgatatcttccacctgcaatactgtgtgacatcttataacccacacttttttttccttctctgtattattgttggattgctacctaggtatatgataggatacattatcaaactatgggtggtatatgcataattta

SEQ ID NO: 217483 - DNA, 337 bp, Glycine max
  unsure (1)..(337): unsure at all n locations
gtgcaagctttgaagcctagaaaaaccatgatttgtggtcngcccaacctcattacaagcctataaagcccttgggattcaattcgtgtggttatttttgtgtggcatgagatgaaatgcaaaggctgggacttgtgtttgttgtttatgatggaatgagcctaaacacttgtgctttacagaaataatgactgccacgctttggtagaagatccttccttgatatctatcattcttactacctgattcttagtgagactctatgacatatgttcctatctctgaaaagatgcatgctctgagaagtgacattgactgaaacatgctatgacattca

SEQ ID NO: 217484 - DNA, 297 bp, Glycine max
ctacacacacccatctgaaaactaagctgaccttcttgacaaaatatatgataacacaaaaaaaagtccctactacatagactactcataatgccctgaaatacaaggctaataccctatactactataatggccaatatacaaggcccaaaagaatgatgaacctattctaatatgtacaaagaagagtggatccaaccttgatccatgggctcacaaatctaccctaatgttcatgagaaccctacggccgtctttaatagctctatgccaagcctcttggaatcttctatacaa

SEQ ID NO: 217485 - DNA, 417 bp, Glycine max
  unsure (1)..(417): unsure at all n locations
agctnntcatggaaatagtgactggtgattnatttgtgagancaagaagagactcattcactcaagcaaaaaggttattgtgtgtgattgatcaggttgtgtctttctttgactcaagttttaatttttgtgtgttttacatgttgttagcatatgcatgaatttctgaaggcatgctagaataggttttctagtttgggctaaggatagatttctcttatgctcttaatcacaaagggccttagggttgggaggagttgagattgattgtgattgcttgtaagaattatatatacatagngaaaatctaattcggtttagattagattattgaagtaacttctttagagataaagagtgaaccaatacaaaaattgatgtacattttctcttgatcttatctttcttattgcattc

SEQ ID NO: 217486 - DNA, 355 bp, Glycine max
aaatgttgacacctggcacttttcccgattttttggtctttttgcccctccattttttcctctgttggttctcccacgtgtcttgctgtccaaccttctttggccatgtcgttgtgtacctgcaacacgcttcctcccatgtcccatcgagaaaaccctgttccacttttgtatcatcgtttatctcttccttctttagtttccttcgttctttagtttccctctggtcatcctttgtttgcccctttgttgttgtacatgtttggttacagagtcaaggttttacttttgtttgtgacatgcatattttcttggtaacctatagatccttgttttgtgttttgcttccttaccg

SEQ ID NO: 217487 - DNA, 463 bp, Glycine max
  unsure (1)..(463): unsure at all n locations
agcttgatgaagagctcaacaaggtcaatgttttttcaaggancaggtggaagcagcccagcatgaagtaacccttttgagtaaacaaatggaggccttggttgcactaagggtaaaggtgaaaagtccatatacatgtaaatacaaaattcaaacaatagttttatagatatttaagcacatagttctactattgtgaggacttgcaagcttttagaggcanaatttgagaaatgtgcatcaactaaatgctttntatgttgggaggattgagaaaaaaagatataggaataggatcacaatgtatttgaggccacattaagtcaaataaatgtacactcattatantgttttctatgttgccatgcacatgtgaatatctgtgaatttcattcataataactcactgacactcatagtagcacattagatgcttgtatcggaagaattatttatctataat

SEQ ID NO: 217488 - DNA, 330 bp, Glycine max
  unsure (1)..(330): unsure at all n locations
gaattaatcaattaccccatttgttaatcgattaaatatattttgtctgttaaaatctatatataccttttcttgttcattctcattagtgattgttttagatcttatctttcaaaaattatttctaagagtcatctaaggggaccactctgcattttcaatgagagattcatgatgatcaagattcattcattctttatcatggtttgagtaaggaaagaaaggcttgaagatattgtgatctttacatttaagtgcattcaatcctattgtgatttctttccagtgtttaaccctgattangggttcaactcctggtctctctcttgt

SEQ ID NO: 217489 - DNA, 318 bp, Glycine max
caaattatgaataacctcttatgcaatgtatattatacactttcctaaatctctttgtaccattctaatatccttaatagctaaggtctgatggagggaggaataatggtatggaaataggattccactagaaataatatatccgtcctttattaacgctactcatctagcaaagtataattggcgggctgagacccaaattcattatttttagttcatgggtttgatataagattatttttaactgaacgaatatgctaaaactggtcattgaccatttttaacataacaacgtaaatatgtaatacagattaatat

SEQ ID NO: 217490 - DNA, 379 bp, Glycine max
  unsure (1)..(379): unsure at all n locations
aagcctanacaacaaagcatactagctacatgaactggatgcacagcaattccaagagcatggagcgcaacccatctaatgtttcactttagttaactaatgcatgactagatgttgtaccattttcccctactcaagtcttttgtcccacaagagataaatcacggttttggattgagagcttttaatgaggcacatctaggataacaaagggaattttagtcaatcaaatacattgaataaaattctacgccccttcatttttataatattcttgtgtttccaagacaagtacgttcatggtcacagctctacaggctcgtcaaacctaatgtatacccttggtgagtcttgccaaaatcaaggatgtgacacgtgc

SEQ ID NO: 217491 - DNA, 313 bp, Glycine max
acttataagttatctttggtagtcttctaccaaaaaattacataatcactattatattaaaatacaatgttcttttccatattttgtcaaatctatgcctttagtcttctcattttttaattgaaatatttattctctcacttttgaaaaactcgcgattttagtcttccattttctaaattgaacatttcgtcccctatttttaaataatctataattttagtcattatgatgattttaaacattgatcaatgcatttggtaacatatttttctattatctacatgacaatctttttataaaattattccat

SEQ ID NO: 217492 - DNA, 295 bp, Glycine max
atcctcttagtcacctgcggcatgcagcttgatgattggtcttttctctatttgatcaaggggctgaaagaagaaatctgatcatcttgtttgataatgcaaaaaaaaaaaagctggggcaaaaagaggggaggataaggagaacccgtgcttgactgccattcctatacagcaaattcccaccaccctcaatgtattattagccaataccaaccttctcttacccaccgccagttatccaaaggccatcctaaacaaccacaagtctgttaccgacttcaatgacaacaccacc

SEQ ID NO: 217493 - DNA, 313 bp, Glycine max
cccatatgggtagtgtgctaataaaaaactttaagtgttagacttgtagtaggtggatcagctagcatggaatgagtccctatatgttctatacaaatctgtattttctgaattctttatttaataaccaaatactttatgtcaacaaaattttacttggttgaatccttaataagaccgctcatatattgtctcaataaactaccgatggcttcttaatgttggcaacaacaaataagctagttacaataatctggcagtcataaattctagtatgatgtttcatagcaaaaaatgtgaactccaccaatat

SEQ ID NO: 217494 - DNA, 438 bp, Glycine max
  unsure (1)..(438): unsure at all n locations
agcnagcacagagaggagagagtatctttctttatagnccccaaaagaacacaaaccaatctacatcacctcaatcttcaccctcaccttttcacctttgtccccatcaactgttcctcgagattgaaggtctctctcaagatgctgaaaccactttagacatacccttctttttggtcccacttctcgccacggctttggaccgcaccgagaaagacatcgaacttctcctaagggaactgaaaccacaatttgttttctttgatttccaacattggctgcccaacctgacttgaaacctatgcatcaagagtgtcgcgtatttcatagttaatccgctatcaatagcgtatctcggaaacggaccaagacaaagccaacgaagatgattaactgaagttgtatttatggaaacctcctaggggttccctgatgatg

SEQ ID NO: 217495 - DNA, 343 bp, Glycine max
aaacacacatggtcttgttctcattgtttctatttagctatttgatgttttaaaattggaactgttgttctagttgatctgatttatatggaaaattacttatactcaccttaatataattatatttgtctaccaaaaaaagaaaaaagtaaacacacaaagcatagtaatacaacgaagtcatacgaaagcatgcatgccatttcggtgtttattaataattttttgcttaccaaaagataagcgagcatgcatgccttatctctcttaatttgttttccctcgaattttctatcccttccacgtacgtttctttgcccctactttttttttttcttttctt

SEQ ID NO: 217496 - DNA, 399 bp, Glycine max
  unsure (1)..(399): unsure at all n locations
gagcttgatagatagatgttatgtttttgtttttgggctaaagnattccctggacctaatattaataaaaatcgccaaccaaatgataaacatgttagggatcctcattgtcttactcacatgtaaaaacttattaagtttctatactctccgcgggcaagcattattggtttggctgtatcacaatgacaccatcactaacaatcattaacaccttacacatctctaatatgatattcatgtatgtaacgcattcttaatttgatcatcctatctataacgaaatcaaatcatgaatgaatgagaaggttaatggtattgctcaataccgtaccctcacagataagtatcacaatgacatatatcaaattatcattaataagaacgtcactatagcat

SEQ ID NO: 217497 - DNA, 330 bp, Glycine max
catccaaaaacagcaacaatcaccagtccaaagattaagttggttcacttatttctaccccactaccattactaaagaagaataagacagcgagagaaaaagcaaagacaagaacaagatatcagatatgcgggttatgcctatccgctattcccaaaggattacatacgcctctctctattttttgttaaacatacacaaaaagataaatgtcgtgcaaaaacgtagcatatcatgtttaaggtttctctcacgcaacgggttgggtcttctagcatgggctaatttctcgtaccataacgaatcaaggttgcaatttttaattattgg

SEQ ID NO: 217498 - DNA, 320 bp, Glycine max
  unsure (1)..(320): unsure at all n locations
ggctgcagctttcacacatgcaacatcacttccttcacgaaccactaacagtaaatatagcagtaacacattcagaatgaaccactaatgaaatgtgtcagggacaaagacctcgggtaaaatcagaactacaattggcaagaatttaagaaatgaatttgtatgtaggagaaactaatgaaaccaatgtcatgtacttaggctaaagccggtagtggtgttnttctagtactttcaacanatccattgcagtcacctattgagaagatatcctctactgtaggaacacgaagccactcatcaatgccaatattgtgaat

SEQ ID NO: 217499 - DNA, 437 bp, Glycine max
  unsure (1)..(437): unsure at all n locations
tcgactatatatatatatatgccnccctaagcattgaacttgcattctaatccaaccctcggaatcattacagtgtagagtttgtaggaaaaccctcagaatcataaccatgctcattttcttcttcactcttctagtgtccttctcagggtttctccttctctttttggacacacaaccagaacaacaacgtagtcataattataaccatgcacctctttcgcacccaatcattggatgcctcgtctctttctaccaaaaccgccaccgtctactggattggtacaccgaacacttagccaattccccgacacagaccatcgtcgtgcgccgcctcggagcacgacgcacggtggtgacggcgaaccctcgcaacgtggagtantatttaaagaccaatttccgtaacttccccaaaggcaaacccttcaccgaaa

SEQ ID NO: 217500 - DNA, 464 bp, Glycine max
  unsure (1)..(464): unsure at all n locations
tagaacctggcataaatgtataatatagaaataaaaactagctttagtaccattaatntaaacatgtgatgttacatgcctttctagaaggaatgaaaagatatacctcggcttgacggacatgatatataagtatatatagtagagtcatcaaaacaaatacaaaatagattatctttgggatagtaggcaagagatgttactataggtggtggagacattatagtagtcaaagtatgtgtaaggcaaatgtgtgacatacattaagttaaatataaaattaacatcatttttttaacaataacattagggtaaatataataacaaaaacatcattgtgagtagcaaaataaaagcaacaagcgtgatctcaatattaagattanagaaagaaaacataggacacggaaacaaaaattgcattgagtttttttttctatacaaaattgcaggatgtaataacc

SEQ ID NO: 217501 - DNA, 475 bp, Glycine max
  unsure (1)..(475): unsure at all n locations
tccatcaagtggtatcaaaattgagtggaactgtgaagtgtatcttattagactntcattcatcaaagttacaacaagtgttacacatgcttctatttatagactaggtagcttccttgagaagctttcttgagaaaacttccttgagaagcttctttgagaaaacttccttgagaagctagagcttagctacacacacccctctcataactaagctcacctccttgagaagcttccttaagaagattcctaaagaagctagagcttagctacacatacctctctaatagctaagctcacctccttgagatgagaagctagaacttagctacacaccccctataatagctaagctcacccncatgacaaaaaacatgaaaatacaaaaaagaaaagtccttactacaaagactactcaaaatgccccgaaatacaaggtaaaaccctatactactagaatggccaaaatacaagg

SEQ ID NO: 217502 - DNA, 332 bp, Glycine max
ctgaaaaactatctttcaagtttgctcccagaatgccccagaacctgctaaatgccagaagacaggcgacgaagaactattccgttcagagactaccaacacctcttaggagcgctgtacacccatcagcacttcgaggccatcaaaggatggtcgtctctccgggagcgacgcgtccaccttatggaccacgagttttctcgattccagatgaaatatggcgcctgctgtggacatcacgtggtactcccatggcctcgctcgactcagacatactccatgaattatatgccgatgctctgccaccagaagacggcgtgcgcgacatgata

SEQ ID NO: 217503 - DNA, 416 bp, Glycine max
tacaagcgtctagatgtattacgggatatatttatcatcacgagaaacagcaatggtcgatcgaatgtacttcgagcttctgttttcaataacgagcgtctctatgtactacgagaaacaatcggacatccaagtaaaaagttattcctgatcgaacttgctacaagcttgcattttcaatttcaagcgtctagatatattacgggacacaatcggacattcgagtaaaatgatattgtcggtagaatttgctcagagcctcttgcctctattacgagcgtgttgatatataacgggacataatccgacattcgagatacaagctattgtcgatggaatctgcccacacctacaattttcatttcgagcgtctcagaatattacagcactcaatcagacctcttaatgcacagtta

SEQ ID NO: 217504 - DNA, 375 bp, Glycine max
tctactccactaattgtacattgcccacacactctccttagtggggaatatatcatacttgtggtggactacacagtaccttgcttatacttgagccaaagagagaattgtgacgtatccagcacatcataaccaatgccaggtttaaatggtccacaagcaacaagtagatcatgtctgcatttgctcttatcttcaccaactagttgatcatgttctaaaattgttacccagacttgtctatcagaaaccacactatctactacagcatattgaccatgcatggtattctccccacaataaatagccccgacttgaccagtggcataatcatccgctgataagaactatccaccacgctaaacattcttacta

SEQ ID NO: 217505 - DNA, 400 bp, Glycine max
cttatgggtttgaaatctttaagagacgtatgggcatctacgttatggatacgaacaattacagtttctgccaggatagtgacaaaagtccctgttgctaaagcagtagctgccatactcaaaacatgattagcaacaacatcctgataagatttgaggaacattggttggaagccatataatccgagagctttgtatgatctcatagaatagataacatgcctatcctctttcatggtaacggagttaatgtgatcattaaataacttttgatctacataaggaacgtggaaaaattgatggcttggttgataacactggtctctatattgaaagagaatcttgaacaatcataagatcccttttgtttaagaccttatcatttgaacaccatatacct

SEQ ID NO: 217506 - DNA, 311 bp, Glycine max
tgttctggacgttgaacaagcacatgacgactctgtctgtagcttttctatgtgcacgcgacgggccactctcatcccttgtgacctagagtacactattggtcccccatataactccgcgaaatgtgctccggccgtactttaccatgggagccctcttacaacattggttaagggcatcggcggaaataccattcgatcccccttacacagcgcactcgtttccaacgtgcgtagaaagaaacttgaacctctcatgacatgatggcctatcctaactcgcttatcaaagcttggacgttcaatgactc

SEQ ID NO: 217507 - DNA, 206 bp, Glycine max
tttttttgtggggggactaacctaacattaagaaacttcaaaactctcagaagtttcaaaaacttcagaacactagtataaaaatatgtgacatgggaattataagaattggaaacaccaagagggttcccattctctacggcccattttttttttccagaacttcctctcaaaaatggattttctgaccagagctctacacttat

SEQ ID NO: 217508 - DNA, 410 bp, Glycine max
ctgagcaatcaccaatgccagtatcgccctcctctcaaaggccagactacctatcttgcaagtactttccttgtctggttgtttcgatatatcaaacaagagtgctcctttcctgatgaaattgggccagaccttgctgggattgaatcttcaaaactgcaattcaattggcagcaacataatggagttgctagtggagaagttatggagatgtgatattctggcttaatcatgtttgaaactagaaacaaataaaactgcctaaatcatggaagaagatagagttgtataggctagcacttctaaattccaacagccccaaacacattgctgcacttaaattgcagacagtatatgagagctttcgcatgagaagaaagctagtagattgtgcaactcttattgaacaa

SEQ ID NO: 217509 - DNA, 465 bp, Glycine max
  unsure (1)..(465): unsure at all n locations
agcttgcccagagaaggaatccacttatgaaatgcttaccacctcgaaagactgganagcggtttctaatcactcctctgcggcctccacataaggcatagaggatgggcagctcaccaagatgtcttcctcgcctgatacgatgaccagatgcccttccactacgaatttcaacttttggtggagtgtagagggaacaactcccactgagtggatccacggacgccccaacagacaactgtagggggggttaatatccattatttggaaggtaacttgacaggtgtgagggcctatctgtactgggagattgatctcttccctaacctctcggcgagtgccatcgaaggcacgaaccaccattgaactcggctttaggtgggaagcattgaatggtaatttcttcaaagtgctcttangccatcacgttaaactggaaccattatcgatgagcaccttggctac

SEQ ID NO: 217510 - DNA, 463 bp, Glycine max
  unsure (1)..(463): unsure at all n locations
tctccnctatnttcctataaatagggggagaagtgaatgtatataatgttcaaccctcctgttaattcgagatcacttgaaattagtgaaaaaaattgtttccgtgaagaaaatccaagccgaggcgcttccctaacatttctgtaatgtttccgtgggtgatttcgcgaagattttcaatcgttcttcattcgttcttcgtcgttcttcgtcgttcttcagtcttcaaccagtaagttcccaaaatcgaacttttcaattcattctatgtacccttagtggtcctcatttgttttcacatgcttttattttcattccttttactttccgtacccccttttgacgtgctttagtcacttacttaagtcattttctcgcctaatcgaaaaaataaaataaatttccaccgatcatttgaattgtaacatctgttaaattctgttaaaatgaaatccgaccgttc

SEQ ID NO: 217511 - DNA, 449 bp, Glycine max
agcttcaaatgtagatagaaggtgcttttgtataaaacaaacaacaagttcactgtgagtggtgataatacttaatatcatggctctatgttccatcgcggtgtcttgagacaggtggaagacgtgctaatctcttacctactggtagaagccctttgaagcagccttgctctcttgtataaaagttcaatgccttttggtcccttctacaaaagggagtgtaaaaatattgttgcttctggtaattgagccaccattggctttacttttattatactttcccccttgcatgcactttcaagacatgcttgtagttcatcttatcattacgggggaactccacaaacggtggttgtgttcctcgctatatcgcttattggaaaaatacatattcttcgctctcgaactattccctcttctatcttctgactgacgatgtgcatcgtcga

SEQ ID NO: 217512 - DNA, 444 bp, Glycine max
  unsure (1)..(444): unsure at all n locations
tcattagatgtngcatttcagtatcagatcctctttgttttatcgatatgcacttcttgcattgtatatttgttgattgtggtgcaactgttggcattgtgctccttcaatgttagcaggatgtttcttggtttcaccatcgactttgtcatattagcaataatattcttcccatccttagtcaatcgcccagagtatggatatccaactaaggacttggccaattcatgattgtgaatcccacagatcaacttcaccatccaaccttcccctctaatcactggtttcccacgaagcttgaagggacaaccacatttcctactcccagtgtctcttctaacaaattctttcttcctacacttataatgaccgctcctttcacaatcaattaacacaaatgaacttctttctctactaccagtatgtgtgttagacctcataatg

SEQ ID NO: 217513 - DNA, 398 bp, Glycine max
  unsure (1)..(398): unsure at all n locations
caagttcactgcggggggtgttaatacttaatattatggctttatgttccattgtggtgttttgagaaagggggaaaaggtgttaatcttttacctatggttagaagccttttgaagcagctctgctctcttgtataaaagtttaatgccttttggccccttttacagaaagggagtgtagaanaggttttgctctggaatttgagccaccattggctttatttttatattactttcccccttgcatgcactttcaagacatgcttgtagttcattttatcattagggggaattcacaatggcgttcggttcctgttatctggttattgtaataatcatatttcttctcttaaaatatttcctcttctatcttttgactgatgatgtgcatcattgac

SEQ ID NO: 217514 - DNA, 474 bp, Glycine max
  unsure (1)..(474): unsure at all n locations
gacctatgaaactcaagcttattagatgttgcatttcagtatcagttcctctaatgttatattgatatgcactncntgcattgtatatttgttgattgtggagcaactgttggcattgtgctccttcaatgttagcaagatgtttcttggtttcaccatcgactttgtcatattagcaataatattcttcccatccttagtcaatcgcccagagtatggatatccaactaaggacttggccaattcatgattgtgaatcccacagatcaacttcaccatccaaccttcccctctaatcactggtttcccacgaagcttgaagggacaaccacatttcctactcccagtgtctcttctaacaaattctttcttcctacacttataatgaccgctcctttcacaatcaattaacacaaatgaacttcttcctctactaccagtatgtgtgttagacctcataatgactgcaacaaa

SEQ ID NO: 217515 - DNA, 446 bp, Glycine max
  unsure (1)..(446): unsure at all n locations
agcttgagtataatacattggttgtgttatgatcctacatcaaataatcggattattgatgtttctgtcacgatcaagcgatagttgatatctccatatgtgcgtacactgcgattatgttttcgtttctagaattcatttggagtatctactgttgattctagatgagtgatccttcttgacttaaaattatagtctcctaatcaatcgagtgttcatcttattattggctgctcatcttccaatcatgtctagttaaactgcttgataatctttcttgttgatacttctaatacgaataaagagagacttcgcctttgacaatcatgttaagatgttttgagaggaaatacttgagtagacatgatcattgttacctatagacgaaagtcanacttagtaagacgtgtacctgtgttccttgaggatatgcttagttaccacct

SEQ ID NO: 217516 - DNA, 178 bp, Glycine max
tctagccaaatggacttaccttgaattaattcctttgattctctcttttgatccttgtttccctttccttgttttgaagctcactacaagccttatatgaaaaaccatgatatcaccatatccttaaggaattttggagctttggaattgttttgggaataagtgtgggggggggggg

SEQ ID NO: 217517 - DNA, 431 bp, Glycine max
  unsure (1)..(431): unsure at all n locations
tagcatgaaggaaactatttctctttgtttacctggcgacccaactgtgcatgaatcaaanaactgcacctgtcggcagactctgtgggttatgctcatctgccgaccaccacatagacctttgcccttctgtgcaacaatttgatgcaattgaacagcttgaagcttatgctgcaaacatctacaacagaccttcttcacctagcaccaaaatcagccacaacagaataactatgaactctccagcaacaggtacaatcccggatggaggaatcatcccaaccttagatggtcgaatccttcacaacagcagtagcaacaacaacaacaaccttattttaaaatggttctggcccaagcacaccatacgttgctgcaccaatcaagcagcaacaacaacaacaaccacagccccaaaaacagcaaacagg

SEQ ID NO: 217518 - DNA, 459 bp, Glycine max
  unsure (1)..(459): unsure at all n locations
tntgcaagctggaatcatttatcctatcttcactgctattgggngagncccgcccaggtagtcccaaagaaaaccggcctcacagtgataaaaaatgagaaggaggagctaattcctactcgggtgcaaaacagttggagagtctgcattgactatatgaggctgaactaggttaccaaaaaggaccattttcccctgtcattcattgactagatgcttgaacgcctagcaggtaaatcccactactgtttccttgatggtttttctggttatatgcagattactattgctcctgaggatcaggaaaataccacattcacctgccccttcggcacttttgcctataggaggatgcctttcggactgtgcaatgcccctggtacctatcaacggtgcatgattagtattttcagtgagtttttagaaaatggcatagaggtgtttatggatgaattcact

SEQ ID NO: 217519 - DNA, 343 bp, Glycine max
taactctttttaaataaaaactcacataaagataaaaaaaacagtcagataaaaactaataagggaagaacctttgtttctggcatttttctttttctgaaaaaaaaggaacaacgtaaataaacacgttagagtatcaataatccgacccagctaatgaattagtttttatccatgtttccttgaagacttgaaccacgagttaattaaagtgaattcattcacctcttttatatatgttagagcagagccatccctctttcagaacgggtgatcatttttgtgcactgaacatttgaactttatgacgtagaattaagaaatttaatttttctcacacaaa

SEQ ID NO: 217520 - DNA, 459 bp, Glycine max
gggtaacttcggcggcgtatggctaactatgatttcttcttcggccaataatatagcaccgatttagaaaaaaaaaaaaacagcttactacaacgtttgtttatggaccgttgttgaaatttttaaatttcaacatcattataatcaaaaacggtcaagcactgttgttgaatcgcgattctgaccgatgtagaatacgcgttttctagtagtgacttcgttcgagaaaaagttgtacttggtcaagttcatgttctgcaggtgcctacacgataccagtatgcagacatctttactaaaggccttccaaaaccgttgttcgatgattttcgttccaacctcagcatccatcctcctcccgcttcgactgacggtgtgtattagactatatgtatactggccatatctattgtaataattaggttgatattgtccataattagcgtgatactatgtcat

SEQ ID NO: 217521 - DNA, 408 bp, Glycine max
gagctctgatttaggcacatcacatatatagacgctcgaaattgaacaacggaagctctcgagatattcaaatggtcataagtttaacttggaggtctgattcacgcacataatatattgagaccccgaaattaacaacagaagcacttgagaaaatcaaatggtcattacttttaactcggaggtccgattcaagcgcatcacatatagagacgctcgaaattgaaccacggaagctcttgagataatcaaatggtcataacttttaactcggaagtccgattcaggagcataatatatcgagacgctcgtaaatgaacaatggaagctcttgagaaattcaaatggtccgaactttcactcggagctctgagtccggcgcatcacatatagagacgctcacaattg

SEQ ID NO: 217522 - DNA, 462 bp, Glycine max
  unsure (1)..(462): unsure at all n locations
tgctctaaattacattgatgtttgatttatgggaggatgttgtatgtcannttttgtttaagaatagtatcccactggtaaaactaactttccaaatgtttgccttcgcaggaaatggccccgaggaagcttgcctcaaaaaggtccaggaaggacaaggcagcagaaggaactagttccgcttcggagtatgatagtcaccgctttaggagcgcggtacaccagcagcgcttcgaagccatcaaggggtggtcgtttctccgggagcgacgcgtccagctcagggacgacgagtatactgatttccaggaggaaatagggcgccggcggtgggcaccactggttactcccatggccaagtttgatccagaaatagtccttgagttntatgccaatgcttggccaacagaggagggcgtgcgtgacatgagatcctgggttaggggtcagtggatcccgttc

SEQ ID NO: 217523 - DNA, 456 bp, Glycine max
  unsure (1)..(456): unsure at all n locations
acctgcggcatgcaagctttcnaccacagcaacacaaaatctatgtgttctattttctctcatttaatggattttctaggcttgagaagtgaaatttaaaatgagggtaatttgaagcaaactcttaccttacacaagttcataacatcaatctaaacttgcttaaactggatttacacctaaaatttcaccgaatcaaaatttggactctcaacaacccaatttgccctaaaaatggctcttgggtcactttgggcatttgttttctccctagcacagtccaagaattcttataagtctaaatgacatttcaagctagaattaactcactttaacctccatttaccacaaaatccagatttaacctttcaactctcagagccttactctttttncactcataacaccacattctcactgtctaacgcgtaggttaatctacccttcatctctaat

SEQ ID NO: 217524 - DNA, 461 bp, Glycine max
  unsure (1)..(461): unsure at all n locations
tgacatgaggaagtgttgaagggtgaaacttcctgctttattgtgatctcagagnggnacctggagatatgtcgcggnggttaggagaccttggggacgtcatgtggggtgctattgcccaaaaccaagcttgaccaatcccgacccaacccgggcatagtcggtcagtgagaacctgtgatgtacctaagcaggcgagctcctggcagtcaacagataaaaggaacaaagaccacaaagcaaggaggcttgtggtagctggccagctgtgaaacttgactgatatgtgagatatggtctctggtaatcgattaccaagggtgggtaatcgattacaaggcttaaaattgaagacaggaggctaagatggtctctggtaatcgattaccacggggtgtaatcgattaccaggcttgaaaacgagatcaaaaagctaaggaagcctctggtatccattacca

SEQ ID NO: 217525 - DNA, 416 bp, Glycine max
  unsure (1)..(416): unsure at all n locations
agctntgctnctacaagagtcaagaggaaaggcttttatttttcttctgacgcatcctaatagaccgatagtcttggatcttggtcatacatgatccgaacagattgatcaggtactaaccatcctttttcattgtgaaacgctatgacaacatgaaaagataaaaactttggcccttctctctatggcaaaggccttaggtgtcccctctaattgataaatagggtttcccaatgaatagccaacaataattttaatccaaccattacaagtaatatctgacttgacatatatctccaggacgaaaataatgacaagtaataatgtctaagaacttaaatgaaatagctgagaggtctagagatgtattcagatagcgtttggtttagagggaagaattacgggtggaactgaat

SEQ ID NO: 217526 - DNA, 459 bp, Glycine max
  unsure (1)..(459): unsure at all n locations
tggcaacataacaattganttggttgtacgcacagcgtttatgttttcttttctngannctcccagcttatgtgttgcatatactaataatactataggacattccaattccaatggctatccctttttctcttttgtatgttatgtcaatctttacgagtttggttttgtatatgacgaaggccctctatcattttgtcatgtccttgtctatttcctttcatgaaatcagaaatattttagactattttcatgtttttttttctgtacattaatgtactgagattgagtatattaatgttgaagtttcagctaaaagagcatcttaattgtttgtcttccagtttgattatttcaccctcataggaattgaatgcttattatgcctttgtgtctatagtgaccctcgagctcacctgcactgtgcctttgtgtcttcaatctctgcgaagcaacgtc

SEQ ID NO: 217527 - DNA, 461 bp, Glycine max
agctttgcatgttagaaagttctaaagagagaaaggtctcttttccaaagagttctaagagaatttgctatgtgaagatctgcagagacgatagctcgaagcggaagctgttctgagagcttgagatgagtttgtgagtgattgtgagatcctagaggtgaaggagacatcctcaccactttgtattttgcaatctttcatcttattcttctctatggttgaaaggaggtttccagactatggaaagctaaatcctctgttggatcttccttatagggacttgatgtaaatatatttctatctatgtaatgatgttttgtgcattctctgtgctatctgcttttcattccagtatgcctttaccttgatcacgtagatgcatgctttgttagggtcattcaacagggaaactggtttgattctaaagtcctcgatagtacggagctaagttggtgtactat

SEQ ID NO: 217528 - DNA, 468 bp, Glycine max
  unsure (1)..(468): unsure at all n locations
tcacgctgctcaattgctccacgttgctgcatggaagggcaaagttctgtatggnggncagcagaggagcacaaaccacaaacccttgcgacaggtacagatttctgattcaaggccagctgggttaccaagttaaccaatgcatccagttttccttcaagcttcttagtctcagatgatgcagctgagtttgtagctacctcatgcactcctctaatgactatagcatcatttctggcgctaaactgctgggagttagaagccatcttctcaattaaattcctggcttcagcaggagtcatgtctgcaagggctccaccactggcagcatctatcatacttctctccatattactgagtccttcataaaaatattggagaagaagctgctccgaaatctgatggtgagggtaactggcacatagntttttaaattgctcttagtactcatacnaggctctctcactg

SEQ ID NO: 217529 - DNA, 390 bp, Glycine max
ttttttacacccttcgacctgaagaacactcgttcatcatccttcttcatccctaacaaactctctatggaccaatgaagccgaccgtcatcctatccatctgttcatcctaactatctatgttcagccatctccctccaagtgggaagttcgcctccatattgccttcgacgagaggatgcacattaacgagtgtcaatgattgctgctctctaactgcgtgcatgacgaacaacgttcactctcttcacattgtatcattcctatatgttctatgttgatgggtttagtggtttgcactgcctcaactgaaatcgagctccggtctcttgattcctcaaatatagctctctcagaccgaccatcttcttactacatatcacactctaa

SEQ ID NO: 217530 - DNA, 471 bp, Glycine max
  unsure (1)..(471): unsure at all n locations
ttaagcgactgagctgcagcttggntactattaaattaaataaatgttatctccatgcaaagaattatattaaattaactctccaataatttctttcataagtaatttttttatttcctaaaacacaaaatcaaagaataatccatgggaaagatgaaggatgaaaaaaggctgaagagttattgaatagtatgtaaccacatgaatacacacaagtaggtaattgagtatgagaaagattgaatatcataatactagtgtggaattcaactaaaacagggcaccttggagaattttttgatatggcaagagtgggattgtttgaatagatgactattgtggaattcaactaaaataagacaccttggagaaatttttgatgtggtaagagctaaaatggtgaatagatggaaagggttatattttagtaatgaagagacatatgtcacattcttcatttttcttctcgct

SEQ ID NO: 217531 - DNA, 467 bp, Glycine max
  unsure (1)..(467): unsure at all n locations
atgagtaaataaataatataggagaaatagtaagccatagttttataanaaaaaacttttaaataatacatgaaaaggaaagaaatggacagatatatatactaacgaaactaagaactaattgtagaaataaaagaaaccctagctaggccctgagatgtaaatgcgatagtgccttgccttgggtgaaataaaatgaaaaggcagacacgagttaggttttttgagtgattctcaaacactgaagccaaaagcagacactggctgctaaaacttgacatagaaaaaataattaataatgatgtgcatcttttcccaacacttaattgcacagaaacagaagcctgatgagcagatccgaaattgcttttgggggaaaactttgaaaccagatctgcttgaaacttaacacaaatgaagcaaaaaaaantaaatttgaatcgctgggttgagagccaaaagaggat

SEQ ID NO: 217532 - DNA, 329 bp, Glycine max
cggactgcgaagagaacatgcaaaccgggcttgactacatgcatttagaccctgcattaaggatagataaacccccttctactacggatttcaatacctttgaacagaggaaacttcatgagaagcggaatcactcaaatcgcatgagtcttatgatcattaagcgtggcattcctgaggtctttacgagtatgttaattgctattcttgagctttagtgcattaaaaataaggaagaaatagcaatatgcctctaatttacggttcttttgaggaaatcgcaaatatatttgttcttgtatgaatatattaaggtagaaactccattc

SEQ ID NO: 217533 - DNA, 471 bp, Glycine max
ctgcaagctatgaacttcttgtatgttggttatgttttacatctccagcatggcagggccatttgtggggttggcttcaatcccccggtgtgtgatcatgaagtcgaggaacttgtcgccgcctaccttgaaagtatatttttcagggttaaggcgcatgttgtatttgtgtagttcccccaaagacttcttccaggtctgccacatgttggggtatgctttgagacttgacaaccatgttgtccacatatacctcgacgttttgtctaatctgttgtttgaagactcggttcattagtcgttggtatgtcgcgcctgcgtttttgaggtcgaatagcatgaccttgtagaaaaagttggcatcttcaatgatgaatgtcattttctcctcatctggagaatgctttctgatctggttgtatccagagtaggcgtccaggaatattagcatctagaatccaaacactccat

SEQ ID NO: 217534 - DNA, 482 bp, Glycine max
gacctatgaatactaagcttataaatattacaacatccttcaaacttctgattagagtttggtatagccactccatcccttcttccacaatctcaaccacccaagcctttcatgcctcttttccagcactcatgccttttagttgtttagggctctattggctttgcacgccactcatcccaactacatctcttgctttctcatgcaagttgttcttgttccttctcgcctctgcatatttaaaagagagaacactatgaacttgcttaagatgagaacctcctacaccattccccactgttcttccagctccgcttgcccacccatatcctttcttaaaatgtggcatatttgcatgtaactttgtgtccctaaacataatcgagtccaattgtggttctagtaacctatcattcttcaatcgcagaaacctcacaaaaccatatctataacccatttatctcttttggtaccgataatat

SEQ ID NO: 217535 - DNA, 487 bp, Glycine max
  unsure (1)..(487): unsure at all n locations
gacccgggatccttgagtcacctgcggctgcagctatggacataaaactatgtcttgtttatatggnagnngagtcctatgggtctgccatggtcgcacgcaagcgccaaccagttgcttttgcactatggacggctgctaaactaagtgagttttgccgggacagaccttgggatcttggtattacttttggaagccatggtttgaagccccaacaccttgagaacaaatgtgttgttgatgggccaaggaatgttatgaatggaataaagtagcatcaaccaaatacacaacaagcaggcccaaaccaaaggcccaagaggaagataaccaagccacaatatctctaaatgattctacgtaaccaactccaacaacagtgctgagttggcaggaattcattggcttcataagcatatgctgtctgtcatctatgtttttntctgttaattgccaaaatctgttacaatgtgtttggatggagaaa

SEQ ID NO: 217536 - DNA, 454 bp, Glycine max
  unsure (1)..(454): unsure at all n locations
tcccgcatccatacttggaaggacttgattactttttttctttgcaanatcagtataatnccgatatggctcccgatcgcactcagctacagaatatgttcaagaaggaaggtgagacctttaaagaatacgcacaacggtggagagacctggcagcacaagtgacccctcccatggtcaaaagggagatgatcaccatgatggtagacaccttgccagtgttttactatgagaagttggtaggttacataccgtccatcttcgcggacctagtgttcgtcagggaaggaatcgaagtagggttgaagagacgaaagttcgattacgtttcctccacaagtgccaatgctaaaaggatcggagcaactgggacaaaaaggaaggagggagatgcccacgtcgtcacttctgcgcccgtgtgggtcaaaccctcgcaagcatctcatggtacaca

SEQ ID NO: 217537 - DNA, 433 bp, Glycine max
ctgcagcttatttgcatattgtaagctgtttaccaatttctgcacataacaaagagagcggggctgatatttgcacgtatagtctttagacagaacaggaacgttcattatcgagatgatgaagtctgctctttttaattcccagcaatgctatccatcatatctaaatgctcattcctggtgttgcccctttctcttttatcggagtgaacctattttatataatcaaagttagcctatattctttctcatagattattcatcttctatggaggcacatcaatccttaatcatattgagttatgagaagcagtatcgctaaagctccgcttatcatgtccaaacacgaaatggggttgatgtcgcgacacaaaaagatatctcatatatctaactttacgtgccccaaagggcccggcccttattcaaaaaa

SEQ ID NO: 217538 - DNA, 458 bp, Glycine max
tatagtatcaatatatcagggagaagagtacgtttcggttttcttctacatccaaagacatatattttgcacaatgaaaactttctagacaccaagtaggattgcaacatatgtcatttgatatgagataaagacatcattccttacagtgacattgacattcaactaattgtttagaaaatgattgatgtcttcaataatctaataacagtggaaatactagaattaaaggcaaatggttcagttacaacaagagttacgacttgggagagggggagggcaaccctatgatgagatgattttagaagctacaacttgtttacttacactttccttggattcatctaataactgtatcactcttctaccaataaagattaatcaattacaacatgcatattattcgtgatgtatgaacttaaagcgcatgacaagcgtcacatcatggtgtaagaatt

SEQ ID NO: 217539 - DNA, 233 bp, Glycine max
cgtgaaaatgatgctagccgaggctcctccctaacgcttccgtaacattcacgtgagtaagtacacgaagactctcgaccgtgctttaagaatcatcgaccgatcttcgtgttctatattcttcaacggctatgagcactaaaccatgctttgcaaatcatactatgtacccgtgggggtccaaatcttgagccgtgtatatatattctcgacttcaattactaacacacccc

SEQ ID NO: 217540 - DNA, 309 bp, Glycine max
atactaagcttaaagcgccgtccggagagaaggtcagaggcttattttttattatgagtcctggtcataggatgggtactaccttgccctcctgatttacatctgtgaattggcgagtggatgaacacccggacaataacgcaactagcataatgaaaaccgttatggctgtacaaactctatacatgagcctaagctctatagtgcctcttgtggtagggcgatgtgtatgttgcttctaaacttattatcctagagcactttatctggcctacggcttcacacctcagcatatgatggaacgtcttt

SEQ ID NO: 217541 - DNA, 473 bp, Glycine max
  unsure (1)..(473): unsure at all n locations
aagtcacctgaggcatgcaagctctagatatattatgcgccagaatcatacttccttttannaagtatggccatatgaatntctcgagagcattctgtgctcaatttcgagcgtctcgatatagactgcgcgttaatcggacttccgtgtgacaagatatgaccatttgaatttctcgagggcttccgttgtttaaattcaagcttctcgatatattatgcgcctgaatcagaccttccgttacaaaagttatgaccatatgaatttctcgagagccttcgttgttcaatttagagcgtcttgatatagtatgcgcctgaatcagactttcgtgtgataagttattaccatttgaatctgtcgagagcttccgattttcacattttaagcttcctgatatattatgaacctgaatcggacttccgtgggacatgttatgaccatctgaatctctagatatctatcggtgttca

SEQ ID NO: 217542 - DNA, 460 bp, Glycine max
  unsure (1)..(460): unsure at all n locations
taagctttcgattatatgcgcctgaatggacatccgaggataagtattgacctncgaacntctcgagagctctcgttgttcaattacgaacgtctcgatatattatgcacctgaatcggacttccgtgtgacaagttatgaccaattgaatttctcgagagcatccgttgttgaatttcgagcggctcgatatattttgcgcctgaatcggacatccatgtgacaagttatgaccattggaatttctcgacagcttccgatgttcattatcgagcttctcgatatataatgcgcctgaatcgaacattcgtgtgacaagttataaccatttgaatttctcgagagcttccgattttcaattcatagcatctcgataagggatgtggacgaaatcggacctccgtgtgaaagtttgaccattggaatcttcgagagcttccttgtttaattcaaagatctc

SEQ ID NO: 217543 - DNA, 463 bp, Glycine max
  unsure (1)..(463): unsure at all n locations
agcttgctgangcattaaagcataccatatggtttttgttgagaaaaataactattgactctgctaccctctacaataaggtttgttgcctttaacagtcaatgcatttggatgataaaatcctttcttgtgagtctatctattgattttactatagcaatataataaatttattctaattcttggcacggtctaaaaataattgaagcacattacttgtttggagcaagctatgacgatattgagattgttattcatcctcaatctatcatacattccttggttgaaacgcacagttaaaccttacaatatgctgtgctagtttttgcttgttaacaagcacacaaattctcactcatactgaatgacattacctaccagttgaaggcttgaacatgtgaattgcttaagttcaaactacagtgcaagccaaatggaattctaaacaagagacatataaaac

SEQ ID NO: 217544 - DNA, 466 bp, Glycine max
  unsure (1)..(466): unsure at all n locations
tncatcataagggggggtgtcgcaacctacccttcggagtgatgtctactctgngctcacgggtgtgctttccaaggaaggaaggcgcgcggagttgccaccaacttttattcgaggaaaatgtcgaaaaaactggaacgtgtggtctatgaactctaatcgtgaaaggttcgggagttgtttttacgcacggngaagttattagcaccccacacgtctgtcacaagggacgacagcctctaatcgagtgtgcaagacatgacttcaaaattatgtatttttcctttttttttttatgttttttagctttttatgggcctttatgtattttttatctttttgtggacgacaagggtgtttcccttgctcctatgtattcctcactttgataaatacactctcatttatgtgtttttggccggtttctctctgaaatattccagaactttacggattccacagtgat

SEQ ID NO: 217545 - DNA, 383 bp, Glycine max
  unsure (1)..(383): unsure at all n locations
acgaattctatcatatataaatcntgagataaaataaacgtccaattcagtactttttagtatgttcttaaaataactatattgttataatgatttttttaagattatattatcatattttatataatacgaaatctgattcatattgaaatatattctcgtgaaaaatatctctaaatatatacttataatcttttatagttctagacaactattgaacatacttaacacaagttatcctatctatcgcgtgactcctgtttcatatatattattcggttaggttatgataaaaataaatttgtttctctctgtattaaacttatatacttataagatactcctgcacaagcaattattttctttgctgagttctgggcttt

SEQ ID NO: 217546 - DNA, 443 bp, Glycine max
actaagcttggagcacctatctatggactggaagatggtttaattatatccgtgggaagggatggcggtgggtgtttgcaaaatattccaagaccgggagaggaagaggaaaggggatggctatttatgaaatgatagaagggtaatttagagttttaatagtttttgaaaaacatgggggttaaagtagtaaaattatggcgagaatagtaacaccttgggtaaattaacactgccttgtttggattgggccatttgcttgctacactttgtaggtcttgcaaaaccctttgaaacctacctgaaaagaaaattatatttttgcaccattgttctcctttgtaagttacactgttcttgaattattttaaacattttattcttaaattattcttatatataatagaacgtgtacattttaccagcactgtgacccataaata

SEQ ID NO: 217547 - DNA, 495 bp, Glycine max
  unsure (1)..(495): unsure at all n locations
atccttaagncacctgaggcatgcaagcttcttctattccttttcgagcgagaatgatctcattntataatcttcaagttgggggaaatatggcacacatattccattaataggtaggccaatttgcgtaaaaaaagaaatcacatacggatctaaattttcccaaccactatgtgtacgagtatcatagaaatagccatctattgtctcacaagtttttttctcaaacacgatgaatttgtgacccaaaacaaaatgaccatctattctgccttgagggtaccttgtataaggaggaggattatttaatatttgaggatattcttcatatggatcgtaaacttcaaaaggcccattaagatgatgatcgtgaagatatggctctccctctagcacaaaaattttaccttcaatggtttctaccattggagaacattttccatatagaaatctcttgatacgcgaagtgcgctttaggctaaatgcatttttctc

SEQ ID NO: 217548 - DNA, 461 bp, Glycine max
  unsure (1)..(461): unsure at all n locations
aactaactcataactaactctcatcagacactaaagagctgtaccttctttctttccaaatccaaaccactattatttgaataccttatcgtccacggactctagcaatgtaagtcccttgttaatgtccagccacttatattcctatcaaaagcgctttcatatttagagcccgaacaaggagaacgaactatacaccatgccagtaatggcactaggtttttccactggtggcaactattattcatgcggagcaagaactttaatttcatcctttcttctgtttttattcaaccaaataacttacaaactttgatttcctaccattgcttatgcatattggtattgctttgtctatattgtgttctaccgtctttataaactttgaacttgcttataaccatttggttcttcgtaaacatacaatttanaattttacatgtcaaagcacccatgccatc

SEQ ID NO: 217549 - DNA, 403 bp, Glycine max
  unsure (1)..(403): unsure at all n locations
acacttaggttctaggagagcattcacccattccttgtctacttatagaaccactttttctttgacctcccaacctttatggacatgccacaattaacagcgcacataggttgttttttttacgatgataggtattacaaaagaatggtagtctgattctctgagngtctgttactcatactcctggaacataatttacccaaaacactctcccaaagttggaaaaaatttgtcttgatccataataatgttctcctatagcctatgatagggtgcaaaaagatagcatttgcatttagctcagggttcaatgacacattcattcacatttaggctcaaaagggtgcaagggattcaatcattcattatcataaggtaactgcttggctaagtggctgaattg

SEQ ID NO: 217550 - DNA, 465 bp, Glycine max
  unsure (1)..(465): unsure at all n locations
ntaccgtcgaagggggacactaaccatcacattttctttttntttcagtcaaccccggtcaatgtgcgcccatattgttatccacactatcacaagtgtgaaattgaactacaagttgaatctatgctttagaaaggcctcattcaaccgagcaccagtccattctcttctccagtgctactgggtaagaaacacgacaggtcatggcagtgttgtgtggattactgctaatcgtcatatacgaataactttttgtaggattgtaaatattttcttgtttagttttatctttgctcagtagaggctctccgcatggaattaatgcacatttcacttcaatttcaggtaaaaaggagaaaatttgaaagaagcagtatgctttgtctcgcttagcctagaccatgcgcttagcgagtattatccgctaagcgagacatcagcccgcttattgagtaagaggaatct

SEQ ID NO: 217551 - DNA, 271 bp, Glycine max
tttgctatgtgctttctttcgtcctctctgcttctgctgtagctagattatggtctctcttatgttcctcattcggattcttcctagcgtgataacgtgcaagtctatatgttgatcagacaatggtatgccttgctgtcctttttcatattgtggtttcttggttttttacatcatatatttgtatttcttccatggtgatcaccttcaccatgtcagatttgaccttcctcacttattggttgccgtcataacatcaccactaattggt

SEQ ID NO: 217552 - DNA, 447 bp, Glycine max
  unsure (1)..(447): unsure at all n locations
ccttnaaactagcttgattagcggaggggggaataaacctgttttatatttcttgaaccnatcgngacgctttgngngagaatatatgtatcacaaacaaatcatttctgatgtagatgaatggaaaacattgatgtttcggaactaaacattgtttgtgtcaacaatgttagaactgaagacgtggaagatgcccaatccctcaaaatgtcacagttttgatgataacgaaaatattaaactctgatggtcaatctaatgaggcttattaagtgttacaggttttttttgcgtctaattatgatattggtattgtatttcttaccttagatgcagaatctattttaattgcacatttgctcaatgtaaccaaaagatggattcagtccaataatttctcaagttagacttataatataccgttctatatttgaaaacccacattca

SEQ ID NO: 217553 - DNA, 327 bp, Glycine max
  unsure (1)..(327): unsure at all n locations
gggctcatgggccaccttgggatacacaagaccgttgtcttactcataaaagattttattggccccatatgaagaaagatgtccataagcattgcactagatgtgtgacttgtttacaagccaagtctatggtgatgcctcatgggctatacacacccttacccatcccatctgcaccttgggtagacattagtatggactttgtccttgggcttcctagaacccagagaggtgtagactctatctttgtggnggtggataggtttagcaagatggcacactttataccatgccacaaggtggatgatgcttcctatatcttagaac

SEQ ID NO: 217554 - DNA, 456 bp, Glycine max
gggttcgaggtacttacccgttgaagatcgaatatcgattattaacgaatgaagaacgtcgaagaacggttgaaatctttgcgaaattcctcacggaaaacgttacggaaacgtttcggaagcgcctcggcttagattttcttcacggaaacaatttttccaagcaaattcgaaagagagagaagtgccaaaggggctgaacccttttcttcttcacttcctcccctatttatagcaaaataggggaggtggttgccgcccagctcgcccaggcgagccaggttgcttcctccagaagcaacagccttctggaggaatattctggagggcccaagtgggcctgggtgctatttgcacccacatgtttactaagtacacccccctctgctggtttttggtgattctcttttcgtaaagttacggaaacttacgaatatcgtaacgatacttgttttc

SEQ ID NO: 217555 - DNA, 462 bp, Glycine max
  unsure (1)..(462): unsure at all n locations
agcttcatgatgaatcaagattgattcaaagattttttgatgataacaaaggtgatgacaaaaagctcaaaggtcaagaatacttcatgataacaaagatgatgatctcaagaataaaagaatgagttcaagatgttcaagattgaatcaagaacacttcaaggttcaagaggaagtttgatttcaagaatcaagaatcatgattccagggtcaagcttccaagaatcaagatcaagattcaagactcaagattcaagaatcaagagaagaattaatcaagataagtatgaaaattttnttttcaaaaactgagtagcacatggtttttctcacaacctttttaccaaaaagtttttactctcaggtaatcgattaccagattattgtaatcgattaccagtagcaaaatggatttgaaaaagttttcaattgaatttacaacgctgccattgatttaaaat

SEQ ID NO: 217556 - DNA, 459 bp, Glycine max
  unsure (1)..(459): unsure at all n locations
ggctctaaattacattgatgttagtatttatgttatgtttgtttatgccattttngctttaagagtaatgtcccactaaaactaactttccaaatgtttgccttcgcaggaatggccccgaggaagcttgcctcaaagaggtccaggaaggacaaggtggccgaaggaactagttccgccccggagtacgacagtcaccgctttatgagcgttgtacaccagcagcgcttcgaagccatcaagggatggtcgtttctccgggagcgacgcgtccagctcagggacgacgagtatactgatttccaggaggaaataaggcgccggcggtgggcaccactggttactcccatggccaagtttgatccagaaatagtccttgagttttacgccaatgcttggccaacagaggatggcgtgcgtgacatgagatcctgggttaggggtcagtggatcccgttc

SEQ ID NO: 217557 - DNA, 283 bp, Glycine max
caagttttggtatgaattaattatagggtgctaattaaatacaatatttaaaaataaatcataatacaacatcggtcttttgaaaacctgatgtgtaagatacaacatattggtttttaaacaaccgatgttggaaagaagaaaacaacatcacgttgtcacaaaatcgatgttgttatttgctacaataacatcaatgtttagagcaaccgatttaatggtgataaattaacgttattaactggcaacattaacacattcgttaacatcggttgtctttaca

SEQ ID NO: 217558 - DNA, 456 bp, Glycine max
  unsure (1)..(456): unsure at all n locations
ccttggcttgaggacttgctccaatggctcatcatgtcntttattgaacctttcttcataggcttgaagagaacccatcaattggtctacggtcattgagtctaaatccttagactcttcaatagcacaaaccacataatcaaatttagcgattaacactactacaaaaagcagttttaacatcggcttattaacatcggttttgacaaaaccgatgttaagttaaacgcagtggcatatttgtaaataaagtatcattcttaacatcggttttccaaaaaaccgatgttaatgcatacacgttaacattggttttttggaaaaccgatgttaactaatgatgttaacatcggtttttcaaaaatcgatattaacgtataatatgttaacatcggtttccaaaaaaccgatgttatgcaacacgttacatcgatttttaaaaccgatgttactaat

SEQ ID NO: 217559 - DNA, 338 bp, Glycine max
ctccttaaacctccattaattgttcgctttaccttctcttccattgctgtgtcttcatttttctctccatgtatctcctcacatgtcttgtgctaaatgtttataacatgattctttagagtttccaccgattaaacttgctacagaagctagatttgattttctatgggtcaaatttcttgttcttattcttgaaccatgaattgagttgagtttacgctcctctgagttctgtcttgctattttttgtggctgaaaactaaatcataaaattcttaaaaaaatttacagtagaagacaacctcaaaaatctagagtgacttgttcacctattgtag

SEQ ID NO: 217560 - DNA, 437 bp, Glycine max
  unsure (1)..(437): unsure at all n locations
tgtatgactaagngggcatgagaagaatccttgtcgccttcatgctnncaaaaaaaaattgaatctcatcacatatttgggtgggcctgtgtttgcccattctttcaacattaagggttgtgttgtagtcttgtagatataataatgacatgtgtgaaccttcacctaacaacttaatatttaaggagagttggtgattgacacaattattagtcattattataaatattattaaaagctatgtttgttctctgttggtcttttgttttccagtacatgatgggattgagaggaaaaaataaccttaattattctaatcttataactttctgaatgatctgctgcttaggaataagcagtactttcacaagtaattgataagaactatgaagctatttacgacatatctaactatacgtagaatgttatggtaatta

SEQ ID NO: 217561 - DNA, 468 bp, Glycine max
agcttatagtaatcgattacatagctctttgtgatacaatgattgattcttcaggagtctttgatttaatagaataccaaatgatataatcaattacttctctcttaaaaagtgtttcagaagtgatcaagaacactttaatcgattacatcaagaaactaatcgattacattgttcttggaagtcttctagtctttgggaaaaaacacttaatcatttgaaatgataatataatcaattaattctttgaaataattgattacattgtatatttaattgattacaggcggttataatggttttctttataaatagtcaccttgtgttctcacttctaacaactctagaagcgtgcaaaaaaaaaaagtgcaaaatttgtatgagctgaagtatgtgataaaaagagaagataatattcttagaaacaatgtgactcacaaattctaatctttgaatatgaaaatcata

SEQ ID NO: 217562 - DNA, 469 bp, Glycine max
  unsure (1)..(469): unsure at all n locations
tagctacacaccacccctctaataactaagctcacctccttgagaagctttcttaanaagattcctaaagaagctagagcttagctacacacacctctctaatagctaagctcacctccttaagatgagaagctagaactntgctacacacccnctataatggctaagctcacccccatgacaaaatacatgaaaatacaaaaaaagtccctactacaaagactactcaaaatgcctcgaaatacaaggctaaaatcctatactactagaatggccaaaatacaaggcctaaacgaaggaaaaaacctattctaatatttacaaagataagcgggctcatacttagcccatgggctcaaaatctaccctaaggctcatgagaaccctagggccttcccttggatctctggcccaatctacttggagtcttctatccaatgcccttgcggggtaggattgcatcattccc

SEQ ID NO: 217563 - DNA, 445 bp, Glycine max
agctggggatgaaacaaatgtgattcataaaatattacatctctgctgagaagaactttcttttccaagggtgaccagatcctatagcatttcaccccatcaccataacccatgaacagaccctttcttgatctaagtaccaaggtttcttcattgacatgataataagcattgcagccaaatactcttaggtttgagtagattgttgttctgcccttccagatttcaataggagttttaagtcctatagcagtagagggtgttctattgatcagaaaacaagttggattgatagcttttccccagaaactgttgttgagaccagcattagacaatagacatcttgttctttccaagagtgttctgttcattcggtcaacaactccatattgctgaggagtgttcctaacagtaagctgtctaacaattccttatttctacagaa

SEQ ID NO: 217564 - DNA, 461 bp, Glycine max
  unsure (1)..(461): unsure at all n locations
taccttcaatctaagctaagacatgagggtnattggaggtcaaaagtgtgtgtaattttgacgttgaaagaaacttgttttgcattcaagtttgattggaagcttattgtcatgagtgatttgcaaaatgatgctacgccaatggaggttgatctttccttatgccaattatgggtgtgggtttattatctccttataaaatatcacacacaaatgatgcttgaaaccattggtaaatgaattagtgggtgttttggatgggatccatcgagggagaataggctgggaagatcaacgagggttagggtggttgtgaatatctataagccactcagaaggggatgatgataaagattgaagggaaagaggtgaggtgatgcaatcccatcctcaaggaaattagatagaagactccaagaagattgtgcagagatgcaagagaaggccctatgattctcatg

SEQ ID NO: 217565 - DNA, 448 bp, Glycine max
agcttaatgcccaatgggagttgcatcataagaatagatatggactcagtgatcatagcagcgccacaggaagttataaatctgaagggaatggatttagactggtggatgagaaaactaatcccactgatcatgaacttgatgaaacagatacgattttgacattacgagaatcggttttgaaggcttgtaagattatggataaagaactgaaacatcatcctgatattgactgcttttgtagtgggactacagcagttactttggtcaagcaggtaagaaatataaattacaatgtaatgttctcttgattaattcttatttgctttttacatgtggtttactgatgttctttcaggggctgaaccttgttattggaaatgttggtgactcgagagctgtattgggtacccgagatcatgaggatatccttattgtggtcagttga

SEQ ID NO: 217566 - DNA, 461 bp, Glycine max
  unsure (1)..(461): unsure at all n locations
cttgtacgttntataacgttgctgcatgcaaatgtatatctttcgtancaattgntaatttttatcactttgtacaatttgaacatgatatatatttttcttttcgttactgtacgatttttaatggtaatggtctaatggatgccaataactatgctgtgccatatctacaaagagcgtgtaattgctttgtagtcaacaatattaatttcatgtcctgactagctaatcattttttaaaattatttaagttgtttaaaattgttgttagagcgtccactatgttgcggcctttttcaatgacagtaacaaaactggttttggttgctgcttgttagatgaatntggaaatttcgttcaagaccatacaaagtggttatccacagtgttggaggtcaaagagggggaggcttatgctatgttacaagctatgaagtgtgtagagcaattactttataatg

SEQ ID NO: 217567 - DNA, 459 bp, Glycine max
  unsure (1)..(459): unsure at all n locations
tcttcttccatggcttattccctagtggatggcgcctgctctcacctcttcccctttatctttcgntgcaactccatggttgaaaatcaccattgaaggacctcattgaagctcacagatccagcctccatagaagcttctcaagcaagcttccatcactagctccttggtcacacaaagatgagctacaccaataaagagatcataagtctgttgaggtcagagcttggtattatgacaaaccaagaggtagatgttgtgacaccaatactcaataagaggcaattgagttggttaagggatatatcacacacatattgctagtacatcatatgtttgggctattagagcgcatatgctgtattttctctancaataccatattttttacaagaactcaatgcatgtacacattagatacctacagtacctcagtgatctagatcactacaacgagta

SEQ ID NO: 217568 - DNA, 479 bp, Glycine max
  unsure (1)..(479): unsure at all n locations
agcttcaagccaaggcatagacatcttgtgcatgtcttgaggattcnnttaagaaanaatgctcaaacttcctacaaaaaaatctggatttcaagccttaaatagggtgggttgggtccattgcttgcgccgcttagtgcaaaatctgaatcgtcttagcgtgcatatagtggattgtggcttagcgcgcttctctcgcttatcggatgagctgaagcagtgcgcttaatgacctggagcggtgcgctcagcgaacctggcagctcattttcttctggattgttcctcgcgcttagccactgagtgtcgcgcttagcgaaagctcgctaagccaatatgttgagagaaatttgcctaattaacctgaaattgagagaaggtgaaaacaatgacttttccaatttgcctaattaacctgaaattgagagaaatngatcattaatcacacaaaacacaagtatatattatctatgacctat

SEQ ID NO: 217569 - DNA, 440 bp, Glycine max
tgtgttgaattagtctaaacttatgagggattgggtttattactttagacttcagcatagaacacaagaacatgattaattagagaaatatctttatatgcataaactcgtttgttagaaagacccaatgctttttacctattgttgtcaactgtttaattacttgcatttactactgtttaacataacatctagtttactttagtttatattctcaattatcaatgtttgttcacacaatgccctatttctgaataaaactctgtctaataaacaagttccctgagtttgatactcggattacgccgttttaattttaaatgcttgacgacccggtgcgctttccggtatttcatttcccttgaatatactgcttgtaaatttgagagaaatgaactgtgttgaagggtaaacaaaaatctaacatcaaagcatttatg

SEQ ID NO: 217570 - DNA, 394 bp, Glycine max
taacttaatgccattaacctagggaattaaaaaaaaaaaaaaaaacttaatggctgagtgtaactgaaattgtggcaaccaaaagtcacccccaacagccaacaagtcagccaccatttggtcttccaaaaggctgatgcctaggttgccaattgggcccttattacaacttgaactaaacctaactaaagcacttttagttgattcacccaaaacatatttttggtcagccaactttacaaggattgggccattattttgacaaactaaacactctaaaattgagacaaagtggtgtcatttagtcctcctccatttgggccatgatacaactcacaaccttggacttttctccttgaaacttgggcttgtattcagatagtatggacaacac

SEQ ID NO: 217571 - DNA, 452 bp, Glycine max
  unsure (1)..(452): unsure at all n locations
cgaaagccccactccatcattaggattagttcctgacatctcaaacaaacaaatcaaacgtaacaagacaattatagttgctgtttgaatacctcacccactcaagtgtatcacacaattatggcttttctctaatgaaacactcttgccttttaccactctaattccccttgagttcttaggcaattcaagagattatggccacaacaaagaacaattcaccaatatgtgtaaggtaaggctagagagacaaggaaaaggttaaccaagaaaaaggctaacaatgtttttaggcacaaatgaaggaaataaaattcagaatttaggaattcaagtaacaatccttcatgcaaccaatatattaccttanagaggggtttttttttaagttcttcaagcatgaaccattcagcccaatttttttttttttaattntgcttatacgaaattct

SEQ ID NO: 217572 - DNA, 450 bp, Glycine max
  unsure (1)..(450): unsure at all n locations
gtcacctgcngcatgccaagcttggttaggctattaatagttctntattacaatacacatacacatcagaaatacaaacagtacttgagttacagtagtatgaaaaatactcaactaaaatagcttaagcaacagcaaacaaataattttgattgactcattgaccatcattgtcctgcatcacttgcataagacttgacttacagttccattcatttgtcaacaactataactgtgtacttagagttatgccaatatagtggtctcattacacaaattctacaaatgtagaactttggaacttgccatttcttgctcaaagagaaatagacaacacaaaagattagtctgattaattaattatacatgtcctacttccgtaagatactcagacttttagaaacatactttgagatcaatgtactggctcacaacattgctgtctgttga

SEQ ID NO: 217573 - DNA, 455 bp, Glycine max
  unsure (1)..(455): unsure at all n locations
ttctggtcgggacaatggagatagctcttggcgtttgtttttctaagncncagcacatgaatttggaggttaagcgcatgatgaagaaagagtttgagaggtttttgcctgagtatgggctcactgatttttactacaggagtttcattaggactctcaagtatagttctaagatttctgctgcggatgtggtgtatggtgtgactgccttgcttgagtcttttgttagatctgatggctcttgtgcttctaagcagtatggtgtggcctatgatgcgctgtctttgaacaatattgacaacttgagaactgggatgcatcatgccattaaaattcagagagcaagtttaatgcaagggagtgctgcaattactaagaatgggtgtatattgagtgggaggagtatccggtggctgaagctagaggattcaaatgatgcttcgctgttggggtcc

SEQ ID NO: 217574 - DNA, 420 bp, Glycine max
  unsure (1)..(420): unsure at all n locations
ctatcactaaggttagcagccatgatcaaggcatcgtaatggtgctgcacaaagcctgaaagtacatttgttccatcctacatacgcaacatgccatgtgaggagcaagactgaataatcaaagaaaccactaccttcattaacttttccaatctcatcatagatatttagaccaagcaccaatagcaggtatcaactgtttactccagagcaagactttggcttgtacaactgaggcattttatgactcagtaggagcatcttcaccgggcaagccgaatattcgaagatttcggtccatcgatcccacagctatgtatctagaatctggaccatattttacacacgtgttcttccctgagaagaaanagttcgagttgtgtattagtaactgaacaaacatgacatcatcaaaccctc

SEQ ID NO: 217575 - DNA, 401 bp, Glycine max
atttttaagaaaataaggaaacattgacggtgtaaaatatatacctcatctaattataactcatcatatataataatgttgttgatttttataataatcattctaaaaattataccaagaataatttacgagtaaatgatattattattgtgttaccattatattcttattttagttgaaccaataaatcaatacaacatcaatttagtccataacattataaaccttttttagcttcaacaagtaacaatcaatttaatcccatatttaagaaaaaaataattagaggatgtaaaattacttataagcaacccatcatcaaaaataaaaaaaaccttagaagcaagttcctaaatatttataaaagaagctacatcaattggttacatcagtcttggatg

SEQ ID NO: 217576 - DNA, 468 bp, Glycine max
  unsure (1)..(468): unsure at all n locations
agtcacctgcngcatgcagctngggactatagaaaaccactagagattcctctatcactgccagactacacacgtgagcctgcttagaggttagggatgaatttatcacaattggggttagaatgaacatgtatagggatccttagaggattaaattgaggtttatattgggatgtttattgcattgtaattctttcgttacgattataattacaagattgttgtgtttgatggaccaattgatgtcatgatgcaaattagctaataaattgagtgttcttggtgtttttgtatttttgacctatgattctgattcctttgattctgatatgatgatgtgaaattctgtgagggatattacttctcatgttgcgagaaacatttttgtataatttttttctgtgtttttgaaaagattactatattagcatgataaatcgttatattgagatcatggaantttgattg

SEQ ID NO: 217577 - DNA, 462 bp, Glycine max
  unsure (1)..(462): unsure at all n locations
gatagaagaattaacatttagcctattatagattgtgtgttatttattnatttatttatttatttttggtaaaaacaactaggaatattaaagatttaatgtgaagaagacttttaaataagctaccaggccaggctaggcttttaaaaaggtcaggacgagccaaactaaaaatctttgataggctatagactcaggcctcaaaaattaatcgtagactaagatcagaccttttaaagcctggtctgacctggctggcctattcccacccttactcggcacatcttattctgatccaatggcttctataataaattttcattttgcttcttaaaaaaaaacatgaaacggacgaggtttttactctttataagcataaaattaaagaaacgaagttaatggcataagatatttgaagtgtaacgaaatcgggttctgtgtctcttttttgataattatcta

SEQ ID NO: 217578 - DNA, 408 bp, Glycine max
  unsure (1)..(408): unsure at all n locations
ggaacgngaagaggtgggtgggtatttatttatctttaaatcactcaatggttgtatttaacattttgtatttggtagcttcatatgcgtgccgtgtttgctaaaatctatcaattgcataatatgaagacacacttgttacatgtctttccatgtgttttggatgaaaatttggactttcttaatgtgagtttcaaataataggattcatacatttccatcagtaacgctgtatgattattctatgtttcaattatattcttattatatttgcaaattaatgccttgaaagtttgatttatgaatggcttttatatttaagattgttactatatcaatatttttccataattattaatatcttaaatttgaatttttgtgtcatataacttttataggggtactcat

SEQ ID NO: 217579 - DNA, 463 bp, Glycine max
  unsure (1)..(463): unsure at all n locations
gctgcatgaatnacattctgccgctttctctagcaaattctttctgacatcatcaagatcttcatgatttacattctcctcctttgtgatgatgacaaccacctataggttaggagcaaaaacaaagaaaaaatatctatttgcatatagtttactccctggtgattttgcaatgttttcttatatgagacaggtgaagaattcatatttttcatatataaaaatttgtctcataaagaatagataatttttcttattattttatcttttatctttctctcccgctttgtcaacatcaaaaacaaatcatgaatagagaggagaaaaatgttaccacttgttgcaatgtatgagaatcaagtgataccataaggcattaaaacaatcattcaatattaatcaagcaanaacaagtatagtgagacatctatcaaaaacacaatccaacataatcaatcaaata

SEQ ID NO: 217580 - DNA, 467 bp, Glycine max
  unsure (1)..(467): unsure at all n locations
cttanaattngaattaccatatatggtaatcgattacacatggctttattttgtattcaaatttaatagctgtttgtaaatcagttttggctactggtaatcgattacatcctctggtaatcgattaccagagagtaaatttcttgtaaaagactttttaacttataattcttggccaaaccttttgctacttcaattggaattcccttcctatataatataccctttctaagactctatagactgtcttgatcatccatcttgaatatctttaattgctttgtcttgaataaagctttgagacgcatgtgatcttttggcatcatcaaaacatcggcttgatcctttgtctacacatccaccgtagataaacagtgaccacaacattgatttctctgaccagatgcacaatcaagtgaatcatgatgtcaaagaaagcatggggaaaatacatctccaactgacac

SEQ ID NO: 217581 - DNA, 440 bp, Glycine max
  unsure (1)..(440): unsure at all n locations
agcttcaactgaagtctcctacattatattcatataattgtatnngccgggcnctctcgcacaaagatgttagtttgtgtggaaaatggatgagccaaacaagtccaatggaagcattttcttcgtcatgcaatgcttagtttcaaccatttatatgtacatttaaggtttatgcaaaaataaagactgcatttatgaaggaaagcctacacaaccttttattttatagtttatacaaagaagaaaaacatcatatggcctctattctatggtcgatttaattggacgaatctccacgctgtacatttaatttacaatccaagagctttctatatttggatctgaaatcaatccatcgtcaattaatacatacaaaccaaccattatatataactaaacgaacagcatatatgtttattatacatagatcagcgaataaa

SEQ ID NO: 217582 - DNA, 468 bp, Glycine max
  unsure (1)..(468): unsure at all n locations
aagatactaagctgtaattttttggaagggctaaaattaatctacagtttttacttccctgtaaagggtttatctgcgagaaaatctagacccccatggacacatgaaacaatgccggaattaaactaaacgcagctgatcccattgtgtgtgcataactaaaactaaaaaataaatatatctctatatacataagtactatatactatctactatatatataaaatatatatatccatggccatgctgatctcagatttccaaaaccttgtattatgttctacgaatttggatttgtgattggaaaagaaaaacccttgccacctaagttcccaaaacgcgttctaaacagatactctttgtcacttaatccatttgtntatttcgtctcatcaatccaatccccaaatcttcgagttccaaaagttgacacagaaacacatggcaccctctcgtgaatttccatct

SEQ ID NO: 217583 - DNA, 463 bp, Glycine max
agcttagccgctgacattgtagaatcatggtttcttggttcctacccaacaatgacatcaagcacatgaactgcgtctgaaactgtcctacatattggacttttcacaaaaatacataatgttaaagatttaaaattcaagtagaacatttatatgtgggggttgctattggtccttaccatcatctcaaaatttcaaaaatatctatccgcccatgcacaaagaaaatacacttttggtgcataagtagaattgcaaaaaacattgcacaatggaatcattgtactttattttcgcacctctagctgcgcaacagaattataattcctttgtgttacataaattgctacacaatgaaatcatgatttccatgtgtggtaaattatgcaccctaatagaatcatagtgtggttgtgtacccagtagagggaagaaaatacctgagaagggaatgatacatgat

SEQ ID NO: 217584 - DNA, 339 bp, Glycine max
acacccgtttaaaataatgtttttctttgataagcttaaattaaatttggatattgttacccgttggtaagaaattaaaagaaaaaatatttttatgtaaattataaaaaaataaaaatattataaatattataatttttcgtcttaagcattaactagttgtcttaaaatttatctagatattttcatcattatactaataacaaaattatgcatgactagttaagattaactgattaaattatgtagttttttataaattaataaattattatattaatattatttaatgatttatatttttactttcctatactaagctttattttaggttttatt

SEQ ID NO: 217585 - DNA, 443 bp, Glycine max
  unsure (1)..(443): unsure at all n locations
gcttcccaccaagagagtgccttggatattaagcttatagaggaagggtcaatggaggaagagaatgagagagagagagagagagagagagaatgtggcatggaaaattgaaggaagaaagggagagagttcgaactttgaaatgtgtctcacaagactctcattcatcanagttgtgaaaagtgttacacatatntttatttatatcctaggtcactaactaaaagaaatctactttgtgaatttctttttcatttcatgtgaatctaagaggaatattccaaggatatgccaaaggcatcttancatattctaagaatatgccaaaggcatcatagcatattccaagaatatgccaaatgcatcttagcatatttcctttagatgtcacaagaatgaaaggtgtgactctagcacatgggaaatgaatatgccacaagaat

SEQ ID NO: 217586 - DNA, 474 bp, Glycine max
  unsure (1)..(474): unsure at all n locations
agctnttcactanaccttgctccaatgatgcaggtgagtgcattntatattcctacaaaataattcattaataagcatatgcaatctagcagaataactagtttaaaagaataactacaaattaacaatttacatcaaaaagatataaacaaagtcctaaataagagaaaagatgaaataattgtctaaatccaaatttctcaatggaatatttttgacaattatcagtgttgcaagtggtgcttatatattaccggaaagtaattgcattaactttcaattcatgacgatctccaaaagcaaaacaccctataaaaggaaaggaataaaaagcactattcatttgtgttttcctgaatcatcttctaaattaattaccactggcatttaaagcataacacaattaattaagttcagagatgaatacattggcatatggcatgccatggttgtatcatggcatcatcatcttct

SEQ ID NO: 217587 - DNA, 274 bp, Glycine max
tttttactcgggacaagaaacagcaatacatgcaccgggtgggatatattggacaatatactcgcccctcccaatattattcctatgtgttgccaactgtcttatggctcgagagtgataagataggatcatacagagaaaacttcaagctgttattagtaacacacaccagaaaatttacgcaatacgatactattcttattttgagacacgcgctatcaagcaatagggactattacatgacccacatgggtgagaactgacaccatatgat

SEQ ID NO: 217588 - DNA, 466 bp, Glycine max
  unsure (1)..(466): unsure at all n locations
taataaagagaacaaacacattatgaaagnggatacccatgantattagaaatacataacccagtagcaaatggctacagataaggtagcacaacctttgttcagaaaatgacattataaatattaaaaaaaaataaaactaaaaagaaggggcaaatggagaatatttgtacagagaaaagccacaaaaccagtactcactaatgtgaagcctacttattttttattttataaaattattgtctactaatactaatatagctaatctttcagcgatagaactctagcaaaatcttcaaccaagatataagataatccatggttctgggactatttgacactgacagcaaacataagatatatttatatgacaatcacatgcttcttactctaggacaaagtatgaaatcttcttttgctttgttagcaatatattgggtgtaaaaaacctgctntgaagtcagtt

SEQ ID NO: 217589 - DNA, 416 bp, Glycine max
aaaaaccacacaatgttgctttttgaatactaatggaacatgcacatgtgctactggcatatggtatcaacacaatatatgcacccacccccaagatgataaaaatattcatacacggcaactagcatgggaacacaatcataaaacatgagagccttataagtgttaatatgagaaaagcatattaaacagggccaacggagaacgacataattttaaatgagaaactttatttttccaatgaaacaaactgtatgtgagatgtattgtgagaaaatttcatcattgtttgtacaagaactacaatccaatttgcagaatgataaaagaagacagctaaactgcacaagaacacttaactttttgaaccacatatttaatgcataactgcacgctatatattaaatccaacctaa

SEQ ID NO: 217590 - DNA, 451 bp, Glycine max
  unsure (1)..(451): unsure at all n locations
tccatcacggggagcatcaaacacatgagagagtatgttttcctcttcatcnganatacagacgccacacacctgcatgaatagaaatataataccgcaagaaatcaatcatggattagaaatggcgtacgttcagtttggcatatggagggagggattagcacctgtgatgctgctctctgaaaatcagattttgtcaagaccccattaacttttccataactgaatatggccagagagaaggagtgcaacttcttgcgtaattccgcaaaatcatgaaactccttgaatggaattctattgactcttaggttctggacactgtttaattcttcgaccctatccaatactttgtttatgcgactgatgtctgcggatgcaaccaaggacagggcaaacatcttggctgaaagggccttcttattgtagcaaatggaaaactctaacctaa

SEQ ID NO: 217591 - DNA, 441 bp, Glycine max
  unsure (1)..(441): unsure at all n locations
agcttatgaaaagtttagccaaagtctgtttttcatatgnctatggcccaaggagttaattcacatataaaggaaaaggaaaatatctgaatggaaacatcattgaaacaagtttagaagtattaataagatattttcactgctagattagcaaacctaactaatgacatgattttccttttacttgcttcacgctgaacttgaagctgtatgaaaaccatgacttattagtcagtataatgctataaaacctacaataaattaaaactattatggtttataactatttgaggctttctctcagtcatgcaatcttgttgaacctaataggatgattgtgccctaatgggaaaaaaaggtgaagaaaacaaatagatgaactctttacgaacaactattaatctatgtgaatatcaaagtaaaatactagatacacctatg

SEQ ID NO: 217592 - DNA, 454 bp, Glycine max
  unsure (1)..(454): unsure at all n locations
tgtccttcanggtttggaatgctgctgaacattcttcatttaatttgaaaacaatgtctntgtttagcagattactcagcagccttgcaatcttagagaagtccttgatgaacctcttatagaaccctgcataccctaggaaactcctgatgcctttaacatttgatggtggtggcaacttttcaatgatatctatctttgcctgatctacctcaattcctcgggctaaaattttatggcccaagactatgccttcttgaaccatgaagtgacacttctcccaatttaacaccaagtttgtttctacgcacctttgtagtaccattgagggccttacactggaatgggggtataagaactgattgaataaggggtgaaagaaagaaatggagaatatggtgaaaaagagaagagaatttcctaaggaagagttctcacgctttgggtagtagtg

SEQ ID NO: 217593 - DNA, 396 bp, Glycine max
  unsure (1)..(396): unsure at all n locations
cttacccaaagcaagaaattacgtgcatatagaacctcagatgtcttagaatcgatacatacagacatttgtgngtcatttaatacaccttcatggaaagaacggcaaaattttaaatcattcatagacgataactccagatatgcatgcgtgcttctaatacatgaaatagcacaatcgctggatgtgatcaaaacatttaaagttgaaatagaaaatcagctaaacataagaataaagtgtgtctaatctgaccgcggtggagaatactatggtagatatgacgatttaggtgaacaacgtccgggcgctatgccaagtacctataggaatgtggaatcgacccacaggacaccatgccagggtcacctaaccataagggtgaggctgaaagat

SEQ ID NO: 217594 - DNA, 277 bp, Glycine max
atacgtacacaattcataccggatagggaaccacaaacgcattaattggactggcaactaaatcgaaaaagtccgctaataatatgacacgagattgaccgaaaacgagaatgtgcgatactgaagaatcatacaccataatgtcttgcgcgagagaaaccgtctatgtatgcggccgcaacaatacatgccatcaagttatgagccataaaatctcggccgtgcaagacgcaacggacgataactaaagagcaagggggtgccatgcatatgccaa

SEQ ID NO: 217595 - DNA, 458 bp, Glycine max
  unsure (1)..(458): unsure at all n locations
agcttngtagcatatggactaaagttattgatctttgtacatcctttcttactggtactgatggaggagctggagtggatgatgaagggatgtcctccgttctagctctttttcttgatgtcatctgtaactaaaaagaactcaaaattccttagaccaaaattgttcaagttaaacgacaaaaataaaggctgaaattaacaataggcgcttagcgggatatagcttgctcagcactccctgagaaacataacatatcaacttagttggagccaagctcgcttagcctaatagttgtcgtgatgaaatgcgcttagctcaggtgaactatgcttagcgcgaggctttcaacacaaaattttctaagttattttggcttagcgattcagcctcacttagccacaaggatttcaacaggaggatgagtggtcatccttacaagatgaactcgctaacat

SEQ ID NO: 217596 - DNA, 454 bp, Glycine max
  unsure (1)..(454): unsure at all n locations
tgtgcgaatccaatcactcctgcattatatctataggagtgcattctttctttctttacccactcctcacgtttggtttttatggaaaaacaccataactaaacgcgccacaaggcatccctatcgcaccagatccaaatctataacgatgggtgatcaagaggagacacaggaacagatgaaagccgacatgtcggctctgaaagaacaaatggcctccatgatggaggccatgttaggaatgaggcagctcatggagaaaaacgcggccaccgctgccgctgtccgttcggctgccgaagcagacccaactctcttggcaactgcgcaccatcctccctcaaacatagtangacggngaaggggcacactggggcacgatggcaaccctcacctgtgatacaaccgagcggcttacccttatggattatcgcccaactactcaccacccgtc

SEQ ID NO: 217597 - DNA, 458 bp, Glycine max
agcttgtaaagcattgatttgacactgcttttctcatgagacctgtcaatccttcatccactagatcaaataaaagaggagccaaaggatccccttgtctcaaccctctttgaggtttgaattcagcagtaggactaccattcacaaggacagacatagaagctgaagtgaggcaacccctcatccacctaatccacctctcatgaaatcccattcttctgagcatatatagaagaaaatgccaagaaatagaatcgtaggccttctcaaagtccactttgtaaaccatgcagggtctcttagatctcctagcctcctcaaccacttcattagccaccaagaaaccatgtagcaactgtctccctttaataaatgcggaatgcctttcatcaataatctgaggcatgatctttcgcatcctattagccagaaaattagtaataactttataaatgcat

SEQ ID NO: 217598 - DNA, 456 bp, Glycine max
  unsure (1)..(456): unsure at all n locations
tctnttggaccttgaacaggcaacgaactcctctttatttccatgctatgngctcgcgactggtccctttcttccttgagttcactattgctaccccatagagctccgcgaaatttgttccgaccatactcttccttgcgagccctcttggtctcttgttcaagggctcttgcgngaattgcattctcttcccgtaacccggcacactccttccgaacgtgtgtagcggccaacttgaacttctccttggcaagttttgcctttcctaactcgcttttgagagcttggacttcttcgtcctcttccagtgcttcaaagctctctttgctgaagactnttaacttggcgagccaatctatacctcgtacatgaactntcagccattcgtggtacccaccaatgatgccattacgaatgcctctaagctcttgatctttctttaacggggtttcccac

SEQ ID NO: 217599 - DNA, 379 bp, Glycine max
tagtttaatatctttcattattacggtatccaaagtatcaagtggattgagatcataaacaagtccctttgcatctctctcccaagtataaccaatcaacttcaccaaattggggtaacctctcaatgttggattagtccaaaattttacttcctcctgcaaaacaaaatcattgagcttccaaaatccgtgacagataaaattaaatttggaaaaaatataagaaaaaaggttatacaaaagtgcaagagatggggagggaacttgctttgataatcaaattctcatcatcatatttggaacttaactgttccattctttcaccatcccatatctttactactacatgttgaccttcaaggatgcctctatacaatct

SEQ ID NO: 217600 - DNA, 459 bp, Glycine max
tcataaaagtttatatggctggaaacaagcacctatgtattggtataagaagtataatgagattatgagctactcatgattcaacagatgtgacatggaccattgctgctatgttaagaaatatactaatagttatgttatccttgtcgtgcatgttgatgacatgttgattgcaggatctagtatggcagaaattaatatgttgaagcagcaattggcagaaaactttgaaatgaaggatcttggtctagctaaacaaatccttggtatgagaattattaaaaacagatcagaaggaattttgaagttgtcttatgagaaagatatacacaagttgcttgacagggtttaccttgaagattctaagaccaggaatagccctttgggatctcatttgaagtttttaaagaagcaatctttgcagacagatgaagaataatgttacatgtcaagagtacc

SEQ ID NO: 217601 - DNA, 478 bp, Glycine max
  unsure (1)..(478): unsure at all n locations
aagtcacctgcggcatgcaagcttcatgatgaaacaagagtggttcacggtttttttatgactacaaagatgatgacacanagctcttatgtcaagatcacttcatgataaccaatatgatgacattcaagactgtgttcaagattgactcaacaacacttcacggatcaaaagaaagtttgtgttctaggctcttgattcaagaataatcaagatcatgatcccggattcaagaatcacgagaagacttatgttcgatcagtattaaaaaaaaaaattctgaaattgagtagcacatgaatttttctcaaacaacttttacaaaagagttcttgctctttggtaatcgattaccaaattattgtaatcgattaccagtagcaaaatgcttttcataaaagctctcaactgaatttacatcgctgcaattgattgcaaatgttgaatcgatacaatgatttgtaatctataccacttg

SEQ ID NO: 217602 - DNA, 418 bp, Glycine max
  unsure (1)..(418): unsure at all n locations
tatctcatgtgagacaccctaatatgagcagtggcaaactatcatagtttattnggtgccaacttaaagaggaattaaacacagaatatgcttaaagtgcatgaaagaggtaaataatgctcaaaataggcaatcctatttgcttgatgtcacccacagtcggcaagtacaacttatagaattgctctctgaatgcaaacacgaacctacctatagtggagaaaccaacatgaatgagacaattacaatctgtttgatttgtataaatctaagggacagcaagagacatctactatattatagtgtttgagactgttcaaggactatagaccaatcattgaccatgattgatgtattagcatttggatgtcactaactcgttacttaatatgtgtctcaacttgcaatgacaacttca

SEQ ID NO: 217603 - DNA, 418 bp, Glycine max
  unsure (1)..(418): unsure at all n locations
gcacctgggctgcagcttggacatgaagtgatttggttattattatataaanaaaannccattattcatttatttattggcttaattggctccagaaagaagcaagatgataaaagcagtgctggtgttgaacacggaggggaagcctcgtctctccaaattctaccaatttcaggtgccttgcgattcacattttcatttatcgttcaattgacgcaatttttcacactgtttatttttttggtgtggnggtagaacagtctgtggagaagcaccatgaagctattcgcaatgtggtttcacgtttatctcactctcattgatctggtctttctttttgcatatatgctttcttttcttgccaacattgtgtcttttgcagtcttatgctggagacctgaacatgtcaacacatttg

SEQ ID NO: 217604 - DNA, 453 bp, Glycine max
  unsure (1)..(453): unsure at all n locations
ctaagcttgcgccttgacaccctttggataccttatagacatgcacttttatgccctgngttccgacttgtcttgccttatgtgcacataggcaacacaaccaaacactctaagtatgtcataggttgaaggatgaatagaccaaacttcttttggtgttttcatgttcaaggttgtagatgggcatatgtttatcaagaaacaagatgttgtcacagcttttgcccaaaaagtttttgggacagctggactcaaaagcatgcatctaaccctctcaagtatggttctgttgaacctttctgctaggcaattttactggggtgttctaacaactgatttatgcctagtaattcctatcttcctgcaataatcactgaaaaaatcataacagaattcaagaccattatctgtaccaaacctcttgattttctttcagatgattctcaatcattg

SEQ ID NO: 217605 - DNA, 484 bp, Glycine max
ggtcttaagcacctgcggctgcagctaacaacttggatagagcgcttttttggcctgatttgaagataataaaccgcacttgtcttgagagaagagtgcttgaagtatgacttctgaaagcactttcgttcaacctgccatttctaagtttgatggtcattatgatcattgggccatgcttatggaaaatctccttctttcaaaggaatattggaatcttgtggaggatggaatccctgctgcaatagagggataagagtttactgaagcccaaagaaagtcaattgccgagcagcaactaagagacttggtaagttaaaattatttgttccaggctattgatcgaaccattttggagaccatccttaataaggatactgccaaaaatatatgggactctatgaagtagaagtatcaaggttcaacaactaaggtcaaaagagcacaactccaagctcttcgaaagaagttcgaggtcctccac

SEQ ID NO: 217606 - DNA, 472 bp, Glycine max
atactaagcttgtagggttaaagtctcacgattgtcacgtgctcatgctacaattgttattcgtggctatacgagacatctggccaaacaaagtcaggttagcgataactcggctgtgctttttcttccatgctatatgtagcaaagtcattgatcctgtcaagtttgatgagttggaaaatgaggccgcaattatactgtgccaattggagatgtattttccccctactttctttgacatcatgattcacttaattgtgcatctggtcagagaaatcaaatgttgtgatcctgtttatctacggtggatgtacccggttgagcgatacatgaggatcttaaaagggtatacacagaatctatatcatccataagcatatattgttgagaggtacattgcataagaagccattgaatcttgttcagaatacttagagaaggtacaactgttgggcttctgagtctcgcatga

SEQ ID NO: 217607 - DNA, 127 bp, Glycine max
  unsure (1)..(127): unsure at all n locations
agcacctgggctgcagctttccggatcatgaagtacgaaagaagttttggttcatcttgancngtaaagtgggtagacaaagattaccgatcaagttgatcccgaagtttttaccgatcatgttgat

SEQ ID NO: 217608 - DNA, 435 bp, Glycine max
  unsure (1)..(435): unsure at all n locations
tcaatctggccacccagctcgcccanncgagcagggttgcttcctatagagtgacaacctttnggaggaancttctggagggccctagtgggcctggttgctatttgcacccccacctttactaaatacacccccttgcccttttttggagattctttttttgtaagagtacgaaaacttacggatttcgcaatgatacttgttttctttccgtaatgttacggaaccttgcgaaggggtggtcatcccctttattgacttatggaatgttacggaaccttactaattgtgcaacgatgcttcattttgatttctggtgtttcacggaaccttacggattgtgcatcaataccttcttttgatttccggcatgtcctggaacttcacaaattggctaatgatgggtgccaagcacctcacaatgatcaaacaaaa

SEQ ID NO: 217609 - DNA, 459 bp, Glycine max
tgcggcatgcaagctataaggaaaccgaagtgtgttatcgttattgaaagggcttcacccgtagggaggcgtgacaatgcatctgccaccacattaaaagagcccgggttatatcggatatcataacatagcctaaaaggtacgtgagatagttctgctgctctggtgcttggataacatgcgtcatgagatctttcaaactcttatggtctgtaatgatggtgagcgaatggcccaacagataatggcgccacttgcagacgacgacagtaatagcatgaagctctttaacataagccaaagcgcgctgcagacgagggcataaaactctgctgaaacatgcgataggatgatcttggtggagtagaactactcctatggctatcgcaaaggcatccgtttcgagggttaatgggagagaaaaatcatgtgtggcaaggaccggaacctgattcatta

SEQ ID NO: 217610 - DNA, 461 bp, Glycine max
  unsure (1)..(461): unsure at all n locations
tgctattccaagntcatttaccatagcctttaagccagtttttttccttcactccttcagctagggccatgtattctgctttagtagttgaaagagcaacaactgattgttgatttgctttccaactaattgttataccaaacaaagtaaatacatatccggttaaggactttcttgtacctacatttcctacaaaatctgcatctacatagcctgtgattgctgcctcatgtgttgtcttcttgtaccttaatccagcattcaaagatccatttagataccttagtgtccacttcacagcttcccaatgtgcactgccaagatctcccatgaatctgcttataatacttacagcatgagccaagtcatgtctgctgcaaaccattccatacattatgcttccaacaccactgacatagggtgtttgattcattntagacctttcttcaactgtttctagt

SEQ ID NO: 217611 - DNA, 417 bp, Glycine max
  unsure (1)..(417): unsure at all n locations
tgngggaaaatatgtttggtaaccaagtaattaataaagtaatttatgatgtacggaccganatacgagacaagagtagtgacaccagcaaatacggcattacaagctgcctccttccagaaggacttgagaagtgcccaagccaaggaatgctgctcggattggatttcagccatcaacctctcccaattagaatgcaaaaccttataatttgtcttggatcggtctttcaccgcaacaaggggaatgtccttaagcacaagcggcctttttgcccctatggaaagaagtggaatcaaccaagacaaagaggccaagctaaaaagtccgcatcagtataaggagtaaccttgagacaccccgggtcttcctaaaagcaatggctggagctccttggaattcctagaaactttatac

SEQ ID NO: 217612 - DNA, 443 bp, Glycine max
  unsure (1)..(443): unsure at all n locations
aatcataccacggctggtctaagagatcaagaacgctcttatacatagncgncnattccagatagtagcacagtgcagtaagctctaaaaaaaggctatattggtgtagcatatcacagaggaaaccagattcatacagtccgcacattataaccattggaagaaagtcagacggctcatatctagatgcatgttttaagtccaatttaagagctaaaatatgagccatccgatctttatcccacgaatctgagatgctgactgtgtgaatccatgaagaaaatgactgcaaggaggaatcaatcacagagtggctgctatagcaaatacaatgcatataaattcaaatacacacccgacatatgctagaaccatactctgttcaatacattctctactattgagtgagcaaatggtcaaaagtcataagagttgcacaggtg

SEQ ID NO: 217613 - DNA, 213 bp, Glycine max
gggaaaggagggggttttttggaaaaaggaaaggaaagaaaaagaaaagaaaaaaaaagggaagaaaaagaagaaggaaagagaaaaaaagaaggaggagggagaaaaaaaaaaaaggagggagaaaaagaagggaaggagagggggaggaaaggagaagggagaaggaaaaaaggaagagagaaaaggagaagaaaggagaagggggagaaa

SEQ ID NO: 217614 - DNA, 376 bp, Glycine max
ttttttcacacgaaggacaggcatgatctagaggtaatgtactgctcaagcctaaagtcatatgtacatctacatactcacatgcatgtgagaacattatgaataatcaaaaaaccactacctcgtgaaacttttcaatatatgattgataataggacccagcaccaataggagtgaggcactgattacttcagaacaaactttggctcgacaactgaggcaattatgactcagtaggagcattgtcccgggcaagcgaatatcctgagatttcgcccattgacctactgtcataatttagaatcggaccaattctacacacgtgtcttcctgaaagaaaagtcagttggtatatgactgacaaacagaatcataa

SEQ ID NO: 217615 - DNA, 455 bp, Glycine max
  unsure (1)..(455): unsure at all n locations
caagcttcaagggaagagagaccaatcacgagttcatagcatgggcttaaatgaggagttagctacttgttcaagatccaagaggagtttggcccaacacttagaagccacggagcaaagcatgctatctataatagggcagtacaaaaaagagttaaaccagtctttgacccatgagcaaaagctagtagaggacttcgcacaaacatacaccgagaaggacgcanaaggggtgattgatgcattgcatgaagaagcaaccatgtggatggataggttcgccttgaccttaaatggaagtcaagacctcccgcgactactatccaaagcaagggccatggccgaagtgtgttcagccccgaaggaaattcacgggctaatcaattactgtcaacacatgataaatttaatgaacccatataatagaaaccgttaggttctattgtaacactttt

SEQ ID NO: 217616 - DNA, 461 bp, Glycine max
  unsure (1)..(461): unsure at all n locations
actcagctttgctctagatttataatctggaagccatgcatcttatggctcatctagtaattctttgtggcatctgcattngagccacatgagtgaaaaaggtatggatattctaagcaagcaaggcttacttggaaatcacaagggggaacctcttcagttttgtgagcactgcgtctatgggaaacaacaatagattaagtttcaaaaggttgtacacacaacatgttggactacgtccattctaattgctagaggccttcaagagttccatcattgagaggggcaaggtatttccttttcattatcaacgattactctangatgacatgggtaatcatgatgaagcaaaaatatgatgctttcaaatttttcaagcaatggacaattcttatgaagaatcaaataagaaagacagtaaagtgtcttacgactgataatggcttggaattctattactg

SEQ ID NO: 217617 - DNA, 465 bp, Glycine max
tgcaagcttccacaacatccaagcataacaacattttatctgacaagctatcacagccaagcaaaacagagcaaaggcagaaaactctgctcaacacatcaaccaaaatcacagcttttctcacttaaagaccacagtaacaattccttcgatccaattcgttaaccggtggatcgactccaaaattttactggaagtctatagtgcaataaacccacattgtgaaccgtgggatctactagcaaacatccagaactcattctatactactctttccccagccaaccacacacaagcattttctgcaccaagctaaaatcctgttgcacctattttgacagcaaaattctgcataagtgcagaatttgaaaatcacacttcccctcatccaatcttgctcaaatcaaatcctacaagtcccaaatcatgtatcgatcatgtctaaaccaaaatcaagctttaaag

SEQ ID NO: 217618 - DNA, 440 bp, Glycine max
  unsure (1)..(440): unsure at all n locations
ccctctntgaacaaatacccctcagccaaattttanctcanttttggcctctatcccacaactctcgtaaatgtggagagaaatgttcatctaaaccatacatgtccttaatattatcaaatcctataatttaagctcccagggagcaaaacaatgtgtgtctcctaaagagggcatcaactaccacatttgtgtttccctttttgtatttgataacatatggaaattgctctatgtactctacccattttgcatgccttttgtttaacttgttttgccctctaatgtacttaattgattgatgatcactatgaatgacaaaatccttggaaacaatgttatattcccacagttggagggctcttataaagcgtaaagctctttattataggtggggatattgagggtggcactattaagtntttcactaaaaaaagcac

SEQ ID NO: 217619 - DNA, 483 bp, Glycine max
  unsure (1)..(483): unsure at all n locations
ttaagcaccgcggctgcagctttgaaacaaactgtgccactagtaatcgattacatgaatctggtaatcgattaccagagagtaaaaactctggtaacttagaaaattttgagaaaaactcttttgaaaaacaaaattgtgctatgtttgttntttgaaaaatcttttcaatacttcccttgtgaagtcttcttgatttcttctcttgaaacttgaattcatcttttcttgaatcgtgaaatcaaacttctcttgattcttgaattgttcttgactcaatcttgaaatcattttcttgggctttttgtcatcatctttgttatcatcaaaacaacttgaatcaatcttgattcatcatcatgaagcttgcttctacactctgttctagcattattaattgtctcacacaattcaattntaactgattctatttctatacagtggtttggttacgctaccatgtgtgtagntcttaacttatgg

SEQ ID NO: 217620 - DNA, 401 bp, Glycine max
ctcatggactcctctaaggacaataacatcatctcttgcactaaattgttgggagttggaagccatcttcttaatcaaattcctagcctcaacaagagtcatatcaccaagggctccaccattggcagcatcaatcatactcctctccatgttgctaagtccctcataaaaatattgaaggaggagttgctcataaatctggtggtgaggacagcttgcacgcaatttcttgaatctttcccagtactcatacaagctctctccactaagattcccgatgcctaaaatgtctcttttgatggtagtggtcctagatgcagggaagaatttctccaagaacaccctcttaaggtcattccagctgaaaatggacttgggagcaaggtaatatatacaatctt

SEQ ID NO: 217621 - DNA, 470 bp, Glycine max
tactaagctggacatataagggaatcaggacctctagagacttggttttgatgtctgcaaattggttgttggagttaataaattcagtactgatttctttggaatacagcttatcctgaacaagatggcaatcaatctctacatgcttagttctcatgaaatacacgattagaagcgatgtgaagagctgtctgattatcagaatacaacttcatctgtggaacataacaaaattttaattcttgaagttgtttaatccacacgaattcacaagtaacaagagccatagctctatattctgcttctgcacttgatccagcaacaacactctgtttcttgcttttccaatagacaatatttccaataaggatacacaatatccagtggtggatcgcctgtctatgggacaacctgcccaatcggcatcacaatacctacaaatgtgcggattctcattatccttatacaat

SEQ ID NO: 217622 - DNA, 409 bp, Glycine max
acactcttataaaaagaagaatgaggtaagagatgaattgagtcagtggagataaaaaccaattattgctgtaagggaagaaataaatgacaatgaataagaaattgagggaggaaaaccaaaacctaatgaatataaacccttagttgataaaaattaagaagaagaaaagagttagagtgaaaaagcacgagaaaaatagttaagatacatcttctgatgagggaaaggaagtgtcatatccttttgttaccatacaaaaaagataaggaacgccacctggcgagattcctagattttttcaggaaattggaaataactatgccatttggagaagctttgcaataaatgccactctactcaaagtttataataaacatgttgacaatgaagcacaagtacattcacc

SEQ ID NO: 217623 - DNA, 451 bp, Glycine max
  unsure (1)..(451): unsure at all n locations
actcagcttatttatcatctgaactngcacttagcatatgatcggattgtttctctatacgtatagaaaaacactattggaagaaataattctttaaatgaatcttgatctcctttacccaattattataatcaatccttacattctctgagtgccaacatattatatagttagaatcttaataatttcagatcacactaatctctccgttaatatctatgcattttcttatctttacttattacatcatattatttatcataattaattacagtctctctcttttttctttaactgtttaagtgttaactagaaactaaagttgagttgtcaaccaatctttaatatagaaaacactaaatacattgcttgcattaccaaaattgaagatttttaagtctgagtttgctatattctatagtaaagaatttttttttaagtgacctgatca

SEQ ID NO: 217624 - DNA, 423 bp, Glycine max
aagaattttctgacttataacctttggaaagttcaatataaacttctttaaacaaatctctattcaaaaaagcattattaacatctaattggagaagacaccagtttctagcagcagcaacacagagcaaaactctcacagtggtaagcttggccactggagaaaaggtatcagagaaattgattcctttgggaagttccatataaacttcttcaaacaaatctctattcaaaatagcattattaacatctaattggagaagacactagtttctagcagcaacaacacagagcaaaactctcacagtggtaagcttggccattggagaaaatgtatcagagaaattgattccagcttattgagtataccctttggcaaccaatcgagctgtgtatctatccacaaagccatccattttatatt

SEQ ID NO: 217625 - DNA, 449 bp, Glycine max
  unsure (1)..(449): unsure at all n locations
tatcttgtaactaaccaagccctctggtatggtaatcgtttacattgaatagtaatcaattatcaaaccctaaaacatagttttttctataaaaacttactattgtttactcataaaacctacacactcattgtaactattatcaacaacaattaaagatccaaaatagacattgaaaaacaagcatcataaacttcttaactacaatcatcaagcacaatcaaaaatacaaaaacaatcatcaaaacacaaacaaagacaatcaacgacaatcattaatcttcaaacaacaattaacatgactatcaaaacacaatcaaagacaatcattaagccacaattaataataaccatcagaaacaaactcaaatataaagaaagagaataatcaaccgatgtaactatntatctaagtcattgctatctaaaagtcctaattctcttctaat

SEQ ID NO: 217626 - DNA, 452 bp, Glycine max
  unsure (1)..(452): unsure at all n locations
agagcttctatggaggctggatcttttatcttcaatgagggccttcaatggtgattttacaccatggagatgcagcgaaaggcaaaggagaagaggagaggggaggcaccatccactatggaataagccaaggaagaaggagcttcatcaccaagaattgccttggataagaagcttgaaaacgatgctcntatggaagaaaagaaatagagaaggagggagcacgaaattgaaggaataaaagagggagagaagtggaactctgaaatgtgtctcataagactttcattcatcaaagttacaacaagtgttacacatgcttctatttatagactaggtagcttccctgagaagctttcttaagaaaactttcttgagaagctttcttaagaaaacctccttgagaaacttctttgagaaaacttccttgagaagctagagcttatctacac

SEQ ID NO: 217627 - DNA, 438 bp, Glycine max
  unsure (1)..(438): unsure at all n locations
tgtatttacatgcccaactctcttgagtggcatttttattgattgcnatcatatacgnngcatcttaacctatatcatatcatttgtacatcatgcattatcatgcgagttagaaatttcttccaaaggaaaaactctatnttaatcgattacaaccttatcgtaatcgattacacaagtttgctataagcttgcaaaagatatgtttcgtattggtttaatcgattacaacctatcgtaatcgattacatagttgtttttgagacaatgactgagttattcaggagtctctgctttaatcgattaccatgtgatataatcaagtacttctctttctacaagtgtttcagaagtaaacaagaacactntaatcaattactttgagtatctaatcgattacattattcttgagttgtttccagtttttgggaagaacac

SEQ ID NO: 217628 - DNA, 450 bp, Glycine max
  unsure (1)..(450): unsure at all n locations
agcttcatgatgttgaatcaagattgattctttttgttntgatgataacaaagatgatgacaaaaaagcccaagagaatgatttcaagattgagtcaagaacaattcaagaatcaagagaaatttgatttcaagattcaagaaaagatgaattcaagattcaagagaagaaatcaagaaagacttcacaagggaagtattgaaaagatttttcaaaaaacaaacatagcacaattttgtttttcaaaagaagctttcacaaaattttctaagttaccagagttttttactctctggtaatcgattaccagattcctgtaatcgattaccagtggcaaaattagtgcttttactnttgattaagtttctatttctattctntactttcttaacattttaggtaaagcctaagaagggtagatttttaattagtgaagggttcgttaataat

SEQ ID NO: 217629 - DNA, 464 bp, Glycine max
  unsure (1)..(464): unsure at all n locations
ntccagaagggctgttccacaacacaacacaattagttgaaaccacacaccacaccattctcttcataaacaaaaatcaaatcaaattaaaattaattttaaaaagttatcagtaataacaatacctaaatgtggtgagagaaaacgaatactgactatcccccatgattaaccgcacaagaatctgcaatcacaactttacttgcatgttacaatcacaatcacaataacaaaacaaaacaatcatattgttttattttatattggaaagtaaaagcacttgaaagaggatttttcataccattaccagccctagtagtaaaaaagatcaaaaaactatttttgcaaaaatgagaacctaaactggagagtcaggcaaataaacaacgtagcaagtgggggaaaggattggaagggtcaaacaattatcatagaggaagagaatagaggttggtttgatcaat

SEQ ID NO: 217630 - DNA, 432 bp, Glycine max
  unsure (1)..(432): unsure at all n locations
gcttntaatggtaagagaaaagcaacacactcatatcttctaataagcaacaagtattaaaaaaaactgtatgtataaaataaaagtgtgtgtgatgctaatcaagaaaaagaatagttaagggcagaaaagcaagtaatagagctggaataaaaagaaaaaggttgatctaaagatgaatgctctcctagaaccttagctgttgcgtcctagaaaaaccatcaattgattgcaacccagcctcgttacaagcctagaaaagtccttcaaattcagtttgtgtgttcttgactgtatggcatgagataaagtgcaaagattgagacttatgttggttgttgatttatggataacctacacacttgtgtttgagtgaaatagtagttgtgaggctttggtaatgatccttncttgatatatgtcattcttact

SEQ ID NO: 217631 - DNA, 458 bp, Glycine max
  unsure (1)..(458): unsure at all n locations
tttttccctctatatacacacgcattgagaactctttctctctataccgacacggtctatataaaatctctattccttttcaaagatttcttttccccttttcaatatacactcgttgtttatataaaaatttcctttatatacactcattgctcatatacaagaatttctttccacacattgtttatatacaaaaatttcttttcttttctttatatacagatatgacattntgtccacaacgtctctttctttttctattcttggtgttatcacgacgtttgttcgttttattttaggatgacgttcctaaatgaaaactctacatggttccggaatttcaacaaccattatcgacaataatgacataagcactaacacaaaaatccaaacaaaatgtatgcacaatacaaatgactatcgaaacaacaaanacagacgttagtcccttcagtcat

SEQ ID NO: 217632 - DNA, 442 bp, Glycine max
  unsure (1)..(442): unsure at all n locations
aagaggatgctttaatggtngatattattgagaggaagcgggaacacgaaattgaaggaataaaagagggaaagaagtggaactttgaagtgtatctcataagactttcattcatcaaagctacaacaagtggtacacatgcttctatttatagactaggtagcttccttgagaagctttcttaagaaaacttccttgagaagtttctttgagaaaacttccttgagaagctagagtttagctacacacacccatctaaaaactaagctcacctccttgagaagcttccttgagaagctagagcttagctacacacacccatctaaaaactaagctcacctccttgagaagctttcttgagaagccttcttgagaagctagagcttagctacacacccctataatagctaagctcaccctcatgacagaaaaaacttgaaaa

SEQ ID NO: 217633 - DNA, 399 bp, Glycine max
tcggtattcaatttcgagcgtctcaatatagtttgtgtattctatcagacatccgactaaaaagctattgtcgtttgaattatctcagaggttcataattcaatatcgaacgcctctatagattacgggactcaatcagacatccgactaataagttattgttcgttgaattaactcagagcttctaaaatcaatttcgatcgtctcgatatattacgggactcaatcaaacatctgagtaaaaagttattgtccgttgaatttgctgaaagcttcaactttcaatttcaagcgcctcgatatattacaggactcaatcagacatccgagtacaaagttatttgtcgttgaatttggcccgagccttaacattcaatttacagtgtctcgatattatta

SEQ ID NO: 217634 - DNA, 465 bp, Glycine max
  unsure (1)..(465): unsure at all n locations
agcntgtgtatctagcaaaatattagatcattgttaaaaggatagaaaattccaagcactaatgtccggaattgtttttctttttattaagaacacattttatgcatactttgcaatgcaatttaactgtaaactgtagaatatagaaaatgcaggtccaggcagaccataaaatttctataaaagtaaacatgcatctaataatttctagcacaatatgaaagagtctccacttaaaaccaaaaccaaggttcaagataactaanatacagcatttaccttcatcaaataaacagataaaagtgcagatccattagagagagcattggaagaaaatatctctctttttaaaagaaaaaaaaatttatgacttacacaaacttatagaaaattagggcangctaacgattaccttcagatcatgaagctctgcctccaggtttagatgagactgcagtttctttc

SEQ ID NO: 217635 - DNA, 453 bp, Glycine max
  unsure (1)..(453): unsure at all n locations
aactcaactcaaagggcgagagacacaattatgtttttttgaccaancaaccaacagaaaagacataccacaacatcttctgggctagcctgtccaccattgatttcattgtcaacaactagaataattaacgcctaatgatacattccttcggtaacttcatatccacaatgggggcccacattcaatgtacttcttcttccccccagcagtatatgccaaagtggcacatatacaaaataaaatctgatcaataatgtgagcaacctacgccaatcaaaaaggttctaaacacatcttatgactgcacaataccatccatatctttcccctctcgctcataaaagtggtatacatataaacaccaataacatgctcaacctcatcttatatgaaatgacactaattaagtgaaggtatacgaacaactagcactctataatcgacaaagac

SEQ ID NO: 217636 - DNA, 465 bp, Glycine max
  unsure (1)..(465): unsure at all n locations
taagtcacctgcggctgcagctttaaggagggagcttnttatgattgggtgtgngagctaagctctagcttctcaaggaagttttctcaaagaagcttctcaaggaagttttctagtctataaataaaagcatgtgtaacacttgttgtaactttgatgaatgagagtcttgtgagacatacttcaaagttccacttctctccctctgttattccttcaatttcgcgctcccccctctctctttctctccctctttcttttcctccattgaagcatccttccaagcttcttatccaaggctcatcttggtggtgaagctccttcttccatggcttattccctagtggataacgcctcctctcacctcttctcctttgtcttccgctgcatctccatggtggaaaatcaccattaaaggacctcattgaagctcaaagatccagccttcatagaagcccctcaagc

SEQ ID NO: 217637 - DNA, 456 bp, Glycine max
ttaacctcatcgactctcagtctttagagttgggagccattccaatccttgggcccggactctcagccacttattatagccgccgatgctcccattactgcttcgcctaagctctctgtccttacttcacaccgcatcacatgccttgcgaactccttggagaacctttgcattggggtcattgaaaccccgtgtaatgaaaggcatgatgctttcgtctaatggcgctcctcgcatggggtagccaatctgtcttatggcgaggacaggattatcaattatacaaccccttgttcccattaagggaacatttggaaatccttcgcatgaagatagaatcctgactcttccttccttctagcgagggaaccaattaacagacgcccctctatgctagccaagagttggtcccaattcgcggtgaccttgtagcggatagacgggcctaccttcttg

SEQ ID NO: 217638 - DNA, 438 bp, Glycine max
  unsure (1)..(438): unsure at all n locations
agcttatctaaatgtagaatattgtttttcattgactatacgnaattggtcataagtggttgatcctttaactacaacccacaatatcctaagataatacaattctctagtacttggagacacccagttaaaccttccaattgtatagcctcctttacgtggcttccaacatctttatttggtgatgtatgtaagttttggtatgaattacanatatgtaagatcttttgtttgctggaaaatggtgttagcttgcagccaagaggtaaacatggactctttaatagttggcttggacaacaaaacattaatgtcatcaccatcttcaaatattacagaattttcggtaggcaatgaaagtacaacctctcaacaacaggtgatctcttgtgaatctggaatgtaaatattctccaacaagaatcacaagaagaaata

SEQ ID NO: 217639 - DNA, 451 bp, Glycine max
tatgctggacagaaaggggcaaatgtttttttgtattgactcacacatcgataagacaaaaacatctaattttccaatcataggaacctatgaactaaaatggaataaacaagtgaataagccaagttcaatgcatacaaactagacaattcgttattggcataaataatcattccctctggctaacaaaatttgttgctagtcattgcattacttacttttctagtattgctccaataacaagcttcctgatataaactaggcattaatcttcaactaataacttaagcttctagctgagttggtttggtcctttgatgattttcgtgtatattgaccaactgccctatcttttacttgtttacaaatatatatttgatgttggcatgcacatatatctaatgtacttcttttgatatgtgtagatagagaaaggtgcatgctacatatt

SEQ ID NO: 217640 - DNA, 372 bp, Glycine max
  unsure (1)..(372): unsure at all n locations
tgangcatgcaagctntgagcccaaatcctgactcaccatatatcttgacccatgtgagaatgtcaatccttaccctcggaagcaaaaaagaaaagaaggaaaatctccaatcaaagagaaagcataaagaaaagaaggaaaatttccaatccaagagaaagaaaaaagaaaagaaagaaaattcccaatcaaagaatgggagaaagtaaaaaaggaagaagaagaaggaaagaaagctcctgatcaaggatcgaaagaaaatataagaaatgtgcagaaaggtctttggaccagacaatatctgaacaatacagaattgtcaccaaatgaacgaaaagaaggaaaggaaaccatgacctatagtggtcttc

SEQ ID NO: 217641 - DNA, 468 bp, Glycine max
  unsure (1)..(468): unsure at all n locations
ttactaaatcaatcacacacacacacacacacacacacacaacacgaaattctatgattaanaacatataactattaaaattaaattcatgcatgcacaaatgacacaatatagagtttccttgtcagtctaagctataatttttcagggtgttacaactctaatttattttaattattttacatcatataattagacactcttattagtcaccaactaattaaactaaaattctatttttaaactagttatatagtcatttacgaaaattctctccactttaaactcttatgacttaattacctcttttctaattctatggaatctaaatcaccattaatcaaccttaattatcctcacttaatttctaactttgcttacattaattactaattttctttcaatcttctaatttctatttctagaccaaattccaattattaaacatctaggtcattgataatttga

SEQ ID NO: 217642 - DNA, 447 bp, Glycine max
  unsure (1)..(447): unsure at all n locations
gaaaagctagagcagagctactcatattctantttattgctaagctcatccccatgccataatacatgataaatacaacaaaaaagtccctactacaaggactactcaaaatgccttaaatacaaggctaaaaccctatactactagaatggccaaactacaaggcccaaaaataatgaaacacctattctaatatttacaaagagtggacccaaccttgacccatgggctcagaaatctaccctaaggttcttgagaaccctatggccttctttagcagctctagcctaatcctcttagattcttctacacaatacccttggggggtaggatagcatcaattactttcagtctacattccaatatatatacctcgaaaaacccaaataaatcaactcctagaaagcaagtgctaaccccttctacttggagcattaatntgctaca

SEQ ID NO: 217643 - DNA, 326 bp, Glycine max
atacacactcgccgacagcctattgagccattagatattctttcactcataaagtctaaatttacaatcgtatttacataagccacagataatcgtatttaactcaaagacatgttgagataataaaacttgttactcagaatgcattaacaaacacttcttttaaccatcgaacatggagatcattgaattaacgagtataaagtcgttaaccttacgtaaacgtattaagtctatgtctcaaatatataactgtgtaaaatatatcacacaactaatcatattgtcaattcctgctgagaatatatgtactccataagaaaaac

SEQ ID NO: 217644 - DNA, 411 bp, Glycine max
  unsure (1)..(411): unsure at all n locations
tctaggaccacgacacgacaagagtgttgggtaccttactttattacaggtaaattntgtgttcgtaatatgttacattggattatgatgtaaacatgtttttatgttatgttaacctaattctttttgtagtgttggatctatgagcattttccgagtgagcatcagtgtgtcaccgatgatgcgtatgaggagacgtccccttgtgcctcccggtggctgacgacgaaggctcatatgaagagaattacaggagcgccgtaccaggcacgttgggatgctttgacgatcacagacgtgtgctggttgccttacagtgaccatcgaggggttaaggggtttgagctgatttcatcattccanggttagttgagatggggtcctacggtgggtacagttcgaccggagagg

SEQ ID NO: 217645 - DNA, 464 bp, Glycine max
  unsure (1)..(464): unsure at all n locations
ttaagtcacctgaagcatgcaagcttgagacgagaggactagtatatgtcttctatacgtanactcaganagagctgatcactgaggaggggagcttggtggcgtattcataaccttttgcaaataaaacaaattataaagtaaagaactcttcaagtattccaagttaatatccaaaaaagataaaaattgataacattatgcgctattataaacacattacttttagttaacatgattatgtaggaatattctcccataaaccttcatcatgattattacaatttgcatgtatatcatacacaattatggaagacatgcatgtggagaaagaataagtctcacaaatatcaagtgttgaatcatcattttgatgacttacaccgtttgttcttctgtggagaaccaccgaccatattgagtcacataaatatttgacatacacaacctatttgtcttgttct

SEQ ID NO: 217646 - DNA, 446 bp, Glycine max
  unsure (1)..(446): unsure at all n locations
gaccttaaaactcaagctgatacacttcttcattacgaatctattcagaaaggttctcttggcatcgatttgatacaacttgatgtctttatgtgctgcataggataagagtattattatggcttcaagctcgctactagtgtaaaggtttcttcatagtcaatcccttcttgttgattgcaccttcagcaactagtctagcctgtttgactacttctccttcttcattgagcttatttttgaacacccatttggtttcaatgactgactgattctttggaggggaacaagattccaaaccttgttcttagcgaattgactacatttctcttccataacaaacacctaagaatcttgactcaatgcttcatcaatattcttaggctcaatggttgagaaaagagtcattattcctttntctcttattagacaagaggagggggggg

SEQ ID NO: 217647 - DNA, 311 bp, Glycine max
catgaagctttgctaaaccttttctttctttttcaacataaaaagccaagaactggaaataacacagttatacaatggagtacaagattaaggatcagagtattaaatatagccaactcatatcaaaaatatcaaccgaattcaatacataaaatgtcacaccacaaatatcagatgaaataaacacaagataatagcaagacttacatatatgtaatttagaactaaaccaaatacacgttataaaataatatcaaattaaagctaagacgagagggggagacaacttgacaagtcactctttagctgga

SEQ ID NO: 217648 - DNA, 467 bp, Glycine max
  unsure (1)..(467): unsure at all n locations
tccacaacatccaagcaaaacaacattcaaacagcacatgctatcacagccaagcaaagcagagcaaaggcagaaaactctgctcaacacaccaaccaaaatcacagcttttctcacttaaagaccccagtaacaattccttcgatccaattcactaaccgttggatcgactccaaaattntactggaaatctatagtgcataagcctacattgtgaccgttgggatctactagcaaacatccagaactcattctgcactactctttccacagccaatcacacacaagcatttttctgcacaagccaaaatcctgctgcatcctatttgacagcaaaattctgcataagtgcagatttcgaaaatcacactttccctcatccaatcttgcccaaatcaattcctacaagtcccaaatcatgtatcaatcatgtctaaaccaaagtcaagctttaaagcacagcaaca

SEQ ID NO: 217649 - DNA, 425 bp, Glycine max
  unsure (1)..(425): unsure at all n locations
agcnnggatagntacaatggagagttttcttatttctcttattatcnngaataaccataattcgaagagaagcttatatactttattgtgatttcataaataccagctacaacgtcagcaccacaatctcatacttcattatatggcatgcatgtatggaaacttaaaataacaataaaataagagttcaacatacaagactatcttctatggagatgatttacgaacattgttttgaactaaaataacatgcatgagttatactcaaaattcaaaagataggcgaagaatgacatgaatacatgaaaaaatattgcttgaattcaatcaacataataaaaattcaacacacacttataacataatgtgactattactatgactaaacatgactctaagacaacatggattaagtgagttacact

SEQ ID NO: 217650 - DNA, 455 bp, Glycine max
  unsure (1)..(455): unsure at all n locations
cagaagcggacnnaaagggaatgtagatgaaggtggctttacacaaaacgagctngataaattgaagcatgaaaatgaaaaacttgtttcaagatataaaaccaccaaatatgtttgtgcttctacatctcttaatatggataattacaaatctttgctagatgagtttgaacagtttaaaaaggattaatatgaataacgtacaaaattgcaaactgaactttcatgtcttaaagatgtttttagaaaaacgaatcaacaaaagagtgagcttaatcacttacttagtgtgcgaaggcatactaccgataagaccagtttggcgtataacaagaaaattgaccttcttaaaaaaccaagttcgcacccctcacaaaggtgaaaacaaaatctttcaaaagacaagcataggacattctaatactacatcaaagatatgtcattattgcatgaaa

SEQ ID NO: 217651 - DNA, 462 bp, Glycine max
  unsure (1)..(462): unsure at all n locations
agcttattagtacgacaccttgtangcaaattcactgntaatcctctcttgaatcaaagaaacttttattgatggatcttctctgatcatgcctgttaatagaataacaaaattaaaatgacaattaacacaaaagtagcataatatgaacattaaatacgtacctactacacaagtggcaattaaatcataaataagcttctcgtgatcttgtgtcatggtcatattgagacatgtgtgtggttcaccccattgtgtgacttttcatgaatcagtttttttagataagattgtccttatatagaacaagcaaggacactctgcgcttttattcaagcaacaaacaacatacttgttcgatttgctattaacaactatgaaagttcgatgcaccatcataacatagtgtttaatgcatgttttaccggattcttagtatcaaatatcatgccaacatataat

SEQ ID NO: 217652 - DNA, 439 bp, Glycine max
  unsure (1)..(439): unsure at all n locations
ttataantgccggtctgggagacgaatgtgagatgtttttctatatatgaagatgatattccaagtactttgggtttggtccgaccatgccctcctgatttccagctgggaaattggcgagtggaggaacgccccggcatttacgcaacaagcataatgtaaacctttacggtttttaaagctctatagctgggcctaggctttagagtttcattctgggaaggctttgtgtcttttgtttttgaatttataatacaaggatctttcttcatctgttcctggtctctacccattctcattcatttgcatgtatacttcttctctgaaacggcagattcgatgacgagtcccccgaaggtactaatacctgggacccgtctatcaacttcgagcaagaaatgaaccaaacggaagatgaatgagatgaggatgggggact

SEQ ID NO: 217653 - DNA, 415 bp, Glycine max
ttaagccacccgcggcatgcagcttgtgttagcaagcgtacacacttctctatgcccactccccacattataatcttaacaaggatagaaatatctctcttgctgcttggaataaaggatgtcccatctggaaatggtatagccgaattttctctttgctagtcatggtggattcagagatgatagagtggctcctggtaggcatgtcaggatcccttatggtagacaaggccattccattctttatcatatccaatcactctccctgagttcttgtcctgtgatatacaataattgctatcaaaaacaacatttcatgagagagcttttgtgagttcttgtatacaacatcatattggtgggacaccttaggaaccatgaaggccatttttaatgctatggatgggcttatttg

SEQ ID NO: 217654 - DNA, 458 bp, Glycine max
accataaaactcagctggagcctatcactgcaaagtattatgttttttttggaaactgttgagctcacagtcttaggataatgtagccacctaccctacgacaagagtgtgggcgaaaagccaaaggagtgtcttccaacaagcaaaaatgtattggagtcgccagcaacgtttattcgaggaaaatgtctagaaaaaccaacaagaggtgtgggagatttgaaaataagggttcaagagttatttacgcatagggaaggtactatcaccccacgcgcctgtcacaagggacggcggcctttaatcgagtgtgtataacgcgacttcaagagtatgcatatgccttttttttttatacttttttacttttttggggtcgacaaggaggctgcccttactcctacgtatcctgaagtgcgatgaagaattcagacctacataactcttcaagactaaat

SEQ ID NO: 217655 - DNA, 436 bp, Glycine max
  unsure (1)..(436): unsure at all n locations
cttagcacgagctgcactgattgaatgtaaacctccttatattagatagacctgacattcaacaaacaaataaacgtacaagacattatagtgctgttgaatacctacccatcagtgtatacacaatatggcttttttaatgaaacactctgccttttaccactctaattnccttgagttcttagtaattaagagattatggccacaacaaagaacaattcaccaatatgtgttaggtaaggctagagagacaaggaaaaggttaaccaggaaaaaggctaacaatgtgtttaggcacaaatgaaggaaataaaattcagaatttatgaattcaagtaataatccttcatgcaaccaatatattaccttaaagagaatttttgtttaaaaagttttcaagcatgaaccaatcagcccaatttttggtttttttttt

SEQ ID NO: 217656 - DNA, 459 bp, Glycine max
  unsure (1)..(459): unsure at all n locations
tatancanctgaagagaaacttgcatcttcttatgatattattngtgtgtatgatgaacaaatacaggaattgaagaagatgcttgctaaaaaagaggctcattgtcgaggatatgccattggagttgaagagctacagaaaaaaatagcaaagcaatatatgaagacaacaattccgagaaaaagggggaaggtcctaaggaacattgtggtcttcttttggggtttgttgtgtgttgtcatatttgcatttgcaattaagtagatcatgtaatatgttgttgttttgtcttttgagatgtagtgattgaaatcgtgttatgaccaagtttaaggttttgggtttggtgttcagctattgtaagcgcaagtttgtatgaacacataattggtaatgactcttttgcggaagaaattatccatcgttaacgttatgtattctgcgatattattgaagag

SEQ ID NO: 217657 - DNA, 302 bp, Glycine max
aatgagattggaacttatcaaactgcagctgccttggacctcaaggaattttatgcatggatgctaagctaagatcatttcctatttaaatcacccatgttcaaaatgtcttatcattggctcatcgatcattcggcgtcggatatttacacatcaccctcagggataccactttttcaaaatgctataattttttcaaaaagtggagcattcttcaaacatgcgttttactaacactatttctttccactttctctgttctttctatcgctcttctttcattatttattcaaaatttgtgt

SEQ ID NO: 217658 - DNA, 185 bp, Glycine max
  unsure (1)..(185): unsure at all n locations
acgcgctaagccgaaantcactgatgtgcgctaagcgagccataattgcgctaagcgcacgagcacgaacaaggccacctatttaagcctgaaatcagaatttagagagggaaccgggattcagagntttgcatgtctagaatttctagagagagaaaggtccaagtttcagagaagtttgagag

SEQ ID NO: 217659 - DNA, 378 bp, Glycine max
  unsure (1)..(378): unsure at all n locations
ctaagctctaaactatcgtcaaataatagacgaacaacaattaaattacatggctatttcttatganacttccgtaagaatgaataggacacatattcaactaaatcacacactcatattattaagaagacaataagattatagtgaaggaatgaagtcaatgaactataggtacttgttgagcttcgattttgtgttttcttgatcttgagtcacttatctatttanaaatgatcatagaaactcagcctttctcacctttcgctaaagaattaaacgagatatctctgagaataagaaagagaatagaactactgttgngaggtggtcagcttctagagaaattntaacatatgcttgtattatggtcacgatcag

SEQ ID NO: 217660 - DNA, 327 bp, Glycine max
  unsure (1)..(327): unsure at all n locations
ctgtgtggatagggtgattccagggtggacatctcacagcagggagtagacgtaccatcgcaaaaggttgagaactatgatttatatttcagagaggaagatgaagtgtttcaaagtaatgagtaatgccaagagtttcaacattttacagttcttgtatgtggtntctggccttatcaaaaacaatcattaagtccactttccaaattgactcacaattagtgtacaacgtttcgtatgaaaatactgtgtttatataatattactatcatataatatcatattatatcatataatataatattatgatatactatataatataat

SEQ ID NO: 217661 - DNA, 381 bp, Glycine max
  unsure (1)..(381): unsure at all n locations
actagcttaccccattccaaatacatgagaatacacagaagttcctactacttacactagtcataaggcccccgaatacaaggctaaantntatactactaacactggccacatacaaggcccaacagaatgaaaacctattctaatatttacaaagaatagtggacccaaccttggctcatgggcttagaaatctaccctgaggttcatgagaaccctangtatgggcttcttaaccgctctagctcaatcctcttggagtcttttatccaatacccttgggggtaggattgcatcanagaccatananaaacccacccctaagactagttnccaagcgaggactatcaacaataaatgcttcaaatgtcttgggacaag

SEQ ID NO: 217662 - DNA, 339 bp, Glycine max
  unsure (1)..(339): unsure at all n locations
cttagatttagaatttgtttcttctaagagtggacatgtgacttgagagaagttatgaacaactaagtcactttttcttttttcttaattcggctcccctctttttctttcctcataagcatctcttcaagctcttatccagggacattcttggggaggaagctccttcttgcatggcttattncctagtggatgagaccgtcccctttctcttctcctttggcttccggtggcatttcatggagaaaaatcaccggtgaaggaccttattgaaactcanagaaccatccttcatagaagcttcacaagcaagtcttcatcaagtgggtatagagcaca

SEQ ID NO: 217663 - DNA, 285 bp, Glycine max
  unsure (1)..(285): unsure at all n locations
tatacaccttttgnnnnccccgaccctccttcttaacaatcttcttggaggaatnttttgcctttttttcctttcccttggcctttgaagacaangncttantatncttntttttnttttggttttntagntnttcttcctcaaatccttatatttcatagntagttgatntttggccacctgtgaatgtgttcgaggatgcaacacaaatttagtgccatgatgggtgaaggtaatctaatagttaaggtattggtaatgatctatctataaaattgctatggc

SEQ ID NO: 217664 - DNA, 255 bp, Glycine max
  unsure (1)..(255): unsure at all n locations
ctagcttgcgaaagcatggcgctggagctgacccatcaattgccctaactcttttattattggtggccctaagntnttgaccttgcttgatanaannntccttctaagcgacagcgcgttgacttgatcccatgttttaataaagtgaaacaaaatttaacgcggattaagaatntganatntatnatgggtggaaaggatgaatgcatgataaaatgtatatgaaaaaaatgnntttatgaattcgggagcctg

SEQ ID NO: 217665 - DNA, 374 bp, Glycine max
  unsure (1)..(374): unsure at all n locations
acgcttcttgganggttgatggatcctccactaatgtataagccatataatttttctcataatctntagcaattcttgctctcttactcttcgaggctttatctggctctggctgtgcaaaaatttcactactaataacaggaagataattggatgaagtacccncactatcccttaatttaaaaggaaatttattttcataaaaatcagcatcatttgactctatgatccttttgcgtttaggtcataaaacctatacactttgctgttaatagcataaccaatgaacacacattcataggctctacttgcaagtttaaccctcttaagatctgggatccttacataggccaaacatccccaagttctcaaat

SEQ ID NO: 217666 - DNA, 303 bp, Glycine max
  unsure (1)..(303): unsure at all n locations
gctttaatgtntagagagcatgttatcttttcctttgattggaacgtttaaaacagccataagaaatntgaaattannatttaaagttgtgtaatcgattatagtaaggttggtaatcaattaccagtgttaaaaaattcaaatttcacatgtgaagagttattactctttagaagtaactgtgtaatcgattacaccatcgattagctaacaaaaagaatacaccattatggtaatcaattaccagtaatgatttntaaaataattccaacagtcacatcttttcattaaatttgaatggca

SEQ ID NO: 217667 - DNA, 180 bp, Glycine max
  unsure (1)..(180): unsure at all n locations
acattatttctacttcannaacccttgaactacttannatggattactggatcctctacaactatgtagttagatggaaattactatggcttggtaatagtggatgattactcaacgttaacttggaccttgttcttgataacaaaaaaaataacgcttttgatgcttttggcaaacttg

SEQ ID NO: 217668 - DNA, 347 bp, Glycine max
  unsure (1)..(347): unsure at all n locations
ctcangcttatgggtatcggaaggaactgacaggtgtttggacaagtacctggtattgtttcatgctcgcacgctncacaaataaaaatatttanatnnaaactgtccctctttcttgccagctcatatntttnnttttttttttatcctctncaatattncccccaacaacaataannaatccatttattntnattnatttcactggcccccttccctnctgtgtnctatncttattattattnccacttatcactaatgcccctttactattttcacaattatcaatgttaacattctttattaataattnnaataaatttcatcaattattttactaacttttt

SEQ ID NO: 217669 - DNA, 146 bp, Glycine max
tctgtggccacctcatggactcctctaaggacaaatagcatatttcttggactgaatcgctggagttggaaaacccctctcaatcaaatcttagccttagcaaggttatataccagagcttacatggcactcatcatactcttcat

SEQ ID NO: 217670 - DNA, 232 bp, Glycine max
  unsure (1)..(232): unsure at all n locations
gacgaatcatgtcttcctatatgcgagangacntatacacgtctcatnggacctttcnncctcgaccttcgtagacctgaattatgcatagtatatgattgtggatagatttcatgttgatcctcgagaatgacatntaaaggctataataatgaacttacgttatctagcatgtaccactaatcaatgttcgtttataacaaaaatcacattctcatgtactggtacctct

SEQ ID NO: 217671 - DNA, 259 bp, Glycine max
  unsure (1)..(259): unsure at all n locations
ctactaaaaaatggtgacaattttttattggaaaccttaaatgcatataagatgagtantttttttttaatatgaattattctatacataagtgcgaacattatttaaatgcctaaaataatgtattttttgaatgcacttaacaaatacagaaactagtgggtgtnatttacgaagatcacttgatttttngntaaacacataaattggtgatgagtgttcaataataattaggatcgaaacaaatattcaacctttt

SEQ ID NO: 217672 - DNA, 300 bp, Glycine max
cttttcctccaactgagtcatatgctacccaagagctcggaattgtccagcatactttctgcaccctcttgttttgtcaagctctgcgaatgcatttttccgaacccgccactcttcaacggtgacaccactgaacttcttgggagttgcttctactcgttgaactggacttttctctctcgggctaaattctcgtgacatttactgcagcattaactcatggacttaccttgggaccacatagcatcaagcttacttgatttctaaggtccacctagatttgtactgattgcgcaacct

SEQ ID NO: 217673 - DNA, 339 bp, Glycine max
  unsure (1)..(339): unsure at all n locations
attagtaaattctatttagaatgagaaatcccaaagagaaaacgtcgattgatntttttnccttcatttttactaaaaggtattttttgactattatattattattttacctcttttttgatttccaacgtggttacggcacgaccgaacgggtgtaattcattttaacagaaattaatagatattacaaataaatgatcggtggaaatttattntaatttttgattaggcgagaaatgacttanataaatgactgaagcacgtcaaaagggggtacggaaagtaaatgaaaacgagaataaaagtacatgaaacaaatgaggaccaccacgggtacat

SEQ ID NO: 217674 - DNA, 203 bp, Glycine max
ccaacgcccgccccctctccgcaaaaaacaaacaaaaacggagaaccaagagccgccaggccacaaaaagataaacacacaccatgagcgaacagaaaacgtaacaggagccaaaacaaaaaccacacacccgaccaggacgcccgccagggggggcacaaaaccgcccaaaacaacgaccgcaaacaacggagcagaaaaaa

SEQ ID NO: 217675 - DNA, 376 bp, Glycine max
  unsure (1)..(376): unsure at all n locations
catggaagaaaggctcaagataacttggtataacttggaagaaaaataagaatatttatggtctcctctntctcttaaagcttcagaaaatgggagaacgcgcctacgctttggcgtttaaataaatgatacttattgtaggtgaaatgcttgaaccaacggaattgtaaggtttaatccttatcttcttaatctaagctctttgaatgaccattaatatgactaattggcacctcgacagcccttgatgtgctctttgcaagctcagccatgttttacgtggtttgtcgcacttttctcaaactaactcataaaggataaagtagtgttttgccaacaatggaaaatatactttaactgaaactagtaaatttta

SEQ ID NO: 217676 - DNA, 169 bp, Glycine max
cggaacaaaggatatttacacaccgccacccaaaaggagcaaggcaggggcaaaaccccaaagggggggacaaacaacagaaggacagcgacaccaaagcagagataaacagaggaggaagaaaaagagacaaggagaacctaggaagagaccaaaaacacaccgcgaa

SEQ ID NO: 217677 - DNA, 199 bp, Glycine max
  unsure (1)..(199): unsure at all n locations
aaaaactagcttggctctataaatctaattatagatggtactactaattggttttttgatacaannaaaagccctcgannnnnnnnccctaataaaactagcggtatatttttatcttaattacaaaaaataagtttgtgagaaaaaatactaggtacagaatatgttatagcttttttttagaaagagtttgttataa

SEQ ID NO: 217678 - DNA, 306 bp, Glycine max
  unsure (1)..(306): unsure at all n locations
gtataatgtgcattaacatactgccaanaantcatggagtacctatacccgatccaagaaatatttagcaacattgggaagattatgtaattccttttttgtcttggatgggtcttgaacaacaggatctttccaaatttcatctaccataagagcnatactaccgttgtaagagggaagaaagctccaaatcttcgatggcataatatncagtatcagtcagataagtgcttgaatttttgattatagaggaaacacttcaccttgtttcgtcagtgctgtctttgataaaatattataccatta

SEQ ID NO: 217679 - DNA, 375 bp, Glycine max
  unsure (1)..(375): unsure at all n locations
caaaaactagcttcttgaaagcagagggggctactcacacccttccatagctagttcatcccatgccaaaatacatgaaaatacanaaagtccctactannacactactcacaatgccctgaaatacaaggctaaaatnctatacccgnaacttgtacccttaatttgtagggtaccctacaaacctaaaatggccaaaatacaaggcccaaaagaagganaacctattntaatattacaaagaaaagtggacccaaccttggcccatgggcttagaaatctaccctaaggttcatgagaaccctanggcctttttnagcagttttaacccaatccttttggagcctcttgctcatgactctggtgactaacccc

SEQ ID NO: 217680 - DNA, 258 bp, Glycine max
ggagatgaacggtcataattgctgaacccctacaatggatcgatgcctcctattctttcttccttttatcctccatcatgttttcgcaagccacaagttacctctacgagaccgtaagtatggactcatcggatgaatatggatctcctgagcctctcttgttgtccctgtgagtaaattagacacaatttcaacagaatactcagataaattatgaattactagttcaaaaaccacacacattactaacctaccaag

SEQ ID NO: 217681 - DNA, 338 bp, Glycine max
  unsure (1)..(338): unsure at all n locations
gatggcttcagtgtgagaaatggtaatgaagtctctatatgtgtggttgataactggactagactgaannccctggcccaaagtggcttatgatgatattcaaggtgtggacttaactttgtcaaatttaattactggaggtaaatggaacttgggtaagaaggctattattttaaatgatgaagtcataaaaagttctatctctcatcccctattcttnatcatgatgctcatgactcatttgcttgggatggcaataaanatggtatttatacnantnattcancttatgcttggttgcaaaactaataagataactctacagcggtacaaaattt

SEQ ID NO: 217682 - DNA, 208 bp, Glycine max
tttccgtatggtacaaacttacgaatttgaaccatcttattttcttcgaaggtacaatcttcggatatgattacttttttacttcaagagtaggaactacgatgccaaaacactctttcactcgcacatacagattcacgatggcagctgttcttaattcgaactctggattattatggcacaagacccagattaaaggctacaaatg

SEQ ID NO: 217683 - DNA, 360 bp, Glycine max
  unsure (1)..(360): unsure at all n locations
ttgatgcaacatttggagaggttaatgaaacaacgagatgattctctccatgagagggtggatcaaatggagaaagcatctctgaanacacacacgacgacaagacggaatgatggtgttcctagacaaaaccgaattgatggtattaaactcaacattcctccatttaaaggaaagaatgatccggaggcctacttggagtgggagatgaaaataaagcatgtttctcatgcaacaactatgaggaggaccagaaggtgaagttngctgtcacggagttttccgactatgctcttgtgtggtggaacaagctacnaaaggagagagcaagaaatgaagagccaatggttgatacatgga

SEQ ID NO: 217684 - DNA, 218 bp, Glycine max
tacattacatacgtctatatagttaatggtgtcaagtaatgtcactgcacaagtattctgtgcaccactgagtctgattgaccgaacgattatgggctatcaaactacattgattgacatagcgaatatttacggttattccattattcactgcatgtaagccaaatcataatgtcaccacatgacatcactgctactaacaaaaattatacgtatag

SEQ ID NO: 217685 - DNA, 480 bp, Glycine max
  unsure (1)..(480): unsure at all n locations
gctcatccctcatggcttcttcaaacacttgtgtcttgatggtatgagagctcccctgttatttttctgaagctaatcaacctacatgctgtaaaaatgtgccttctgggggtatttgtgaagaatacagagggtgcttactagatgatactaaagaaggacatgaccactctcacacaaacatagagttttctctcttacttcaactcggcttccacttatcatacctctgacatcaatatggatagagccaagttggttttcgctattttgatgaagatggatatggacatgcgtagtttcatttcttctcaaatgtctcagattgcctaatcatgtacctncaaagcttgtnttcccttcanctcattatgaatnttgtgccttcaaagagttgtctttacactaagtctttgatcctttacccattatgttcttatctctggagaattatggactgaccaactcttatatgtttcc

SEQ ID NO: 217686 - DNA, 164 bp, Glycine max
  unsure (1)..(164): unsure at all n locations
gacttgaactagctgatcgataacacatactgaatcataccagagagttttagaatttttctctacagccatnttttgtggggtctgaatggtatactgcctatatatatgtgacttgagacacgaaatttacaaaaatttgaaaaaaaaaaagacttattctc

SEQ ID NO: 217687 - DNA, 258 bp, Glycine max
tgtgcacacttcgcctttggaaaatgtcgattcctggaccgatcaacagcctttgaggtagtaccatgactctgatgcactaactcacgaatcgtgtgttctgtgtgttggtgctttttaacttgcactcgtgtttaatgaaccgaggaaagacgctgcggctgcaagtgaaagtattggcctcaatgatgcggaagaggcgcgccctcccttgcctgtaataacggaaactctctacgacgacgcgatgctgtatgg

SEQ ID NO: 217688 - DNA, 352 bp, Glycine max
  unsure (1)..(352): unsure at all n locations
ctcagccttagttctcttatgcctatctctggcaatatttgactaaacacatagtttatggcttaaggaagctttctaacaatagattcccgctgcaaaataccgcgctcgctttgagggaaaaaatggaatttgcaaaaacctaactatagcattgctgtggttgtgatagtagctggtacaagattcatagtgactcatgactgctctgcatgaccataacactctattgataatactactgaagtagtcattcatattatacacaagacctttntactgttttaacgagaatatgtttttatgggctaaggacaccaatttattgnnctggtattgggctttatggatc

SEQ ID NO: 217689 - DNA, 411 bp, Glycine max
  unsure (1)..(411): unsure at all n locations
agcttatactggtgctcaatgtgtgagtgctagctacaaattatattgtttaaatataatatctattcaattagtttctgaacactgttacattcctttggaacttacatgtgttgatgcaatcaggttaagcaacttcaacaaatcaacaaaaaacatagcagcaacaacagttagtattcccatcaacacgtgggatcatccacaaaataagtagaaagccaaggctatgtgccattagagaacactcagagtagccacgtgttaaatgaaagacaacatagtggaatctatggcttattgnggcaaancaatgtttttgaaagaaaggaactcgtacaatttttcttattgtgggggaatattgtgcccgtgacaccatgtaaatggatggacaatatggtttgacat

SEQ ID NO: 217690 - DNA, 217 bp, Glycine max
tggactgtgtctgacactatcttacttcctctctccccaccccatcaagttgatgcgttaatgtgcgaccgtggccttctctcacgatatataagatatatgcttgtgtaacatgaacaactctttatgcatacattactttcacctggaggaacaactgaacttcattgttgaaatgaaactataataatcatttacttactggattgcacacaat

SEQ ID NO: 217691 - DNA, 338 bp, Glycine max
  unsure (1)..(338): unsure at all n locations
ctcagctccatttcaattacagcgtctagatatattacgggacacaatcgaacatccgagtaaatagntattggtcgttgaatttacttcagcttctgttttcactaacgacgcgtcggtctatgctacgagaaacaatcggacatccaagtaaaaagttattcctgattgaatctgctacaagcttccacttttaatttcaagcgtctagatatattacgggacacaatcggacatcgagtaaaatgttattgtcgnttgaatttgctcaaacatctgtttcaatttcgagcgtctcgattataacgggactcaatccgacatccgagataaaagta

SEQ ID NO: 217692 - DNA, 317 bp, Glycine max
  unsure (1)..(317): unsure at all n locations
gtgaaagccttggaagaaagacgtatgcctatgtgggtgtggatgatctctccagatttacctgtgtcaactttatcagagagaaatcagacacctttgcaactgtcaagcacttccacatctttggaagtccatgttacatnttggcagatagagagcaaaggaganagatggatcccaagagtgatgcangaatattcctgggatactctacaaacagcagagcatatagagtattcaattccagaaccagaacagtgatggaatccatcaatgtggttggtgatgatctgtcttcagcaagaaagaacgatgtc

SEQ ID NO: 217693 - DNA, 369 bp, Glycine max
  unsure (1)..(369): unsure at all n locations
acctatgatactagctctgaaacagagcttataaagacaagagtggtgaaagagaagctatttatttttgtcattanggttaggaaggagtgtgatgactccaanngataccctaccactgttgaagcgttagagcgggaaacaaanagggcccgaaaggaagaatgaagcacgaacaagttttgaggggntttgtggtgcagcagtaacgagctnaagcttanaagggccgagagggacaatnaangatggaaagcatggtgttacaacgtaagctataggcttcgcacaaggcnaaaagatgtttgatggaacatctgagcataacagaagagaatatgctgatcattattgaccaatataacgaga

SEQ ID NO: 217694 - DNA, 439 bp, Glycine max
  unsure (1)..(439): unsure at all n locations
tggactttatgaaaaaatgaaacatatctccgtccaccttgtctcatacagcttgtgactttatgaaaaagtcacagcatattgatgtcagatgtgagtgatataggtgaaacaaaactgaaaaaccgattcagatttcttgctgctaagcaaatattactctgatgataattaggaatgtgctagttgaaatgaaaatgaacaatggcttcagaatttactagctatgctattttntggctctgtagtcaattcttttggtttgtatcagaatatcagatagatctttggaaaaatttggaagagaatgaactgagagttttagcttgcgttaatctgaagttctgaacagtgtctctgaaatttcanatttgtaaattgggtctgttcattattttgtcaacttagtatcatgaaatctaaactttgattgtaaact

SEQ ID NO: 217695 - DNA, 335 bp, Glycine max
  unsure (1)..(335): unsure at all n locations
cacatcttcttcaacctttgtgattcttgactttatttcattgaagcgcanatncacttgtaattccaagtgtcaaacctttcaccaactggttcggcaacaatccgngcctacatncaatccccaagnaanntgnggtccttgagatttcttctcaaccttcgaaaaatcttttaacaagcaaagatccacaanggatgtaccctcccttgtctctttgaacctaatggatgtaccctccactagaactgatccacaagagatgtaccctctcttgttctcagtcaacaacccaagtagatgtactntntactngtaccacanaggatgtaccc

SEQ ID NO: 217696 - DNA, 320 bp, Glycine max
  unsure (1)..(320): unsure at all n locations
ctagcttattgtataatatttcaagaaagcgttagtgtgacacaaaatttcttatatctgatgccnggaaaatacgggccccataaaggaagcttannccggcttcttagctaactcttcaaatntgtntgtatattcaactgagagggatctgccaccaagagatggattcaggtaaaatacaaatnatgatgntgntataaatttgaattaattaacaacaagatgggactttaaaacccatagaaataattacaaattgccgggcctgaaatcattctaataactgtatggtagtcattaacgcataacaacaacag

SEQ ID NO: 217697 - DNA, 343 bp, Glycine max
  unsure (1)..(343): unsure at all n locations
aagctagtggaaataattcgtatgtggaagaatcctctggttccatctcttcataccacacgacgaagntggggtaaggtgatgagatggagggtggattcantgtcaccctgcaactcaatgagtcgcctaccatggatgaacttcatagtcaagtcattgtagtcccgaagaatccggcctagggattngagccactacaccactagcacaaggtttgcaccgcataatggcgatacatggaagtcaacggagaaaacaacatcctgaatatgcaccgtcatgtcctcacaaagaagatgacagtggagctgatggccattgcccaccatcacacgaagtg

SEQ ID NO: 217698 - DNA, 379 bp, Glycine max
  unsure (1)..(379): unsure at all n locations
ctagcttcatataatcatcactatntatattctctgccagaaacttatatgatgtttatttaacaattatttgatcaaaaaggaaaattagaacaganaaatactcattcctctataatttaaccctaaaatatactcataattagcagctatcattaccatgcccctctctcgatggtatcattctccttctttctggatagaatttaaagataataagcntataaaatttaatactcgtgctttgggatattggataattggatgattgtgagcttcgaaggctattctgtgattcaatctagtaaattgaagaataaagatgaattatgccatgaatagctcgtctttaaaggataatttgtgaacatagcagtgt

SEQ ID NO: 217699 - DNA, 365 bp, Glycine max
  unsure (1)..(365): unsure at all n locations
tcctagcggctcctaagtatatgggccattagagctatcatatgcttgtctattagccaagaaggccgtggattctctccgggcgacgtaggtatccgccatcgctatggncggtggcagcaatcggagaagttcttgactcccgatcaatggaaaagccaattggtccatccacattgttgcctcttgatgtaacgagtcgatcacccttcctctagcctgctttttgcaacacttgggcatactcgtgcgccactctatgctggtgggatcgggctatattaaaatattcttggtacctgctgacaatggctagcatgttggcctctgtttccataaccgatgagacaagattcttttggacc

SEQ ID NO: 217700 - DNA, 513 bp, Glycine max
  unsure (1)..(513): unsure at all n locations
agcttcaatttccttttatatattgtagtgaagagatntgttatgatattatagcatgctttgagatgaccattgtctcaaaactatcagtgatgtgtcactttcttgaggtgaaagaaatagaanagaaaaattcatgtgcttttcttttgtagctagtactatatcctatgaagcacaaacacctctactgttcaaagagtcatcatgctggacacatttctgacattgacacacccaaacacttggttgacacttgtctgagacttcttattaaggttttcaattaaaaatgatnttntgttggctagggtacnntttgtgacacctttacacaacttagacacttagtaaaacatatgaagttggtttaaaagatgaatagagcatcaatntagatattntattatatggtactcatattccatttcactaaagtctnntatcttgatgtgtatggggcgtcccatgtctatatttaagcttactggatcaaggtaaacacagaacacc

SEQ ID NO: 217701 - DNA, 341 bp, Glycine max
  unsure (1)..(341): unsure at all n locations
acacaaaactaagcttactgactgcttaagtntacacgatatgccncagaggtatatcattgcctnatagttactattaagcgaaaagatactgtgtnnnccccgctcgcctattataagattcattcntgcccgaatgattgcatactgttcaagcatgaatttcaattaatgntcaaatgccctangtgtanggggntacnagaaaatgttaaagatgatattgaattttttttattataattctaatatggatctccttgaaagtgtattgtattttacaataattctaaggttaangantttttnnnattgatanaattcaatgatctatctggttg

SEQ ID NO: 217702 - DNA, 340 bp, Glycine max
  unsure (1)..(340): unsure at all n locations
gctgcactatagatcatactactctttgaacattgattgttttttgagctttgattaatagatacccaatgatataatccaatacttctctcttaaaagtgttccaaagtgatcaagaacactttaaatcgattacatcaaagaaacctaatcgatacattggtcctggaaattntctagtttttggngaagaacacttctaatcacttggaaatgactatataatccattaattctttgaaataacggattacatcgtatatttaattgattacacgcgggtataatggttttctttataaatagtcacctttgtgtctcacttctaacaactttagaa

SEQ ID NO: 217703 - DNA, 375 bp, Glycine max
  unsure (1)..(375): unsure at all n locations
agctacacacacccctctaataactaagctcaccttcttgagaagctttcttaatattattcctaaagaagctagagcttanctaacacacctctctaatcctcagctcacntccttaagaagagaannnnnaantttgntananancccctataatggctaagctcacccccatgacaaaatacatgaaaatacaaaaaaagtccctactacaaagactactcaaaatgctcgatatacaaagctaanatcctcatactactagaatggcacaatacaacgcctaaacgaaggaaaaaacctattctaatcattacaaagataagcgggctcatacttagcccatggngctanaatctaccctaaggctcatga

SEQ ID NO: 217704 - DNA, 272 bp, Glycine max
  unsure (1)..(272): unsure at all n locations
caacccgggcatagtcagtcagtgagaacctatgacctacctaaacaggcgagctcctggcacgtaaccaataaaagaacaaagaccacaaagcaaggatgcttgtgtggcggctggccagctatggatcttgagtggtatctggaatatggcctctggtaatcgattacgaaaggtgtgtcatcgactataaggcttaataatggacacaggaangttatatggcctctgtaatcgataccaatggggtgaatcgatacagggtttaaaat

SEQ ID NO: 217705 - DNA, 359 bp, Glycine max
  unsure (1)..(359): unsure at all n locations
cttcttcaccttcttgtctcaaccgcaagctttgactaccgctcttncttcccgcgatgcttcttntatatcntgctgagtgggcttatagcctaacccatacttnccacgatttcctttggcatttatcaggttagttatgccaccgttgtctttgcctaaacccattccgggttcgtaaccggtccccaacataactcgggccatcatactgctgcatcggacaggcaagcttgcccagagaaggaattcacggaggaaatgcttaccacctcgaaagactggaaagcggnttctaatgactcctctgcgggctccacataaggcatagaggatgggcagctcaccaagatgtcttt

SEQ ID NO: 217706 - DNA, 312 bp, Glycine max
  unsure (1)..(312): unsure at all n locations
ctaagcctagatatcacaatcccacatattcaaaccaccctcaacctcaccacatgatttgatcaaaggntccaacgaaagngctctttcaacaccacagaagttncacactctcctcttccaactgtctatgctatgtacatttcaacgcactgcacnnctccttttttctttttctggaatgacctttctagaaaaagggttttggaacacctactttggaaataacaactttctataagcctggtttggaatatttttcttttggataagcctctttggaacaccttttcggaatccaaaaatnccttt

SEQ ID NO: 217707 - DNA, 216 bp, Glycine max
  unsure (1)..(216): unsure at all n locations
aactaagaaacctgtcatctattcctacaatgcagctatctagccctgctctatcaagttttgaagaaacagtacacttcccagtgctaaagttcctaacagtacacaccaatgggtgatcagaccanaagcatgcaacaatgaagcatcgatagaagcaatgaacacataaaacacacttaattagatatgaagaatatttacatcaactattca

SEQ ID NO: 217708 - DNA, 249 bp, Glycine max
  unsure (1)..(249): unsure at all n locations
ttgaaagagaaattgagaatgagtaaatttanagcaaactctctgctcacacaagtctataacatcgatctaaacttgcttaaactggatttacacctaatattccaccaaatcaaaatttgactccttaacacccaattatgccacatgtcttcatttgagtggagatgaaagacccactttatcttttgattgtgactcatactcagccacaaacagcgagaaaaacctgacctttgaaatgctaaa

SEQ ID NO: 217709 - DNA, 347 bp, Glycine max
  unsure (1)..(347): unsure at all n locations
cttaaaggtggatcacacagaactggcttagctgattacacttcacccaagactctgcataaggcacataagatattatnatacatgtacgatgcccgctcagctaaaaatgaccaatattcttaaaggttggaatccttttcttcactacttgtggtgaatagtccaaggatgnctatggcttcttctatatcttaaaattgtcagtatatttcagaagagtggggaaaaatcaaggatgttgaattagatcacccatacccacttaagttaacaattggcgcaaagaacaaacctgtaacgaaagataaaaatatctttacaaaaaatattaacatcgtggacac

SEQ ID NO: 217710 - DNA, 335 bp, Glycine max
  unsure (1)..(335): unsure at all n locations
acattcagaaactgctggtaatcgattactatatatgtgtaanccgatacnnagggatactttcattcatattttaatccctgtngnacctcactctttggncgntggnnatngattacattctctggtaatngatctcctgagagtacaatctgtgaaaaagactttctaacttaaaattcttggccaaaccttgtgataattcccttgaactcccttcctatttactataccctttctaagactntagagactgtcttgatcatgcatcttgaatatctttaatttctctgtcttgaataaagctttgagacgcatgtgacactatggatcat

SEQ ID NO: 217711 - DNA, 401 bp, Glycine max
  unsure (1)..(401): unsure at all n locations
agcttctaacttggacaagaatgaagctctgataccttttgtttatctgtggcctcanatatcttaagaagggnggggttgaataagatattccaaacttttctcctaattaaaaatctatcttactttttacttaagttatgaattcccttaatgacaatcttcttaaatattaattcagatgaagcaacttgaattatgaatataaagcactaataaataaaggagattaagggaagagaaaatgccaactcagttttatactggttcggccacacccttgtgcctacgtccagtccccaagcaacccgcttgagagttccacttacttgtaaattccttttacaagttctaaacacacaaggacaaccccttctttngtgttagagatctttacaaca

SEQ ID NO: 217712 - DNA, 362 bp, Glycine max
  unsure (1)..(362): unsure at all n locations
tcccatatccgtacttggaaggatctgattaccgccttcctaaggctgtattttacaattctgatatgggtcctgaccgtctcaactgcagaatatgggtaanaaananggcgaaacctttaaagaatatgcgcagcgatggagggatttggcggcacaagtagctcctcccatggttgagagagagatgatcaccatgatggnagacactctgtcagtgttctacttgagaagctagtgggttacatgccgtccagctttgcggatctactgcttgccggcgaaagaatccatgttggattgaatagagggaaagttgattactgtttctccacaaacgcgaatgccaaaagaatcggcgc

SEQ ID NO: 217713 - DNA, 295 bp, Glycine max
  unsure (1)..(295): unsure at all n locations
aaaaagcgaggtaaaaaactgttgactcatagtttttgtaagagaaatagaattgaatcgccaaaaaacaacacccgcctcttcataggataagtatttggtttaagattaattcaagaatgcctcaacaaacaaagtcttgtttcaagattcactaaaaaataagccttgcctgaaaatatagggtttcaaaagtatgcaggatctggtaatngattaccacaaaggaagaatgaatatgagttgtagaaaaaggttttgaatatgaatttgaacatgtnattgattactatat

SEQ ID NO: 217714 - DNA, 442 bp, Glycine max
  unsure (1)..(442): unsure at all n locations
agcttctngngcctntatagctctagctcttgtcatggtttcttttatgcccntgaaagggncttgggcttccatctggtcatgggccaaagactagttggtgtnatgggcttgggctttgatgtccacatcatttccttcttcttgaaaagcatttgcccctcaatctctgaagccatcacttgcatcgaaaagcattntcctcttcttgatcatttgagaatacacttcaaagttcagaccttatttgaggcacnnaaattcgtgcttcttctcttccttgtcctcacccatctttcctaccttcaactcttatccatgcttctatggggtgagcttttttgactcatcttctctgagtgggctcaatatatttttcttctcattcgtgcatcatttcagaagcaagatcatgataaaaatctagctacactcatgacta

SEQ ID NO: 217715 - DNA, 359 bp, Glycine max
  unsure (1)..(359): unsure at all n locations
gactcttcacattagaatttgaatttcaacgttctagcacactggtaatcgattaccaaaacatgtaatcgattacagcactttgaaatcaattaaaacgttgtaaattcagttgaaaactttttcaaatccattttgctactggtaatcgattacaataatctggtaatcgattaccagagagtaaaaactctttggtaaaaaggttttagaaaaatccatgtgctactcacgttttgaaaaaactttttcatacttatcttgattaagtcttctcttgattcttgaatcttgagtcttgaatcttgattcttgaaatcaaattatctctttgaaccttgaagtgntcttgattcaat

SEQ ID NO: 217716 - DNA, 404 bp, Glycine max
  unsure (1)..(404): unsure at all n locations
gcttgtaggactatggagtacccatcacatgttgtacttttgtgctgtcgggcganggngcacaacaagttttccacattcacanagcgcgcataaactcactcatccctggtgcccaccttcatttgagctcacgtactcccacgtagcccatattctcgtttctctcaacaccgggtccccatcaatcctgccagagcttcacaacatccaagctaaaacataatcaaacagcacaagctatcacagccaagtaaaacacggcagaggcagaatactctgctcaacacaccaaccaaaatcacagcttttctcacttaaagaccgcagtacaatttctacgatccaatcgtgacgcgtggatccgacttcaaatttactggaagttatagacataacctaca

SEQ ID NO: 217717 - DNA, 378 bp, Glycine max
  unsure (1)..(378): unsure at all n locations
acactatagaactcaagcttactatgccgagaaatccagggaaataccttcatctgacttattattatatatttctaagnnatctcttccattcttcaacacacaacatctcaccaccnnnnnantgannatgtgagatgtttggttttttgccattgaacaattcatatggagatattcttnagatgggtcatattatagctctatatataatggngcacgcaatgttaacggcctcccccccactattttggaagaggagtatcatttaataaaggtctacccatctcttccaaagatctatatttccttttcanaacaccatcttgntgaggcgttcttggcgcacacaagctatgctcaatcccatgcttatca

SEQ ID NO: 217718 - DNA, 243 bp, Glycine max
cattgatatgtgattcattaacttcatgcagcatgactatagaagtgaaagatgatttacaggaaaatcattcaactgtctcagctgaactgaatgtaaatgtggtagacaatttaatgcaagatcaatcaactgtctcagctgaagtcagttgtgctaaacgtgcatctaagaaattcattgattcagatgctaccaatatgccattcatcaagtcactttgtgaattctgtgtcaactcag

SEQ ID NO: 217719 - DNA, 386 bp, Glycine max
  unsure (1)..(386): unsure at all n locations
cactatagaaactttaagctttaacatatatttttattataataagagtagagcagttcttctccttctgtggggcagnttcaatgctggtgctatcatttaacatttnatttagagtaaattacactaaccacccatggtttttgtgtaattacacagacacccnctgcttttttaaccattacagtcaccttccttgtaagtggtgttagtgtaacatatgaggggtgttattgtaaagtttcaaacataaaggtgcgaatgtaatattttctgtctttctcctaaagctggcgattttgtgagaaatttctttagtgccagcaatcttattgcgtttttctttctattatatagctgtaaggaaatttaatgacagcagccac

SEQ ID NO: 217720 - DNA, 149 bp, Glycine max
tctgacctatatcatcttcacctgattttaatttttttttgccaactttaagtttgtttaactaaacggcataattatcttctcctgcaaattccagacaccgatttagcctctccttcaaaaagaacgcgatttggcccttctgaaat

SEQ ID NO: 217721 - DNA, 189 bp, Glycine max
  unsure (1)..(189): unsure at all n locations
tataacgcttgtgcacaatttctagtgcttgaaaagatgtttncaatgactctttcgtagctttcacataaggtgttaaggatggacaactcactagnatcttttcttcccctaaactataaccaggtgtccttccggcataatatattaattctagtgatacattgatgggaccaccccaacagaatg

SEQ ID NO: 217722 - DNA, 153 bp, Glycine max
acatgtgaccccttttaccagagcatctgtttttgataccaagagcatgatgacgctatagaagatcttgatggactaggtcaaatcaaggagtaagtgtgggaagagtactctgggaatgcatggacatcatccatgctatctgcaattaca

SEQ ID NO: 217723 - DNA, 194 bp, Glycine max
  unsure (1)..(194): unsure at all n locations
cataagaaaactatattatntacacaaaaggtacacttntttatatttggatagagggtggttttntaaagattgaaaaaacttttctgaggcgtcctaagngattatctacgctcctactgacactaaaatatcatcataaaaacaactatcaatctacctatgaaagtccttaagacatgatgcataagcct

SEQ ID NO: 217724 - DNA, 342 bp, Glycine max
  unsure (1)..(342): unsure at all n locations
gatatttatcatgcagacttttctgatgatgacctacgtacttttttggatcagactgaaacttatgtgctttaccgagaacaaanctctttttccacttgtgaagatgtcaaagtttggctatgaagaaaggtcaaactgagaaacatttggtatttncattggtttataaacttattgagctatctttgatattgacggggtctacaacattacgtaaagaactatttaacaatgaagattatctagtctatattgcgcaataagatcaactatgtgagggtaatgacttgatggatgttaaaccgacggatatattaagctcttgatgaaatgatatat

SEQ ID NO: 217725 - DNA, 241 bp, Glycine max
  unsure (1)..(241): unsure at all n locations
attacaatgcangtcgctaggtttttcctcgacctcaaccgaagtgtgtttcgaccgacacctgcattgtttcatttactcggcaaggaaaacattagcccgcctcggaaaataacatgattcaccgatactgaatctaaaaaatgttagccgatgtagtcaagaaagatgaccgatcgatgtntaaaanagaagcatcaccggatgacgccgatcgaacatttccaaatagaaacgtatc

SEQ ID NO: 217726 - DNA, 132 bp, Glycine max
  unsure (1)..(132): unsure at all n locations
tatattgttttttaatagagantantgaaaattagaaaagagaaattattatttgttttatttttatgttagtatttaaaatgtttatttgtttatagattatttaatgaggggttgtttttttatgttttt

SEQ ID NO: 217727 - DNA, 432 bp, Glycine max
  unsure (1)..(432): unsure at all n locations
acccaccatcctctggtgccacctncaactgagctcacgtactcccacgtagctcatattcttcgttctctcaacaccaggtccccatcaatccttccaagcttccccaacatcaaagtaatacaacattcacacagcacaagctatcacagcttagcaaaacagggcaaaggcagaaaactctgcccaaaacaccaaccaaaatcacagcttttcacatacaaataccccagaaacattttcttcgttccaattcgttaaccgttggatcgactcgaatatttactggaagtctctagtacttaagcctacattgtgaccggtgggatctactagcaaacatccagaactcattctgcactacaagttccatagccaatcacacacaagcatttttctgcacttgtgcaaaattctgctgcacaaattcac

SEQ ID NO: 217728 - DNA, 377 bp, Glycine max
  unsure (1)..(377): unsure at all n locations
agcttccatatcgagatgcacganattgaactacggaagctgtctagatattctaatggtcataacttttcactcggatgcacgactcccgcgtatnnnaactcgcgacgctcgaaattgaacaacggaagctctctagaaatttaaatggtcataatgtttcacacggaggtcctattcatgcgcttaatatatncagacgcttgaaattgaacaacggaagcttttgggaattaaaatggtcataagtttntactcggatgttcgatttaggcgctttacatattgacatgcatcgaaatgaacaacggaagttattataaaattatatggttataacttttnactcggatgnnncgatctggtgtatcacaata

SEQ ID NO: 217729 - DNA, 360 bp, Glycine max
  unsure (1)..(360): unsure at all n locations
tctagcttccaggaagctaccttgcttatcttctcaggaagcttcccatgggctaagctataaatagaagacgtgtaacacttgcctacacctctgctgaatgagaaacttgtgagacacacttaaaagttcaacttctcttcctaatctgctttaatttccatgcccccccccncctctctttcattactcttctncattgaaacttcctatctaagctcttatcaaaacattctcttggtggggaagcttcttcttccatgggttattctctagtggatggcgtcattttttaccttttatactntatcttccgctggaactctatagaagaatatcaccattgtaggaccttattga

SEQ ID NO: 217730 - DNA, 380 bp, Glycine max
  unsure (1)..(380): unsure at all n locations
agctntagcaagctggaatcatttatcctatctccgacagtcaatgggagagtcccgtccaggtagtcccgaanaagactgtcctcacagtgatcagaaatgagaaggaggagttgattcctactcgggtgcagaacagttggagagtctgcattgactataggaggctgaaccatgttaccaataaggaccatcttcccctgccattcatagaccagatgctcgaacgcctggcaagattctacaggcgctttataagggattttagcaaagtagcccttccactgtccaacttgttgcanaaggaagtggagtttgctttaatgacagatgcaaagaagcttttgatagcctcaaaagagcgtngactaccaccccca

SEQ ID NO: 217731 - DNA, 364 bp, Glycine max
  unsure (1)..(364): unsure at all n locations
ctttaccttaccaatctacattatataacagagaggggaaccatttcagagcattgagaaacattgcaatagctctgggattatagctacgcgcacctaactaacactacagaaaatnatntaatctatgttttgataaacttcacattcacaggatatttaacttccacagaaatatatnagnaaactttcaaaataaacagctaaatcataagcatatcaacttacccacttgctagtcaatgaacttgccgatatgtaaaagaaggttgccttcgcctcctctgctatggcgttttctatcattgggttaccacctccctagcattcataggataagagagattaaagaccagacagagtc

SEQ ID NO: 217732 - DNA, 384 bp, Glycine max
  unsure (1)..(384): unsure at all n locations
ctataaactcagctntctaagaagcttctttgagaagctagatacttatctacccacactctttattaactaaattaacctccttgaaaatattacgggtaaaattaacgcaacaaatataatcaaacatcaaacataattactaataatatataaatatatatcagggtgttacagcaagcgtgtgcggcacacacacactactcttgcatacgtgtcactcacgaagtgggcatgtatataatcacggttcgtgcgtgagaaggggagcgtcacaatgagaaaatttatggcaccacttcagctcctgccggntatcgaagagntattgcctccctttaaatggagtggacgcttgatttcgagtcactattcattgtcttc

SEQ ID NO: 217733 - DNA, 313 bp, Glycine max
  unsure (1)..(313): unsure at all n locations
aaagagagccatgatggtgggctcatgggccantttgggatagacaagaccttgtcttactcaccacccagccttattggccccatatgaagaaagatgtncataagcattgnactaggtgtgtggcttgtttacaagccaagtctatggtgatgcctnatgggctatacacacncttacncattccatctgcacctgtgtagacattagatatggacttgtccttgggctttctatataccaaagaggtgtatactctatctttgtggtggtggataggtttannaagatggcacactttataccatgccac

SEQ ID NO: 217734 - DNA, 279 bp, Glycine max
tttttttgctgctactgtggtatatggagtgatcatggaagaaattctgtggaacttttcccctgtctatggttggagctatgcttgtgacattgtctctttaacggtattgaatatagcactcttaaatacgggttgtgggccttcttatgactgaaccgtattatagtccagaacagaatgaccttgtttatattagcacaactatatgacatagtttatgctcgttactacagaatgcagcgaaattattttaaaaaggtgctagggtggttttta

SEQ ID NO: 217735 - DNA, 64 bp, Glycine max
  unsure (1)..(64): unsure at all n locations
ggaacttaaaactaagctacctnncgcaggattccatcagatnttaatggcagaagatgacatt

SEQ ID NO: 217736 - DNA, 255 bp, Glycine max
tattaacacagtggttattaatattattaatatcagaagaaagggatgaagtggtccttttgcgaagctcttcttctttcattccattgtggatacactactactactactacttgcagcaacagcaacagcagcttcttactgacttgttatcaatctatcttcttaatttcttacttcgagttcatgctcttatattattataatcttttaggttatctgggaatacttattcgcgttgtatgcgttgcttgt

SEQ ID NO: 217737 - DNA, 331 bp, Glycine max
  unsure (1)..(331): unsure at all n locations
taacataattngacatttcggtgatcaaangaaaaattatatccagataacacggatcttnttaaagctccactgtgatgattgcagatttcatgtgataatgcaagaacatgttaaacatattcataatcgtgaaattcattatcattatcttgagtataatatttaagatgagttgatctctcttttggatcacaagataagaaggtccatcgtgaaaaatattaaagaacgaaaactattattctctaattcttgattgtacccccgatggttggcatacagaacaaatgactcttataatacgatgtgtaatatgtcaataataaat

SEQ ID NO: 217738 - DNA, 385 bp, Glycine max
  unsure (1)..(385): unsure at all n locations
tgatatatcaagacactcgaaattgaataacgaataatctagagaaattcacatggtcataacatttcactcggatgtccgattcagacacataagataccgagacgctcganatgaacatggaaagtctggaccacgttagacgaccataactcttgacatgggtgtaccctcgacgcccatgatatatcgagatgctcgaaattgacatggaagctcttgtccagctcaatctacaataacgtttgacatgggtgtacgatcgacgcccatgatatatcaagtcactcgaaagtgaagaacagacaatctagagaaatttccatgagcataacatttcactcggatgtccgattcaagcgcatatatattgagacgctctaaa

SEQ ID NO: 217739 - DNA, 363 bp, Glycine max
  unsure (1)..(363): unsure at all n locations
gtgtgaagggngaaacttcctgcttttattgttgaccacatcagtggacctggagatantgtcgcggggtcagagaccttggggacgtcacgtggggtgctattgcccaaaaccaagcttgaccaatcccgacccaacccgggcatagtcggtcagtgagaacctgtgatgtacctaagcaggcgagctcctggcagtcaacagataaaaggaaaacaaaccacaaagttaggaggcttgtggtggctggccagctgtgaattttgtgtaatatgtggatggtggcctctggtaatcgattactaagggtgggtaatcgattacaaggcttaaaaatgaagacaggaggcttagatggtctct

SEQ ID NO: 217740 - DNA, 385 bp, Glycine max
  unsure (1)..(385): unsure at all n locations
gctggctaaacttttgtgcattatgaagnattgtatattatttgaaacttacgaattgtggtatcatatgatgatccgggggcctcccccatttcaatgttgaagcttgatttctgcttctgagaatgctctacattcctgaactctcctgcccttgtccttttaccaaatttaatggtatccatggattctgcccttatccatcgctgtgaataattgtatgtttttcttggccaatggtttttgttttcacaatgaatatgaatgtcccttgctgtttaaatcggtaataagtatctttggcgttatggaactcgaccattatcatatctgctgtactaatataaaagttgttattgatattttaaactgggcccaattttgt

SEQ ID NO: 217741 - DNA, 423 bp, Glycine max
attattatctcttttctgctccaacaattgcatcaaaagaattttctcggtttttcttctcaatccttgagcaacatattaataccaagagagaccatttatatgtgtgattttaagagaaagaattgtctactcttatataagaaatatccgtaagttgaaatttatttattgatctatctttatatattatttgtattacctgtaattataatcatctttaccaatttaatatattattatactaacatttttttcaaaataaaaattacattctagtatatagaataataaatctatcttttttttactagaatattattaaatatgttatctaataatataaattatttcgaatgtactcgcattagcatataatcagttgactacttaagtataaacgacaaataaaatggaccttat

SEQ ID NO: 217742 - DNA, 327 bp, Glycine max
  unsure (1)..(327): unsure at all n locations
ctagttaccaaacaggtcatagcctttctagttaggctctcaaattggcaccctagaattgtcttcttattagaggtgttcatgttaaacatatttacctatagttgaagatgataggtacatattaaagacaattacatacagttaggagatgtaagtaaaagttaatgacttttacctacacactatacgtagtagttaaaacctatagtgacagacaattagtcgtcattatacgcctnnctcaaattgacggaagaaacgtctgtaggacatagtctatcatatanttacccacgganttttttaattataagtgacaagttt

SEQ ID NO: 217743 - DNA, 354 bp, Glycine max
  unsure (1)..(354): unsure at all n locations
cttcgacgntcttcattcgttcttcatcgntcttcgatctttcaacgggaagtacctcgaaccaagctnttgattcattctatgcctccgtacgcggccacattgtgtttcgngcatttttattntngttttgnttactttttataccccctgttgacgtgcttaagccattttacttaagtcatttctcgcttaacttaaaaataaaataaaantctccgaacgtttgaattgcattattcattaacttttgtcaaaataaattccgaccgttcggtcatgccgtaaccacgttggaaataaaaaaaaaccgtaaaattatataataatcaaaaaaacatcttttagtaaaat

SEQ ID NO: 217744 - DNA, 377 bp, Glycine max
gtaaattcacatgtggtctacttcacttggtgtaagattatgcaaatgtcatttttggcatgaacattgtttattttttgagtttctcctacaaatattatatggaatacattgcacctaattatggtttctgtttcacaacccaattttcatggaatggataaatttgtatagatagttaaagtttaatatagttatcgaacatcgacaaatacccttttatggacatactacattatctgaaagcaaaaacaatcaaataattgtcaaatttaacccgacctaaagaactatgaatggaagagagttgatgtgatcataatgtggtctgtggcttcaacacgtgtagggcacaaactataagatatcatttccct

SEQ ID NO: 217745 - DNA, 242 bp, Glycine max
  unsure (1)..(242): unsure at all n locations
atctatgagataacattagtaatgagtaaaatggagatatgctgaataatattgagaatttaaaatatatatttacatgaataattgaaaattgatgaattctttatctgtaatataaacgtattttgttggttggatgggggtgggggtggaagattcatattatatatttattgttgagaattatattattattanatattatatattattattctatttatttctcatccatattcatt

SEQ ID NO: 217746 - DNA, 315 bp, Glycine max
  unsure (1)..(315): unsure at all n locations
cctaacgctagcttcactgcatataanatacaagaattttgctaagcgggctcacatatcggcttagcgagaagtgcacgtntcctgatccgaagatcttgctaagcggtagctntaacttgctaagctaagtatttatgtgctaaataaaaacccaaacgactcttctgcttagcgcgagccccgctaagcagttggccttggaaaacataacgactctctcgcttagcgaacgctttgctcagcggaaacgtcaaaaaaacattggttaagtggaacttcagcacaatgacaagtgctgagtganggacagct

SEQ ID NO: 217747 - DNA, 302 bp, Glycine max
  unsure (1)..(302): unsure at all n locations
tcaacagncactcttcatgaagcaatgccttttctncantcttcacgaataggcctgcatcacaagatgagcttaattntggtatccaattgactagtgcgcttaaattaaaggtcactataccttccttttttgggatagatattnctataataacaatatgagtttcacacttcgctcgttgtatatcatgaacatttattcctagtcttttgagcaaaaatggaaaattctagctattggttctgagttgctttttaaaacttttggtacgtagaaacacaaagaacttattgtgaatt

SEQ ID NO: 217748 - DNA, 223 bp, Glycine max
gcttgagatgaagaagtgttgaaaggtgaaactttctgtttttatttgtgaccacagagtggtacctggagatatgtcgcgcgggtcaagagaccttggagacgtcaagtggggtgctattgcccaaaaccaagcttgatcaatcccgacccaacccgggcatattccgtcagagagaacctgtgatgtacctaaacaggcgagctcctggcagtcaacagat

SEQ ID NO: 217749 - DNA, 261 bp, Glycine max
gacatgaactcattgtgctacgttaagacatatactaatcagctatgttactccttgtcgagtatgttgatgacatgtcgattgcacgatctagtatggaaaacactaacaggttgaagcaatagttggcagatcactttgaaatgaaagatcttgtccacctaaacaatccttggatgagaattttagaaacagacagaatgaatttgagctgctcaagcaaatattacatagttgttgacacgtttaccttgaaaatct

SEQ ID NO: 217750 - DNA, 374 bp, Glycine max
  unsure (1)..(374): unsure at all n locations
ggcttattccctagaggatggtggcctccctctnctcttcttctttgccttccgctgcatctccatggtgaaaaatcaccattgaaggacctcattgaagctcanagatccagcctccatagaagctccacaagcaagcttncatcagctntcctctttctactcccgtctgttcctcttctcaatattttttattttcaacttttaattccctcgcgttcattcctttccctccatatacctcaacccaaaccccttccttctcttctctccatgtcatcccctcacgtctgttcctttcccccgcgttccacttcgttgtcgagagagagaagtagatagggtgatacagactnttntnggtgctatacatc

SEQ ID NO: 217751 - DNA, 353 bp, Glycine max
  unsure (1)..(353): unsure at all n locations
tcgagaactgggctagcataataacatctcgagtaatctcttatatctgccatatactacttccttagcttttccaaaacacaagggaaaaaagaggtcacgcttcttggtatgcttttgtttttcctctagcattactctcctttttccggttaactttgaacacaatttcaggatcctgttattcctttcttgatgctagaatctgctccattnntgtgctcaaagtatcaccagttaataatatcacttagttttctgtagggacccccccaccccaccccccatggtatattgtttgtcttggatgccctttacttgtgagggaagtaaatacctgttcttcctccttc

SEQ ID NO: 217752 - DNA, 193 bp, Glycine max
ggattaaaagcttttatgaattggaatcaaaactagaccttaaataatgagggaactaggagaccacagttaactacgcttgggaggtcaatgactatcatgctctggcggacctgaggtgctttaggctgttgaaagcgagagtaaagcccttgaactaatcctgactgaataaagaaggaaaaacattgta

SEQ ID NO: 217753 - DNA, 187 bp, Glycine max
  unsure (1)..(187): unsure at all n locations
ttgaactcaanatctggacctgtngtaagggtntgnngnttggttcctttgnncccaccatacagacctttggcctttcatgcangaacctggagcaattgaacaaaccaaaanttatgggtgaaatatttanaataaaaactnntaaaaataacaacaaaatcaaccacagnagaaaaattatgac

SEQ ID NO: 217754 - DNA, 315 bp, Glycine max
  unsure (1)..(315): unsure at all n locations
agaataaaaaaaaccccttatatacatattatanggnggccaacattaactctcattntaatttgattagttggaagctaacatcaaaaggaagataggaaaacaaaataaataattagaaaacatgtttgaagaaaatttatcacctcgaagtttaccttaagattctgaactggtgtggacattcaacaggaattaatactggctccncaaatttctgcttcaaagttcagagttctacacctgaaaaagtaatattcatgtanataactaattgcatgcattgatcaaacactttacaagtctttgtactaa

SEQ ID NO: 217755 - DNA, 286 bp, Glycine max
atagagttatctctcttatcttagagagaggattctcctaacctctctgagtgattcaagaacaccctggctatatcaaaggtctttcacatactttgtgtgttggcctcgctggaaagagtgaatcttttctttcaccatttcattttcaaccttggtcctttcaaccacaattccagaaaatccaattatgcctagaattatctcgtgacataactctcgtttaatcgttcaaataaaggatcttggatctaattgaactcgaacgagactttacttcatttga

SEQ ID NO: 217756 - DNA, 226 bp, Glycine max
  unsure (1)..(226): unsure at all n locations
aacatgagctatctgttaactaatttggagaagttatctcatataggntcctcccaaaaaataagaggacatctaccaattagcttatgcagaaactcatttcatttttntcttcttaatttcttctctaagagtgcttctagagaagcttacctaaacagaccctanatcaattattaactatggggtggcaaatagctcagattcagatcatgggtggataaac

SEQ ID NO: 217757 - DNA, 230 bp, Glycine max
  unsure (1)..(230): unsure at all n locations
gtggacttcttcgggtccactgggtgtgttacgggcaccatcccttgcaatagtggatggtataagaaatcaggtgaaccatatgcatacttacctatgtctggacgacacagaccaactgatacatncgcaaggggagatctgcattgcggtcgctgggcataacgttgctaagtatcaacgtcatccatatctgtgttaaagtggcatgttggtgccatgatcacact

SEQ ID NO: 217758 - DNA, 133 bp, Glycine max
  unsure (1)..(133): unsure at all n locations
cattaccacacataaatctagctggacgtgacaactggtaacttgatctacataatacttgtgttaaacaagaattatannnaaaaattataaantcccctcctctactctttattttatntaattattttat

SEQ ID NO: 217759 - DNA, 350 bp, Glycine max
  unsure (1)..(350): unsure at all n locations
agctttcgattcattctatgtacccgtagtggtctatattgtgtttcgngcattnncatnctcgnnttggttactatttataccccctcttgacgtgcttaaggccatttacttaagtcatgtctcggctaacttaaaaataaaatcaatcttcaccgaacgtttgaattgtattatccgttcacttcggttaaaatgaattccgaccattcggtcgtgccgtaaccacgttggaaataaaaaacagggtaacaaactatataatgatgaagaaacacatctttcagtatataaagcggaagataatcggacgttcctctttggattgctatcttaatcgaatgatcata

SEQ ID NO: 217760 - DNA, 220 bp, Glycine max
ctagtctggtatctatatggatcttaaccctcatatgcgacttctttcaaactctgacttaattcccttcttatgttaaaagagggcatatgggagggaatgagtatataggtcagggataacccatacacaacctaataaggattgctggggtttataaccctttgagtatgaaatttaacaggaaaatctcatccacactttggtgccttcaaagacc

SEQ ID NO: 217761 - DNA, 452 bp, Glycine max
  unsure (1)..(452): unsure at all n locations
gcatgaccgtcgtaaaatagtcatcattctacatctggtcttcataaaagaccatctaagaatgctaggccatctaagacggtctcgtctcaacgattaacgtagaatgctcagtattttaagactgttatatctcaaagaccgtcttagaatgggtagcattttacattggtcgtctcacaactaatgtagaatgtctttttttattgttttagctcgaacctactttttttatatagaatcgacagctatgttcttcatataactacaatanatacgtgagaatatgaaattaattaaattctatgccgatgaatttaaatcttcaaatattttgtcatttctaacagtagacgtgtgttgatattacttacttttaagtcttttgaagcggactcactcantccatgcattccagtaaatctcttatatacgccttatgacaaaacagt

SEQ ID NO: 217762 - DNA, 348 bp, Glycine max
  unsure (1)..(348): unsure at all n locations
atgcttgaactccctgtgcatgttgttagaatacttgtgtatgagattctcttttatgctatataaatgcacctgcatgtttatctcaacatttnngtggcgccagatcgccatgaattgctctattntgtactggtntaaattttcttgaaaaaaacaaagaaatattactcactatactagcttatccgagtacaatactcacatacctcctccaccacacacaaataaattaaggtgatagagcttaaacacctccatgtttgccctaataaactgaaacctattatgagagatggatcttctgatgatgttttcccattggttctgagcttggatatgaaccac

SEQ ID NO: 217763 - DNA, 293 bp, Glycine max
  unsure (1)..(293): unsure at all n locations
gcttgacagacaaagcaagaaaatgaacctgtctttatggagttnggangataanatcgaanatggcnggagaaccacgtcnngagaaggtcangaacacaacggggagagagaacaggggagacagatggatagagaaaagaaacacganaccaagccacaggaatgcgaaatggcagggttacccgaaaatacaaaatgacaacaataaattcgtaaaataaaaaaaccgtaaanaaaaggagagagaaacaacacttttttgtaagtactgtagcacgatgtgactgttt

SEQ ID NO: 217764 - DNA, 364 bp, Glycine max
  unsure (1)..(364): unsure at all n locations
cacaaaactcaacttctaccggtctantggtagactattctgcacactaatttgtggaattctcatcnaacggttncacccaacaaagcctgtcgtttgtnccggacctatcttctttgacaaaagtacataatgaatatattgggagctggaagcttcgtacacttgagcctaagttaaggacctttttacaaaatttggttgaaacattctgactagcatttggatctcttcttaacccacctaaaaactactcaaaaatggtcattcataattgcaacgtgaatgatgcaatcaaactctatgaactcctcactgacccaatttgtcatttatattccttcgtcatatggcattaatactt

SEQ ID NO: 217765 - DNA, 459 bp, Glycine max
  unsure (1)..(459): unsure at all n locations
gcttatttctagtagacttcaatctatatgggttgtttctttttgtattactaaaggttcttcccatggtgcagttgagattaaaaatgaagctaccagaataatcttcaaagtgaatggtcaccaactcaagctttttcatgagagcccctaagtggaggagggaattgtggcagacctctctntggtctttgccaatttatgttatgatgtgccttgaatggaatttgaggagtttcctttcccttttcttctacatgttgtctctttgtttgcatttcatgacatgctcacattgaagacaatgtgcatttcaagtgtggggggagggtttagaacaaccaagttgttgtcttctggtttagtttagtagattatcgtctggtaggtttctatatctggatgtggttctgtttagttgattaggttagtctagcattttactatntntacatatat

SEQ ID NO: 217766 - DNA, 342 bp, Glycine max
  unsure (1)..(342): unsure at all n locations
actcagcttgaggggcgtagcccccatcttttataagagagtatctattatgtgtttaccaccacgaacatcgtnttccttccatcattgtgggccccacctggcgccgccagatacctncaccttttgggcgtgatctttgaaaaaactgatcccctttttgcaaatgttctgtaattgcattctatccggaaccatattaaaattgtactgatactggctaacaaatgcaccattangttcttccaagaatagaactcggaagattccaagttagtgtaccacgcaacaactaccccagtaagacatttttggaaggaatgtattatcaattncttatct

SEQ ID NO: 217767 - DNA, 355 bp, Glycine max
  unsure (1)..(355): unsure at all n locations
tcttttaaggaagcttctcaggaggtgagcttatttattagaggggtgtgtgtagctaagctctagctctcaaggaagnnttctcacagaagcttctcaaggaagatttctcaagaaagcttctcaaggaagctacctagtctataaatagaagcatgtgtaacacttgttgtaactttgatgaatgagagtcttgtgagacatacttcaaaagtcacttctctccctcttttattccttcaattacgtgctccccccttctctctttctttttcttcattaaagcatcctcttcaagcttcttatccaaggcaattcttggtggtgaagctccttcttccttggcttattccct

SEQ ID NO: 217768 - DNA, 246 bp, Glycine max
  unsure (1)..(246): unsure at all n locations
gctattcttttaatatgttgatcttaaggtgatttgtccgtgctaaacccttgattagtttgaaaccagcagggtggagcttaccgtgaaggggagccacatgacccaaccaaatatgttacaaggcaacaaagttcttttangggtggcanatggatgggatagatcataatcataatttgtattctaatgaatcatatcnaaataatctattaattcattttaatttaattaaaaattatttaa

SEQ ID NO: 217769 - DNA, 324 bp, Glycine max
  unsure (1)..(324): unsure at all n locations
acatttaatctctttttattgtcgataagcgcctttgcgaccacatggtccatacactttatcgatacatgaagagccttgntatgtccttctccctctacaagaatctcttctttcgcanacacgatataattggtggtggttatatgattaacgatgccttcaaaacccttcactgagatatcgtgggctacatgtgcatcattgaagacttttatcaacagcgtacgatgaagctcggagtttatgagcatgtcaagcaacgagatccttgctggagttctatttcagtgctcgactaccttanactagctttgttggatg

SEQ ID NO: 217770 - DNA, 313 bp, Glycine max
  unsure (1)..(313): unsure at all n locations
gctatttggcattttgntctgttgtaatcaatacaacttctttctaatatattactcacttgggntnatgactnnnntttggtttgngnnnnncnncctctgctcaccttcaagtcttaatcaatacaaagggccnanngggaatttttatggnatatttaatnnattacannannattttaatnnantatttatattnagctttggtttngagtgaatacaaaagccatttaattattactatgttttttaattaacaacttgcgtgctattgtttgtaatcgatcatttcttattatnacctcanaaccac

SEQ ID NO: 217771 - DNA, 364 bp, Glycine max
  unsure (1)..(364): unsure at all n locations
cattaaccatacttaacaccgctgacaacaacgtcaatgaattcttgtaccccggataccaaggcttatttgaatcagtttccaatgtatcatacataggagcaggtgcttgttgaaaagactcttgtccaagatcactgaatcatatctccaagcgatcttccatttgtacattcaaatggtcagattangacccactatgcatgtctgtcaattcaccatgtcatatccatgtagtataattcttcttaatcccatcacacaacaaatgttccagtatgtcgtcgagtatttgtcgttctccgttcaaaacaattattgcacaaacaaaaaaattcncgttttcatccgggtcgactttttc

SEQ ID NO: 217772 - DNA, 355 bp, Glycine max
  unsure (1)..(355): unsure at all n locations
aaatcgatacgatacacttctctacaagcttcaaacacttgtgtaatcgattacgaaaaanctgtnnataataaaacaaanannccccactatacaggaaatcttctaactttagaacttttcttctaacccctacatgatgatgcatgatgcacatatgaaatgatanagactaaaatgcaacacacaatataacaatcaatacaaatgccactcaaagagttgggcatgtaaaatataaaacatcttanagctcttctttaagcttaagggctaagtttcatgttgctcctnctatntntaacaanattttcatggcaccaaacatatatatatatatatatatatatatata

SEQ ID NO: 217773 - DNA, 260 bp, Glycine max
  unsure (1)..(260): unsure at all n locations
atttctgtattaattaggtatataaatanaactttcattattggatgactaaatatactcaccaatatttatcaccaataatgctttgtacttgatcaaccatcataatatcactatcaacatatgtagaagctgattaatatttattcttaacatgtagtggagttgattttaatccttaataatttgataactaaatatatcatgctgtgataaatctctgatccaaaagaatctatatcctttacttaatgttactt

SEQ ID NO: 217774 - DNA, 366 bp, Glycine max
  unsure (1)..(366): unsure at all n locations
atgagtcaacanaaggaatatatgactcacaacactattgttttttctgtctncacaaagcanaagaagtccaatagacgtgcacttgcngctgcatacctcccagagataaatggaaaaatgaaaatcacaccatgacaagttgtaccaaatgatagccaactaataaatataatgttagtctacactacagaattgatcgttntcatcttctaatgaagaatttaaagatccttctgtgcttgaaaaaaaaaaaaatctataatgaggttaagtcattccaaatacagtgataagaatgctaaccaaaactggcaaattaagatgagggtcaantcaaaccctactcaagctgcagtctaactc

SEQ ID NO: 217775 - DNA, 349 bp, Glycine max
ctaacacgcgtcactgctatactaatgaatcatttttcagaagtttaaaaactcatgatggctaaaaaataaaatcacttcccctatattacactaaatattgtaaaaatgttttatttaaagattataacatcaattatgataaaacataacatcaatttatagatggaaactcattggaaatgaaaaagaattgtgattaaatttattaaagctgaccagctatacatataaaataaataaaaagttcaaacatagttgaaatttaaaaaaaatttataaaaaattttgataataccaaatagaaatataactaaactaagggaaataaaaaacttatttgaaaaat

SEQ ID NO: 217776 - DNA, 358 bp, Glycine max
  unsure (1)..(358): unsure at all n locations
tatttnggnttgagcatgtctactcaatataatacgttaatatcaatagtttcatataaataaaaataacaaacacagtttagtatctgtacttccgacgctataatacacacaatacggtataggtaaaatatatatttaatcaattcattaaagtggaaaaaacatatatatatatatatatattaaattttcaattgactctagcttcattttagaaacttaaaataaattgagctctttgtattacctgactaactaagtactatagttgacaacccataataagtgtgtcgctattttttttttagaaataattaaggataaaaatttaagaataattttatggctatttttt

SEQ ID NO: 217777 - DNA, 377 bp, Glycine max
  unsure (1)..(377): unsure at all n locations
ctatantactcaagctaacagatccgnntgcattcaccaatatatttgcacattatatattcttatcatngagaggaaataattaggtaacaatacacagattgntccatgacgccgcgtgtttgacacaaaaataccatttacactttgttacagaaattatgagcttactgcacaaccctaataaaaaacactagccattaaaatatccagcacttaatcctcatgggacatgtatggttatgcagatcaaagttcaaagacaaaaggaatgctccttatactctacatctagaactttngtactatttttcttggggtaattcttaactttacttttggatatagtgaatcattcaacctcccaaccttaacct

SEQ ID NO: 217778 - DNA, 104 bp, Glycine max
taaaaaaataaacacggaagagaagcgatgaacgaaactcgggaaaaaaagaggaaacgttcacaaagcctcagctactttcacaaaagctcacgaactcgtct

SEQ ID NO: 217779 - DNA, 437 bp, Glycine max
  unsure (1)..(437): unsure at all n locations
gcttagcgcgagtttggcgttgagcgaatattcacttactcgcgctaagcgcgacatcgaggtaagtgagccctttttaagcctggaatagcagaaaagaaaggggcactgggagatagaaaagagagcgctgaatagccataagagcttcaagagtgaaatacacagaggcaaagaacagagcaaagaagccaacttttgatcttttaggaagagttttgagtgattgtgagattcctagaggtggaggagacatccccactcctttgtaagcaagcaatttctcttaattcctcttcttcagtgtaaaaggagcttccttgctatggaaggctaaaccctgagttggggattcttgctgagtaattgatgtaaactctntccctatctaattaagggtgttntatgcattcattgtttctatcagtactatatta

SEQ ID NO: 217780 - DNA, 546 bp, Glycine max
  unsure (1)..(546): unsure at all n locations
aggctttgtaccatcattacctgcactatatatactcaagcccgcttctacaccctacctatattgtggagcccttaataccatgcccacaaataatgaaaccttaatctaatatgtacaaagattagcgggctcatacttaacccatgggcctgaaatctaccctaaggctcataagaaccctatggccttctcttgcatctctagcccaatcttcttggagtcttctatcaaattcccttgtggggtaagaatgcatcattcccccccccccttgaaaaggatttgacctcaaatcccaagggtcttgaaactctgggcttttttcctcaacacctgtaaaaagaacaaaaacatatgtattagtggtgtttggtatgttaaagtaanggaaggtctgaaaacccatttcctgggcaatcttccatgaaggaacatggntnctcaccaactcaatgagtggtgccacagtatagaanaatatgggacaaaccttcttgtaaaagttgtaagcatggaagccccacatttttctacactttgtgn

SEQ ID NO: 217781 - DNA, 387 bp, Glycine max
  unsure (1)..(387): unsure at all n locations
gaattacattatcctgaagcatccattgttgaaagatacattgcagaaaaagatatggaattntgtttagagtacattgaaaatgccaaaccagataggctttcggagtctcgatatgatgagtgggaggcaagggtttgcgagggctacatgttataactttgggtctaaaggaattacaacaagcttatttgtatatactaaataatagtaatgaagttctgtcatacatagttcattatgaagcttttgttagggaaagtaaaccataaatgaccaagaatatggtgttgaaagaacataataagactttcctaaattggtttaaagatacaatctttggtggtgataaattggtttaaagatacaatcttttgcaatgataat

SEQ ID NO: 217782 - DNA, 443 bp, Glycine max
  unsure (1)..(443): unsure at all n locations
gctgctaagagcaacaaataactacaatatgagcaggtttcttggtcaaggtggctatggcacagtgtacaagggaatgttaccagatggaaccatagttgcagttaaaaagtcaaaagagattgaaaggaaccatagttntataatactagtacttaattaatgcacatgtacattaaagtctaattgaataacattatttgaatagtcttgttggccatactgattagttgtgttgtattatacatattagctggggattccaatgcttttcgtccttcaaatcaactatctttttcttctttgttcccattattnttttcttataaaatctaagaagaagaatattntacttttaaatactttcaagacatattgcttacagcagcaacatacctacacaactgttgttgggatcaccattacgtgttctgttgtgtctt

SEQ ID NO: 217783 - DNA, 447 bp, Glycine max
agcttgtgattgattgtggaacaagaaatgcgtgaattaattagtataaaattgtgataatttaactaattgagttcgaattttggatatataattattttaaagaaaaaaaatcgactataataatcttacatgacttaagtagatttatttttaagaaaagatacatgtaatctttactgtaaaaatatataaataatgtattccagtcaatttgatcagactaattaaaaaaaaaaaagatttctgatcaaattataaattacaatcacgattaggatcataaaaaattatgtcacgcgaagatattcctattaatttcatcctcagaaatatacatatgctgtaaaggcaaaagaaatacattatggaaaagaatgaagcattattctaatgaacataacaagaacaaagtaaaatcttgcattaatgatgatattgattatg

SEQ ID NO: 217784 - DNA, 443 bp, Glycine max
  unsure (1)..(443): unsure at all n locations
cctcacactataggacagctcataattcatagagtaatacaccctataagcaagcgctacaaaatttcagattactcaaactttatccaaaataggaaaaaacctcacgacacgcatagtcaaccaaactcctctttatcaagtaaagaccaaataaaaaattcgcaatagtgataataataacaataactaatattaatatcaattaataagataaatacattacatcaataaaagaaagaaagaaatcaagtagcaatagcgtgatgagctacttaacacgttctgaactanagcagaanataaaaattattatttatacaaagaataacctcaacaaaaggaagatttgagacatggcaaaaaccagagaggaacaacttgcatcttgaacctanagactcattcttttcttcatttcttcatctcaaagcaagttcatt

SEQ ID NO: 217785 - DNA, 418 bp, Glycine max
  unsure (1)..(418): unsure at all n locations
atttggtctgtgcactatatttgacattgtggcattgagagattangcctaatacttagaaatagtccaaaaggtgattgttatcttttataaaattgacttatatttatttaaaaaaacattgtttatcatcataaaaataaaatttactaacttagatcttaaggagtttataacaaataacgcacagtatttaactaactcacttaaattccttgatgttgaatttaagtatagtcgataatataaaattttagataacttttctattactaatagatgttaaaataattaaataatattgaatttaatattatacttaaattttatcttcttttttattaaaccatcttgtaataattatatattgtctttaaaaaagntactanattaatcttatttttatctactcttatta

SEQ ID NO: 217786 - DNA, 399 bp, Glycine max
acccgtcatatgtggtactaggtggcgatcgggcgatggcgcatatcaactctaccacttccacaaatcaaacatgaacccaccatccccagttgcccacctgtgactgagctcacgtactcctacgtagcccttatcctcgctcctctcagcaccgggtgcccattaaccactccaagcttccacaatatccaagcaattcaattccaattaccatgaactaccctaaaccaagaaaacagggcagaggcagaaaactctgcccaaaacacattcacacattacagctttccttactcatatatcccagcaacattctcttcgcttcgaatcgttaaccatagaatcaacttgataattatactggaggttcctagtacataagtctacatcttgacc

SEQ ID NO: 217787 - DNA, 361 bp, Glycine max
  unsure (1)..(361): unsure at all n locations
agcttgngagcagtctaatagattggctntgaacttgatgagatttactatagccgcaaatgtgaagctatgtatgcccaaaataaataatggaaaggaattcatgaaattggtcaaatattacttgcaatttgatattactgacaagccaattgtggagaatttatcaagtgagctaacaaacttggtcttaaccaattcatgatcatctgacatagatggttaatctggaagcaaagttgaattccatggagatggaagtgagtgagttctttctagtacaatttattttgaattctcttccaactgaatttggccaatttcaagtgaaatataacactcttatggaaaaatggaattt

SEQ ID NO: 217788 - DNA, 479 bp, Glycine max
  unsure (1)..(479): unsure at all n locations
tctctntgttntccttcttcttctttgtgccaaaagctctccaaagttntctggttntctaaaccttgaaaacttgtgctattcattcttttcatctcttctccctttgccaaaaagaattcgccaaggactaaccttctgaattctttttgtgtctctcttctcccttttctaaaagaacaaaggactaaccgcctgaattattttgtgtctcccttctcccttgtcaaagaattcaaaatgacacagtctgataattcttttgattcttccttttcccatatacaaaagacttcaaaggactaaccgcctgagaattcttttgtatccccattcacaaagtatcaaaggtttaaccgcctgagatctttgtcttaacacattggagggtacatcctttgtggtacaagtagagggtacatctacttgggtttgactgagaacaagaaagggtacatctcttgtggatcagttctagt

SEQ ID NO: 217789 - DNA, 190 bp, Glycine max
agcttcataccgaagctacctagtctataaatagaagcatgtgtaacacttgttcgaactttgatgaatgagggccttgagaaacacttctatcatttaagaagacctccctgtgactgtcattaatttcgagctcgccgctttctttttctctctctgttagcaagcctccattgaaacatcctcttca

SEQ ID NO: 217790 - DNA, 68 bp, Glycine max
cctacttttggggcctaatcagtcttatttgacctctgatgggccaataacggtgttttaccctggcc

SEQ ID NO: 217791 - DNA, 404 bp, Glycine max
  unsure (1)..(404): unsure at all n locations
agacaaaatataacatttgtattcagtgcactctctaatggtcaaaaaagggaacagttgtgaaatacagagacctcccctatctggcgcgtcagaccttgcctgtaaaccaaaatcatagtcgccctggacaacctaaccaaagaaatccggaccccacttgtctaggcttgggggccttgacagcttgacaaaactccaaatctcacacctgtcaatcttaccactcttaacactggacaataattttccatgcttgggggctcgacaaactcacgaccctnctacttgtcaaggctactacctcggacatcagacaatctccattgtgcactatctagggtccacaaaatacatgtgtcaaaaaatacacgtgtcaagctatgtggattatgagcacacat

SEQ ID NO: 217792 - DNA, 113 bp, Glycine max
tcatacaactcatatgcgtccgcttcatagagtgtaatactaaatctatgaacaatcgccatatcatgtgagtctactactatatcattcctatctaataaaagggagacctg

SEQ ID NO: 217793 - DNA, 382 bp, Glycine max
agcttcaggttgttcaattgctcaagaatgatgcacagaagggtaaaggtctgtatggtggtcggcagaggagcataaaccacagagtcttgcaacaggtacatattttttattcatggccagttgggttactaggttaaccaaggtgtctagtttaccttcaagcttcttagtttcagatgatgcagatgagtttgtggctacctcatgcactcctctaattactatagcattatttttggcgctaaactattgggagttggaagccatcttctcaattaaattcctagcttcagcaggggtcatgtctccaagggctccaccactggcagcatctatcatacttctctccatgttactgagtccttcataaaaatattga

SEQ ID NO: 217794 - DNA, 367 bp, Glycine max
  unsure (1)..(367): unsure at all n locations
tcnggctgctgaattgctcncggntgctgcatggaagggcaaaggtctgtatggtggtcancaaaggagcacaaaccacagacccttgcgacaggtacagatttctggttcaaggccagttgggttaccaagttaaccaatgcatccagtttgccttcaagcttcttacgttcagatgatgcagctgagtttgtagctacctcatgcactcctctaatgactatagcatcatttcttgcgctacactgatgggagttggaagccatcttctcaattaaatgtctggcttcagcaggagtcatgtcttcaagggctacaccactggcagcatctatcatacatctctccatattactgagtccttcat

SEQ ID NO: 217795 - DNA, 413 bp, Glycine max
  unsure (1)..(413): unsure at all n locations
agctagacantgtcacatgataaatggttaataaaaacattcgaacaaatcaaagtattgttttaaaatttagaaaacaacattaaacccaacaaataaaaaaaaataatcatatgttcatatataattatttttaaaaaaaatatataaatgatagttaagataaacatgacaataaagcaccacgagattgtatgttatttcttattcttgttccctaacatcgtctccatcatcccgtcccttattctagacgacgatactaaacaaatatcgaaaagaaaaaatgaatattaataacaataatagttaccatagatacttataaagtataattgtaattgtgtagaacttattagatgagaaccaaaactaatatgattgaaatatataatatatgttataaaataaca

SEQ ID NO: 217796 - DNA, 391 bp, Glycine max
cgtatggttaaagtctcatgaatgtcacgtgctcatgctacaattgttaggcgtggctatacgagacatcttgcccaacatagtcatgataacgataactcgcctatgctttctcttacatgctatatgtagcaaagccattgatccaataatgtttgatgagttggaaaatgacgccgaaattatactgtgccagtcggagatgtattttccccctgggttctttgacgtcatgatccacttgattgtgcatctagttagagaaatcaactgttgcggacctgtttatctatggcggatgtacccacttgagcgatacatgaagatcttattagggtgtacaaagaatctatatcgtccacaagcatctattgttgagaggtacattgca

SEQ ID NO: 217797 - DNA, 328 bp, Glycine max
  unsure (1)..(328): unsure at all n locations
agcttatgtagcctatgttgataactggtgaaagtttttcaggttaaagcagcataacttanattggatcatcaaatatataaagatttggcatgcatgtttactctttcattntacttctttcaaggctttgtataggaatgtgaaaagcacgtgatgtccaacttgaattgaacaatgctgcaatctgtcaattttagattaatttcatatgttttgttgtagttgtgtagtgtcttatcatggtgctttaatgctttataggctaaacaatgaacaagtaatgggttatcaaaaagagacttgtgggttgacaattggagaaact

SEQ ID NO: 217798 - DNA, 350 bp, Glycine max
  unsure (1)..(350): unsure at all n locations
tctccgtgtaatatccgagtttagaactctcttgtaatcttcaaattatnttacacagataataaaatgatctcttacccctctctagatcttctctaaattccttacggcatcagaatctatcctagatccaataaaaaaggtaacctaccatattatccatgcactgaacccaaaagtgatgggcatgacgggtgtattgtgaaaaacccaagtcccatatcggctagagatagtgccaagatagaaagtataaggggcagacaacccttgccctatgatctaacttttaagggtaagttagaccacaaccttgtgaactatattgttgcagatgattgcagatcatt

SEQ ID NO: 217799 - DNA, 419 bp, Glycine max
  unsure (1)..(419): unsure at all n locations
agcttcgcaacanattctactctccgatcctcaacatcgacaagctgtggtccctggtcccgcaagaagtgaaggacaacgcctccaaggagaacaaggcgccgctcatcgacgtcacgcagttcgggtactttaaggttctcggaaagggcgttttgccgcagaaccagcccgttgtggtcaaggccaagcttatttccaagatcgctgagaagaagatcaaagaggctggcggcgccgttgttctcaccgcttgaatttgacggtatcacttttttgaacgatttangttttgttctgatacgttttgttttggattatgttgntgnttagtctctgctatatttcangagtaaattgaaggtttattattttaatttgcgcgaataactatgccagcctgatgacattagaatcta

SEQ ID NO: 217800 - DNA, 191 bp, Glycine max
cttatatgcctccgacattaactctggagagtgaaggccttaaaaaattcctctatttatggaaagagaactgtcacatgactgaaacaatcatgaatagcattctgtcttgaggtaagaacaagggtaattggtttgataccggcaatacgacaggatttcacttgaatactacgctgatatacctgtat

SEQ ID NO: 217801 - DNA, 342 bp, Glycine max
  unsure (1)..(342): unsure at all n locations
agctngcctcanagaggtccaggaatgatatggcggccgaagggactagttccgctcctgagtatgacagtcaccgctttaggagcgctgtacaccagcagcgcttcgaggccatcaagggatggtcgcttctccgggagcgacgcgtccagctcatggacgacgagtatactgatttccacgaggaaataaggcgtcgacggtggacatcactggttactcccatggccaagttcgatccagaaatagtccttgagttttatgccaatgcttggccaacagaggagggcgtgcgtgacatgagatcctgggtaaggggtcagtggatccccgttgatgccg

SEQ ID NO: 217802 - DNA, 489 bp, Glycine max
  unsure (1)..(489): unsure at all n locations
tccatcaatctatctctctaaccatcaaggccgatatatgtatggatatcctactcaaggcgtcagccactacattggctgtgccggggtggcaactaagctcaaaatcataatctttaagaaactctaaccatctcttttgacgcatgttcagctctttctgactaaacaagtacttaaggctcttatgatcactaaacacctcaaacttggagccaaacaggtaatgcctccacatcttaagggcaaaaactacagcagctaactccaagtcgtgagtgggataattcctctcatgagtctttagttgtctagaagcataggctattacttggccattatgcatcaacactcctcctatacccatctttgatgcatcacaatacacctcanatggttccctcgggttaggaaaaactagcactagagcggtcgtcaatctttccttaagggtcgtgaaactatgctcacactaggtgtcccacccat

SEQ ID NO: 217803 - DNA, 203 bp, Glycine max
tgccccaagagactcagcataaggatgcacagaccatagttgcgtatgtagaacaattgtatgaccaagtgaatgtgcaaattgcaaagaagaatgatagctatgccttgcacgcccaaaagaaaaggaaggaagtggtacttgaacccggagatgatcttggacatttgaggacaaatgttttccaagaaggagggaatgat

SEQ ID NO: 217804 - DNA, 298 bp, Glycine max
gagcggctcgatatattacgagactcaatcggacattcgagttaaacgttattattgtttgaatttgctcacagcttgtgtattcaattgttagtgtctcaatatgttacgggacttaatcggacatcggagctaaaagttattgtcgatggcattggctacgagcttacattgtcaattacgagcgtctcgatatattacgggactcaatccaccctccgaggtaaaagttattagtcgttgcattcctctacgagcttgcgttttccattacgagcgtcttgatatattactggac

SEQ ID NO: 217805 - DNA, 452 bp, Glycine max
  unsure (1)..(452): unsure at all n locations
agcttgcttctacagtaagtgttgatagtcaattagcacttagtcttaggaaaaaggtaactgtgttttaaaatttgcagatacgaaaaaccaacttgcagacatcttcacaaaaccactaaccaaagattctttctacaccattagaagataattaggacttctagatgcaagtgacttagacaaatgatttatgttttgatgacttatttgttatttatgcacatatgcttctattataatgtgaggataatttattatcttgtttgatttctataagcttctctcttttcttgtttaattattatattttttttaacccttgtatttggctatgttnttatgacatttgaatacttagtatttcttttattatttgattagtatgactggacatgatgattatatttacttgcttttgggtgttatggtatgaagtttaaacttatttt

SEQ ID NO: 217806 - DNA, 487 bp, Glycine max
  unsure (1)..(487): unsure at all n locations
tagatgaagatgaatccgtggccacctcatggactcctctaaggacaatagcatcatttcttgcactgaattgttgggagttggaagccatcttctcaatcaaattcctagcctcagcaggggtcatatcaccaagagctccaccattgacagcatcaatcatactcctctccatgttgctaagtccctcatagaaatattgaagaaggagttgctcagaaatctggtggtgaggacagcttgcacacaatttcttgaatcttccacaatactcatacaagctctctccactaagttgcctgatgcctgaaatgtcttttttgatggcagtggtcctagatgtagggaagaatttctccaagaacaccctcttaaggtcatcccagctganaatggacctgngagcaaggtagtatatccaatcttttgtcacttccttcaaagaatgangaacagcctttagaaagatatgatcttcttggacatc

SEQ ID NO: 217807 - DNA, 436 bp, Glycine max
  unsure (1)..(436): unsure at all n locations
agcttgacaagagggtctgtntaactaacaataataataataactttattttatcaaatcttatcttatccagattttattccatccagattttattccgtctagattttatttcgtccagattttattttatccatcttatcttatcttgtccagattttattttatttcgtttatgggcttggacttaaaatagatttgtaagctttgtggctaagaacctcatccatacattttttaatagtatgctctttttattttcttttgatatactttgtgttttaacgacttgaattcaatatgattttgtttatcaattatttttggatttgtacattacttatatgaaattttataagtttatttttttagttagatttcactaggttttaaaataataaattaattaaaggcgtctttaaacaaacttttaaat

SEQ ID NO: 217808 - DNA, 434 bp, Glycine max
ctcagctgagtatctattttggttatggtgtgaaaactctatatggtgtgaaagcttgccctgctaaaggattgcttgtaactagcatgcactggtgcatgtgcgcatcatatgctttggtttggtctgtgaaatgaaattatggatgagccatgttggttctctggtttaggaagtgtcaaatgaaatttgctagtagttgtctgctcaggtgttggagcttttatgcaggctttggagcaatttctgctagcaatttcctttgcatctatacaattttcatgacagtaaggaactattgatatggactaggaccactgttaaatcttatagcagtttgtagagtttgaaaaataatcacatgatttaatgtcctgtttcttctctttctcttataaacttattataaatttacacattgttttggagctgga

SEQ ID NO: 217809 - DNA, 400 bp, Glycine max
  unsure (1)..(400): unsure at all n locations
taaaacctatgaagaacagacactcctgaattagacacacaaaaactggcatgtgtgttctagctagtttttaaaagatagtagttgcttttattttctaaccttcgcagatttattcattttaaaataggtcgtgggtaaatatgttttgcatgtaatgaactaacgttgaagttgggtcagagtgagaggaatagtcaaataaggaggccgagtattggagtgtgaattcagtgcatggagagagaaaagattaaccctatgatagtttgcagcgaaagaaaaatgaaagagtgaaataaacaatataatgatcgatgagatttatatttttacattntattttagttcanaacttttatctcaatttagtttcattttatttcattccatctcactg

SEQ ID NO: 217810 - DNA, 487 bp, Glycine max
  unsure (1)..(487): unsure at all n locations
gagtagcattctgctctggagtctcttatgtaaaatntaagtgggaaagacaaataaacagaaatacagaaaggaaggggaacagagaagaacagagagatcaaagaagctgtgcactgcacttctgttattattattccagcctgtctaaaatgcaacagccctactttatttataggcagctacccgacaactaagaaataacagtagctgactaactaactgacatccttttcttttacatatcagtctcctttcgcttataacagctcatcatggagctgatttcagtaaataatacaagcagttttctggaatttaatcgctagttcctaacttcatttatgggccttttcatcaatatttgcagaaattggcttcaaaggatctctcaagaatggctgagccaataaaggagctagatattctggtgagtcaggttcatttcattagcttgggtcttatantttagntcttggttttctaa

SEQ ID NO: 217811 - DNA, 404 bp, Glycine max
agcttcagaattcaatttcgagcgtctcaatagattacgggactcaatcagacatccgagcaaaacattattgtcgtttgaattagctcagagcttcagaattcaatttcgatcgtctcgatatattacgggtctcaatcagacatctgagtaaaaaagttattatcgttcgaatttgctgagagcttcaacattcaatttcgagcgtctcgatgttttatgggacttaatcagacatccgagtaaaaagttattgccgtttgaatttgctgagagcttcaacattcaatttcgagcatctcgatatattacgggactcaatcagacatccgagtaaaaagttatcgtcgtttgaatttgtcagagcttcaacattcatttggagcgatacatatatacggact

SEQ ID NO: 217812 - DNA, 310 bp, Glycine max
gatcggctaggtttcttcgagcgagctcaaccgaagatgtatttctgccgacaccggcattgtgtcggtcagaagaacattagaccgcctcggcaaagaaacatgattcaccgatattgacagagaaaaatgctagccctattcggcaatgaaagatgaccgatcgaggtctaaaaaagaagcatgaccggattacgccgatcgaacattctctaatagatatcctgcaagtattattcagggattgaatggagaaaacagtagccggcatctgtagtaaacaggcgtgactgatatttttcagccaaca

SEQ ID NO: 217813 - DNA, 403 bp, Glycine max
  unsure (1)..(403): unsure at all n locations
agcttctatgttgagcaaggtggtcaggtaccaagccttatacataacttatacatgttatttttcattatagtaattatagcattaaacatttttgtgttatttataatagaattgtacactcaaagtaaaagtgattctatctatctatccatccatttatatataatctgattttgaaaaataacactttctaagacgtttctttaaaaaaacgtttatgaaagtgaactttctaagatggttcttcagaaaaccgttttagaaagtctactttctaagataattttttcagaagtacactntataagacgtttctttagaaaatcatgtttcagaaaactgtcttagaaagtagagtttctaagatggttntttcataaaactatcttagtaagactac

SEQ ID NO: 217814 - DNA, 335 bp, Glycine max
  unsure (1)..(335): unsure at all n locations
tatgattcagatgctatcttctttttcctcatgtgcatctgctacatctgctctgtctctttgtcctttntcatagaagggcactttattccttggtttgacttgttttctacatttcacttgatactacaggtagttatgatatcttcgctggccatggttatgtcatttgtaataaatgaactgatgtatattgatattctcagcagcaacttatagcccttggaacattcgtgatctctaaccagaattcagaaataaaaatgattatattctactttaaaatgtgctaactgtcttctgtttgaagtatggntntatttctgactctctca

SEQ ID NO: 217815 - DNA, 386 bp, Glycine max
  unsure (1)..(386): unsure at all n locations
agctttgcttctacacttaagagggggcgggggtgaatntaagtttcaaaatttcccactaacaaacttttaacccccttctaaatgataggctcagaatgcaaaaaaagaagcatcaatcaatttaacaatgttctttaaacatgcaagacaaaattgattgtaataacataaatgagataagggaagagagaaatgcaaaatcgatttatactggttcgaccacttcccgtgcctacatccagtcctgaagcaacccacttgagattttccactatctctgtaaatcctttatagactttgaacacaccttgggatccctcacccttgtgttgaaagattctccaagagacaacccgtctcttgattacaattgtcataatcca

SEQ ID NO: 217816 - DNA, 414 bp, Glycine max
tcgcgctaagcacaaagacccctgattgattggctgaagggttcagcgaagcacacatcactgcgttaagcccaacatcttcactataagttgcaccttaagtagtgggcttagtgtggatgatgcactaagcgtcacttcctctctgtgaaaatttattatagctacactaagcgcgccatcctgcgctaaaccccagattcattctgtaagttgagctttcaagctgggcttagtgggaaaggatgcactaagcaccaacatcattatgttttgaaatcattaaaagtgcgcttagcgcaggtagtggcgctaagcctgaatcactctctataagttgaagcctgggtgcacgctaagccaaactttgtaggctaagcgcattttgcaggaccaatcagagctactatcatc

SEQ ID NO: 217817 - DNA, 361 bp, Glycine max
agcttaataaatctatatatggtttaattcatgcttctcgtcagtggtaccttaagtttcatgggataatttcttcatttggctttgatgaaaaccccatggatcaatgcatataccacaaggttagtgggagtaaaatatgctttcttggtttatatgtagatgatattttacttgcagccaatgatcggggtttgctacatgaggtgaaacaatttctctctaagaattttgacatgaaggatatgggtgatgcatcttatgtcatcggcattaagattcatagagatagatctcgaggtattttgggtctatcacaggaaacctatattaacaaaattctagagagatttcggatgaa

SEQ ID NO: 217818 - DNA, 418 bp, Glycine max
agctcttgagaaaacttccttgagaagctagagcttagctacacacacccctctaataactaagctcacctccttgagaagcttcattgagaagattcctaaagaagttagagcttagctacacacatcccctataatagctaagctcacccccatgccaaaatacatgaaaatataaaaaaagtccctatttcaaagactactcaaaatgccctgaaatacaaggctaaaaccctatactactagaatggccaaaatacaaggcccaaaagaaggaaaaaccaattctaacatttacaaagaagaatggatccaaccttgacccatgggctcaaaaatctaccctaaggttcatgagaaccctatggccttctttagtagctctagcccaagcctcttggagtcttctatccaatac

SEQ ID NO: 217819 - DNA, 123 bp, Glycine max
atctgatgatcttcaacatgaccgatgttaacgaagtgacgctcacatcggatcttaagataactgatgttctcggatacacattatttacaaatttgccaccatgtttatgcttacatccgc

SEQ ID NO: 217820 - DNA, 300 bp, Glycine max
  unsure (1)..(300): unsure at all n locations
agcttcttgtgcgttcaccacaggtgggctgtctcttgngcaagggaggtcttgttatatctgaaatgcgaagggccacaggtgctagtattcgcattttttcaaaggaacagattaaatacatttcccaaaatgaagaagttgtacaggtaactttcagtgtaccttgagaaagagcaagctatgttttttcattggcttatccaaactttgtatcctactattcagctctagtttcaatcctaggattatgaatatgcattatgaattntgtaaaattttacaatttgtgatttttac

SEQ ID NO: 217821 - DNA, 357 bp, Glycine max
  unsure (1)..(357): unsure at all n locations
ctgtagaggaatccatcggagttgtgtttggtcgacatcccatcatacccgaatcagataatatgtccaaagtatactttctttgcgacaaatggattcccttagaggaacgcgcgatttccaggccaaggaagtactttaagtttccaagatccttgatcctaaaagcttgatcaagcaatgtgagcatctcctgtatttcagtgttgctgttgcctgttaaaataatgtcgtccacatatactaagagtatcgtggtgactgaaccattaaagcggagaanaagggaatggtctgagtgagactgttggaacccatgcattggtaggatacccgatagcttcacgaaccattgac

SEQ ID NO: 217822 - DNA, 385 bp, Glycine max
  unsure (1)..(385): unsure at all n locations
agcttaaggcctgctttcatattcaaatcaaatcagtgtttcaaaagttgttcttttatcaagtccatgcaaaaatatctgagttcatttggtttttgggaaagtccttcattgtttttcattctcaaatgttttcaaaagaaatccttttgttgtcttctgatccaaaaataagtttcaaaaatactagttgttgattttttccaaaggatgttacattcaagacaaaaaaaatttaagtcccaaaaagagttataatctataactatactaatagaatataaaagcacgcacaaattagtcaaaataaactcgtgtaagtttttcaaaaaattcaaaacaagntcaaatcatggttgaagagctcaatctccttgacgatcat

SEQ ID NO: 217823 - DNA, 533 bp, Glycine max
  unsure (1)..(533): unsure at all n locations
cgcttgatgcttgatcccctgattacggacctatgcaactgaagctgatgtgaacatgattaangatacattnaattaatatatgaacattgactcccttattcatacatatgcgaggggcagagggtgatacangtctgcttaatcttaattgactccacacaagtcttaagggcttctacatctggagcattgaatacctcatgtcttgctaaccatttaatcctctcaatggagatatgctctaatcttagatgacgctcatagaggaagtctcattaataatacaccgtttacactagttcgaacgtgcgttacactattaaagggcttactttggtaaccactagtagacgagccgtgatacattgatccacttccagcacacttcgatcttcaatattacaagtgactctcaagctgtgtctttagaatggaaggacatccatatggaacatactggaataacaagagaggtcaagaacacttggcacataataagtcgttctaatatgagatagagtattatttaa

SEQ ID NO: 217824 - DNA, 388 bp, Glycine max
  unsure (1)..(388): unsure at all n locations
agcttctatagaaggttcgttcctaatttctctacaattgcatcacctctcaatgagctggtgaagaagaatgtggcatttacctgnggtgaaaaacaagagcaagcctttgctttgctcaaagaaaagcttactaaggcacctgttctagctcttcctgacttttctaaaacttttgagctagaatgtgatgcctctggagtgggagttggagctgtattgttacaaggtgggcaccctattgcttattttagtgaaaaacttcatagtgccaccctcaactaccccacctatgataaagagctttatgccttaataagagccctccaaacttgggaacattatcctctgttcaaagaatttgtcattcatagtgatcatcaatcac

SEQ ID NO: 217825 - DNA, 429 bp, Glycine max
  unsure (1)..(429): unsure at all n locations
agaaagagggagagaaagagagaggcgggagcacgaaattgaaggaagaaaaagggagagaagttgaactttgagttgtgtctcacaagactctcattcatcaaagttacaacaagtgttacacatgcttctatttatagactaggtagcttccttgagaagctttcttgagaaaacttccttgagaagcttctttgagaaaacttccttgagaagctagagcttagctacacacacccctctcataactaagctcacctccttgagaagcttccttaagaagattcctaaagaagctagagcttagctacacatacctctctaatagctaagctcacctccttgagatgagaagctagaacttagctgcacaccccctataatagctaagctcacccccatgacacanaaaacatgaaataccaaaaa

SEQ ID NO: 217826 - DNA, 452 bp, Glycine max
  unsure (1)..(452): unsure at all n locations
ctgcagcttgatttanatattatggtgtgcgcttgttgtaacatgttatgtttgctactgatttttaattctttgaccctttgaatgaccaaattggctttcgatgtcttcatgagacttgtagagaattttatcctttacattcaagcactggtatcatgttatttggaccattacaacataatcaatccttaaagcattgcagttttgttatattgtgaggacaaactgacatctctatcttcatggtcagtttcttccaagatccaagccttatttgcccatgacttctccataaaagatatatatatctttctcttagctttctacaaccactgagatcatcccaaattcacttttgtagctcaagtagttttcaaattattgcacacatatgaaactgtcaaggcaaaccagcgtctttaacttcaggctcagttntgtccatgatc

SEQ ID NO: 217827 - DNA, 416 bp, Glycine max
  unsure (1)..(416): unsure at all n locations
tttagtaatgatccactaacctagaattaaaagaacttaattccattaacctagggaattaaaagaacttaatggctgagtgtaattgaaattgtggcaaccaaaagtcacccccaacagccatcaagtcagccaccatttggtctcctaaaaggcttatgcctaggttgccaattaggcccttattacaacttgaactaaaccaaactaaagcccttttagttgattgacccaaaacatatttttgatcagccaactttacaaggattgggccattatttagaanaactaaacactctaaaattgagacaaagtggtgccatttagtcctcctccatttgggccatgatacaactcacaaccttggactnttctccttgaaacttgngcttgtattcaaatagtatggacaacac

SEQ ID NO: 217828 - DNA, 454 bp, Glycine max
  unsure (1)..(454): unsure at all n locations
agcttctgtgagacacatgttntataatccgtatgatgttaaatggtttaaggtgaaaatatattaccctgtccggattctttaaactatacttggatggtagagaagtttattcgctgatacctaatgatatttttcatgtgggtggtgattgcagcctgtcgagctttataccaaacgtggtcttcgtggtcgaataaaagaacctgttggtacacatggtatgttggttgttagaaacctttgccatcaattttactaattaacattctgacagctagttattttagggagaaaacagattatatgttgcttggtcaaagatttacatgtgcattccatgattcttatagtgacccattggtttgagctgttttctgcaatttcctgcttgttttgctatcaatgttcaaatatgtgtggngtatatgatattctgatcatattctattta

SEQ ID NO: 217829 - DNA, 463 bp, Glycine max
  unsure (1)..(463): unsure at all n locations
atattgtatatcatatcatataaatatgattaaacatgtaggaaaagatattaaaactaaaaagataacctacgacgtcccctcctcccacactgtcctctgccactcaaacattgcaccacaaggtcacaatcacgtgtctttgtccttcttcagaaagaatataatgttcatttttaacatttcttacatattatttatttttgctcagaacattntttaaacatgagaatactttcctttttagtgtacattcagataataattataatatatgaaagagcagcaggctagatctagaacaacgtgcacacattcctcggtccagcacatagcatatttcagtgtttccactgtccagccggagacgaatcatgtgacttaacaaacatccaaagtagagaagtgtctatagcaattaataatgtgcaaccgactcagtgtggatcaacaatatcaatct

SEQ ID NO: 217830 - DNA, 421 bp, Glycine max
acttgagtaacacacttgtagtgttcaaaattctagaatttgatattaattatgtttaagaaaatatgtatctaaaatatttaaataaactcaacatgaagcaactaagacaaaaagttataaatatctgcaaaatgttatcaaacttaaaatttgacgacctttaagactaaattataaaaaaaaaaattagtattgatgaatagaaacaaaattagaagttgaagaccaatcaattaatttcaatagaggaattcttgaaaggaaataatgtgattctccaaatacgagtagtcttgcaacaaaggccatcacaaagcctttcattgcttgaatgaaattaattattgatgcaaacattatagcaaacataagatccatactatgcctacaatgatcgaaaaaaaaagagtaacaattg

SEQ ID NO: 217831 - DNA, 486 bp, Glycine max
  unsure (1)..(486): unsure at all n locations
ctcagcttgaggattatggggtacccatcacatgtggtactangtggctgtcgtgcgatggtgcacaacagagttttcacatgcacgatgcgcgcataaacccaccatcccctgttgcccacctccaactgagctcacgtactcccacgtagcccatattctcgattctctcaacaccgggtccccataaatcctcccaagcttccacaacatccaagctaaacaacattcaacccgcacaagctatcacagtcaagcaaaacagagcatatgcagaaactctgccgaaacaccaaccacaacacagctaattccacttaaagaccccagtaacaattccttcgttccaatatgttaaccggtggatcgactcgaaaattctactggaagtctctagtacttaagcctacattttgaccgctgggatctactagcnaacatccagaactcattctacattactcttttcacaaccagcacatacat

SEQ ID NO: 217832 - DNA, 372 bp, Glycine max
  unsure (1)..(372): unsure at all n locations
tgcagcttcgttgtcaatttcgagcgtctggatatattatgtcccaaaattggacatccgtgtgaaaagttatgaccattcgaatttctcgagagcttccgtagttcaatttcgagcgtctcgatatattatctccccgaatcggacatctgtgttaaaagttatgaccattttaatttctcgaatgcttccgtttttcaatttcgagcatctcgatatattatgtccagaaatcaaacatcagtgtgaaaagttatgaccattcgaatttctcgatagcttccgctggtcaatttcgagcgtcttgatatattatgtccccgaatcggacatctgtgtgaaaagttatgaccattcgaatntcttgagagc

SEQ ID NO: 217833 - DNA, 408 bp, Glycine max
  unsure (1)..(408): unsure at all n locations
ntngacggactataccaagctctaggaaccagggacggagaaagatctatatatatgcttgctaatggtagagagaggaagactagagatttggatcaagtaaagtgtgttaaggatgaagaaggcaaagtcttagtgcatgaaaaagatatcaaggaaaggtggaaggcgtatttccacaacttatttaatgatggatatggatatgactctagcagtctagacacaagagaagaggaccggaactataagtactatcgtcggattcagaaacaggaagtaaaggaagcgttgaaaagaatgagtaatggtaaggcggtggggccagacaacatacctattgaagtgtggaaaactcttggagatagaggtcttgagtggctcaccgaactctctaacgaaattatg

SEQ ID NO: 217834 - DNA, 388 bp, Glycine max
  unsure (1)..(388): unsure at all n locations
agcttatggngaaggacacaggtcttgactgggatggtgagaagaaaaccattgcagctagtgatgaatggtgggaagccaaaattcaggtatgtattattcaacgaaaatagagtttttgtgtaggccactcttttgttttttatgtgtgattcttgactttgcggcaaaaattgaagttgcagactgttttttagaaacttgtgtctaaaattttagttgataattaggttggttattactctgttacttgttgcaattgaggtagtttacatgcaaagaaatgaatgtgttgatatagtgatgtttcttttaaaacctaatgaaatggaaatttattggcatgttntttattactctacttttattggctgctgcatgtttatct

SEQ ID NO: 217835 - DNA, 430 bp, Glycine max
  unsure (1)..(430): unsure at all n locations
ngtcgtgccatcaccattctggcctaaacccatttcgggctcatacccatccctcagcataactcgggcaaccatcaagaaggcaccagatagacgcggttgcaccagaggagccttcccataagcattgttcataatttctagcgcttgaaaagatgtttccaatgactcttctgtagcttccacatagggtgtagagcatggacaactcactagtatatcttcttccccagacactataatcagctatccttccaccacgaactttaatttctgatgcagcgttgacgggaccaccccaacagaatggatccaaggccgacctagcaggtaattgtaggcgagggttatatccattacatggaaggttatctgacacgtatgtggcccaatttgaatcgggagatcgatctctnctctcacgtcacag

SEQ ID NO: 217836 - DNA, 368 bp, Glycine max
gctttatatagacttcagagctttgattctttagagatcccaactagctgctgtctaatagctcgagcgttctacataaggcgcattactctgcacagagagaatagggaccacaaatatcttcagggaagtataccttgctagtgtcgccttgtgcttagagctgactttcagcgtacaattcgaatacaacgttaacaacataggtcaaaaggaataaagaatgtcaagacaagacaatgtaagactttcctcttgtgcactattgcacaaattgcttactaaaccatatatggacgttactttatgatgattactttcagtacttgaggattgagtaactcttgctaaacttgtagcttaagcat

SEQ ID NO: 217837 - DNA, 76 bp, Glycine max
gaatggctgcccattggagaagaatgatatcaatgaggagttatgatgctatgctccccccaaagacatcgcctac

SEQ ID NO: 217838 - DNA, 370 bp, Glycine max
agcttatagaattacttgaaattcaatttctgatcatacttaaaaatgattccttagcacaagcactacgtaattttttatcatactgctaattctatttgaagcatttctttctatgtgagacgatgccgcaagcagagctggaaatgaggtaagactttctagagatagccttcctaactaaatcttttgatgggatcttctttagctgaacctgagttcgattaaagttggcctgcacctaagaataaccatttttgacctctcccattgttcgagctacttcgtaacctctccttcaaggatagaagctagaagcagatagcagccatatggataggtattcaatcgcttgctttaaaaggtatga

SEQ ID NO: 217839 - DNA, 443 bp, Glycine max
  unsure (1)..(443): unsure at all n locations
tgcctgtccgatgcagcagtaatgattgcccgagttatgttggggaacggttacgaacccggaatgggtttaggcaaagacaacggcggcataactagcttgataaatgccaaaggaaatcgtgggaggtatggtttaggctataagcccactcangaagatgtaaagagaagcatcgcgggaaggaagagcggtggtcaaagctcgcggttgagacaagaaagtgaaggaagcccgccctgccacataagtagaagctttataagcgcgggtctgggagacgaaggtcaagtggtcgcgatatatgaagatgatgttccgagtacattggatttggtacgaccatgcccttctgatttccagctgggaaattggcgagtggaggaacgccccggcatttacgcaacgagcataatgtanacctttacggttntaaagctcta

SEQ ID NO: 217840 - DNA, 393 bp, Glycine max
tgccagcttaaagctcatgtcatgcatcttcttaatctccaacaaaaagatagggctatatatgaatagtaatggaagatcagactacacactacagaaaagaagaagattgaatcatgatagttagtcgaagaggatgttgccaaggttctacaagtcctagttgaccttgagcaatctagcactaaagaaaatgaacaagaactgaatgcatccattcctaatattgctgccaaggcaccaatctaggagtccacttatgcaaagcagtctcaagaagtcacctctgtccaacaagaggtcattgtatactccagcaatccaaaagatgttcttccaatcaactaccgtgctcccagtgcgatcactgaggaacacattcaagagatgatg

SEQ ID NO: 217841 - DNA, 413 bp, Glycine max
tctcccacgagggctttgatgttgtctccttcaacacatgttttatcttaagagcaagggctaatcgaatcgtgctcataatccttctttggatcttagtccactcggtctcatttatagaaaccaacctttcatcttctaatgtctgatcaagacctaactgcatcaaaatgtattgaatagtactctgtcaaatcataaaatttatttttccatcaaacaatggtatctcgaacctttgtgtgctctcgatcatagctttgataccactgttgggtaatcaacgctctcacaaacaaaaattactcacacccacaaaggaccgtgagaacacaataaagattacaccatatgaaaaataataacaaacacaagaacataacatggttcggcacctcttgcctatgtccaca

SEQ ID NO: 217842 - DNA, 382 bp, Glycine max
  unsure (1)..(382): unsure at all n locations
atatgtacattactactattttataccttatcaaagggataaatgggagttatttatgttgtaggagtatcagaacaatctgtttctgcagtgtggcaagcagaatgatggtaatgccctgtaaaattaaaattatatgcctttgggtatttaagggagtttcttctaggtggtgcaatgaagcctactacacatggccagtgggctcatttagcttgtgccatgtggatacctagtttggttgtgtatgactttattcactctttnttacccagtttggntatttttaccaagtgtcaagatcatggacatgacaggtatagtagcattcttacaccataaggggagggcaaaacattcttaacangataatttaagaatg

SEQ ID NO: 217843 - DNA, 401 bp, Glycine max
  unsure (1)..(401): unsure at all n locations
tctacttatgtggcagggcgggcttccttcaccttcttgtctccaacgcgaactttgaccattgttcttccttcccgcgatgcttcttttcatgtctgcctgagtgggcttatagcctaaaccatacttcccacgattaccttgggtatttatcagtctagttatgccgccgttgttttttcctaaacccatcccgggctcataaccgttccccaacataactcgggccatcattaccgctgcatcggacagactaggctgcccaaagagggagtccacggaggaaatgctgaccacctcaaaagactgganagcagtttctaacgattcttctgcggcttccacataaggcatggaggatgggcagcttaccaagatatcnttctcgcctgacacaatga

SEQ ID NO: 217844 - DNA, 557 bp, Glycine max
  unsure (1)..(557): unsure at all n locations
caccgcgccncccgcgcccctacctncnctctctcttcaacgnncnccnnncccccaagtcatgtgctctgagcgcctgaactcgctgagacaganaagatccgatccgatcagatattttttcctatagtatgacgggactcttcataacggagcagcacaacgctgtttgctccaacagagcttacacaagagcattgactctctggtaaacgactaccaaaatagtgtcatcgaatacctctatcacaaaggagttgagagagtttcctgaagaatttcctacggtcccatttgtcgcagacagttgtaaacgattatcatgcgcttcggaatctattaccagaggctctgaacgctggaactcccaatccaagggaagagacgccctcctttcctgtaaacgttgcgaagctaatacccngacctgggaatgcaatcacgcggatggngctcgatatagataagatgaacatcttccatgggtgtcgaatttctacatggtagcgcttcttcaagaataaacctctagaggagctctgacggacatgataccg

SEQ ID NO: 217845 - DNA, 66 bp, Glycine max
  unsure (1)..(66): unsure at all n locations
gatgaagctttgttganataagatttcgtgttatgtgatttgttgtaaatataggtcgagggggag

SEQ ID NO: 217846 - DNA, 499 bp, Glycine max
  unsure (1)..(499): unsure at all n locations
accttgcttagtctcttgagaactgtgtttctagatgagtgacagtccttgttaaaacctanacccaagtcctgaaggattaaactgcttaaccaaacccaagttgtttggacaagaaaaacatgttcccaccaggtttaatccattttgacgtatttatcaattttgtagtatctcaatagttaaattaaaactaattcaatattattataaacgttgacctggttatgggattaatccttgatcaaagtttaatcagacttgtcactctttcttaagaatgtattttgcgagaattaaacttaagggtgggtaagtaggccggcccatcccgcgtaaaacccgtccacataagttcgtattggcaatagattggaccagtctgtcccgtactcttacacggatntaaaagaatggcctattnntttcttaaaaattgtaatttaaaataaatatatttttcctcttaaaaaaaatagtaattacactcaattatata

SEQ ID NO: 217847 - DNA, 288 bp, Glycine max
  unsure (1)..(288): unsure at all n locations
agcttcttggcaatcctcattccagcgatcagtttggttnttgcgtaagagcttgaacaacggctcacaaatggcggtgagctgcgatatgaatctggcaatataattcaagcgtcccaggaaacctcggacttgcctctctgtacggngttctggcatctcaaggatagccttcaccttttcggngtctacctctatccctttctggcttacaatgaaaccaagcaatttcccttatttgaccccaaaagtacacttggcggngttcaaccttaattgatatttctt

SEQ ID NO: 217848 - DNA, 300 bp, Glycine max
tactaagcttgtacctctcctgtctttgacactgacaatgacctttaattttgtattttcaaattgccttagtacgatccagcgcgccttttaattggatacacattggctagtagtgtttaaaagatgaaaacaatttattttgttgcaatgccatagttgcaagttttttgttcatcatgctttgcctgagagtagcctattctgatgttgctactctgttggcgctggtgagccacttgattggatcccactctttctctgcacctagactgaccactgctttgaccacattggatt

SEQ ID NO: 217849 - DNA, 440 bp, Glycine max
  unsure (1)..(440): unsure at all n locations
gcttcatcangtcgtacccgaatcanatatacattaaaaatgcagtatctaggaagtgatcctaggtcatctcccaacgagcaatggtcaaccaaacgttcataacagatagtaataaaacagtaatgaattgggggttgtttgtttttgtaaattaaacagcaagtaaatttgaattagaaaataatagaattaaaacatgttgtttccccttgattcacaagcaagtctcttatgctaggttacgagaatttatccttaatcagttcaaccacttactccaaccctaaattaaattactaagcaaaatttaacatgaggctgtcattatgtgattaagcaacacatacaccaattaatcatgaacgaaacttatcattaagcatgaacataaattaagcgcagagacaattaatcaagcactaagcatgcatggatta

SEQ ID NO: 217850 - DNA, 388 bp, Glycine max
tacgacacactaacgacatctattcttctaaaccaatgtggtataacaagcggtggcaatttcgtaattataaagttagaaaacgaagacggtgatgtacaaacccatctttgaattgcgaaaacaattcttcgacgatgttgttttggtgaacaccatggtggttggcgcggcattatagtcacgtgactcgaacaacactcccatgacctcaaaagactgagttgtgcgccctaagtacgtgaagactcgaacaagagtcaattgaccccttcgttactcagtttgcatcgtcactcagctctcccttcctcagtcatcgtcactcggatcgcatcttctatcgtgactcatgccacaccttccgcggtggacacccctagtctat

SEQ ID NO: 217851 - DNA, 477 bp, Glycine max
  unsure (1)..(477): unsure at all n locations
tcatgcaagaattattaatcttcttggccaactaataaccattgtgaggnggaggcatatgacgaaagttaagaatctttntatttgacttccaatttaggtaaacaaaatgggtagtcaaagttatgaaacccttagtattaatagatgtccataaatcagaagttaaacagatcctgccaggaatagcacacaacagttctttactgatggttttcttcctctcatatattctcaacatattagtcttaaaagtatttctagaaattggttaattgaggacacaaataacttatcaaagcctgaaactctggatacttaacaaaaatgaagggcaaattacgcctaatcattagattacacaacaattcgcgtgccatcattngatctatctctttggccttaaactttccttgcatgtctaagatcatttgactcatatcttcanagttttttatctcacatctgccattatga

SEQ ID NO: 217852 - DNA, 325 bp, Glycine max
caatttcgagcgtctcgatatcttatgcgcctgaatctgacctccgagtgaaaagtgatgagcatctgaatttctcgagagcttccggtgttcaattgcgagtgcctggagataatatacgcctgaatcagacctccgagtgaaacattatgaccattttaatttctcgagagcttccgctgctcaatttccagcgtctctatatgtgatgcgcctcaatctgacctccgcgagaaaagtcatgaccatttgaatgtctcgagagctctcgttgttcaatttcgagcggtttgatgtatcatgcgcctgaatgcgacctccgagt

SEQ ID NO: 217853 - DNA, 492 bp, Glycine max
atagatactcacgcttgaaggagacacatgagagggagtcgccacttcattatgggtaacttagccacttgtatatgcgcaaggcaatgccctattgcactatccactactgaagttaactatatttcagctactactcgatgctctcatatactagtggatgcagatacttctcgagaggaccttcacatccatgagagtcacattcttaactattttgacatacaagaactgctctatcaatctttccaacaatactcacttgcgtctcacggagagcactacctaatcacatactaggccatacaagaccatgttctatatcaacatgctaatatttctctgcgcacctttcgacaattacacgagcattgactttactcggatgcccgaatatgccataatatatcagacactcaaattgacactgaagctttgagaattcaatggcatacttttactcgaggtcgatcagctctatatacagacctt

SEQ ID NO: 217854 - DNA, 333 bp, Glycine max
atagaacaagcttaactcacttccaaaagctagcttcaaagaggaggattgtttcccgagtcttataaggagtaggcatgttaacagtttttttgggcttgagtgtcatactgacaattctgatggggttgaagtgtgttttaacaacccctccaaaaaaaaaagcaaccaccagtaagcctcttatacaatcctattgcttcttaatcttcaacctttaacacagacattcgtgagaatggttaaaattctcattccatcttaatcttgaaaactcttaattttgccaattgagaagtacctatactaaagaacttgcacccaatggtttta

SEQ ID NO: 217855 - DNA, 302 bp, Glycine max
  unsure (1)..(302): unsure at all n locations
aagaatgagtatcatatttatatggttgataataataataatatttttattttttttcttgatacatgtnaaagacaacaacataacataagttaaaaagatttaatttcagttgattgagttggatatatgagttattataagttttttaattctcacggataacaaataaaaagagaactaacacaaacttttatatatgcatatcaaatngaaacggtaacataatgactcctttttcttttaattgcttctttcaggagagatcatcatcaatggacatggaatcatgtgtgcctcca

SEQ ID NO: 217856 - DNA, 422 bp, Glycine max
  unsure (1)..(422): unsure at all n locations
gctntgataagacaggacacactgctgtcttctactataagctaaaacagatacaataatctattctaaagatacacataattataacataatcaacactgatcctatttgctcattataaataaaggcttagtgtggtcatccaagacgcgacattacacagtaaaacactattataataaatgaagactaattgtgatcatcctcaacaacacattacagcaaacccttccaacatccataatgtgcaatgaatggtatttaatgcatataaggcaagaactagtaacatgtttgctttgacatctcaccatgcttcatgtgtgtttcaccgaaacaaacattcacggcttctacatatattaagctatgactcatggatatgaacagacctaactatgtgatttttgaacagtaggatg

SEQ ID NO: 217857 - DNA, 451 bp, Glycine max
  unsure (1)..(451): unsure at all n locations
attctaattgcaagttcacattcttggtctttctttggctaacatacatacttgctcaaacttgtgaaaagaaacacaaactccatcacaatcatgcattcaatccaaaatcaaatcataacactaattttcacaaaaagataaaagtgtttaactgcaatatcatcaaagtcaagtttaactgtttcatatgcttcaaaataagcatactagctaaccacaaacacaatagaagtgtatataaacattaaccaaaataactgacacaatgtactgaaactataatcattgtaataataatccanaaagatgtagaaacaagcttcatgatgatgaatcaagttgattcaagtagttgtgatgatgacaaanagcccatagaatgatttcaagattgagtcaacaagttcaagatcaagattaatttcangtttcatgagaagaaatcaag

SEQ ID NO: 217858 - DNA, 432 bp, Glycine max
  unsure (1)..(432): unsure at all n locations
agcttgtaggattatggngtacccatcttatgtggtactaggtggcggttaggcgatggtgcgcaacaagttttccacatccacaaagcgcgcataaacccaccatcccctgttgcccacctccaactaagctcacgtactcccacgtagcccatatcctcgtttctctcaacaccgggtccccatcaatcctcccaagctttcccaacatccaagtaatacaacattccaacagcacaaaccatcatagccaagaaaacatagcgaaggcagaaaactctgcccaaaacacaaaccaaaatcacagcttttctcacttaaagaccccagtaacaattccttcgttccaattcgttaaccggtggattgactccaaaatattactggaagtctctagtacttaagcctacattgtgaccngtgggatctact

SEQ ID NO: 217859 - DNA, 396 bp, Glycine max
actcagcttacagttccgtcactttggataatacacaaagaaggctgttcgatgttagaagacaatctcaacaggttagggatacagtggtggaaatgcaatctaaaattggtagtaatcgagtgacgtgcatggagttacaagtagaacttgagaaagaaaggtatttagtctgtaataatgtgtacaaaatttttcttcgaatgatttggtacacagaagttgtgaaccttcttgtctttctatatctaggtttgccaagaaaagagtggaagaggatctggaggtcgctaggagaaagtttacgcgccttatagagcagaatgagggctcttcagtaactgaaaagcttcaagaggaacttgaagagtacagggacattatcaagtgcagtat

SEQ ID NO: 217860 - DNA, 285 bp, Glycine max
  unsure (1)..(285): unsure at all n locations
agcttatgagcganacaatgcgactattatatgttaagtcgaatttcagcgttcaaggactctggtaatcgagtaccaacacatcggaatagatgacagcctgttgaagatatgaggaacgttgcatgatcaggttgaaagcattttctagctcattctgctactagcgatcgattacaacaatatgggagtcgatgaccaaagtaactgctctctggcaaaggttgtgtgaaaaactcatgagctattcaaagtgtggaataatgaagaaatacttatcatgat

SEQ ID NO: 217861 - DNA, 124 bp, Glycine max
atgccccacgttatctacatgagacatgtgccaaaccgattattgtgaacctgtacgcataacatgtcatgcgtgcacctatgatgacactccattgtcgaagattgatggtcatgtgatgcta

SEQ ID NO: 217862 - DNA, 315 bp, Glycine max
  unsure (1)..(315): unsure at all n locations
agctngaagacaagactatacgaggtatctttcttgggtatagcaatatctctaagggctaccgtgtctacaacttgcaaactaagaaactcgtcatcagtcgagatgttgaagttgatgaatatgcttcatggaattgggatgaagaaaaagtggagaagaacgttcttatactcgttcaactacctcaagaagaagatgaggaaganaacccaggtgaaccaccttcacctccatcacaacaacaagaagagatggagtatccatacagaannaattgcaccagtagctcgtcttaataagacaaagctcaac

SEQ ID NO: 217863 - DNA, 317 bp, Glycine max
ggaagaatcataggaaattactacaaatgccgctatcactgttggactacacacatgagcccacttaaaggtaaggggtgagtttaccgcaattgtggttagaatgaacgtgtaaggatccttataagatcaaattgaggtttattttggaatgttttgtaacatcccattcttctgtaagataaatttaataggatttatttaaaattgaatagagttttaggaaaataatgagatttctgtaattaaataaatcaggagaaataattctattgattaaaataatggcttcagggaaatacataaatatatgttct

SEQ ID NO: 217864 - DNA, 408 bp, Glycine max
  unsure (1)..(408): unsure at all n locations
agcttaatcttaatgatcaatcattaattcacgagacatcttctgtttgtctcctgatcatgcactgcagaaaatctagaagttgctgcaagaggttcaaaataaatggngaaagctataatgaactggccatccaccttgtcctcaggctccttttcttcattttcattagcaggactgtccttgtttccttctgctgcatcttcctctcctacaggcttctcatcagcaagaaccttttcagtttcattcaccacttcctcagtcaccctatgaaattaacatcaaaaggaacaaataattaataactgccaattaaaaacatgagactcttggatgaaaattctaatctgaacttcattattattaanattaagaattaanantatgaatacaaacaattactta

SEQ ID NO: 217865 - DNA, 404 bp, Glycine max
  unsure (1)..(404): unsure at all n locations
ttgattcaagatntcttcaagatcaagccttgcctcataacgaaaggtttcaagtcatccaaggcacatgtaatcgattaccaatacgtgtaattgattaccaatgatttgaaagtgtgtaatcgattactagagactctgaatgttgggaattcaaattttaaatgaagagtcacagctgttcaagataaataactatgtaatcgattacactaatgctgtaatcgattagtggagaggattttcaaggaatatcgccaatagtcacatcttatcatttggattttgaatggccatcaaaggcctatatatatgtgtgacttgtgacaaaattggaagagagttntgctggtccagaatgtcttatcctctcacaagaaaatgagagagattccaagagaact

SEQ ID NO: 217866 - DNA, 413 bp, Glycine max
  unsure (1)..(413): unsure at all n locations
agcttaactctcaaattccncttcatcccattctcttttgatataggcattccttcattagggacaacaacctcagcaccaggtttgacaatatctgtcaatgggatcatgagactccttccgtccaaggtggtgagatccaacgttttaccagtaagggcctcaagaagggttatctcttggttgatcaccaaatcattaccatcccttctataaagagcatgcggcttctcatctatcacaaaaatgagatctgctgggatgacaccaggctcacggttacctttctctgggaaggtaatttttgttcctttcttccagccaggttttatctcgatagtcaaaatctcctccacatccccacatttgctgaaatggaattgcatgtgtcaaatattgtcaaaaaacacaaa

SEQ ID NO: 217867 - DNA, 431 bp, Glycine max
  unsure (1)..(431): unsure at all n locations
tgcagcntgagatctcctgttctgtctgactaccttccacagtttatcaaccataaatngtaagagatgcttatcatggaattgtgccaccttgttatactccactgctaaaaaaatttaccacataaagagtagtagcatgctgcaaccacaagaaaacttattcaaatgattttaaatgtacaggttcttaactttcatagtaaataatacttaattgtgtcagaattttttaacaacgtanaatggaagaatttctcctatcaaggaatatctaatgccaaacagcgaataacatgttcagaagtgaacaataacaaatgatcaatagaaggcgcgagagaatatcatttacacgtttcagattgtaattgttcacgcaacctttgacaaagaagcatgtggggattaccctttaactgatatttaat

SEQ ID NO: 217868 - DNA, 425 bp, Glycine max
  unsure (1)..(425): unsure at all n locations
agcttgtgcaaatcanatcactctcacatctcatctctagcatgcattttctttctttacccactcctcacgtttggttttttagggaaaacaccataactaaacgcgccgcaagggatccctatcgcaccagatccaaatctagaacgatgggtgatcaagaggagacgcaggaacagatgaaagccgacatgtcggctctgaaagaacaaatggcctccatgatggaggccatgttaagtatgaagcagctcatagagaagaacgcggccaccgccgccgctgtcagttcggctgccgaagcagacccgactcccttggcaactacgcaccatcctccctcaaacatagtangacggngaagggacgcactgnngcacgatggcagccctcacctgggatacaaccgagcggcttacccttat

SEQ ID NO: 217869 - DNA, 450 bp, Glycine max
  unsure (1)..(450): unsure at all n locations
atatgcatgtgaattatgaagcatcaacaagaatcaagccaaggctattgtgcaagcaatcaatggggcaaaacacaccaaatgattatgatgatggatggctcaaattctcacaaaggtaaactcatcactttcaaattgagctttcaaaactatcatgacatgtagaggagaatcaaggatttcaagtcacaaagtgtcaagaacttttattntcaaaacaattacccatttcttgaacatatcctataattcaaagaanaacatgcaaagtcgtacatgcatacaaaattgacccanaatattaaactaagaatccgacgaaactagcaacattaacaaattaacacaactaacagattaacagaaccaacaaaactagcanaaccaaagaacactgccccccccccccccatacttaaacaacacattttgtctcatgagcacaat

SEQ ID NO: 217870 - DNA, 440 bp, Glycine max
  unsure (1)..(440): unsure at all n locations
agcttgagatgaggaagtgttgaagggtgaaacttcctgcttttattgttgaccacagagtggtacctggagatatgtcgcggnggtcaggagaccttggggacgtcaggtggggtgctattgcccaaaaccaagcttgaccaatcccgacccaacccgggcatagtcggtcagtgagaacctgtgatgtacctaaacaggcgagctcctggcagtcaacagataaaaggaacaaagaccacaaagcaaggaggcttgtggtggctggccagttgtgaattntgtgtgatatgtaaagtaatggcctctggtaatcgattaccaagggtgggtaatcgattacaaggcttataaatgaagacaggaggctaagatggtctctggtaatcgattaccaaggggtgtaatcgattaccaggcttgaaaacgaagtcaggaag

SEQ ID NO: 217871 - DNA, 395 bp, Glycine max
  unsure (1)..(395): unsure at all n locations
ctaagcttttatccaggctcatcttggtggtgaagctccttcttccatggcttattccttaatggatggcgcctcctctcacctattttcctttgtcttccgctgcatctccatggtggaaaatcaccattaaaggaccccattgaagctcaaagatccagcctccatagaagccccacaagcaagcttccatcaagtggtaatcagagcacaagagcttcaagtaggtgctccttaacctccattaattttttttctttaccttctcttccattggtggttcttcattattctccatgtatctcctcacatgtcttgttctaaatgttgttaacatgattctttagagtttccaccgattaaacttgctatagaagttagatttgattntctat

SEQ ID NO: 217872 - DNA, 359 bp, Glycine max
  unsure (1)..(359): unsure at all n locations
gagtgacacgccgagaaaagtttccatccgtgccggtgatggttntcacaacttgaaggtaaatttttatttattggtttgggtttgattgggatgattatgcttaattatttggtgttgactttgggaacattnttaggagattaagactgtggaactcatgaaggcaactgggtgggtttatctatccttgtctggagctcatcctangtaagtacagtgttctttctgtatccagtttttgttggtttaagtttgtatccaatttttgttgtttggaggcctggatttttgttttcaacgaaattttgtgtgcatgttttggtagatttctagcatagagtaaaaattaaaagaat

SEQ ID NO: 217873 - DNA, 439 bp, Glycine max
  unsure (1)..(439): unsure at all n locations
ctcgcccaggcaagcagggntgcttcctccagaagcaacagccttctggaggaatcttctggagggcccaagtgggcctggttgctatttgcacccccatttttactaagtactcccccctgcctttattttggtgattcttttttcgtacagttacggaaacttacgaatttcgtaacgatacttgttttctttccgtaatgttacggaaccttgtggattacataatcatccccttacgaattgtgacttacggaatgttacggaacctcactaattgtgcaacgatgcttccatttgatttccggcgtgtcacggaaccttacggattgtgcatcaatattttcttttgttttctggcacgtccctgaatttcacanatggcctaatgatgggtgccaagcaccttacaaggaccaaataatagtcgcatgtcatc

SEQ ID NO: 217874 - DNA, 436 bp, Glycine max
  unsure (1)..(436): unsure at all n locations
agcttcccgagtgtcccattgaaaacctttattcaacctttcanagttagtgataaggctaaacgaaaaattagggaacttagaaaaactaaatccttaattgaaggcgtaggtgacaatcatagcgaattactaaacaagattagtagtttgcttaaggtcattccagatactccccaagcttcggaaaatacttccaaaatggtaacaagaagtacctccaaattaattaatgttattaatgaagatagtgaccaaaacttagataacacaactgagataggatcagtgtcagaaaagaatataaatccattaaactccaaacactggaaaaccccctccaaattatattatcaacgtccaactgcccctgaccttctattagaagaaagagggtgaaaacaatttaaaatttttagtgcaaataacatctatg

SEQ ID NO: 217875 - DNA, 510 bp, Glycine max
  unsure (1)..(510): unsure at all n locations
agggatgtgcctcgtgttgcgacctatagatactcagcttgtcacctcatagctaggttcttcattgtaatcagcctatgctgtggnagctagntgatgagcactgcggccttagattattaccatgtggatgaatggtggactctgagcattctgcagtgacaaagattcattacctgtgaattgcacaaatgatcacttgggctaaccgcatatacaccgtctaggagaaacagacagagcatcacacatcatgagctcttntagcaacatgtgccttcctgcaagctaactgcaatactggcgctcagctatgttagattactcacgctgagcacgagggtggaggtatgccactgcttgatttcataccaatatagagactgtctgtgcagataacggtacactctaccgaataccagggccactatactcgcactccagtgctattttggtatgactctagatgacgcatatgacatcgattgttcgagctagttatctcattaa

SEQ ID NO: 217876 - DNA, 441 bp, Glycine max
  unsure (1)..(441): unsure at all n locations
agcttatgcgcatatttccttacgaacgttcacttgcacaagacatcctattaactaagaaaaatgcacccatatacaatcaaggcagcttcattacctagattatttacatgtacttccaaggtgtatttgttatttacatcacacacgtctccttggttaaatttacatacatgcatactcaaagcattttggggtaccaaaaattgcacgtgtgcacatcttggtatttctaatacctatacatacacaaacttcatgatgaatcttgactatctacacaataaggtgctacgtttcatgctcttttcaaatttttgctacctaaagtcgcatgcaaattcaagtatattttcctttgctgactaanantgtattaaaagggatacattatttttggaatgtattttctttacataacatgcaacatatttatatata

SEQ ID NO: 217877 - DNA, 441 bp, Glycine max
  unsure (1)..(441): unsure at all n locations
gctcatattttagaagttatcacttctgtcaactctatgatgccttntttgaaaaaggaaaagagctattatttcccttagattgttccaaacattgtctagttatccttttagaagntaatatgtgaactaaagcttttattgtagtccaaatttcataataagggcatagccttggcatctattctccgtaaatgatgctttaacaaattaaagaagcattttcttttgacctgtattatttgtttttctgttcagtgttcatttagcagaatgttatctgtaataataattaataaattattctggtgcaatatatgctcacaatcaaatgagaatctgatacataatgcattctaaatagtataagacatcaaatagtctgtgcttacagatccctttggttacctaagtaaattagtgaaaaattatatttgtcac

SEQ ID NO: 217878 - DNA, 376 bp, Glycine max
  unsure (1)..(376): unsure at all n locations
agcttggattgattcagcctgactagggatctaggtttagtaatttagactacagtatagaacacaaaagcatgattgattagagaaacatctttacatacatcagctggttcgttagaaagacccaacatatttacctactactgttaattttacttacttgcatttttattgtttttagcctagacttagtttaattctattttaaaccatcaattatcaatgtctcttttaaaaatgccttatttctgaatttaactctgtctaagactagttccctgagttcgatactcggattcatccgctttaattntaaatacttgaggatccggtgcgctttccggcaaaccaaatttcccttaaacatatttgcata

SEQ ID NO: 217879 - DNA, 412 bp, Glycine max
tgtccgatgcagcagtaatgatggcccgagttatgttgtggaacggttacgaacccggaatgggtttaggcaaagacaacggcggcataactagcctgataaatgccaaaggaaatcgtgggaagtatggtttatgctataagcccactcatgcggatatgaagagaagcatcgcgggaaggaagagcggtggtcaaagctcgcgttggagacaagaaagtgaaggaagcccgccctgccacataagtagaagctttataagcgcgggtctgggagacaaaggtcaagtggtcgcaatatgcgaagatgatgttccgagtacattgtgattggtacgaccatgccctcctgatttccagctgggaaattggcgagtggaggaaacgccccgcatttatgcaacgagcataat

SEQ ID NO: 217880 - DNA, 343 bp, Glycine max
agcttgcttaagtccgtatattgaattctttattgtgcacaccacgtgttcttttccttcaactgagaatcccattgggctggtccatgtacacattctcctctaaatctccattaagaaagatatttttcacatgcatttgatgtagctctaagtcataataggctactagcgccatgataattctgaaggaatcctttcgtgacactgcgaaaaatgtctctttataatcaacatcatctgtctgagtaaaagtcttagtaacaacagttggcctagtaatgttcaaggttgccatgagagtcacatttagtcttacagacccatgtacaaccaactctat

SEQ ID NO: 217881 - DNA, 334 bp, Glycine max
  unsure (1)..(334): unsure at all n locations
acgtgcacgtgattaagcgcattgctgtgttatcttgaaaaccaatccggatatagatcaagttacactgaattatgacgtaatttcactgttcaaacagtgctcatatatataataacacacccatggaattcttccgtcttgattcaacaaacaggcatcccttgacatagatatataaaaaaacatcacactttaattaattaactgggcatataaaacccgnggtacagaataactcgaataaccaagacacagatgatagtatgcatcagtgtgatcatggttcaagttcgaaacattgatgatcgaaactttcatctccatggaatac

SEQ ID NO: 217882 - DNA, 374 bp, Glycine max
  unsure (1)..(374): unsure at all n locations
aacacaatcaatatatcccaaagagaaagcaaacaatggagatgaacttcataataaaatgcaaatgatatatgagcttcaagagaatatgaaagaacagagagagaaacttcaagtctcaaacatatatatatgtggctttttctttgacaccctccccaatacacacacacacacaaaaaaaaaaaatcttaaattgaggttatctgcatggctgcacaggacatctgaaagcaagttttttgccctctcaccctctccaattttggcaggtgcattagagatttactaactatgtctagtacaacaaaaaacaaatatgtcactggatgaacaaacattacagatgtgttngagaagagcaaacactatca

SEQ ID NO: 217883 - DNA, 345 bp, Glycine max
  unsure (1)..(345): unsure at all n locations
agctnttaactaanggctatttaaggtggttttatattttactttntaaaaaaaaaatccaataataattaatcacgttaagaagggctactatgagggaggtaaggaattgngtggaagggcaatggtttatagtgttggagatgaagagaaatttttgtatggaaaaagggatctgttgggtaggatgttacatgagttataggaagtgaggttgaaggagaggatttgataaatggacgtggaagaaggatcatataaaatactatagaggacaggtgaggaaggagtgacatggngtggcacttatcagcacatgaggaataaatatgttcctctaaagat

SEQ ID NO: 217884 - DNA, 418 bp, Glycine max
  unsure (1)..(418): unsure at all n locations
tgtatacttccnncaatttatggttattntgagagtaaatttgttaataaatcttggtctatgggtaatgttgtctttagaatatttccattggatttaatgatgatatctgtgcattttcaggtgaaaaagaagctaagttttgaattgcaaaaagtagcagttgggctaagcgcatatccaccgctaaggagaatctggcaaagcatcagcatcagtgcgctaagcgtagcaggtgccttcggccaagctaagtgcaagattggcgctaagctcaatttcacttactcacgctaagcgcgagggtggcgctaagcgcaacgtcatgatttcagagcctatttaaagcctgtcttgtgcagaattatggtacactttacagaatacccagggcacaaaattccacagcagccacagt

SEQ ID NO: 217885 - DNA, 343 bp, Glycine max
  unsure (1)..(343): unsure at all n locations
agctataggatcaaaatcttttttctctctttntctctcaaatattgttcattcttctcccacttttcacttatgttctttgttagtcatcatttacgactaacttttgtattgaaaagtttcatgaaatttatatctttttcatgaaacttttgtattgaaaagtttcatgaaatttacatctgctaagcgaggcactcagctcacttaacgagttgcgagaatctggaagagaatctgtcattcatgcatgcgctcagcgtgccatcagctccctcagcgagtcatttgtctcttcttgtgctaagcgcgctagattgctaagcanaaattcactaactca

SEQ ID NO: 217886 - DNA, 506 bp, Glycine max
  unsure (1)..(506): unsure at all n locations
gccctggttatgctctgactccagagaaaacccctcggcccagagtagaaggtgcatttacacttttctttttctatgtacattgtatgcggacattataaatagcaactactactgcgtcatctctggcggactacgggtattaaatattttatgatcctttcaatccacatattgagaccttgtggacgattgtgcacgaaaaagtctttttaattagaagaaaccaacgatgatttcatccttatttgtggtgaaagaagcctacttttaactctctactactaaatctgataacaagaagaaagactttctgttactgtcacaaaacaaaaagactctttcgatctactgcataagatattaaaggcctactccgccaccactgcatatctgagatatgcgcacttcttattattgggtgcttcatctcatggggtataataaataatgacttgtttcatcctgacaagactttgcgacataaaggatctgaagtgatcccn

SEQ ID NO: 217887 - DNA, 388 bp, Glycine max
  unsure (1)..(388): unsure at all n locations
agctntcccacaagtcctaaatgacattntatactaggattaactcactntagactccaatttacactagccccaaatttagcttctctaaccctcaaaatctcacttttctacctacaacattgtcattctcacatttaaccctaagttaactttccccttcatctctaccagttttctatcagcaatttcagcacacaaacatcaccaagcatcatcataaaaccctaaaacagaatgggtaaatttggctcacatcaaacatgacaagtttagcatgctttcaacaaattccttcacaaataactaccataaggcataaacttagtagaactacccatcatatctcccanaaacccaatacccacgaaattcatgtgagaataag

SEQ ID NO: 217888 - DNA, 426 bp, Glycine max
  unsure (1)..(426): unsure at all n locations
atgcccgagtcattcatccctatgagatgttgttgaagtattggcgaccagaattgccattccttggattatatggttgaaccaagctcatgtttttacaaaaaggttcatcaagtcaagttgaaatatggaagtaaccgtcttgcacaattggggcaaaagatgaatcgagtcacatcactgcttcgtctactgccaaacatatttaggattattgatgtccttgttacttccagtttcaccttgacaaagatgtcatggaccatgttgaaaatctaaattgattcaaccccatatcctgcgtaaaaattcgcaatacttcaactgtacatcattcgcatacatccatgcttttcattggntgcattgctcattgcattctttccttgaaaaataaaatanaataaaataaaatgaacttaatca

SEQ ID NO: 217889 - DNA, 370 bp, Glycine max
  unsure (1)..(370): unsure at all n locations
agcttctatataagctgaaccattntatcaataaacacaagttgagttttattcagaaaattagagtttatctcttttatcttagtgagagtgattctcctaaattcttgagtgattcaagaacaccctggctgtatcaaaggactttcacaacctttgtgtgttgccctcgctggaaagagtgattctttccttcctttcatcttcacccttgttctttcaaaccacaattccagaaaatccacctctgcccagaattatctcgtggccataactcccattttacgcactcaaattaagtgattcttgagcctaaattgaatttcaaaacgagacctttcacctcgttntggaatcacctcatttggag

SEQ ID NO: 217890 - DNA, 255 bp, Glycine max
  unsure (1)..(255): unsure at all n locations
tctcgatatattatgcacctgaatcagacttccgtttganaagttatgaccatttgaatttctcgagagcttctgctgttcaatttcaagcttctcgatatattatgcgcctgaattggacttccgtgtgacaagttatgaccatattaatttctcgagagcattcgctcttcaatttcgagtgtctcgatatattatgcgtctgaatcggacttgcgcgtgataagatatgaccatttgaatgtctcgagagct

SEQ ID NO: 217891 - DNA, 433 bp, Glycine max
cattgacaggacatgcctattatattcttgttaaacagagctcatacatctgtgagcattattaagctcgatgcaagatctttcatatgccccctagatccttcttaccaattgaagttttgaacaacatggattgagaaggtataatcatgaagaggagatacttaattcactacagagcaaaatggtgtaccataagatgatttttttttttcacgcaattatgaaaactactaaataacaaactagaagaataaaatgaaggcaaatagtacacagtacacacccatcttgccgtgattcgctccctgagttcaaattttggttcaatggggcgtcttcctgtgacaagttcaacaagcaaaactccaaatgaatacacgtcactcttttcagttagttgataagttttcacgtattcagggtccaagta

SEQ ID NO: 217892 - DNA, 333 bp, Glycine max
  unsure (1)..(333): unsure at all n locations
ctaagctaagctggtatntagcttattatagcatgattactatgtcttatatatcaaatatattctcgaagagttgctgaacttatttattcagaagtaatagacattgtcatgtctagaaatgagataaatgtaagagacagataataaaatactgtttgcacataaagtatgtaattataatttttaatacacgcacgatttaccacggatatgcctattttatataatagtaacacttgtctaccattacatatatacacttgagatgtcatgggctattaatatcaaacctatcgaggctgagcttaactcagtcatataattgagctt

SEQ ID NO: 217893 - DNA, 420 bp, Glycine max
  unsure (1)..(420): unsure at all n locations
ataacacgcagagactaacgtcgtcttctgcgaccttcctcaatcgcggccgacaagcttgttgacatgttgagatttacgtcatcttccgcgctcacaagatctgtcatactgacttttgagtctcgccgacggccgaaaatacccgagtggttatccgtataaactttttgttgtctataagacgaaaagcctgatagcacgcagagactaacgtcgtcttctgcgcccttcgtcaatcgcggccgacaagcccgttgacacgtggagatttacgttatcttccgcgctcacaagatctgtcatactgacttttgagtcacgctgacgggcgaaaatacccgagtggttatccgtataaactttttgctgtctgtaagacgaanagcctgatagaacgcagagactaacgtcgtcttt

SEQ ID NO: 217894 - DNA, 432 bp, Glycine max
  unsure (1)..(432): unsure at all n locations
gtcagcgtgactcanaagtcagtatgacagatcttttgagcacggaagatgacgtaaatcaccgcgtgtaaacgggcttgttggccgcaattgacgaatggcgcagaagacgacgttagtctctacgtgctatcaggcttttcgtcttacagacagcaaaaagtttatacggataaccacttgggtattttcgcccgtcagcgtgactcanaagttagtatgacagatcttgtgagcgcggaagatgacgtaaatctccacgtgtcaacgagcttgtcggccgcgattggcgaatggcgcagaagacgacgttagtctctgcgtgctatcaggcttttcggcttacagacatcanaaagtttatacggataaccactcagctatttcccgccgtcagcgtgactcanaagtcagtatgacagatcttgtgag

SEQ ID NO: 217895 - DNA, 402 bp, Glycine max
  unsure (1)..(402): unsure at all n locations
gttatgatagggaagggtcactatgtacttcagctgttgccatcacaaaaatatatgatacttggataagacatcttggaacttgaaatcatgcatgcattctctgtatacaacaacagactagggttntctaattcctcaaccaacaatataaagttgtggtcatctgataatttggtgaacgtgtattagttagcccgcaatggtttatggatataaaagaggttttaggacggatttatccattatatattgtggtaatggatgttggcaaagtgaatgatagttctgtatgggttccacctatcataaatttggatgtcagctcttcatagaatagttngaaaacaggaccgcatgatacatcatatatattgtattaaaagaatttcaatgaatagt

SEQ ID NO: 217896 - DNA, 485 bp, Glycine max
  unsure (1)..(485): unsure at all n locations
ctcagcttgctttaaacttctacaatcgccgaccgccgaagtagcaattatgtttggaatttcgaatgtgccccatattgaaattaattcacatgattgttacatgataaaaacatgcttctaaattctcagtttcgcttgaatatcacatatagttgaattattttttattctattataagagatattccattcaattgttttgagccggcaaacttatttttcaactatgcacctaaattcgaacttcaaaatcattgtacccaaatataaggcgtttaaataataagatatttctagatgaattaggcttgatagttcaacatgattagtataaatactacgtataaaatagaanaaaaatctatacaacgttggaaacctttggtgcttcctacattntaaggaagtacttttcacacgtgtggtaaacanaacgataganataaaatagagatcatgtgatagagtanaaacatcatata

SEQ ID NO: 217897 - DNA, 399 bp, Glycine max
  unsure (1)..(399): unsure at all n locations
tcactaatatttgaaatttgttgttctatcttctctaagctctttntctgtaaatttttaagttgtaaagctctttaaacaccttgtaaatcctgagagaaaaatattcagtgcttaacttgtatatccttctataagacgcttaagctattttgtgtgcaaaatatacccccaacaaatttgttgatttttttaagagctagaagtggcttttttgagaaaaaatactttatggtgtaaatcttaggcataagctatgttgtaagagccataagtggcaaggaaaaatacttgtaactttntttaaaggtactagaacttggtgggttgaaaaaccaggacatagtctcaatggtagagatgaaccaatataaaactctttatgtcttacatatttat

SEQ ID NO: 217898 - DNA, 247 bp, Glycine max
acagccttctggaggaatcttctggagggcccaagtgggcctggttgctatttgcaccctcctttttactaaatacaccccctagctttttttggtgattcttttttcgtaaaggtacggaaacttacgaatttcgtaacgatacttggtttctttccgtaatgttacggaaccttgcggattacataatcatccccttttttgacttacggaatgttacggaacctcaataattgtgcaacgatgc

SEQ ID NO: 217899 - DNA, 346 bp, Glycine max
  unsure (1)..(346): unsure at all n locations
agcttggcaataaaaaatgaacccgttggtacctgttcaaccccaccctgattntccttgacttggagaagcaggtttgagtttgggtttaggtatgtcacttcaccccatatgtgtcccgctaaaatccaatggggataggatttggtttcattnttccactcatgttttgtaaatctgaatccaccttgttgtgattcctaccccctacggatatcataacataacgtctgaagaagttaatatgaatgaagacaatgaagaaaaaccaggtgtgtttgaaaaaattgattattttgatgtcttcaatacttctcaggtattaatataattntgtattttatta

SEQ ID NO: 217900 - DNA, 394 bp, Glycine max
  unsure (1)..(394): unsure at all n locations
cggaccttaaccctaaccctattgtccaatttcccatcatatagttctctaaattagatttcaagcctacaatccaaacaaacacggatactaacctcgccaagctgcggcgccaagtcaagaaagcttgtgtttcgctggcgttcagctcgtcggcggacatgtcgggagtccatggcgggcggcgaggaacgcggaggctgctggcgtggagcgcctcctcttgcttctgctgcttcctcgcttctttcggcgtcgtcgcttcaccgggcacaaaatctggatcgctactctcanataacagcaacaaaaacaacatatattacagaacaattgccgaaagaagagcgcgggcacgtgaatgcgaataagagaaagaaggctcacaggctga

SEQ ID NO: 217901 - DNA, 433 bp, Glycine max
  unsure (1)..(433): unsure at all n locations
agcttcttttctagaccatgatcagtcatgttttctggccgatgtccactgtcattnttttcgatcaatatcggagaataatattttttttgccgagatggtctaatgttttcctggccgaataagtcgaaacatgccagtttctgaacaaacaaaaggtcggttgagctcacacaaaaaacctagccgacctacgttgtaaattttttatgcaacaccaaaacaagaaaacttcctctgtcgtaaaatacaaaacattattggctagcgagtgtttttttaaagaaaattgtgcaatgtcggtcgaaaaatatcagtcggagctatttcaagttcgatgtcggctattgagttttcaattcaatccgtgaacgaaatttgcatgatgtctgtaacgaaatgttcgataggcctcatcctgtgaagcttcatt

SEQ ID NO: 217902 - DNA, 427 bp, Glycine max
  unsure (1)..(427): unsure at all n locations
ctcagcttctttgtagacctcgatcggtcatctttccaggccgtggtctaccgtcanttttttcgatccatttcggggaataatattattttgccgagatgggctaatgttttcctggccgaataaatgggaaaatgccagtttcggccgaaacgaagagtcggttgagctcgcacaaaaaaacctagccgacctacattttaatatttttatgcaacaccaaaacaagaaaacttcctgtgccgtataaaaaaaaaaaaaacattacatgacagcgagcgttttgaaaaacaaaattgcgcaacgtcggctgaaaaatatcagtcggcgctctttcacgaccgatgtcggctattgagttctcaattcaatccgtgaacgaaatttgcatgatgtcggttaggaaatgttcgatcggcatcatcct

SEQ ID NO: 217903 - DNA, 404 bp, Glycine max
  unsure (1)..(404): unsure at all n locations
agcttgatgaggtaattgtaatcagcacactcacacacactanaagccacaaaactagggtcttcctccccaaaacccatgtactgctgctcccagntttccatttccccttcacctgttttgcatgttatctactctaatttctatccatcataaaagccatcacgacacatccaaaaccgcttcttatcctaacaagttaaacaaacaaaacatttccatgttcctttatcttcttaccaaactaactacggcaacacatcagcacatacatttatttaaacacagcagaaaccactctcacacaaaatatcattataacccaacaagggaagcaaataggggaatcaaatattagttgccaatacaatgtcattttctaactgtagtgagatgttctttta

SEQ ID NO: 217904 - DNA, 378 bp, Glycine max
  unsure (1)..(378): unsure at all n locations
atttcttttatgcaagtgaaatgatgggtgctgctagtgtcactaatttagaggaatgattaacatttatttgttgaacaatttaagttgtttctttcttttattatgtaattcgaaagaatgaaacatgtttaagttgctaaacaaaatgaaacatgttgaaggacaaccaacatagtatattaatatctccttttttgctaaatagaatcatatgctacttattgttgggacaacatatatttagatggtaatgttttttttgtgggaaaataaatatgcatgtcttaattcctcatgcacatacccacatttatgattntaattgaatagattgatttgttntagtaatnttttaaattatgataatgatcctat

SEQ ID NO: 217905 - DNA, 362 bp, Glycine max
agcttgtatagttccccaatttatggttattttggagtaaattttgtaaataaatattgttctatggttaatgttgtctctagaacatttccattggatttaatgatgaaatctatgcattttcaggtgaaaaagaggctaagttttgaattgcaaaaagtaacagttaggctaagctcagcagttgggctaagcgcatatccaccactaagcgtagcttcagcgcgcttagcgcaaaagagaatctggcagagcatcatcatcaaagtcgcacgcttagcgcaagatcagtgcgctaagcccagcaggtgccttcagccaggctaagcgcgagactggcgctaagtccaatttcacttact

SEQ ID NO: 217906 - DNA, 366 bp, Glycine max
  unsure (1)..(366): unsure at all n locations
ntatagaaattcaaatggtcatgactcttcacacgaatgtccgattcggtgaaataataaatcgagacattcgaaatataacaacgaaagctctcaagaaattcaaatggtcataacctttcacgcggatgtctgattccgacacataacatatcgagacgctcgaaattgaacaatggaaactttcaagaaattcaaatgatcataacatttcacacggatgtccgattaaggcgcataatatatcgagacgctcgatattgaacaatggtcgatattgaacaatggtagctctcgagagactcacatggtcataacttttcactcgaatgtgcgattcggagacataatatatcgagacgctcg

SEQ ID NO: 217907 - DNA, 359 bp, Glycine max
  unsure (1)..(359): unsure at all n locations
agctatagagttgagtcttgtatcggtttaatcgattacaactatctcataatcgattacattgttgtttgagagaatgactgatttattcaggagtcttggctntaattgattaccaagatcgattacttaaggcatctaatcgattgcattgttcttgagttatttccagatgttgggatgaactctttaatcgattacttagataatctaatcgattaggtcattgaattaatcgactatgctataaatttaatcgattacaagcagttataattgttttctctataaataaccagcttgagttcacatctaagaatcaagagatcaatagaggatcctccatacatctcaaaaat

SEQ ID NO: 217908 - DNA, 332 bp, Glycine max
  unsure (1)..(332): unsure at all n locations
ttacattgatgtttgtattgatgggaggaggttacatgccattgttgctttaagagtaacgtcccactggtaaaactaactttccaaatgtttgccttcgcaggaatggccccgaggaatcttgcctcatagaggtccacgaaggacaaggtggccgaatgaactattttcgccccggagtacgacagtcaccgctttangagcgttgtacaccagcagcgcttcgaagccattaatggatggtcatttctccgggagcgacgcgtccagctcaacgacgacgagtatactgatttccaggaataaatagggcgccggcggtgggcaccact

SEQ ID NO: 217909 - DNA, 441 bp, Glycine max
  unsure (1)..(441): unsure at all n locations
agcttgcgctggccgctaagtgaggcgatgcactgggtctgtcttgtgcgctaagcgagttctcctaatcttcatttttttcttcaagtttttgcatcaattttcctccaaagcacttgtaattntcttcttttgaatcttgctggtaaaatattaacatgatattaaatttctcattatctcattaaaaacaatagtaaagtaaaggaattctaatcattgttagtcaaaattaactgtcaattaaacttaaatttcacagttatcagtgccagcaaatttaaatttgacactatgcaccttgtaaggttacttcaaccatgcccattcctcatgcagtatgggaggatctctccttggattnttcattgcctttgcttcttcccaaggctataccatgatcctgaaagccctcgtatacaatgttcaaaggtactactc

SEQ ID NO: 217910 - DNA, 380 bp, Glycine max
  unsure (1)..(380): unsure at all n locations
gcatgagagggagtcgccacttcattatgggtaacttagccacttgtatatgcgcatggcaatgcactattgcactatccactactgaagttgactatatttcagctactactcgatgctctcaaatactatggatccagatgcttctcgagaggactacaacatccatgagagtaacattgttatctattctgatttacatgaagcgctactatcacgctttctaaaaatactaccttgcttctcatggacagcatctcctaattacagactaggtcatacgataccatgttctaaagcaccatgctaatatctttattacacccgttactaacagataancttggaatggactgtataaaggaatgattcattatcta

SEQ ID NO: 217911 - DNA, 372 bp, Glycine max
  unsure (1)..(372): unsure at all n locations
agcttattctcgatttgttgctntggatttatcttganaaaatcgctgcttgagaagtgcctgttagtgttttataagatggttagtaagggactgttgcctgacgtcaagaattgcaatagggttcttagattgcttagggatagggataataacatcgacgttgcgagggaggtttataatgtgatggtggagtgtggaatttgccctaccgttgttacttataacacaatgttggattccttttgcaagacagggatggttcangaagctctgcagcttttgtttcagatgcaggcgatggtgtgttcgcccaacgatgtcacgtataatgttntggtgaatggtttgtctcacagtggggagatggag

SEQ ID NO: 217912 - DNA, 371 bp, Glycine max
tatcctagatgacacttcttataccactaagttcctaactctatcacttttaaagtcctactgagtgagtacaaagtgaattgcagcagtttaatgagtaattaaacactcctttgtcgctagaattataaaatcatgtacatatctaatatcaattcaatattaatttcaggatgtgtcgagcaccatgtacttatttatgaaagctgcagaagtcactcggctgaacttggaagggattacgaactgtatgattatttataatcatttgatgaagattacaaacattgcaactggatggaaaacttttacacaatcacaaaatttgaagctgaaactcatatatatttgagttccagatgacactctaa

SEQ ID NO: 217913 - DNA, 352 bp, Glycine max
  unsure (1)..(352): unsure at all n locations
agctntatttggtaaacttcaatctagatgggatggtccttttgttattactaatgtttttttcccatggtgcagttgagattaaaaatgaagttagcgacaaagtcttcaaagtgaacttaagccttttcatgaaagccccacaagcagaggaggaatttatggcggatctctctttggttntgccaattttatgtgatgatgtgccttgaatggcacttgagaagtttccttccattttcttttatatgttgngtctttgtttgcatttcaagtgtggggggaaggtttagaanaatctgttttttggtttctgatattattggttttgttttggctggatttggttttt

SEQ ID NO: 217914 - DNA, 399 bp, Glycine max
  unsure (1)..(399): unsure at all n locations
tgcatcacatagtctgatgtcgcataagacacgaattttaacctttgtatttattagcatttaatcaaacattgtaggctcctgattcatcttaagacataaatgtcttttgacttaacatgcatgctagtatttctagctctccaagccattattctcatttatgaaactctatcagttaaaactaagtattctcaacttgccaggcgatgatactatcttgcatagactttgagaatttttaactaggttactaaattatttgtcatacttaaatatgcccctataccatatttttaattggatcttgaagttgcatgtgttntttaaattaagtccatagttgggtcttaaaacttgtatttgttttttaattagatcccaccagggacctaatta

SEQ ID NO: 217915 - DNA, 429 bp, Glycine max
  unsure (1)..(429): unsure at all n locations
agctataagtgaggccttgngagaggatntgtccaaaccctccaacaccagtacttgtagtaataaagctgacactactactactaaggcaaggataagatgcagcatcgaccaaagctttctgaagaacaaatctgtaaagggtaccacggaacttcttgaacagcatgtgtggaggccccagagagggttgccagagcgtgcagtggcaattcttaaagcctggttatttgagcattttcttcatccgtatgtttgtctctatctatgtctcttattaataattttcttgctccgtgactctcttttctgcattctaaagagacatttggattgaattgtggcctttttttgctgttgttgaatttcttttcagttaccctacagacactgataaacacatgctggctagtcaaacaggtctttcac

SEQ ID NO: 217916 - DNA, 432 bp, Glycine max
  unsure (1)..(432): unsure at all n locations
tcatagcctgaatagtggcttaaggagttgaggctgacaagtcccaatttctgcgttttagcgatgacctagctaagctagtcctgcccgctaagcaagttcatccattttgttaaatttctgggttttaggatgaactcgctaagcgcaccctgttcgactaagcgagttcatcaagtttgtttatatttctgcaatttcgtatgaactcgctaagccactgcactacggcttagctagtcattgaatttatgctntatatttctaggtttgcatgaactcgctaagccgaccatccgcgcttagcgagtacacttagttagttctgcaacttggaggctgtttgcattcctttcgtggctaagcgagtcatgctcgctaagtccaaaagtgcctctggaataaaattgggctaagcgagtctgtctcact

SEQ ID NO: 217917 - DNA, 407 bp, Glycine max
  unsure (1)..(407): unsure at all n locations
tgggaccttgcttagtctcttgagaactgtgtttctagatgagtgacagtccttgttaaaacctanacccaagtcctgaaggattaaactgcttaaccaaacccaagttgtttggacaagaaaaacatgttcccaccaggtttaatccattttgacgtatttatcaattttgtagtatctcaatagttaaattaaaactaattcaatattattataaacgttgacctggttatgggattaatccttgatcaaagtttaatcagacttgtcactctttcttaagaatgtattttgcgagaattaaacttaagggtgggtaagtaggccggcccatcccgcgtaaaacccgtccacataagttcgtattggcaatagattggaccagtctgtcccgtactcttacacgg

SEQ ID NO: 217918 - DNA, 387 bp, Glycine max
  unsure (1)..(387): unsure at all n locations
gaaaaaaagaagtcgtatccagtcaaggtctgagagaccatacaattttcctaacgatttctaattatgtgggccattaagtctatcatatgctgacaatagccgagaagcccatgaatctcttcgggggcggagtaggtgtctgccatcgccttggccttggctaacaatcggngaagttcttgactcccgttcaaggtaagagcaaaccgatccatccacatggttgcctcttggtgtaaagagtcgatcacccttcctctagcctctttttccgcatacacttgagcatactcatccgtgattctatgctcgtgggcccgggctagacctaactcttcttggtacttggcgatgatagctaacatgttggtctctgtctcgcat

SEQ ID NO: 217919 - DNA, 277 bp, Glycine max
  unsure (1)..(277): unsure at all n locations
ttctctttcccatgtcaactatgcagcttgcggtcaacatgaacggccttcccaagattacaaggatgtcagtatcttcagagatatccataaccacaaagtctgctgggaagataaaatgttntaccctgaccaacacttcaatcactccacatgacctggtaatggagcggtcagctaattgcaaagtcattcgagtgggcataatctccaactctcccagccttctgcacatggagagtggcatcaaattaatagtggcttccagatcaatcat

SEQ ID NO: 217920 - DNA, 443 bp, Glycine max
  unsure (1)..(443): unsure at all n locations
agcttgcgctgcccgctaagtgaggcgatgcactgtgtctgtcttgtgcgctaagcgagttctcctaatcttcattnttttcttcaagtttttgcatcaattttcctccaaagcacttgtaattttcttcttttgaatcttgctggtaaaatattaacatgatattaaatttctcattatctcattaaaaacaatagtaaagtaaaggaattctaatcattgttagtcaaaattaactgtcaattaaacttaaatttcacagttatcagtgccagcaaatttaaatttgacactatgcaccttgtaaggttacttcaaccatgcccattcctcatgcagtatgggaggatctctccttggatttttcattgccttgccttcttcccaaggctataccatgatcctgaaagcctcgttatacaatggtcaagggtactactctc

SEQ ID NO: 217921 - DNA, 407 bp, Glycine max
agtcgccacttcattatgggtaacttgaccacttggatatgcgcatggcattgccctattgcactgtccactactgaacgtgactctattccagctactactcgatgctctcatatactatggatccagatgcttctcgagacgagctacacatccatgagagtaacattgttaactatctgacttacatgatgcgctactatccagctttctaaaaatcctacattgcatctcatggacagcatctcctaattacagactaggtcatacagaaaccatgttcaaaagcaccatgctaatagttttattacacccgttactaacgaatctccttggaatggactgtataaaggaatgattcattatctataggtgcgtcacattagctttatgtcacaggacatatc

SEQ ID NO: 217922 - DNA, 337 bp, Glycine max
  unsure (1)..(337): unsure at all n locations
agaacgcatgaacganaatgcttttcatggtgctccgaanaagggttgaggatggagaatcgcactaagaaatcactacgcatggctccaaactcgtgggtggaggacgcatgaacgaaaacgcaattcatggggctccgaaaaagggttgaggatggagaatcacactaagcaatcactacgcatggctccaaactcgtgggtggaggacgcatgaacaaaaacgcatttcatggggctccgaanaagggttgagaatggagaattacactaagcaatcactacgcatggctccaaactcgtgggtggagggcgcatgaacgaaaacgcaattcat

SEQ ID NO: 217923 - DNA, 362 bp, Glycine max
aagattcaagattcaagaatcaagagaagacttaatcaagataagtatgaaaaggttttttcaaaaactgagtagcacatggctatttctcaaaacatgtttaccaaagagattttactctctggtaatcgattaccaaattgctgtaatcgattaccaatagcataaatgatatgaacaagttttcaaatgaatttccaacgttacaattgattgccaaaagttgtaatcgattataatgtttttggtaatcgattaccagtgcctttgaacgttgaaattcaaattcaaaagtgaagagtcacatcctttcacataaaagctatgtgtaatcgattacactgatttggtagtcgattacc

SEQ ID NO: 217924 - DNA, 400 bp, Glycine max
  unsure (1)..(400): unsure at all n locations
agcttatggagtagataaacaaaagcttgttgaggagattactcgtgcctatgcccaccaaatatatattgatggattnttcaatggtgatcctcatccaggtactctctctctctctccctctacgtttgtgcttatgtatgcatgtgcatatgatgtaacacttccgattgttccatgtgctcatgaactattttggctctcttactggaatcatcataggaaattttcttgtgagcaaggaatctccacatcgtcctattttacttgactttggccttacaaagaaactatcaagcaccattaagcaagcacttgcaaagatgtttttggcttctgctgaggtntggtttggcttttgtgcttttcatgattatgtggatactaataacatcatata

SEQ ID NO: 217925 - DNA, 373 bp, Glycine max
  unsure (1)..(373): unsure at all n locations
ctcagcttcagtgaactanggagcagataagaaggtctcacccggtatgtcgaaagctagaaagaggagcctaggcaaaagttagggaaataaaataggaaaaacaaaatatgggcgtgttatcaaaggttttgtccaaaatctaaattgtaaaagtctctaatcaatatttgaaatgacacatggtcatgcttcattatcccaaacactaatttatcccttgttaccccttctgagccaaagcatatttgttttcttttaaaacaacaacaacaacaacaaaaacccgtagtagcaaccaccgctgagccggcgggaagagcaaggcacacatcatatgcatgaggtaagctctacgttgggcaacaatgat

SEQ ID NO: 217926 - DNA, 270 bp, Glycine max
  unsure (1)..(270): unsure at all n locations
catgagcaactangtgtgtcctactatgacttgagaaacaaaggtgatcaaataacaagcagagatttaaaagttactaggttgcctcctagtagcgcttctttaacgtcttgagctggacgcttgatggcttgtcggtcacggacctagtaccttgcttacctttggctctggacttggtcgcctattgctcggccatgggtcgtaagcaacgctctaacctttttgtggagagctgaggtgaactctagaggtgatggcggtgcgtct

SEQ ID NO: 217927 - DNA, 395 bp, Glycine max
  unsure (1)..(395): unsure at all n locations
ntgtgtggagcttcaatggtgaatgagggaggaagaaaagcaacgtgagggagagggagagagagcttctgaaaatgtggggctgagtgaagagagagagagttgctttttggttntaaataaaagggttttctctttttccattattttattcaagctctgccacatgtccctatatgattggagcaaaaagggcccactttctctttttgactgtgacccatacttagtcacaaaagtgagaaaaatctgacctttgaaacgctaaaatcctgcctcggtttgcgcgccgtttctctgattccagtttctcgcgtttctctgcgtccgccggggccagttttcaaaagcaagcaatatatatatcaaaacgctcagaataaaaccccgagcgt

SEQ ID NO: 217928 - DNA, 252 bp, Glycine max
tcccggcaacattgtttgtattaatgaattcaacattatccttgaatatcagtaaacgtttttgcttctctgcagcatccttatataccttcccatatttcttcatccactgctcatgtctttcggacatggatgcctcatggaggttgcgggacattacttgggaagtgcacattgagagaaggagcacaagagctaaaatgtgctgctttttgcccatggaacccatgtcttttctcaacaatgtatcaa

SEQ ID NO: 217929 - DNA, 382 bp, Glycine max
  unsure (1)..(382): unsure at all n locations
tatagaatatataatataagaacagtgactattgaagagtctatacatgtttcctttgatgagcctaatgccattcttgcaaggaaggattatttagatgatatttcagattccttagaagatacacatattcatggaaatgactctaaagaaaaagatgaacgaagcaatgaggattctcaagataatggggctagaggaaataatgaacttccaagagaatggaaagcctcaagagatcatccnctcgacaacattattggtgatatatcagaaggggtcacaactagacattctcttatagatttatgcaagaatatggctcttgtatctatgattgaacctaacaatatgggagaagtcatagtagatgataactgga

SEQ ID NO: 217930 - DNA, 260 bp, Glycine max
  unsure (1)..(260): unsure at all n locations
acttgtaggattcaatntgggaaaaattggatgagggcaagtgtgatttcgaaaatctgcactttatgcagaattttgctgtcaaatatgtgcagcagaattttggctttgtgcagaaaatgttgtgtatttgttggttctggaaagagtagtacagattgggttctggacgttttcttgcagatcccaacggtcacaatgtaaacttatgtgctagagactttcagaaaaattttcaagtcgatccaacggttaacgaa

SEQ ID NO: 217931 - DNA, 414 bp, Glycine max
  unsure (1)..(414): unsure at all n locations
tcacccttcgtcccaaacttagtccanacttatcttcttttaacttctcatcctctagccttcaccacttctctcgcacctctatttcccatctccttcctttctttttcgattccagttgctagtcattataggatctccattggagctcatgcttccaagaagatataacatatgtcaacctatatctaaacatgcaatccaacttcatataaattttttcataaaattagtaaatactcaacaaaatatcatggtggattattcgtacttccattatgatggttcgcttatcctctacgaccaccaaaatgggtagtgagtcatataccacctacatcttcctcactacctnctctctttgatgatcagtaacttatggcgtatgtggtatggttaagggtgtcatcattg

SEQ ID NO: 217932 - DNA, 633 bp, Glycine max
  unsure (1)..(633): unsure at all n locations
tcaccacttctccacnaacatcttcctgtttgtnnnngcanttcatatctctccactacactcctnntactcacaccccccccgacaactggggntgagttcctgtcgttgcagcgacnctnnanagtngacctgcaagcatgcnaagcttctacccctatntgtggctatagaatgaggggttatgatgtgtatataagaaaagcggcgctcaacgctttccttagggcgacatcctctcttcctctcctgcgaanacttgctggagcgaaataataccttcctatgatagaaaaatatcatagcgcgagggcgcttgccgtaaccggtttcgtgagttattacgcaaaaattctcgaccgttcttcaagattcatcggtcggtcttcgtttgtttgagtcttcaacgggtaaagacctccaaccgagcttttcaatttattctatgtacccgtggtcggccacattttcgttcatgtattgttattctcggtgtcattctctatatatacccccctttgacgaggtaagccatcatttaaggatttctcgcttaacggaaaatacaataacttcacccatcgctgaatggatcacccgtaatccggtacaaagaatccgaccgtcgcctcc

SEQ ID NO: 217933 - DNA, 188 bp, Glycine max
tccaggcaactttccaatacttatgttgaacaactcatcattagaattttgacattcgagccctgaatatcgattattgaagcttgacactcactcttggaactcgactctaactgttgaaaataatacgagaatcctgcacttctcgacgtttgtggatttgatacaatttgactcatcgtgaattt

SEQ ID NO: 217934 - DNA, 451 bp, Glycine max
  unsure (1)..(451): unsure at all n locations
agcttgtaattttcttattgcctttgcttgttattacatggttnttatagaattcctaatatggaataatcctaggaatattacaataaccgttttattgataagaattgctcagcaggatcacaattccaagcaaggcgatctgggaaaggatttgcagaagcttctgttttggcaggattcttcaaacgaagtcgtgaaggtaagtgggcctcttcaccttacgtttgggctttacttcgttatgcaccccctgttttgtaattcccacctccgagctcatctaagagctcatctattgtgggaattgngaactggtcttggaccatgacagcattgagggccctgtagtccatacagaaccttcagctcccatcatgtttccttacaaggaggacgagtgaggagaaagggcttgtactangttggatcaatcctttttgaagcatga

SEQ ID NO: 217935 - DNA, 312 bp, Glycine max
  unsure (1)..(312): unsure at all n locations
acactatgatactcagcttaccactgtccggttactccttgcccttgttgctcttcataactggcaccttcaacaattggatgtaaacaatgctttccttcatggngatcttaacgaagaggtttatatgaagcttcctccaggacttattgtggataatcccaaccttgtttgtcgcctttagcattccttatatgggctcaaacaagccagtcgctaatggttcacacggctctcgtcatttcttctctcccacagattccgacgatcttcagcagatcactcgtttatatatactctgataatgaccat

SEQ ID NO: 217936 - DNA, 371 bp, Glycine max
  unsure (1)..(371): unsure at all n locations
aatagggggagaagtgaagaagaaaggggttcagcttcttaggcacttctctctctctcgaaattgctgaggaaaattagttccatgaagaaaattcaagccgaggcgcttccgtaacgtttccgtgagtaattacgcgaagattctcgaccgttcttcaagattcatcgttcgttcttcgttttcttgagtcttcaacgggtaagtacctcaaaccgagcttttcaattcattctatgtacccgtggtggtccacattntgtttcatgtatttttattctcngtttcattctctttntatacccccttttgacgtgtttaagccatttatttaagtcatttctcgcttaatcntaaaaataaaataaatt

SEQ ID NO: 217937 - DNA, 307 bp, Glycine max
tattggcgatcagaatagccattccttggattatagggttgaacccaactcatgcttttaccacaaggttcatcaagtcaagttgaaatatggaagtaaccgtcttgctaaattggggcgaaagatgaatcgagtcacatcactgcttcgtctactgccaaacatatttaggattgttgatgtccttggtacttccaggttcaccttgacaaaacggatcatgttgaaaatctaaattgattcagccccatatcctgcgtaaaaattcgcaatacttcaactgtacatcattcgcatgcatccatgc

SEQ ID NO: 217938 - DNA, 428 bp, Glycine max
  unsure (1)..(428): unsure at all n locations
gctatgctgcntatattacaatagaacttccttcacctcagcagcanaatcaaccacagcagaacaattatgacctctccagcaacaaatacaaccctggatggaggaatcaccctaatctcagatggtctagccctcagcaataacaacagcagcctgctccttccttccaaaatgttgctggcccaagcagaccatacattcctccaccaatccaacaacagcaacagcccctgaaacagccaacagttgaggctcctccacaaccttccctcgaagaacttgtgaggcaaatgactatgcagaacatgcagtttcaacaagagaccagagcttccatttagagcttgactaatcagatgggacaattagctacacaattgaatcaacaacagtcccagaattctgacaagctaccttctcaagct

SEQ ID NO: 217939 - DNA, 423 bp, Glycine max
  unsure (1)..(423): unsure at all n locations
gtgtctttcatatggctatgaataggaatagcactaatctcttccatgaaagccactgctactccatcctcatagtcaaataggcgcctgctccacttcagatcccagctccaagtattctgagaaaagctgcccatcctggaaataagatcattctgctgcttgctgatcagaaaaagctgattatatgtctgctgaaggttgcagtcctcccccagccaattatctttccaaaacctaattntttccccacatccaaccttccatcccatattctgatggatagtactgaagtcattgcgctgatttaactttctaagatccctccaccatttagaatcccagcaatggactctaccattttgtagagctgaccacccttcatggttggaatttacaaccctgacccacagttgattctga

SEQ ID NO: 217940 - DNA, 311 bp, Glycine max
  unsure (1)..(311): unsure at all n locations
agcttcttatccaaggctcatcttggtggtgaagctccttcttccatggcttattccctagtggatggcgcctcccttctcctcttctcctttgccttccgctgcatctccatggtgaaaaatcaccattgaaggacctcattgaagctcaaagatccagcctccatagaagctccacaagcaagcttccatcatgtacccctgccaagcactttggagggccctcagttntgcccacaaccacaacccttgcatgttgcaatgggaagaatccctcctgctatggcagagaagggaaagttggatcatat

SEQ ID NO: 217941 - DNA, 85 bp, Glycine max
agcatgagagggagtcgccacttcattatgggtaacttagccacttggatatgcgcaaggcaatgtcctattgcactatccacta

SEQ ID NO: 217942 - DNA, 450 bp, Glycine max
  unsure (1)..(450): unsure at all n locations
agcttctatggaagctgaatctttgaacttattgaggtccttcaatggtgattntcaaccatggagttgctgcgaaagataaaggagaagaggtgagcggaggtgccatccactagggaataagccatggaagaaggagcttcaccaccaagagtgtcttggataagaagctttgagaggaagcttcaatggaggaggagaatgagagagaaagaggggggcacgaaattgaaagagaaaaaaagggagagaagttgaactttgaagtgtgtctcataagtttcacattcatcaaagttgtaacaagtgttacaaatatttctatttatagcctaggtcactaactaaatgaaattcactttcatttcatgtgaatctaagaggaatattccaaggatatgccanaggcatattagcatattccaaanatatgccaaagacatcttaaca

SEQ ID NO: 217943 - DNA, 375 bp, Glycine max
  unsure (1)..(375): unsure at all n locations
cataaacaaaaaagaattgtgtggttgattacacaatgactaacattatatcatcttacagacgaataaacaatttatgcacttagtcttttctctcaagaagaacaaagtgttntgtgagtttttttaaactttacaagaatttacacaaagaacttttacacaaagaatgaaataatgagcgcttcanattgtacttcatatcttcaaatcttttgttttatataggtctctttcaatcaagtatttgttgtctctaaatagacatatttcctcttttaagctcgcatctgaagaanatggtcattgggcattcgatgcacgtacttcttcatgttgagaaaccaattntcatcgttggtgtgtgaacactat

SEQ ID NO: 217944 - DNA, 386 bp, Glycine max
agcttgccaccattccagaaaatgacaatctttctacagaggaaaacactactaatgaaggtggcgcagcttttgttgatgctaataatcaaaacatttccaatgaagcccaagcaaacactgagcaagaaatggagaggaagtttaggcggtatgtatatgttattttaacatgcaggcataattaatatacacatatcaagaaaaattaaaattaggggcaaaatcatttatgtatatttttttaaaacaattgtctttaaatattttgtgatttcaatattaataatgaaaattaatgttcgtctgtaaatttagtctctaatcgtttgtttttctgtagctacaactatgaaaattattgcatgtgtgtgtatctaatataa

SEQ ID NO: 217945 - DNA, 297 bp, Glycine max
acagcagaataattatgaccgttcgagctactgatacgggccatgatggaggaattatcctaaactaagatggactagttctttacaacaacatcaacctgtccctccgttccagaatgttgctagtacaagcaagccttatgttcctcctacaatgcagcaacaacagctgtctcctcatagactacaggcaactgaggctcctactcaaccttacttataagagtgagcgaggcaagtgaccatccataatatgcaattttagcgagagacatgagcctccgttcagagactgac

SEQ ID NO: 217946 - DNA, 317 bp, Glycine max
agctctgagggtgcgtagcccaccatcttttcatagtagagtatcgataatgtgtctaccatcacgattatcgtctccctttccatcattgggggtaccacctgtgacgccagatccctccacctttggggtgtgttcttcgaaagatccgtccccttgtttgcacatgttctgtagttgcatcctatccggaaccatatcagaatagtactgatactgcctaacgaaggcaaccattaggtccttccaagtatggactcgcgaaggttcctcgttaatgtaccaaggaacagctaccccagtaagactttcttgga

SEQ ID NO: 217947 - DNA, 416 bp, Glycine max
  unsure (1)..(416): unsure at all n locations
ctcagcttgcttctacatatgatgttctagaataattgagtatcaaatgtggtaatcgattatttcgtcacagagagcttctaaatgttccaagcgcaatctaatcgattactaaatgtggtaattgattatctagagccacaaagccttccttcttctaaaatgggttatattatcgattactaaaactggtaatcaattaattcaatgactttagtcaaatttcagaaagaagttagttttgttgcttgttctaacactgtgtaattgattaaataaccttgtaattgattatactatgttgaactcattatttctaagaaactttgagatcnatccatctatctatctatcatgtttgattcatgttgaaacttttggcaagcgtaccaattgttgtataggtttacatttat

SEQ ID NO: 217948 - DNA, 350 bp, Glycine max
  unsure (1)..(350): unsure at all n locations
gctaagcgagcttaactntatctattttcttcataattcctgccgctcaagcactaanaatgactcgctngagaaaggcatggcaatgtctcttcattctgattatgacttagcttgcttaagcgcacaacatgccacacttaagcgagaaggctcagtttctttagctgacttaaattcctataagagaactccatataaacatcaaaaagtctaanaaacttcaaatcctaaggttcttatgtaattaattattcatacttcaacctaatcttaaggtagaacaaagctatatgtatcataaatgtcagataattacctcaaatcatatgtgaaattaagttctattt

SEQ ID NO: 217949 - DNA, 379 bp, Glycine max
  unsure (1)..(379): unsure at all n locations
tgctacccagctcgcccaggcgagctcagctctaccaagcgaggtangttgcttcctccagaagcaaccgccttctggaggaatattctggaaggcctaagtgggcctgattgctatttgcacccccattatttttaaatacaccccctcgctttttttggtgattctttttccgtaacgttacgaaactttacgaatttcgtaacaatgcttttttttctttccgtaatgttatgaaaccttacggattacgtagtcatccctttgtaacctttcagaaggtacagaaatttatgaattgtgcactaacactttcttttaatttccggcatgtcacagaacttcacgaatggcctaacgatggatgccaagtaccttg

SEQ ID NO: 217950 - DNA, 398 bp, Glycine max
  unsure (1)..(398): unsure at all n locations
agctnttcaaagccaatttcatcagagaagtcaggtactctacttgactcgccatcgtcgtcatggtcaaaatggccaatggcaagtggcgaatgtgcaccaactacacgtatcttaacaagctagttgatggagcgtccgagttccaagtactgagcttcctggatgcctacacatgatacaattagatccggatgcatgccctacatgaagagaaaatgacattcatctttgaagatgccaacttctgttatagggtcatgccctttggcctataacatgtaagcactacatactagagagtgatggaccatantattcaatagcaaattggatgaaatgtcgaggtctgcgtcaatgacatggtcatcaaatcacataccactagcccacatgtg

SEQ ID NO: 217951 - DNA, 327 bp, Glycine max
  unsure (1)..(327): unsure at all n locations
agcttatgctcggatatcanaagtttcgttatgagcaaggataacttcttatgtacttggatgtagaanaaataacaataaagtaaatccatgtttatgctatgagaaacttctcttataattgtaaggttccatgaatctaaggtttttataaacactttggtgaatggagaaaggttagctctaatctatagcgttttggctaaggaagactattcaaaatctggggtattattcttaagagactcaactcttctaatcttccatctattggtggcttctcttccttgcaaggggctccttcaaatgaagatccttaaatatacc

SEQ ID NO: 217952 - DNA, 390 bp, Glycine max
tctccactttacatccaacgcatgagttctagtcaggataagagcaggacatcacaatcaggacggatttctttcaaggggtatttattttctttatagtttagacaaaattcagctctcatttttgaactatacttacttaactgactgctaaaaaatatattttgaattgaaagcttctgtgttttgcatacatttgattcacaagatatatctcctattgatttattgaagaatgtttcccttacacatttaaactcattatttgtgcgtgaaatgttttccattctattatagtttaaaagggagatctctgagttctgcagaggagaagtccatagttgaacctgaggttttgatgaccaaggaaatagagtggtctaacaattt

SEQ ID NO: 217953 - DNA, 383 bp, Glycine max
agcttccttgctagcctctgactaccatgttctctgctttagtcattgacattgccacagaagactaaattatggacatccaacaaacagacccaccttcaaaagtaaagacataccttattgtagacctattgtaccctttaggtaccttaagatctacttcaatgctttacaatgttgctttcatgggtcaaacataaacttgcatacttgacttacaatgtgtcaaatctgatttggtgcacactataacatacatcaagcaaccagctgtactgacatataagaaacctatgacatgtactccaccttagtatctgtcttcagacgttgatctaaaaaaacttaaaagtgttttatttcaaaatcacaagtggagttat

SEQ ID NO: 217954 - DNA, 443 bp, Glycine max
  unsure (1)..(443): unsure at all n locations
ntagatacaaatacagcgtgtattcttataccagcagaattttctgccactgaaactcacaagaattgttaattagaaattcccacaatatgaagtaggtgtgtggaaacatatacaattattatattcaagataacaagaaaagtattcaaggataagttatctatctttaatagccattcttttactatataattcatatgctggacaagtgtctattttttgctcatacattctgtataggttggcatcctttccaaaagttctaccttgataatatattccatcaactacacataaacccctaatacatcataagtttgtccaaagtctcagactggtgttcaatcattgctgacataccaatttcaatggtcacaaagaagattgccactatggagaacaatggacacaacttgttcttcagcattccatttaacata

SEQ ID NO: 217955 - DNA, 399 bp, Glycine max
  unsure (1)..(399): unsure at all n locations
tacttatgtggcagggcgggccttcttcactctcttgtctccaacgcgagctntgaccatcgctcttctttgccgcgatgcttctcttcatatccgcctgagcgggcttatagcctaaaccatacttcccactatttcctttggcatttatcaggctagttatgccgtcgttgtctttgcctaaacccattccgggttcgtaaccgttccccaacataactcgggccatcattactgctgcatcggacaggcaaggctgcccaaagaaggagtccacggaggaaatgctgaccacctcaaaagactggaaagcgggttctaatgattcttctgcggcttctacataaggcatagaggatgggcagctcaccaagatgtctctctcgcctgacacgatga

SEQ ID NO: 217956 - DNA, 314 bp, Glycine max
  unsure (1)..(314): unsure at all n locations
cccacacaacacattattttcagttcgggacgaagccaatcaatattacaaccccttgtcatttactgtcacacacataagcactattggtgaaatatttcatggttaatatagcgatagaaattttatttctaaaagcctgctgaatataaactaaaaagtgttttgactaccgaaaaaatttatatttcaatggaaantctcaaagtacttcatccaatagcttaaagttgattctatgattattatattgaacaactataaaaaagtaattttgaatgatttatatctaataagaatatattcttgcattg

SEQ ID NO: 217957 - DNA, 272 bp, Glycine max
  unsure (1)..(272): unsure at all n locations
agctntactgggtgctggaaagcttggtggaaggtttatgagatcagcttctgttaatgaattcttctaaaggaaaagttttctttcagggtttataagatactctacagtggcagggcacttaggaggcacacaaaagagaaagtccttgttcttaaagaggcttataatttgagttccaataagttttcaaacaataaaaatttccatatttggttatgcatcttatttgataataaatcagtatttgaaatattaaatataacaattta

SEQ ID NO: 217958 - DNA, 429 bp, Glycine max
tatacagatatacatattttccagcaacatcttgatggctctattcaatacaacatacatcacatggaaatattagattacagccagacacaatgcatagatgctactgtgttgggtgctttgctacattgccacatgattttctggtacaagaactgtttggaggggatcaaattcaataaagaatgtccgaatcttcatcggagcaagttcaaccaccaacttcgtaggatcaacaggtcctcctctcaccaccttcggctcttcagaggagccttctaccttccaatctagcttcctcttttccatttgagctctttcttgattagcagacaaactcatctctgtcactttattgatctgaaaagattgagtagtcaaaaggaaactatacatgagtacatgatgtgtgaaaaatactaacttgga

SEQ ID NO: 217959 - DNA, 434 bp, Glycine max
tatgagttggtcgcgcgacctaattcaacactccgtcgtatcctaaataaatcttctagagatagctgataaagcattcatttccactatgagcgaggatgttaatgttacacccatcctctcttatactatgtcctcacctctctcctacattcacctccctttctcgccaatatctactctcatatcactagttcgcactgtacatctcttcgctcctactgtccgcgcaccgcttctcctccgttcctacatctgatctcaccgactctccctttcttttttatccgtccgcctttccctcctcccaccatctcgcctctctgtacttcttcgcgctcactactccgctctctcctctcgccccttctttcgcccacagtcatcactcgcaatcctccaccttcctcccatcgctttccgtggggcgcccg

SEQ ID NO: 217960 - DNA, 440 bp, Glycine max
atcttcttgctaagccaatctgctatcttagtgagcgtccgctaagcacaacactcatgggctaagcgcgaggaagactctggaagaagatgagttgtacaggttcactaagcacattgctttatctcactaagcgcaccacttcagtccatccactaagtgagaaaggcacgcgctaagccaaaattcactaatgtgcgctaagtggttcataattgcgcagagcgcacgagcacgaacaaggccacctatttaaaccagaaatcagattttgtgaagggagtttgggctgggattcagagctttgcatgtctagagattctagagagataaaggtccaagttctagagagttctgagagattttgctgtgtgaagatctgtagagactaaagctggaagcatgagcccggttgagagcttgagatgagcttgtgagtg

SEQ ID NO: 217961 - DNA, 405 bp, Glycine max
  unsure (1)..(405): unsure at all n locations
agctggaatgctagatggaaccagaacatgacaaatacgcgagataacctcctcagatntcagcctccaaatttgcggttttgatagtggacactcctatagaagttttttttccaaagccacgagtcaagtctatcttccaataaccgagatccatttacctcctccaaaaacgtctctaccatcactctctcccactcaaaccaatttcgtctccaaacaaattgccacacctagactccttccacccactcgccactctcccctggagtgctctctttntgctccgaattcacaaaaagctgagggtacttctccccaagagtgcattcgccctaccacttatgaagccacgtacacacaataatgctctatcaaacacccgaacattcctaattcctaata

SEQ ID NO: 217962 - DNA, 396 bp, Glycine max
tcaatggagctggcatcatttactcagccccctcacgcctatttatagcttaaaagggcacttggtggacttgcaactcgcccaggtgagttgttgcttcactctaaagtaacttggctcgcccaagagagctggttacttcaaccctaagccatttgggggcccaggccagccagaggctatccaaggcgagccaaggtccaaaaaattgcttggaatgacccttttacccctccctttgggtattatctgcatccttaaccaaaacgtcgaacgatctttcgtcttgcatggtaaccgatgtcgaacggcttaattcggctagcgagaatcaaaatatccacgaatgatagtccctggacgaaattagggtctgacagtagcaaaggatatata

SEQ ID NO: 217963 - DNA, 253 bp, Glycine max
gtgcataaaaacaagctgaggaagtgcaaatccagactaaaacagtggagtaaagagaatggggatgtcaatatcaacaaagttcatcacctgaggcagaagctaaatgatattgaagacaatgcctttgatagaactttgtttgaggctaaacttatgcctaagaactttgtctgcagtaaagtacaaaccatttggtggaaaaccatgtcatggctgcatattaagggtggcttttcattaagcccaaagc

SEQ ID NO: 217964 - DNA, 130 bp, Glycine max
agaaactacgctgctaccatggagctcctaaatctcccacactgttgttgtgtccattcttggatgaccttgatgttgtcagggtccacttggaccccatttctaccaacgacaaaccctaagaaaaata

SEQ ID NO: 217965 - DNA, 179 bp, Glycine max
  unsure (1)..(179): unsure at all n locations
agctntgcggantnggtcttcgctggtgaaatgatcgtagtgggnctaaaaagaggcaaatctgatcatcatgctttgataaacgcacacaaaacacgagcatgtgaagacagtgggaatgggggcgaaacacatgctgtgactgccactcctatacagccatgtttcctaccaactca

SEQ ID NO: 217966 - DNA, 162 bp, Glycine max
aggctacacaatcggagaagaacttgacgcctgcacaaggtgagagcataccgatccatgcacacggccgactccaggtgggaagagtcgagcacccttacactagccactctttacgcagatactcgagcatactcatacgtgattctatgctcgcgggcc

SEQ ID NO: 217967 - DNA, 333 bp, Glycine max
  unsure (1)..(333): unsure at all n locations
agcttacaaaaccatgctcatatgtcattgaggcatntcaccgagcacttgtgngcgcatgtttggacataaatngcaagagaatgggagcaatgtggcatgccccattgcttcagaatacaacctaagcctaaggccttttcatttcaatcctcaattcaagaaaacaagcaccaaagcaaaccaaaactgccttacanatataagcatgttcttacaatttaaggtaccaaaagatgaagaaagcacgtcaatgtgaaacaaaaacatcaaggatgaaatacttactttgtggagttgaatgaaacacccaaaacgaaagcaaaacgcgat

SEQ ID NO: 217968 - DNA, 352 bp, Glycine max
  unsure (1)..(352): unsure at all n locations
tcacgtactgtctcgtggggggtatgaactgctngacaaganacttatggaggagaagagcaagcgtggacatgaggaacattcgtgtactgaaagcccaacactcaacgtcgacccaccatccccagttgcaagacacttgaagtggaagatcgcccgcactaagcggcatggccaaatgacgtctgaagtggcacaagaaattgtagacaaaattgtcagttcatatatttttttggttactgtcattggcaaataatggttagctaacctagtcaaatttgttttattcaaattcaacaattgtatatgcatgcaggattcattacaggaacaagcaacacaggggagt

SEQ ID NO: 217969 - DNA, 443 bp, Glycine max
  unsure (1)..(443): unsure at all n locations
aaaggtgttttgatgataacatatgatgacaacanaagatgatcacaaaggtgatgaacaaaaagctcaaaagatcaaagaacaactcaagtgaatcaaagaacatctcaagtgaatcaagaacaagtcaagagttcaagaatcaagaagaattcaagactcaataagaaagcctagaatcaagaatcaagaagaattcaagactcaagaagaaaacctagaatcaagaatcaagattcaagatctcaagaatcaagatcaagattcaagactcaagattcaagaataaagaaaagactcaatcaagataagtattaaaattttttttaaaactttgaatagcacttgagttttttacaaaacctttaccaaagagtttttactctctggcaatcgattaccatattgttgtaatcgattaccagtagcaaaatgacgttgag

SEQ ID NO: 217970 - DNA, 307 bp, Glycine max
cctaaagaagctagagcttagctacacacacttctctaatagctaagctcacctccttgagatgagaagctagaacttagctacacccccccctataatagctaagctcaccgccatggcaaaatacatgataatacaaaaaaaaaagcccctactacaaagactactcacaatgcctcgaaagacaaggctaaaaccctatactactagaatggccaaaatacaaggcctaaacagagtgaaaaacccatactaatatcgacaaagataagcgggctgatacttaggccaaggcggtaaaatctac

SEQ ID NO: 217971 - DNA, 412 bp, Glycine max
  unsure (1)..(412): unsure at all n locations
tccaacaactactatgcttaagatcaaagagctgattcttcatacatccccacactcttacgcaggttatatcatcgaagaccactgcaaagacattacgcttcccatcgctactttcatggcgcactcacgttctcctctccgccttccgactctctacgccccctcccaccttttctccgcttcctccctctctcantcacattctcccacgctcctctaacgcacctacccgtcctccgccccgtccactccctgctcctcgtccttctcccccgttcccccactcgccaccgcgccctctccttctatccgtatcgtaacacgttcgccctgacctctcctccgttcctcctctctcccgccctcccctatcactctcccccctctccgggggggcggcggcgcgccg

SEQ ID NO: 217972 - DNA, 194 bp, Glycine max
gctgaacctttgtgccgcacgttccgcaactcattttcactcttaagtcctaactctctcttcctccctttccctcgacctacatctgcccgctctatctttcttatctacacatatactccgttcctacattctccgctccccttccttcctctttccttcttctcctcccctccgggggcggggttgggccg

SEQ ID NO: 217973 - DNA, 370 bp, Glycine max
gagaacaatatctgtatgaacagagaagagctgtgtatccacgaaaagctgtttagcacaagacaacaaaggagaaatccgcattagtaatatgagaataaatacctaagaacatgaaggcaatgcaaagatagaaatgtgtcaataaattacacagataagcatgcctaaattatttaatcacgctgacaaataagtactgtactacatttaatccgagtataggtataaactactgctaattatacaaattcatttggcttcctacacagatatgcagtagagaaatcaacaattacatccgtctacacgtcagaaaaagttaattaccctagcaagaactacatggaaatccagctgagcaagtagc

SEQ ID NO: 217974 - DNA, 516 bp, Glycine max
  unsure (1)..(516): unsure at all n locations
nacacacgaaaggcaaaacacgtaatgaatactctcaacatgattcataaactnntacccacgagaaacnnnnnnnnnnnnnnttnggacgatcatgacnacngtggaacnnncnnncnnnnnnnattnntntaaaaaaccttttctttttatagaanaaaaaaaagggagggggnaggaaaaaaaannaaaccccacccgcaccaaccacaaataggaagaaaaggggagagtaaaacaaacaaacaaacaaaaaaaacacaaaaaacaacaccaaacagaaagccaccacgacaacaacaagaaaaaccaaaagccgcaccaaccaacaccaaccaaaaaacaaaaagcaagtaaaaagacaacgcacagaacacgaaaaaccacaagcaccgacgcaaaaccaaacaaaacaaaaaaaacaaaccaaaccaacgcaacaaaaaaggaaacctaacacaacaaaacaatcacacaccaaacaaaacccaacaaaacgaagggagaaggagggca

SEQ ID NO: 217975 - DNA, 167 bp, Glycine max
  unsure (1)..(167): unsure at all n locations
gaaaaggcagcccacagagggcagacacaaagcaccccccccaccanacgaagaaaacgggacgcagccctacgggcaccaaggcaaaccccaaggcatggaagcagggccaggacccacccccacaatgaaagcaccccaacgaggccaaaaaacgacaccacaac

SEQ ID NO: 217976 - DNA, 304 bp, Glycine max
  unsure (1)..(304): unsure at all n locations
cgataccgagagaaaaaccgggaacttgaaaaattgagaacccccccccgaacacaaaangggaagatggaggaccaggtcaacccggcacccccccaccaacacccgagacaaaacaccacaccacacccacacccccacaaaacacaccaccacacacctnaaaaaacacaaaacaaacccccgcccccccaccccaccccaaaaccaccaagcccaacaacccaacccccatcaccacacaccacaacccccccccctcccccacacccaccacccacacaacaacaaccaccccccacac

SEQ ID NO: 217977 - DNA, 180 bp, Glycine max
  unsure (1)..(180): unsure at all n locations
gaggttntgattgatcaaaaagaagaanctacttcataccgatatgcccttaggcacggcaatacataacatagaaatcacanctcgaaagggtggaccaatagctagagcagcaggtgctgtagcgaaactaattgcaaaagaggggaaatcggccacattagaattaccttctgggga

SEQ ID NO: 217978 - DNA, 52 bp, Glycine max
  unsure (1)..(52): unsure at all n locations
atctttagagacgantcgaggcatgcaagcttgtcttaaagaaaatgataga

SEQ ID NO: 217979 - DNA, 477 bp, Glycine max
  unsure (1)..(477): unsure at all n locations
nggtgtgtaatgatcatgagcattgaaactaagcttgccttggttagacatgattgtgtacatgattcgcgacnggtagtattcaatttgcgaaaaattggatgagggaaagagtggttttcgtaatccgcctccaggcagacaactatcttgaataaagcggtggaataaacctattgggcgaggcggcccaccgcgctcatgaatcataccccgggatggccgccccaatctactcgtgaatttnagaaggggacatatttagatcaacgtcttcatctcctctctaaacctctcgtatacattcactctccctacacctctcccatttatccttccacacccccctactcacctcattccactctaacatagctcctcgcttgcgctaatccccaccctcttcctcctctcccacctattctcctctgatctctctctccactcctcctccactaactccacgctggcgctgac

SEQ ID NO: 217980 - DNA, 440 bp, Glycine max
  unsure (1)..(440): unsure at all n locations
cttgtgtgtaaagagtcacaacttanaattcttttttcaagtctaaagagtcacaactctttagaaaaataattttgtaatcaattacaccattttaataatcaattatcagtaaggaattttcaaaaataactcccaacagtcacatctattcaaatgtttttgaatggccatcaaaggcttatatataggtgacttgggacacaaaatttctcaagagtttttactgcacaaagagtctcatcctctcaaaaactaaattatcttatcctctaaaacattctttggccaaacacttgcaaattcaataaggaatcttgagtgatcttcaattgttatatctttatcttanaagagagaattcttcttcttcctcttcttattcaaagagattgattaagggaccgagagtctcttgaagttgtaaaaattcttgacac

SEQ ID NO: 217981 - DNA, 357 bp, Glycine max
  unsure (1)..(357): unsure at all n locations
gctacacaaatccngtctaatagctaagctcacccccatgcgcaaaaatacatgaaaataaaaaaaaagctcctactacaaagactacccaaaatgccctgaaatacaaggcttaaaccctataatacaagaatggccaaaatacaaggcctaaaagaaggaaaaacctattctaatatttacaaagataagtgggctcatacttagcccatgggctcgaaatctaccctaaggctcatgagaaccctagggccttcccttggatctctggcccaatttacttagagtcttctatccaatgcccttacaaggtagaattgcatcagtagggtcggtgctgcttaccctcaacgatca

SEQ ID NO: 217982 - DNA, 328 bp, Glycine max
  unsure (1)..(328): unsure at all n locations
cccttaaaaaggggcctggttgactaaaactattatgcttttcctagaatgtaaagtgtaattgcacatattctgataggagttacaaagaattgatggccaattgcactattcttggaagaggtaaggctcgttataacaaaaagcttgagaaggttaaagagaagatcacaaaactgaaggtaagtatgctccagaaatacattcaaaactgcaacagctcttgaaccaaatacattcanaacaaaaaggcattatcgaagcaaattcaattgctcagaattatattagaaagcttatggcagaggagcatgatttgtctanaact

SEQ ID NO: 217983 - DNA, 317 bp, Glycine max
  unsure (1)..(317): unsure at all n locations
agtaccaagaagagatacgnctagcgacgtgttatgagcatataatcgccgacgaatatgcccaagtatactcggaaaaagaggctagaggaacggtgattgactctttacaccaagaggcaaccatgtggatggatcggtttgctcttaccttgaacgggagtcaagaactttcccgatagttagccaaggccaaggcgatggcagacacctactacgccccgaagagattcatgggcttctcggctattgtcagcatatgatagacttaatggcccacataattagcaattcgtaggatacctgtatggtctctc

SEQ ID NO: 217984 - DNA, 266 bp, Glycine max
  unsure (1)..(266): unsure at all n locations
agcttgaggaatcttangaaacttctagagactctgttattactgctggattacacacgtgagcccgcttagaggtaagggatgcgtttatcgcaattggggttagaatgaacatgtgtagggatccttaggggatctaattgggatttattttgggatgtttattgaattatagtttttcctttatggttataaatacgatattattgtgtttgacggaccaattgatgtcccgatgtgaattggttgataaaattgagtgctct

SEQ ID NO: 217985 - DNA, 329 bp, Glycine max
  unsure (1)..(329): unsure at all n locations
taatatcaccaggaactatcacattaacaaaatcacagcctctaagatttcgacanattattaggtagccttgaagcattatgtttttatgattctaatctaccattctctntatatataatacataactatattttttaatttgtaatttatttataatattcaattatgttatgtaaaaaaatagttaaaataattaacattataatgattttagactatctaataatttctagtaagattttaatgtataacanacctggaagcacagaaggctaccacataatccgtcccagaacaagtgaaaatactagttggatcatcataag

SEQ ID NO: 217986 - DNA, 430 bp, Glycine max
  unsure (1)..(430): unsure at all n locations
tgatccttcacaaaagttctgtgttctagaacattctgtccacaatggagggtcacaatatagtaaatgatgctcagtgaaatttatggcgtgatggtcataattcggttttaaaagtgtagcattgatagtgccgttgttagactaataaaattatttgaatgaatcaactaacaggtaaagcatagttgcggatgaaagcaaatggtcaaggacanaggtgacccataaagaacaacattntacttactcattcaacaaatgcatattaaactccatagtaccataactatgacctccagatcaccagtatgttataaaggtttttccttcttctaatgtgaaaagganaaacaaccttatatacttataaatatcagtttaatagttccatacttattcatatattaaaataccttnatagtatatg

SEQ ID NO: 217987 - DNA, 131 bp, Glycine max
gcttcttctctcttccacgtgttttcttctttctcttctccaccattgtgcctttgaagctcaaattcttctcatttactcaaattgcaggagaaccattttcgagctgaagccacctctacgttgggggc

SEQ ID NO: 217988 - DNA, 472 bp, Glycine max
  unsure (1)..(472): unsure at all n locations
ctacattcanatgcaaggataaaaagacttgattgaatggacctctcatggtctcaagtgtgtttacaactcaataatcatataaccttcagataaactttgcttaagaaacaaaaactgaggtttgtaagttgtaaaagttcattcaaacatttattggatctgagaacacaaggtgggtatatatagagaaaatagttataaccatctgtaattgattaaattggcaatgtaattgattattacgtgaaagtaatcaattatattttccaattaatcgattaaagtgttcttccccaattctagaaaatataattgattattttcacataataattgattacattgccaatttaattgattaaagtgttcttccccaattttggaaaacattcaagaacaatgtaattggttaaagttttcttaatcacttctaggaacactntcaagaatgatgtaatcaattactata

SEQ ID NO: 217989 - DNA, 304 bp, Glycine max
agcttaccctatttataccgtgtttgaaagagtggtgtaatgattctgcagcaatttgtgtttctttagaattttcaatttagtccttgccacattggactcaaacttgccacattgggttgcttacgtggactgaggtgtgccaaatagacatttgactaacggaataaattagattttaacagcaaggacttatttgcataacggatgtaaagatagggactattttgaattaaaagttaagttaaggactaatatgcaaactgggtacaatcttaaggactaaatagcctattcactcgtc

SEQ ID NO: 217990 - DNA, 469 bp, Glycine max
  unsure (1)..(469): unsure at all n locations
ggtctctgccagtgaaaggatcggtgtgggtcttatataaggcaaatttagtcatcctgcttggacgaatgagaaaactggggcaaatgaagagggtgaggatgaaggaaaaacccatgctgtgactgccattcctatacagccaagtttcccaccaacccaaaaatgtcattactcaacccttctccttacctaccgcccatttatccacaaaggccatccctaaatcaaccacaaagtatgtctaccgcacttccaatgacgaacaccacctttagcacaaaccaaaaacaccaaccaaaaaatataatttgcagcgaagagcctgtaggattcaccccaaattctggtgtcatatgctaacttgctcccatatctacttgataatgcaatggtagccataacccctgctaggttccctcanacccccatttttctgaggatacgactcgaacgcaacatgtgcata

SEQ ID NO: 217991 - DNA, 406 bp, Glycine max
  unsure (1)..(406): unsure at all n locations
gccttttcattggggcacttgaaaagaattttaattacacttacatgatatctccatttcccttcttactcttttttttgggcaatggctagtgatggtcagattcaaatacatgctctacggatctcattttcagaatacacaaaacaatagttatagtaattgtaggtataaattttttaaaaaaaaaactatttccatatatttgtgtagaaaaggaagaaatttgcagaacaaatttgtcgtggctatcagtatttacagtataggtaccctgagaaggattnangacttacatgatactcacattatagaaaagtaagacttttaagaaatctacaccangaaccaanacccaaaccaaacattccccccccccccccctaaaattaggacgaaataaaac

SEQ ID NO: 217992 - DNA, 385 bp, Glycine max
  unsure (1)..(385): unsure at all n locations
tgtctcagcgtttatgcgagacagagaccaacatgttagctattatcgccaagtaccaagaagagttangtctagccacggcccacgagcatagaatcgcggacgaatatgcccaagtatacgcggaaaaagaggctagaggaagggtgattgactctntacaccaagaggcaaccatgtggatggatcggtttgctcttaccttgaacgggagtcaagaacttccccgattgttagccaaggccaaggcgatggcagacacctactccgccccgaagagattcatgggcttctcggctattgtcagcatatgatagacttaatggcccacataattagaaatcgttaggaaacttgtatggtctctcagaccttgactagatac

SEQ ID NO: 217993 - DNA, 400 bp, Glycine max
  unsure (1)..(400): unsure at all n locations
aatactccgcgcatggctctttgagcactatcttcatccgttagtccccctcccctgttcttattttagttttaacttgcggtattacatctaataattgtttcccaaatttcatttgctaccagttatcctaaggattcagagaaaattatgctagcaaggcaaactggcttaacaaaaaaccaggtacaataattaatggtttctaaattgtagaacattgtatgtataagtacatgttcgggaatgattaatcgtggggaaataatcactttttcttacactcttacaagctgatattaattgtatgcccgaaaatttgtaactttacaagaactctttaaagttatataaccatgatnttctgagtgctacattgacaattctaaatgcatcatga

SEQ ID NO: 217994 - DNA, 215 bp, Glycine max
  unsure (1)..(215): unsure at all n locations
catatcgncacttaagcatcggagtactttgctctacacagcccttcacctcgtcgtaacagagacatccatgcgagctcacgagtaaagtctgataccccataaaggtctgacaccccatgttggtatagtcaatacggatctgccgagatctcatatttaggtatgaacaacgtgtaagttatttgcgagctgcagcgagaagcctacattat

SEQ ID NO: 217995 - DNA, 162 bp, Glycine max
  unsure (1)..(162): unsure at all n locations
gcatttcattggctacacactctccaatctcnttcttctttgacccacctatatttgtcaggatgcacactccctcactataatgaaccattcttgctcaacttctcatctctgcaaactctccatcttttccttactcgntattcccctgccatttctttt

SEQ ID NO: 217996 - DNA, 449 bp, Glycine max
  unsure (1)..(449): unsure at all n locations
caatagtgatggtctaattgtcacttacatctaanaatatttatttcatgttggcgtagtgaacaatctaccgctattttggcattttgtcgtagcgagaaataaattcaagttctatgttaaggtaaatagagacaaaataataccctaatttatgtcatgtcttatttcttatttaagatatttatgttttttttacatacatattttgttttctttcctttcaatttcttcataatcaaattagagaaaagaaaaaatccaataattttcttatatcattgaatttatacattaaaatatcaattatgtgaatattgtgacacccatttactacatagttaataattaaataaacaatttatctaanaatgaattattgaatttaagactttcataaacatgtgacaaatgtcatcacatatgtaactcagatatatactaaaact

SEQ ID NO: 217997 - DNA, 291 bp, Glycine max
  unsure (1)..(291): unsure at all n locations
ttaaccaccgacattgtattattgcattttctgatttattatgtgggtttactgcttgcatatatnatttttggncaaaacttaaagggctaaatatgtttttatccttcatatatacgtgacttttacgttngttcactcatacatttttgttttcattgatttcttaataaaatactaaatttattntaattttcttaataatttgtttaagtcttcataaataaaaaattaacaaatttatgttaattcctgacaaatagtaaattttatttaatctcgactataaca

SEQ ID NO: 217998 - DNA, 479 bp, Glycine max
  unsure (1)..(479): unsure at all n locations
tataaagtttccagacacaatctaatcgattactaaatgtggttattgttatctcgagccacanagtcttccttcttctanaactggctttataatcaattactaaattgataattgattaattcgatgactttagccaaatttgaaatagaagtgactttagccaaattaagcaacacatacaccaattaaccccttgttcattaagcacaaacataatttaagcacataggcaattaattgaacacgaagtgtgcacagattaacagaatgcatgtgggttaattggtgaagggaaaaccgataggagagcaacattaaaaatagaacctcanagagagttacgcttcttcctcagagggaaacaacactagaaatttagccttccataagttcaatgaaagcaganaacataaatgaaactaaaggcagaaaacataaatgaagctaaaggcagaanacaaaaatgaaactaaagg

SEQ ID NO: 217999 - DNA, 388 bp, Glycine max
agcttgtagaggatgcttcaatggtgtgttttatagaatgagagaaagagagaggggggagcacgaaattgaatgaagacaaagggagagaagatgaactttgagttgtgtctcacaagactcccattcatcagagttacaacaagtgatacacatgcttctatttatagactatgtagcttccttgagaagctttctttacagaacttccttgagaagcttttttgagaaaactttcttgataagctcaagtttagctacacgcacccctctcataactaagctcacctccttgagaagctttcttaagaagattcctaaagaagctagagcttagctacacatacctctcttatagctaagctcaccttcttgagatgagaagcta

SEQ ID NO: 218000 - DNA, 438 bp, Glycine max
atgttatctatatttgttgaatgtggtgctccataattataatcgtacttcatagtggagatattttgctggacttggtcccgtgggggttttccacgttaaaaatatcttggtgttattcttcttctcttactctccgaatttatttttcttattgcccatctaaatcacatagagagggaaatttattcttggtattctccaacacttatggtatgtagagtataataccctagtgaaagcaaatatatgtaacaaaaaaattatacaacaaacagatagatggtcatttgaactacttagcagtatataatattctcctgtgtacccatagcaagcacttgcctcctactacttctcacatgtcgcacataacattgtctaaacacatttatagagccactctttcttataccacactgccttaatgaagaagca

SEQ ID NO: 218001 - DNA, 230 bp, Glycine max
  unsure (1)..(230): unsure at all n locations
tctaactntctaagttgtaattgcagttcagttatgatgacatcngattattgcctattggtaatgactaatgaatggtatgcgccatgttttctttcgcggcggtggngagtgttcaaacggcgccacttataaagaaggggctaatgggctatatatgcatcagtgcctgcatctgctggatccaaattctatcatatcatttttgctggcacctttctttctcgtac

SEQ ID NO: 218002 - DNA, 569 bp, Glycine max
  unsure (1)..(569): unsure at all n locations
aattgctcattgagtngccgngactcctctagaaagtcgacctgcagngccatcgcaacgcttnacgctacaactggctgcatgcatcgcataaaagaataacatttataacttttgtcntcagcttcgatactacgctacagtagcgagatctattatggttctcatcggaacaaggtgctactaagacagtcatctaacctatatattcatcgatatcactggaccaactcctactctcacgttagcatcgactggcgagctatactagctgtggaaaatggattctactcaaaaggtagttagagaacgcgactaaccgtgcgctacattatgcgataagcctatgttcctgatgcaggacgcttgaggaagaagatctaggacgaagctcatcatttctttacaccactcatacgagctctagtagaatgtatcaagacttataggagttttattggaagggagggatgataaggacgtacctgaatctgtatctaaatgcctagtatgtcagcaagttaaaacagagcatcagaagctcgtaggttngtttataaggaatgact

SEQ ID NO: 218003 - DNA, 248 bp, Glycine max
agctggcttgtggagcttctatggaggctggtatttttatcttcaatgaggtcctttaatggtggttttccaccttggagatgcagcggaagacaaaggagaagaggtaataggcggcgccatccactagggaataagccatggaagaaggagcttcacccccaagatgagccttggataggaagcttggagaggatgcttaaatggaggaaaagaaagagggagagaaagagaaaggcgggagcacg

SEQ ID NO: 218004 - DNA, 399 bp, Glycine max
  unsure (1)..(399): unsure at all n locations
agtatgtctgatcattaatgatacactatttttcatacacattgtttcaagcaatgactaatttattcaggtgtctctgctttaatcgattaccatgtgatataatcaattatttctctttctttaagtaattcagatgtggacaaaaacactntaatcgattactatcagtatttaatcaattacattgttcttgagttggttccagatattgggaagaatacttaaatcgattaacaagataatttaatcaattacttcattgaattaatcgattacctcgtagatttaatcgattgcaggcggttataacagtggtttctataaataactagcttttgttacttaaaaaagaattggagggcttcaaataacaaatatggtctaatgagcaagatc

SEQ ID NO: 218005 - DNA, 284 bp, Glycine max
  unsure (1)..(284): unsure at all n locations
aaaatgactaccctataagtaactctccaattcaatacaactattgaaacccagactatcagacctacctgctgatcagctacactactattgaagctgtttttgtcaggttntggtaaaagatgaaaaaaaacccagtgagaatagcagacaacctacttcaaacaaatcaatgagcttttgattcacattttgatttgtgacagctgaatctagtatttcatcacacaagcaaactctgaaaaataaattatgagtaacaatccaaagtaaaagcgagtaac

SEQ ID NO: 218006 - DNA, 400 bp, Glycine max
  unsure (1)..(400): unsure at all n locations
acttaagtgattattttataattttaatagataaatgactaaattatcagttaanaataaaagttaaagaaccaaatgagtaatntaatcaaataattgtgatgtttgacaacactcacaagacttatatattgtaattntgataattcattaagatataatggataatattaattcttctcactttttgcattaaaacattctcactaattatttaatcttttctttttaacataaaaggcaaaacctcgctagatagagagagaggacttaaatttgtgttgataaaatttactgtgaagcttattaaaatatttataaaaatcataaatcattttaacaagcttaacaaaatacatactcattattactataatcaaataagtttcatacaaactcc

SEQ ID NO: 218007 - DNA, 459 bp, Glycine max
gagagatcttcattctggtttaattgattactgattatttgtttatcgattacactattcagttgagaccatgtctcattttcatgagtctctactttaatcaattaccaagtgattgtaatcgattacatcgttcttgaaagtgttcccagtagtgatcaagaaaactttgatcgattaaatcaagagtctaatcgattacattgttcttgaaagctttctaggtgttgggaagaacactttcatcgattaaaaatgataatctaattgattacttctttaaaataatcgattaatgtggcaatttaatcgattacatgcaattatgattgttttctctatatatagccaccttgtgttctcagctcttacgactccacattctagtcttcattcctgaagcattcatggttaaagtgagtcattaacatcttgtgagatcaagaagagatccattca

SEQ ID NO: 218008 - DNA, 190 bp, Glycine max
  unsure (1)..(190): unsure at all n locations
gtttgatgatgctcatgatgatttgatgcaaatgcgcttttcaagttaaattcaagacaatgattcaagaatacaagacacaacatcaagatgatcactagtattttaggaaagggaattcctaatgatatagcaaaaggtttggccaagtaatttaagttaaaaagtgtntttcaagagaattactctc

SEQ ID NO: 218009 - DNA, 405 bp, Glycine max
  unsure (1)..(405): unsure at all n locations
agctcgcccaggcgagctcagctagcccaggcgagtatggttgcttcctccagaagtaacagccttctggagggcccaagtgggcctggttgctatttgcacccccatttttactaagtacaccccattgcctttttttttgtgattcttttttcgtaaagttacggaaacttatgaatttcgtaacgatacttgttttctttccgtaatgttacggaaccttgcggattacataatcatcccctttttgacttacggaatgttacggaacctcactaatcatccncttttttgatttccggtgtgtcacggaaccttacggattgtgcatcaatattttcttttgttttccggcatgtcccggaatttcacaaattgcctaatgatgggtgccaagcacctcac

SEQ ID NO: 218010 - DNA, 372 bp, Glycine max
  unsure (1)..(372): unsure at all n locations
agcttccacttgantaatcttaaccattgttttttttcaaataatatctcatcaatttggtgactagcccatccatttgtgtagttttctcggcaggatctggtcttgaggtatctatgtccaaaaaacaccaccaggggaagtttcacttatggcattttctaatctttcaattccaattaaatggaaaaatagtttggttgatagcttatcatattagttgaaatgcttagtttgcaggaattcttccttgtttctattnttgaacctaatgatctgcgttggcagatgctgtgattcccatcacttgcttcatactggtgtgtttggttgcactacaacactatggaacacatagggtgggattctttt

SEQ ID NO: 218011 - DNA, 473 bp, Glycine max
  unsure (1)..(473): unsure at all n locations
tttatccctataaacanactctatntttgtattattaatcctttanataaatcttattatagttatatttgaaaagaaatttcatctaatctctaactttttttcctaactgaacaactcatttgtcatttttaatagtttttaacatttttttaaacactacttgaaataatatttttaaaatattagtttctaacttttttatattttctttcttttcatccttaatatatttatcagtttttctacttatcatttttaaataaatcataattttattattatttaattatttcaacaattaattttactaaacacttgtaatttaataagtagaattttcaattttcaactaattgttaatttacaaattaaattttaactaaaattattgaacataatttatattatcaggcacatcatcatcaaaaaatttgacatganaataacaaataagttttttttgaaatttg

SEQ ID NO: 218012 - DNA, 447 bp, Glycine max
  unsure (1)..(447): unsure at all n locations
gcttggctccacctacacttaagcttgaattttagtattccattntcccttgcagggtatcatacaaaagaatgacaaatccataagattaaaacctaatttacccttgtttgtacaagaaaagactaagactcaaagtagtgattcaaagaaatctcaacccttatatacacatttcacagctctcaaggaatcttcaatagatctttcttcttttggaacaagtacaatcacctctttagtgatcatcatagcttttacatccaatcttcattattggcatcaagtccctcatcttgctctaaaaaacaaaatggtatatggagtaagtcacccatctnctctaaaaccacacagaaacaacctttangtcacaacacaaatgcaataaccatcataaggtccgtctctcatggtcttactcatcacttgactcacgtctgacta

SEQ ID NO: 218013 - DNA, 277 bp, Glycine max
atggacttaccttgaataattcctttgtagtctctttgagccttgcttacctttccttgttttgaagctcactacaagccttaagtgaaaaaccatgatatcaccatatacttaaggaattttggagctttggaattgctttgggaatagagcgtggggggtttttgttttattggacaatttgttttgttggctatgcttcatgatgtattctgcgccatacttgatgtacattgtatattggttaaatgctggacatgctgaatgaaatgttgat

SEQ ID NO: 218014 - DNA, 393 bp, Glycine max
caccgaatgacgccgattgaacatttcctattagatatcgtcttattattattcagggattgaaaagaaaatacaataactcgacatcggtcgttgtaaagtcgcgactcagattttcctcccgacattgagcaattttttttacaaacgctggccgataaaatttttttacggtagatgatgctttctagttcggtgttgcccgaaaaatttacaatgtacgtcgactaggttttttcgttcgagctcaaccgaagttgtggttcgaccgacaccagcatgtattcattctctcggcaacgaatacattagccctcctcggaagaaaacttgattcaccaatactgataaaaaaaatgcttgccgacgtctacgagggacaatcaacgaccg

SEQ ID NO: 218015 - DNA, 187 bp, Glycine max
atgaataaaaaatctgcacctgtcgccagactctatgggttatgctcctctggcgaccaacacacaaacctttgcccttttgtgcagcaatctggaacaattgaacagcctaaagcatatgcttgaaacatctacaatagacctcctcaacctcagcagcaaaatcaaccacaacagaacaattatg

SEQ ID NO: 218016 - DNA, 458 bp, Glycine max
  unsure (1)..(458): unsure at all n locations
gaggtaccaatcgttgtctttcgtcatgaccttgtaggatgtatcctattgngtgagaacttctaatctgcccctaggttcacttgaggctcatgcacgatgcccctcattgccccagtgtaaggctttgaggtaccaatcgttgtcttgttttcatagcctcgtagtgaggaagaatgaaagaaggagttgattcttgcaaaaagaattttttcaaggacgagaaatagttgaaggatttttcgatggattaagtcaaatgactcctatgtagaagcaagatgttttgatgttntgattatgccaaaggatcaagtgcttccaagttttattcaagacaagaatccaagaatccaagaaaatcaagatatatgatcaagttgatctctagaatcttaggaagaagtttccaaattgaaaaagcaaaaggtttggccaaagaattctatctaaatcat

SEQ ID NO: 218017 - DNA, 390 bp, Glycine max
agcttgaacgaatataagaaacatcttcttcaaccttgttgattcttgactccatctcattgaagcacatgttcacttgtaattccaaagtgacaaacctttctccaacaatggtttgaagaccgtcaaacctgtccaaaatctttgaaagaagagatgaatcttctccatcatgtccttcttcaccaacatgtcgagcaccttttttcactcaagagccatcatgctctatttgataaccaaaggatgcaatgactgaagcgcctattaggaaggatctcttgattggaacataaggttcacaatcaaaagggatgttatagtgttgaatgaagacagtgactatatgtggatatggcaatggagcattcaatcgcacattcttatgca

SEQ ID NO: 218018 - DNA, 390 bp, Glycine max
agcgcgtgcatggtcttttatattgtaaggctgcttgctcaaggagcaagagaatgtaggctcactgaagatgggagacaaagaccaacatgttagccatcatcagcaagtaccatgacgaattgtgtctatctcctgaccgtgagcacagagtggcagacgattatgcccgagtgtactcggtatatgatgcttgaggaagggtgatcgactctgtacatcaataggcaataatgtggatggacacgattcactcttacttagaatgggagataagagcttactctagtgctagccaatgcctatgcaatggcggactcctactcggacggcgaggagattcacagacttcttatctgttgtcagcatatgatagacgttgtgacccat

SEQ ID NO: 218019 - DNA, 180 bp, Glycine max
aatctgataagcataacatatatcaaatagaatttgataaataacaaaatagtatataacaaatatgataaaatacaatttttcgtgtatattaaaagaaggtttcttaccaaaattagggagataatttttggggataattacaactatcatgaaatgcatattggccacatgctttac

SEQ ID NO: 218020 - DNA, 269 bp, Glycine max
ataataaccggaagtgcaacgatataaggacctagagcagattggactgaggaagacagaagattactacaatataatttaaaggccaaaaatattattacatctgccttaggaatagatgaatactttagggtttcaaattgtaaaagtgctaaggatatgtgggatacaatacaagtaacacatgaaggcacaacagatgttaaaagatctacggataacactctaacttcgtgatatgaacttttacgatgaatgtaataaaagta

SEQ ID NO: 218021 - DNA, 206 bp, Glycine max
  unsure (1)..(206): unsure at all n locations
cttttttcctcgcagcaaatcaaccacngcttaacaattatgacctcttcagctacagataccaccctggatggaggaatcaccctaatcttaaatggtccagccctcagcaacaacaacagcaggctgcttctttctttcaaaatgctgctggcccaagcagaccatacattcctccaccaatccaacaacagcaacaaccccag

SEQ ID NO: 218022 - DNA, 400 bp, Glycine max
  unsure (1)..(400): unsure at all n locations
agaggattgatggngacccggtgttgagagaaacgatgagttggtctacgtgggagtacgtgagctcagttggaggtgggcaacaggggatgcgcggtttatgcgcgcattgtggatgtggaaagcttgttgtgcaccatcgcccgaccgccacctagtaccacatgtgatgggtgccccataattctacaagcttgagatgaagaagtgttgaagggtgaaacttcctgctcttattgttgaccacatagtgcgacctggagatatgtcgcggtggtcaggataccttggggaccttacgtggggagctattgcctcaaaccaagcttgaccaatcgagacccaacccgggcatagttggtcactgagaacctgtgatgtacctatacatgcgagcttc

SEQ ID NO: 218023 - DNA, 601 bp, Glycine max
  unsure (1)..(601): unsure at all n locations
cattttaccttcacttcactctctcacactctattttttntcttnaatnattttntacnnntnnncccnnnncnnacgcaccccctctgcgagtgaaccctgtanacacncacacttanganactactcagcctgaggaactatggaccgataagatacgtgagtgncctgtttaattcctgaacagaccgaccatcatgaggggagtggattaccactactggaaaacccctatgcagaacattatagaagcaatagatctaagtctttgggaagccgcaaaacaaggaccatatgtgccctctataatagccggaagcgcaacaatagaaaaacctatagcagattggactgaggaagacagaagaccaggacaatataatttaaaggcccgaaaaattattacacctgccttaggaatagatgaatactttaaggattcaaattagtcaactgcataagatatgtgggatacaataccagttacacatgaacgcacaacagatgctacagatctaggaataacactccacctccgaatataaactttgtcgatgaatgtgaacaaactctcaagacatccgagacgttccacacatcg

SEQ ID NO: 218024 - DNA, 289 bp, Glycine max
  unsure (1)..(289): unsure at all n locations
cacacaaagacacctacccttaggccaatctagaaaaccctattctagcatgcctttagaaantcatgcatacactaacaacatgtaaaacacacaatgttaacaacttacttttaccatgaatgcttctaaaaatgaaggttagaaggtgtgagtcgcacaaacctattcttagaacattttcttttctcttaaaagggagaacataaggtcattatttatagagaaaaaagtataaccgctgtatcgattatatcaaaaagaatcgatagattatattttaaccgat

SEQ ID NO: 218025 - DNA, 314 bp, Glycine max
gctcgcgactggtacctttcttgcttgcgcaacttgagttcactattgctaccccatagagcttcgcgaaatttgatccggtcatactcttccttgcgagccctcttggtctcttgttcaagggctcttgcggtaattgcattctcttcccgtaacccggcacactccttaccaacgtgtgtagcggccaacttgaacttctccttggaagttgtgccttttctaactcgcttctgagagcttggacttcttcgaccaattccggtgcttcacaactctctatgctgacgacttttaacttggcgagccaatct

SEQ ID NO: 218026 - DNA, 445 bp, Glycine max
  unsure (1)..(445): unsure at all n locations
agcttaattagactntntgtcctcttactattgttatttctcanattcggtctccattnttttttttttgcaaatcatcctttggtattttaattgtgttattntgatccatttgttgacctgtaatgaaacaagtgtcacattaacctttctattaaatatagtggatgtcaagttaatggataaaccaaaattgcacaatttaaatagtggggatcaaatttgtgaataaaaaaaatagagatcaaatttgcaaaatgtcaatacgtgccggataaaaaaaatacaattattcctaaattaaaagtggaacaataaacattctttatagaatgtctcctcccaaacttctagtatacacttgtatttctataatagttggagaataagcaaacattcacatatataattgatatatttaaaagattaaactcaccaaactata

SEQ ID NO: 218027 - DNA, 417 bp, Glycine max
  unsure (1)..(417): unsure at all n locations
agctgatttagaggtttaaggggtcaaaatcgagctacanagtctctatcctacactttgaaaatttcaattgtggcatttgagctctagttntgtgtttagtggcccaatggtagttttaattggtttttagttaactaaagtctcgttcggngtggttgtgagtttctggttttcagttaactaagttttaatctttaccctaacatttactttcccttcccctttgacgttgactatttctttcatggtgctcacacttgctgctatttccctctctttgttgatatactctggtcatcatcgttgtcgctagccaatcggtgacggtcatcatggttgttggttgttgggatcttgtcttgctcctcacctcactattttccctcacgttcttacttttccttcatgtttcta

SEQ ID NO: 218028 - DNA, 352 bp, Glycine max
  unsure (1)..(352): unsure at all n locations
agcttttatacggagtttaaagataaatacatatatatttatagaaaagtcaaacttctctctttttaaaatgcatatcccttaaanatgcttgagaaataataatgttattaaatagttatagttatgaaaaattattaaggacaaaatttagataccaattgttaagtgcttttagagatttatttgaataatttggcataataaaatttatattaaatattactcttttcggttctatttataagactcaattacttaatttagttagattaaggagagtgattagtttagttgataataagaaatatgttcaagatcatattcttttttctaaaactaccattgtcta

SEQ ID NO: 218029 - DNA, 387 bp, Glycine max
  unsure (1)..(387): unsure at all n locations
tctctattatgctgtcaaggattctattattacactgctcagaagttcttaaatggataatataaaaatgcaaaatattgtacaaggtagaacttcttatttaacacataatgttaagaattaagctggattcttactgcagattatttcatcttcctttcctggtatttttataactagaactgattcttcttttttataatattgcaagctaggttgttgaaaatggaacaggtttgcacactagaagtttggccaaaaagagagccagtcctttnttatctaccatggtccatggcaactttgttaatgtttctagaatggacattccgatcaaagcattggaccatacatngctagaattgttgaatgacagataatactagt

SEQ ID NO: 218030 - DNA, 442 bp, Glycine max
cttagaggtccaagaaagatgaatggaagtgtgagtgtgactcataaagacgagattggtatgatctgcatgacatggaaggatgtgtgggtgacagcttccaatagaaagaatggcagcaaatcaattcttcaagggctaactggttatgctaagccagggcaactcttggcaataatgggtgcctctggctgtggcaaatcaactctacttgatactttagcaagtatatacatcatcacaagttctgaagcttctgaggtctgaataatctcctgcatgatagtggatcccttataagcttcaaacaactttgttattcaactatattattaaatgttagctttttttctttctatagagtagcctaaatattttactatttattaacatatgagatacgacctcaccaatctattaaagaagataaatttgaactaac

SEQ ID NO: 218031 - DNA, 138 bp, Glycine max
  unsure (1)..(138): unsure at all n locations
agcttatactatatcgagacgctcantattaattatcgtaaactctcgagaacatcagacgggcataatcttttacacggatggcccgantcgggcgcataatatgtcgagagtcgagaaaatggacacccgaagctc

SEQ ID NO: 218032 - DNA, 145 bp, Glycine max
aactacgctgaatcggcctagtggaaaagtgcgaccattgaatttctatgagcttccgccttcaacttcgtgcggtttatatgtgagtcgcccgaaccgcacacccgagataaaagcgaagtgcatttcagaaagactagagcat

SEQ ID NO: 218033 - DNA, 333 bp, Glycine max
  unsure (1)..(333): unsure at all n locations
agcttccatcctaagaaanatgttattgctgtactaatctgatataatctttcattgtatataatatgtaaataaaaagaaaagggatgtcagtttgttagttntagtcagctactggtgtttcttggctgttaggttatcgggtagctgtctataataaggcaggtctgtcgtattttagagagaccaaatgataatcacatagtgcagagcatatttccttgagctctttggttctcttcccttctatcctctctattccttttcttctctctttgcctctttctttctctggcattctggttctttctctttcccacctaaatcctataa

SEQ ID NO: 218034 - DNA, 390 bp, Glycine max
cacaagcagaggcagatagaagttgattggatcctttatttaattattctctagatttgaatatcaccttttcaccatcagagttgacagtgtcattgttcgacggttggcaagtgcaccggatctcgcaagtagtataaaacggtaagaactgagtatcgaactctcggggaacttgttttacttggtaaagatgtggttcagtaagtaagcgtcttgttataaaaggtttatgtgtagtatggacacatgtgtaaactaactaaacaaaggtaaataaaaggtgagcagtggtgggtgcgaaggtagatggtcaacatgttggtcttcctactaggcgactgatgctactaaagatgttctctacctaacagtgttcttgtgttctat

SEQ ID NO: 218035 - DNA, 292 bp, Glycine max
cacccttccccacgacaaacatgaagtcttccatttgataaaaccacatgttttgtatttcatttgtgtattcactgtttctatcacttcaaagtcaatacaggaatctagaaggcacactcataatgcaagtgctttagaaacaaatggtatgctcttaactatctcaaataagcacaagtgatttttgcaattgtacttgccaatccttagccattaaatgtgatttttccttagtatagtgatgtaataacaacagttgaacttttaacttgtagactcataattgaat

SEQ ID NO: 218036 - DNA, 378 bp, Glycine max
  unsure (1)..(378): unsure at all n locations
aactaagctgaaccaaaccgatgagagtgtgaacttaaactgcgagtgtatgattagctgtgagtaataatctttgcatgaatctctgaattttagaatgaactgtataaatgaggacatgatgaaggccatgattgcacatacacaagccttntgaccaaaaagcttaccttgaatgataattatatcctttgcaccctttttgagctgaatgatattgtcaaanaattgaaccctgaacttaaataattatctcaagataccttgtttagattctaggagagcatatggttcaaggaaaatataccccagatttgggggagtggaactaattgggatgcacagaataagattaagcatcggcacacacaacacata

SEQ ID NO: 218037 - DNA, 228 bp, Glycine max
  unsure (1)..(228): unsure at all n locations
aacttcctgctnttaaatantatcacagagaggnacctgcagataggacgcgttttataggagacctcgcccacgccaggtggcgtgctattgcccaaaaccaagcttgaccaatcccgacccaacccgggcatagtcggtcagtgagaacctgtgatgtacctaagcaggcgagctcctgntagncaacatattaaaggaaatcacgaccacacagcacgtacgctt

SEQ ID NO: 218038 - DNA, 385 bp, Glycine max
  unsure (1)..(385): unsure at all n locations
tggaaaatctgggacttagccatggtagaangtccttcttttccattgcctccctcgcccagtaggatgatcatccgttgaggtgcttcactctcggngacttccagctatcacccatggtggaagaattcgaagaaatcctaggatgtcctctagggggaaggaaaccatacctcttctcagggttctatccctcattagctagaatttctaaaatagtncaaatctcaacgcangaattagaccgccaaaagcaagtcgaaaatggggtggtcgggataccgagaaaatgtttggaggcaaaagcaagaatactggcaggtagaaacgaataggccccgttcatagaacgtctcgcactgttgatctttggaggagtcccttt

SEQ ID NO: 218039 - DNA, 230 bp, Glycine max
agctattttatgatgtgtccagcactagaactaggtccctaacataaagggcatgtgtgtgttgagtttatgaattcttcctaaagaggcttgcctggattgaatctcctttctataggaagatagcttcattatgagttttggcccataatctgatagttcccaataagagaaatttggactagcttcaggatcatccaacaaaatatctttagtctgaaaggtcacgt

SEQ ID NO: 218040 - DNA, 78 bp, Glycine max
aaaaaaaaagcacgggcgggttaaaaaacaatacaccaccccccccccccgaaaaaaaaggaagaggggggggaaaac

SEQ ID NO: 218041 - DNA, 414 bp, Glycine max
atagagggagagaaagagagagggcggagcacgaaatttatggaataaaagagggaccgactcccatctttgcatgttgttctaatgggaatattatatcaacggtctatctccgtccccatacctcctcttcttatttcaaagtattccgttcatcctgatctcttatcactccattctccccacatactacaccccccaaaattgaatctctccctccctactctctaacgctcttccttgcacacactctatcgtgtctcttcatcactcatatctctcttcccggtgaatatcggcaccgctccaatcctcattacacctattacttttgacactattcatgatcaatttcctctcctcaccttgcattatgcgcgcgcacctctcacctacctgcattccgtcggggcg

SEQ ID NO: 218042 - DNA, 418 bp, Glycine max
  unsure (1)..(418): unsure at all n locations
ggtctatatcgacgactgctatgagcaggagacttggcgctatgactcagaggacctgaagttggtgctggatgtgttaccgttctattattactttaacgattcggtgcacttttcgataaagttcgggactaccctagatctcgaacaactcccaactatacaccacccatgattgtaccggtgcctgccgagaacattactaatcctatccctgtttgtactaagaatcatccaactcaacccaatcaaactcaaacctataactccaattctagggaggaggcacaaaaaactcccgtagaccacacgataattggttntgggccccatccaggatataccttngaagggcatgcattntttagtgtncctatgttgaacgctcctaaagcctctcaatagcacccgttatcac

SEQ ID NO: 218043 - DNA, 479 bp, Glycine max
  unsure (1)..(479): unsure at all n locations
tctcgctgatacggcactatagaactcagctgacaactatgctcaagtagattgcgaagctaaactcaatgnngatanaaccactccaagtccagaaacttgtgtattctcacattctgcatagggcacatcatcatgcaggggcagctgggataccaagtttaccaaggcatctagtctaccttcaagcctcctaagttcagatgatgctgatgattttatggctacttcatgccgtcctctaatgaccacaggaacaataactgccctgaaccgctctgccaaactccctccttctccgccccaaccatcgacctggcccccggcacttcaagacccccccctccgcccaccccaaacaacccccttgctcacagcgctccctcgctacattgcgcttgccctctcgcacccctccactccgcgttgtctccttttcacacatcctccctccccctctctaccccttggcggcagcg

SEQ ID NO: 218044 - DNA, 460 bp, Glycine max
  unsure (1)..(460): unsure at all n locations
tgtccgtcgtgtactgncanactacagagtcgacttgcangcatgcacgcttctatggctcttattcatctttacgtggtctattttanattcttnnantnncgncgctaaagaatttgcatacacctccttcaaagtgaaatgtgtaacctctctccatcatttggccaatgcttaaaagaatttctattatgctgggaactagtaagacatcatggatgagtcacgtacctttatctgtctccaccatgacagtgcctttgcctttgattaaccaccctttcatttccagtcgaatttgacttgacagactataatctttgaaaaagtccatcgtggccttggatgctactncatatccaagacacttnctcctttttttaagagctgatgcgtaaaggactgttttgactgcccttggaatggctgagccatttgtgcacattttttacgccgactg

SEQ ID NO: 218045 - DNA, 384 bp, Glycine max
  unsure (1)..(384): unsure at all n locations
tacttctcaccagcatttctttggttaacaccaattatattttcattctagcattttaatagatttgtatttagaattgtgtatttatattgattggaacagatatagtgttccttttgtttttcttcgttgagtttgtgttaattaactccacgttgttattaatttttcttgattgtattctcaaaatttcttagatttggttctatctaattatcctggacccattgattgtagaaagatattcatagggggtttagcgagagaaacgccgattgatgagtggtttctatttgtattgcattnggttttctttccgggtttaccaatgagatttcgtgaattaactaattttttaaaataattttgtggagcgcaattcat

SEQ ID NO: 218046 - DNA, 270 bp, Glycine max
gagagggccactaagcactaggttgtcaaagaaactatctcacacaagcttctcaacgaagacctctaatagagaatctgacagaagctacctagtctatacatagaagcatgtgtaacacttgctggaactttgatgacatgagagtcttgagagacacaactcatagctcaacttctctccctttttcttccttcaatttcgtgctcccccctctctctatctctccctctttcttttcctccattgaaacatcctctccaagcttct

SEQ ID NO: 218047 - DNA, 264 bp, Glycine max
  unsure (1)..(264): unsure at all n locations
tttagctgacgctaaatcagatccctacgaacacatgatattgctanaggcttccaaagtttgcatgactaaatgggtatgagtgaacatcccaatctatgctttgatacacagacttggtgagtgaaatattttatgcatgcatgcagacangtggtactacctgngaccatgatacatgtgacattcagtcatctactgagcatgactgctgtttctattaagctacaacaccaatgctgatagctgattttgtgctgatga

SEQ ID NO: 218048 - DNA, 340 bp, Glycine max
  unsure (1)..(340): unsure at all n locations
tcatgaattgagaggattagcattacgccttgcanatcatggagagttgactcggctaagtgtaggcagcctttacttaatattgcatatgttaatttagctattactcgttattcctctgctttttggccatgatcatccagtactgttggtttaaaggtagcacatagatggaataaaaaggactaatttttgtttctttgatattttaaatttccaattctcttattgaacttaacaccttcaatttatgttaaaataataaaatgactgtttgagatggcatacatctgtctttctttgggataacttgtcttcttcaactcttttattttaatat

SEQ ID NO: 218049 - DNA, 289 bp, Glycine max
  unsure (1)..(289): unsure at all n locations
ctctactaggggcaatttttcttggcacccttaatcatgttcaatttggtggtaaagttacgtcttttaatccaaaaaaggaaacttggttaccatgggagaatatttggatgaatgaaatagtttggttgtatatgaatgagtattcgatgctgttgcacaatgtatataaaaagtcctaccactagagagggtatgcatttggaagctaagaagttagatttgtgatgcatctctgcccaagtatgcatganaatagtgctcccaaatacttaaaatacaacatata

SEQ ID NO: 218050 - DNA, 445 bp, Glycine max
  unsure (1)..(445): unsure at all n locations
cttagctctgcaattntntagccatgaccacattgtcaacaaattatataaatgaatacatatgatctgtatgtctatcaaattgatataatgtatcaaattttaaaattcaaaattcaaatttaaattgagatagactaattttaaacaatagggggaaataaaaaacttaaaaataaattagtgtgacatacttgatacgggagaagttatgtagcttatcatgaaagagagtgagtagttcctaatattctcttgttcaagagtgaatacttttataagggtgaatttatgcatccaaatataacatgttggtcccgagtaaaattttaaagtgaagcttcatcatctttgcattccaacattgaaacggttgggctggcccatgcattccagctttaatagaagtacatatgtgatattataaagttggaaagcctacact

SEQ ID NO: 218051 - DNA, 400 bp, Glycine max
  unsure (1)..(400): unsure at all n locations
ctgcctttacttgcagtatactgatatggcttcaccttactcgagggttccacttgcggagaaggtattcttttattgtcaagtagtattcactttttagcacctcttctcaatgttaataatttttgtctgtatgttacactcacaataaatacatcacttttgattgtttcttgtttcagatagacgagttagctcgaagtcacccggcattattaacattgaagagtgtggatctttccccagcaagttggatggctgtttcttggtgagcatagttngttgctcttgttacattgtaatttttttcctgtatgaaatatgtgaactggttacattgtctctaaaaccattttatttttgtaaatatatctttgaagattggtctttaactaaacta

SEQ ID NO: 218052 - DNA, 307 bp, Glycine max
  unsure (1)..(307): unsure at all n locations
agcttcaactttaattacgtattttgttatctttcaaattgccgntaaaatgatttttttaataatgtggccaattaaatttttttttgataaaaatagtaattagtaaaatgagtggatattattccatataaacatcaccacgaccaaaaaaaaaaaactcaatcaaatttgacctttgaaatatttcttaacataaaaccaaataaatgaacatcttttttatgaacatacattaattaatatttcaacatgaatataaatcgactattcaacttgaatccaaacatatctttagtagttggag

SEQ ID NO: 218053 - DNA, 454 bp, Glycine max
catctaacgcgctttacccccccagaccccggtggacacaaatttgtttaccaaccacactctcagagctctcaacagctcccacgaacttctcaggaagcgccctattaatagaggagagagggacctgagctctatctcgacaggaacacttctcacggaaccttctgcaagaagtcttctaataagagatctcaacgacaccacctatactataaattcgcggcatgggttacactagcttgaactatgatgaacgatagtcttgtgagacaccactcagagtgcaacatcatctccttattgctcctaccaagacgagctcccccctctctctgtctctccctctgtacttgactgcattgaaacacccgcctcaagcttctaaatcaggctcatccggttgtaaaacaccatcttcctggctgatcccaaaagaacgccctccataacg

SEQ ID NO: 218054 - DNA, 246 bp, Glycine max
  unsure (1)..(246): unsure at all n locations
gcatgcaagctntaggctgaaatatttagtcctataaattatatgattgagttntgaatttggtctgtgtacttggttttatgtttgcatccctaataaatatgaaaaccagtacctttttcattccttctctcatgtgacanttgntaactacatactntatgtgtgtaaacatgagccaccatgaactctctagctaaaggaattatcaaaataagatgattcanactttgttttgataatgac

SEQ ID NO: 218055 - DNA, 235 bp, Glycine max
tgctataagagtaatgtcccactggtaaaactaactttccaaatgtttgccttcgcaagaatggccccgaggaagcttgcctcaaagaggtccaggaaggacaaggcggccgaaggaactagttccgccccggagtacgacagtcaccgctttaagagcattgtgcaccagcagggcttcgaagccatcaagggatgggcagttctcctggagcgacgcgtccagctcacggacg

SEQ ID NO: 218056 - DNA, 191 bp, Glycine max
ttaagtcacctgcggctgcagctgttgagatgtgaaacttggttgttgttggtacagctaagtgtgacaaaagatgcttggaggaagagaaactactattacaggcagactgccggagaggtcctattgccataagaagcttggagcaggtgatcagaaatagtgcttgtgagaaaacgacaaataccgat

SEQ ID NO: 218057 - DNA, 472 bp, Glycine max
  unsure (1)..(472): unsure at all n locations
cgtgccatcaccatttggcctanacccattccgggctcatacctatccctcaacataactcgggccaccatcaaggaggcactagataaacgtggttgcactggaggagcttcaacataagcattgttcacaatttctagcgcttgaaaagatgtttccaacaactcttctacagcttccacatagggtgtagaggatggacaactcactagtatatcttcttcccctgacactataaccagttgtccttccaccacaaacttcaatttcttctgcaacattgacgggaccaccccaacagaatggatccaaggccgacctagtaggaaactataggcgaggtttatgtccattacttggaaggttatttggcagcgtgtggcccaatttgaatagggagatcgatctctcctctcatgtcacaccggctaccatcaaaagcccttaccaccatggagcttggcctcatgtg

SEQ ID NO: 218058 - DNA, 408 bp, Glycine max
gtcctttgttatacgagctggataggttctgacggaataaccagcttatgtttagagggggatataaccccagtggtgcacataattggctgacggagatcaggaagacttctcatgctctggcgggccctaatgctcggggtagctcttggaaccttctttctaaccaccgatgcctagttatgatgggagaatgctcatgaatgcttgttagctgagaaatgagtggatcactcgaaagtctccatacagattctgtggagagagacttctccgaatacgttatgacagtcaggatatagaggtcttgagcttaatacgcgaacacgatcctgtcagaatgcatgagtatgaaatgcttttttcccctatccgtgaggatgagaagatccaaggtgactgttcgtt

SEQ ID NO: 218059 - DNA, 288 bp, Glycine max
  unsure (1)..(288): unsure at all n locations
actgagatgtctgcttggagtactngcattatatgacataagctgnaacttaggggagagatggttaggtatctcaatgtgtcactacactgttctattttataggactgacaggggttggatagttgctctacccacgcctacattgctaccatgcagttatgtggctggtgtctttattgtcatgctattatgagagacttgtgtgtaaggcttataacagccattttcggatgattgaatactatgagcactctcttcacatattaagcgagatacacgtgcata

SEQ ID NO: 218060 - DNA, 294 bp, Glycine max
  unsure (1)..(294): unsure at all n locations
ttgataaaaacctaagtgtcgcaacctacccttcgacgggagggcgacgcgagactcacgggagcgtcttccaaggaaggaaaacgcgcggagtcgtcaccaatgtttatttaaggaaaacgtcggaaaaaccggaaaagacgtggtctatgaactttaagtgaaaggtttgggagttgtatttacgcacggngaaggtattaacaccccacgcgtccgtcacaaaggacggcaacctttaatcaagtgtgcgaatatgacttcaatttatgttacggtcttatgtctttttat

SEQ ID NO: 218061 - DNA, 269 bp, Glycine max
  unsure (1)..(269): unsure at all n locations
caacttattnttaattcttttanaagatttttcaagttggggttagttttagttttctccaatttttaattntaatataaactcattttgaaagtttcatatcctatgaaattagtttaagattgtttttgtgtggtggtgacaccaatgttgtaggtgattacaacatggtgatggtggtgccgatgtcgactgtggcagtggtggtgtcaatattgatgacaattgtggttttggggaggatggtagtccctgcatacgtggtgatt

SEQ ID NO: 218062 - DNA, 203 bp, Glycine max
cggatcttaagccaccgccgctgcagctgaggggagggtaaatactttttttttatcataactggattataatacaagaaacattgatctgatgaatggatactatatcatattgaatgaatgtaccgatgatcgattttcatttaataagagaaatcagaacccacttccataaccctgtatatcccaaaggtcacttttac

SEQ ID NO: 218063 - DNA, 325 bp, Glycine max
ctaaagaaagcatggatccaatagcatcagggatttgacttagattgcagaaacttagatcaaggtcatgcaaacaagagaagctaggcaaggaaggcaacaaacaaccacctgaatttttagaccctctagagtaggagaaatggaaaggtatgaatctcttgatgatggaggaggatgttgactgggattgcatggcagtttccctgatattaggaatcatggaatactccttcattattgggttctctaacagttgattactaaatatttttggacaaccagagatatttagatattccagagaacttagacccaaaatatt

SEQ ID NO: 218064 - DNA, 316 bp, Glycine max
  unsure (1)..(316): unsure at all n locations
agctngaagaccccataaggctcctattgtttatggtgcagcaactatcttcattatcttccagtaatctccctcctaagaatgctgtcacacacctgattggccctctatggcccactagaactgccagacacgtgtgtngaccatcttgttctctagcccaaaccctgctcgttgagtcagccgagccactcactacatatttggccacacttgccagacacaacactgcatgcgtgtgcccttggatggagccaccgtattgtaactgccccgcanaccaacccttgtgccagtagtgtatgtagccatcagt

SEQ ID NO: 218065 - DNA, 420 bp, Glycine max
  unsure (1)..(420): unsure at all n locations
tgtganaacgtacactccatattctaataaaaatgtctaattttattgtttgaaaatgtattgatagcacttttcaaattcaatactaaaaccagaacatacttggtcttaaatgcatattgtattgtttggtaagacgttagctaagagtgaagagttgaaagaatggagaaagtgacggaaggaggaacgcggngttgaccccaaatattggttcaagtacaatttctctaacgcaaaaatcaacattctttgtttcaaaaaataaataaaaaaatcaacagtctttaacacactacaatttgctttgttaaaggcttatttatttataaatatttttaagattctcattntatgtcatagacaatccacataaccaaattaactactattgtttcttccggttggggagagctggaa

SEQ ID NO: 218066 - DNA, 411 bp, Glycine max
  unsure (1)..(411): unsure at all n locations
ataagataagattggatganataaaatctagatgaaataaaatctggataagataatataagataacattggatgaaataaaatctagatgaaataatatctagatgaaataaaatctggataagataagatttgataaaataaaattgtttgttctcttcaagtccaagcccaattccggattcaagcccaattgcttataattctcctgaaattaaattaaaaacacaaaattagtccagtaggcccaaatgataaaattgcataattaatttgacaattaaggctaataagtaattaaaatggtgacaaaaagggttaagaaataggagaaaatattgacacatcaccgtcgctctggccaaactatcttgaaagaagtgcatcaaagattctcgtctctggaatatg

SEQ ID NO: 218067 - DNA, 252 bp, Glycine max
gcttctcgatgtattatgcgcctgaatcgtttatttgtgtgaatggatatgacccatggaatttcttaagagcttccgttgttcaatttcaaacctcttcatttaatatgcgcctgaatcggactttcggtgaaaagttatgaacaaatgaatttcacgagagctttggcttgtcaatttcgagcggctcgatatattattgcacctgatcggactttcgtgtgaatggtatgaccatataaatttctccag

SEQ ID NO: 218068 - DNA, 471 bp, Glycine max
  unsure (1)..(471): unsure at all n locations
cgcgctntcatatctaatattacaacttggtctaagaactctattacctatcttgtcctgacaacaggttgggatttttgagatagccccatccaagcagtcattgcagtctttctcagacaagtcaggggtgcactctgccataccatatatggtctgaaaacttgaagcagttacattatccgtggcatacttacgacgagagtcacccgatgcggctacacctttgaggtttctcattaagttcgccagagcttgactgaacttatccggttccgttacattgtttatgttcatcaaggattggctaggttcaatttccatgatgccaaatatcgagcggggtgagtagcgcaacatgcatttgctagtgttcaaccacagaagtgcctctttctggtttggacaaaactgtttaattgtgactctggaatcattgaggcaactgcggcactcatgtggctcaacatc

SEQ ID NO: 218069 - DNA, 337 bp, Glycine max
  unsure (1)..(337): unsure at all n locations
gcttacattccttctcatttgagagaagatttttcccanaaacaagtgctgcccaacagtgagaaattaaacttggttttttaccattctttttttttttttactcttttagtaatgtggctcaacaattgtcttgctcttgattaggaagtaaaaatatactcaaaataatcatgttttcattaaatagaggcatttaaaaataacagcatatgtgaaaaacaacataactaccccgcctggttgatagaaaaagaagataagagcatacgaatataaacttgaaacaaagagaatggtatataaaagagagctttacgcatgtttgttttggatg

SEQ ID NO: 218070 - DNA, 582 bp, Glycine max
  unsure (1)..(582): unsure at all n locations
ctatgacgctcacgtctagcatanagacacacngtaccgcaaccgattntactcaaagacancacacaanagccgacactaacatgaaacgcgccacanatactacagctncccggccaggggagagcctcttcaaccacaaagacatacatatttatattcatgatgatacccggagcacagagggcggacgttggaagccgacacaagccaagaatgcgacgactagtggaacatgcaaagctgagccaacaaaaggctccagcgattatccccaccaaagatagactaagagaagtggcgacaacaagaacgcggcccaacataacaacaacgagcgaccgtaaccaaaaagacccacctaaccaccaagggtgcggggaagaaaacatcggcaaacacgatccacagtacaacaacccaaaccgaacagggggaagagcggaacagaaaatcgtaaaccgatcacagtgcggaacaaatacccagacccaaacaactcacatcgcgagcggaccataggatagagccgcaaaattaaataaacctacactaccattggaactgagacacgggcccccc

SEQ ID NO: 218071 - DNA, 435 bp, Glycine max
tctgttcctcaggtagtacgtattctggaaaaggtgtcacaatcattaataagaagattacaacttccagacaccgaacaaatttcctaggaatgctataacttccatgatataaaccatgaaaaatatgaaggggaaccacaatgagaaatatacttgccccattagcatgcatataatggagcaaccagcccccctcaacatctctcataacgtgttctacgctgttgaaagctagatccacatgaggtgtgtaatgcatagctaaaaaaatgccaatcactatctgaatgaataaacaaataccagctaacaaacctgagccccaccaataactaagattgctcgaggttggataatctatcacatgttgattaagcgtggacgatatatgttctttaaaaacgagagaaatcattgttctctcatttcttc

SEQ ID NO: 218072 - DNA, 450 bp, Glycine max
ctcagctcgggatgtatactgatgccaatgtttacaaccatttataccatattcttgttgcaatatgacacaggaagagtaagtggctgttagattcctcaactgtattacataaaggacactaattatcctttggagataacatgattcctctgacttgaaggttatctctagtagttgctctattaatagacgcactccatacgaagaatttcacttgaggaagaaccttaagtgcttaaacagatttgaagaacgatgactcttgagatgcctcatctgtcatgatagtgagcttgtgataggccgaattcgcagaataattccctaagggtctagccaaccaaatacacctgtacatgctagagggttagctgtataaccaagtttagaagaaggaccatcgattcatccactagcttctattcccaaactaaccagtcctttctc

SEQ ID NO: 218073 - DNA, 188 bp, Glycine max
tcgccaatacgtcaacaacatttcatggggatgaaagactcgcgaatacgcatgctatgcaagcaaaatgtgattatgagattgaaatgccctgtcgcaacctacccttcggcgggagggcgacgcgagactcgcgggatgcgtgttccacgaaaggaatacgcgcggagtcgccatcaccgtttatt

SEQ ID NO: 218074 - DNA, 195 bp, Glycine max
tgcactttgacgaattttgtcttaaaagtgccctgaaaatattacgcagatagatctgatatgcattttttatgaggagatgatattaatctgatgataggatcatcttactctgtaacaagctcaaccccgcttgtcaagttattagatcagcgattcattgtagcagctcgatggtatccaattgaatgcatg

SEQ ID NO: 218075 - DNA, 584 bp, Glycine max
  unsure (1)..(584): unsure at all n locations
acccaggcactactactatatcgcatctctctataactnttaaattaaanacctacgannaacnncccnnnnccccgtgtcatgatacgcgccacttatacacagcccccggctacgcaagaccagccatagcggccaagaagcttttctcgaacgagaagagtgcaccagatgagggctagatgaaatagacactggaccacacaatgtacgatgacagaggatgagacaaagcccacatgacacaatctctagatgaaatacaacctggatcggagaacgattgagcagcaaacaaaggatgacctctacaagaccaagcccaactccggatgcaagcccgagagctcagcagacgctcagcacatcggagacaaacacaccagcatcgtcagggagcccgaaggagaacactgcgtcattaatccgacaactcaggctaaacacggagtgaaaagcggacatagcagggtcagaagtcagaccaacatatgacacatcaccgtcgctgcgcccacctatcgatggcgacgtgcgaagaagatacgcgcctctggactatgcgcccaacttgccacctcccg

SEQ ID NO: 218076 - DNA, 176 bp, Glycine max
gatcttaagtcaccgcggctgcagcttggatattttactatatatgtgtgtgtgttcgattatctctacctgtttaacaatgtgataattcactcatcatgtgttgtatatgattggatcatgtgatgatcttaaaccttgtgtttgtgagagcacatgactacgtgaattacttt

SEQ ID NO: 218077 - DNA, 497 bp, Glycine max
  unsure (1)..(497): unsure at all n locations
agtgtcctgatcgcggccttagactccgacgctcgactattatgtggctgaatcggactggcgtgcgaacagttataatctatctagcactgacgacagcgttgggtgtttgatatagacccattcaagcagttattcgcgcttatctcacacccgtcaagggtgcgctctgccataccatatgtggtcagaacactccgtgcacactcattatcctgggcatactcactgccatagatacgcatatcggcgacaccattgatgctgatcattgagacctgcaaagcttcgcagaacttagacagngtcgtaacatatgtcatgtccgtcaatgatcggctatgtgtaaattccctgatcctcgattcctacggagtgacgaggctccttgattatctctccttagccatgaagtgcgtctttcttgcgtgacagagtgtgaactttgacgatgaatcattgtggatccgagactcatagggttgcagacactctcg

SEQ ID NO: 218078 - DNA, 315 bp, Glycine max
  unsure (1)..(315): unsure at all n locations
ttattgaaaaaaaagtcgtaccagtcaggtctgagagaccatacaattttcctaacgatttctaattatgtgggccattaaatctatcatatgctgacaatagcccgagagcccatgaatctcttcgggggcggagtangtgtctgccatcgccttggccttggctaacaatcggngaagttcttgactcccgttcaaggtaagagcaaaccgatccatccacatggttgcctcttggtgtaaagagtcgatcacccttcctctagcctctttttccgcatacacttgagcatactcatccgtgattctatgctc

SEQ ID NO: 218079 - DNA, 448 bp, Glycine max
  unsure (1)..(448): unsure at all n locations
acctgtctgagcaatcttatgttctggttctcaccttcatatcctctngaccttctcccattacctgcaagcaaacattgtgttctggagtaggcttgtcttccacagacaagtcgaaatcaatttttgggtcttcaaaacctaactccagctttctcttccccatgtcaactatgcagcttgcggtcaacatgaacggccttcccaagattacaaggatgtcagtatcttcagagatatccataaccacaaagtctgctgggaagataaaatgttttaccctgaccaacacttcaatcactccacatgacctggtgatggagcggtcagctaattgcaaagtcattcgagtgggcataatctncaactactccagccttctgcacatggagagtggcatcaaattaatgttggctcccagatcaatcatagcctcttccacatttac

SEQ ID NO: 218080 - DNA, 326 bp, Glycine max
  unsure (1)..(326): unsure at all n locations
tcaccattagtgacgggaaccttactctttcttatggaggccactataacctgacacatgcgagtgagggggctaccaccgggcttctgaatccgatacagactcgtaccggataagaagctcaccacagcaattgccatggccactgctggaaagacaaatccccacccccaacttacagtagtaaggacccacaccaccaaagaagcagcaacgcgaccaccactatttattgacaagcagaaccactngaagaaagagctcttgtgctcnctctcagcttcatcagcatcacaaattgagtgcaccaaagaagagacacaagc

SEQ ID NO: 218081 - DNA, 376 bp, Glycine max
  unsure (1)..(376): unsure at all n locations
ctgangttcaaggggacgcgaaatacgaagatgatgtttcaagtacattgaattgggacgaccatgccctcctgatttcagctgggaaatgccagtggaggaacgccccggattacgcacgagcataatgaaaccttacggttttaaagctctatagttggcctaggctttagagttttccttttgtaaggctttgtgctttaatttaaatacaaggatcttcttcatctgttctacgcctctaccatctcattattggctgttacttttttttgaaacggagaccatgacagtcccacaagactaaacctgtgaccgctatgacttcagcagaatgagctacggagatgatgaacgggatggggactccccaaat

SEQ ID NO: 218082 - DNA, 342 bp, Glycine max
tttccattgcactcaatgatgagatgtgtgcattatcacgtgaaaaagaggctaagctttgaattgcagaaagtagccgttgggctaagctcatcagttgggctaagcgcataaccaccactaagtgtagcattagcacgcttagcacacaggagaatctagcagagcatcagcatcagaggcgtgcgctaagcgtgagatcagtgagctaatcacagaaggtgccttcagtctagctaagctagagactggcgctaaacccaatttcacttactcgcactaaacgcaagggtggcgctaagtgcaacggcgcgatatcaaagcctatctaagcctattttg

SEQ ID NO: 218083 - DNA, 202 bp, Glycine max
  unsure (1)..(202): unsure at all n locations
gttttatggaaattagttgtaaatttaattgaattatgttatatgatacacacatgttaaagtagttgcattactattagactctcttatacattaattggtttatatgaactgggagaatgattatataattagaaaaacaattaaggataaaantttctaggtgagaattaaatctaacatgaaagatgaaattagaaag

SEQ ID NO: 218084 - DNA, 465 bp, Glycine max
  unsure (1)..(465): unsure at all n locations
actaagctttacctttagtttaacccttagaacttcccggccaaattgttatatataaagcaatgttgatgttcaaaggacactttacatgcctttntaatcaactgacctacgcttagcaagttctggtcaatgttaggtacataaagaacatctgatattaatttgatacctgaacacgttgaaattgcaacagttccttttccttttataggaatatagccaccattcccaattctgacctttgagacattagttggcttcaaatccttgaataaagtcttatcatatgtcatgtggttcgtacaaccactatcaatcaaccaactttcacttgattcactactcaaggttgataatttttctttttatccttacctttgatatggatgattgcactattttcgctgcttgctggctggatcttctagaanaaatgctttntgctttcatcaacttcatgat

SEQ ID NO: 218085 - DNA, 463 bp, Glycine max
  unsure (1)..(463): unsure at all n locations
ttgtcttgcacntgagaccgggaccttagagcactgcgcagcngctacacaattgatcatgacacaactcggcggctagttgacatggacctaaagtggcacggccgtaatcaattgattttcctctctaggaatgtgatgaaatgatatgtcatccaaaaagttccatcaatttcctaatggtaagcctggtaacgcatcaatttatggtctctgggctcccattcacccttcaactgatggataccaatgtcgagtccccgtataccttgaataaaatgaccctgaagtcgatcgctgttccgatcccaagggcacatgcctcatactctgctatgttgttgtgctggcgagcccaacctagtcgtgaaaggtatatattgttggtcgggaaaacaatactaacccatttcatggccagtgcatagacgcaccgtaacacacgatccactgccttgtctag

SEQ ID NO: 218086 - DNA, 424 bp, Glycine max
  unsure (1)..(424): unsure at all n locations
cttggggttgttagttcatgacatggttttggagcctatttgatcagtgtgtcgacagtttgatccacatcacccaccccttatttttctaaggcttaaatatatttttttatccctgcaagataacacttttttcattttcgtccttgcaaatatattttttttcgtcttagtctttgcaaaatgtgtttgtttgtttttcatccctaaagtactttagataccgctttgaacagtaaaaaagtgctttgaacacacacaaaaaatgctatctaaagcactttaaggacggaaaacaaaacaatcatattttgtaaggactaaaacgattttttttttatgtgaacganaatgaaaaaagcgctaaactgcaaggaccaaaaatgtagttaagccttcttctaatacaaaagttggatttgag

SEQ ID NO: 218087 - DNA, 101 bp, Glycine max
cagcttgctttctccgaaccggcactatatgtttcgccctccatcaattcaactcgacatgacaggaaccttcccgtgggcgcattgagtgcaacattgat

SEQ ID NO: 218088 - DNA, 367 bp, Glycine max
tgtctgaacgtttatgccagacaaagaccaacatgttatccattattggctagtaccaagaagaatttaatctatccatggcccatgagcacaaagaggcggatgagtatgccctagtgtctgcggaaaatgaggctataagaagggtgatcgactcgttacatcaagaggctacaatgtggatggaccgagaagctcttactttgaacgggagtcaagaactatcccgattgctggccagggccaaagcaatggtgaacacctacttcgccctttaggagatgcactgacttctcatgtatagtcagcatatgatagacttaatggcccatataattatgaaccggtaggaagtgtgtattgtcac

SEQ ID NO: 218089 - DNA, 423 bp, Glycine max
agcttagaacatgcaatgtgagcagagactaattcgagcttaagctgggtccttttctttctaggttgcatctttctcctcttccctgcttgactctttacagtgcttgtgtgtgggtgaatcactctgtatagctcctatggtatatgtatatgtattgtttctgtagttggaaatcataacttacagaaagaaaagaagaatactagtagatcaacagtgtcatatactcatattcactggctaggagaaaaactgaaaaagctttctccatatgttgcttttggcagacaatccgatccttgcccagaaccgctgcagtgttataaccaattttttttaccttagaataatacaataaatacaatatgaacattacagtcagtgcttctgtgagtgtttttacccgttttactgatctcc

SEQ ID NO: 218090 - DNA, 613 bp, Glycine max
  unsure (1)..(613): unsure at all n locations
tctattgactaccaaaattacgagtttaataatcttcaggttcaaatacgtggtactataattccgctagttatcaaactcattaaataatatagcaatataatattgaactaactagggtggaaaattttcttactataaaattgcgttaaactttaactctaaactaacaagtatataaataaactaacgagtatatatattatggtgtcaatatttttaattttaagtaaaatttaaaaggtataaataaaaataaaaatgtttaaatttataaatagaacatgtttcacactatataaaaaataaaacaattaatttgagcattttaaaaaaattacttttcaacagtaaagccacatgttgaagaaagagatcatcacttttaataccatacatttattttattatacaaaggacaatagaaatacaacacgaagaaaaatcattaaagcaaacaattgctatatattgtatggttatgccttgtgggtgtggtatcgctcaagtatttaagagtgattgattatatgatagataacatcatttagaaaaaatactttttnttttctaagccaattagaaaaatacttgacaacctacaactaagtgg

SEQ ID NO: 218091 - DNA, 423 bp, Glycine max
agcttctcaaggaagccacctagtctataaatagaagcatgcgtaacacttgttgtaactttgatgaatgggagtcttgtgagacaaaactcaaagttcaacttttctccctttttcttccttcagtttcgtgcttgcccctctctctttctctccctctttcttttcctccattgaagcatcctctccaagcttcttatccaaggttcatcttggtggtgaagctccttcttccatggcttattccctagtggatggcgcctcctctcacctcttctcctttgtcttccgctgcatctccatggtggaaaatcaccattaaaggacctcattgaagctcaaagatccagcctccataaaagccccacaagcaaactttcatcaactacgtccactaaagaagggtttgtgaggaatggctta

SEQ ID NO: 218092 - DNA, 624 bp, Glycine max
  unsure (1)..(624): unsure at all n locations
ttctccactaagttgcctgatgcctgaaatgtcttttctgatggcagcggtcctagatgcagggaagaatttctccatgaacaccctcttaaggtcattccagctgaaaatggacctaggagcaaggtagtatagccaatcttttgtcactccctctagagaatgaggaaaatcctttagaaagatatgatcttcctggacattagggggcttcatggtggaacaaaaaatatggaactccttaagatgcttataaggatcttcacctgcaagaccacgaaacttgggcagcaaatgtattagtccagtcttgagaacatatggaacaccctcatcaggatattgaatgcacaagctttcataagtgaaatcaagtgcatccatctctctaagagtcctttcacgaggtggaggttgagccatgttctcagtatgaaaattagcagcggaatgttcaaaatcacaatattcagaatcaccctcaacagaatgctcaaaatgcacataatgaccaggatgcacactatgcctaactaatctatgaaagggtctatctattntatgatcaaagggttgtaaatcacctagattgcccctagtcatgcactatatgcagcaaatagt

SEQ ID NO: 218093 - DNA, 402 bp, Glycine max
agcttgaatcggacctgagtgtgaaaagttatgaccatttgaatttctcgaaagctttcgttgttcaatgtcgagcatctcgacatattatgcgctcgaatcgaacatccgagtgaaaagatatgaccatttgagtttctcgagagcttccgtggttcaattccgagcatctcgacatattatgtgcccgaatctgaccttcgtgtgaaaagttatgaccatttgaatttctcgagagcttccgatgtttaatttcgagcgtctcaatatattgaaagcctgaatcggacctcagtgtgaaaagttatgaccatttgtatttctcgaaagccttccttggttaaattccgagcatctcgacaatatatgtgcccgaatctgcctttgggtgaaaagtatgac

SEQ ID NO: 218094 - DNA, 563 bp, Glycine max
  unsure (1)..(563): unsure at all n locations
tcttatccaaggcaattcttggtggtgaagctccttcttccttggcttattccctagtggatggtgcctcccctatcctcttctcctttgccttccgctgcatctccatggtgaaaaatcaccattgaaggacctcattgaagctcaaagatccagcctccatagaagctccacaagcaagcttccatcacttttcacacagaggtcagattcgggcacataatatgtcgagatgctcggaattgaaccacggaagctctcgagtaattcaaatggtcataacttttcacacagatgtccgattcgggcgcataatatgtcgagtagctcgaaattgaacaacggaagctgtcgagaaattcaaatgggcatactttttcacacctgcctcacattcnggcacataatatgttgagatgctcggaagtgaaccacgaaagctctcgagaaactcaaatggtcataacttttcacacggatgtccgattcaggcgtatcacatatacagacgctcgaaattgaacaacgaaagctctcgagaaatacaaatggtcataactttt

SEQ ID NO: 218095 - DNA, 360 bp, Glycine max
  unsure (1)..(360): unsure at all n locations
agcttttctctttcacttctcatataacctgtttgctccgaaagtaagagtaggtcaccattcccacttttatgaacctctagacttctgtcaatcctccctattttatctatattgtcttcattgcttagtatctcgacaccttttcttttcttcccagaagaaatattaatacctgatttggtaagagggctctgagctacttggagtgctgaatggtagctattatcaagaccatgaccatctaagttacctttgggagacaagtcttgcatattgngtgggtcttgcagtttcttcccagaagaaatattaatacctgatttggtaagagggctctgagctacttggcttgctgaa

SEQ ID NO: 218096 - DNA, 678 bp, Glycine max
  unsure (1)..(678): unsure at all n locations
ttggggttgagaactatataacaacaccaaggtcctagttttagccttctctttcgttttaggcctcttttcgttttagttacttttttgttttggagagaaagaataaatttaagttttgcgattctagtttttacaattcatatagcaataaagtttcgttttctgcttcaatctgcaatctcgttttttgttgattaatggaaggctaagtctccaacgttgttttctcttgaggaggatcaagcacaactctctttgaggttttattattactattaaattctgatcaatttttcctcttcaccaattactctgtatttgttgctattaatccatgcatgcttagtgcttgattaattatctttgcgcttaatttagttcatgcttaattattagtttcgttcatgattaattggtgtatgtgttgcttaatcacataataacaacctcatgttaaatttcgcttagtaatttaatttaaggttggagtaagtggttgaactgattaatgataaattctcgtaacctaggataagagacttacttgtgaatcaaggggaaacaacgtaatttaattctgatattttctaattaaaaattactcgctgtntaatttacaaaaacaaacaacccccccaattcgntattggtttattactatctggtatgaacgtt

SEQ ID NO: 218097 - DNA, 482 bp, Glycine max
cttcaagccaaggccagattctcgtgcatgcagaggcttctgaagaagaaaaatgccaaactccccttaaaaaatttgatttcaagcttaaatacgtgggttggtccgtgctcacgtgcttagcgcaaatataaatcgcttagcgcgcataagtggatttcggcttaacgtgcttctctcgcttagcggatgagctgaagtggtgcgcttgatgacctggagcggtgcactcagcgaacctgacagctcatcttcttctggatgattcctcgcgcttagccactgagtgtcgcacatagcgaatgatcgctaagctagaagattggcttatcgagaaagtaaaaaatagcatttttgcccaatttgcctaattaaccccgaaattgaaaagaaattgattatttaaccccaccaaaaccaaaagttttaaattatctattacctatatttaatagaaaagtcttataatattacaaaacaac

SEQ ID NO: 218098 - DNA, 596 bp, Glycine max
tattattatttatacatactaacaataaggtacattaacttggtaaattaaattatcggcgtaaatgtacatcaatataaatataatataataaaatattaacaatgttgttaatggcggaaagccaaaaattcactataaaaatatggcggatgacgtaacagaaaatgacggatgtcatggcgaacaaaaaaaaaatacatatttataaagtcactgaaattgaaaaaaacaatggattgcattcaaataaactaaaaatgtttcatgagttcatacaataatcaattatcaataccaaataaactcattaaagagttcaaaataagaaaatgataaaaaataaaaggggtgtcaaatatcaaaaggaaaaaaaagctgcatacaaagaaaggggtgtcaaacagcaaaaacaaaattgaaaaaaaaaaataaaagctaaagggcaccacttcacccgcgatgctgtttgccttcatgaaggtagtggtcaccattccaggctcgtgctcgcgccgccgttccaagcttgtgctcgcgtcgtcgttcctgtcggtggttgcatcgccgttcgtgccgacattggctgcggtcta

SEQ ID NO: 218099 - DNA, 641 bp, Glycine max
agctttgtttttattttatatattatatttatataatcttatgtgtttttatcatattattcaaaacttattttatactttaaatatataatatgaatttttatctttaatttatattttttatataaattataatttcataaaatgacaatattgtattatcttttaaaatatttagatatgtgatttaatggcggtattgtttttacctatattaagatattatcattatttattataataatatttttatttatatttaaatttatttaatcaagtacataattttaaaaaaaaaataaattatatactaaagataagtaattaaataaaataataatattttctatttttaaaaacatttatatatgtgatttattgacattatttttttatctatattacaataaataacaccaatatcttaatatagacaaaaaaatgttgtcactaaatcacaagtattattttaaaagataaatattatatattaaataaaaaaacttatataaatatacctattctaatttatatgaaaataagaatttaatatttatatatttatatttttaaacatattatataagatttttaaaattttattaatttaaaaaagaaaaaatttggattttaaactattt

SEQ ID NO: 218100 - DNA, 544 bp, Glycine max
ttatgtaaccgagtaaattaggatggctatacatgtgttgtgtatgcaatgaccatttgtcctgatatcaatacatttccaagtacaaaattgattgatgtataaagaaagaactaacacatatactataatttccatacattcatgctacctcgagccatgtttttttttctataaccacttgaaataaattgtcacttttctttttcaatatcaaagtcttcaattaggaagttttccaaataaatcataagttatgtaaaagtgtcatattaatgtcctgcattgacccaaacttattacaaagttattttcacattaattttttacacactcaaataatgcgcaatcaacacaaaatcgctatcgacccatacgaattgcatattataatgactttacggattcgtaatatgtattagattcagcaaaggacaattatgtaattgtccaaaatggcttgggtgtccaagtatattggtgggtgcagtaagcaaaattggttttgtgatgaatgcttcattttaaaactgcaaactctgta

SEQ ID NO: 218101 - DNA, 521 bp, Glycine max
agcttttcaacacaaaagttagtcgtaaatgacgactaacaggatcccaaccatttcttacacactcagaacgacatatagaggggtggttagccaacgtaactccgagtatgatgcaacctccttaacgtcaaacgtgtatatatagacccagaggaaatacctccaggtaagttttactcttccagatatagacacataattgggaaatatttattacttattagtgtactttaattttctttttgcatcagtaaactaatgaaatgattggggaatgggagataatatcaaatgtctaatgtctactagccacacatggagtataagaataataaaaagtaggttcatgttgtaaaataaaaaaaaaaagtatcatttcttttttacaagtgtgggttgtagtcactaatcagtccacgttcatacaaaactaccacagctctatcattgaccaattcaaatctacacttgctttctattcttctttttctaggttggactggctacaacatgtcaat

SEQ ID NO: 218102 - DNA, 599 bp, Glycine max
  unsure (1)..(599): unsure at all n locations
taagaatatggaattgaacaaagttaacaaaaatggtagcatgcagcaagcttcatgtgcttaggatacagtagaacatgaaagtttgtattagagtcaagttgcgaactcaactcatttctagacttttttttttctgaattctcatttagtgtcaactatccctactctaattttatttattatgttttaatatttaatgttctatacttttgtagatttaatttattgttttaaatatactatagcaatgtgtgtgcgcacacgaatttatgcatttttaggtttggtgtatattttttatcaacaattattaatatacctcctctaattgtttactttttttttaatcccaaattcaaaagctagcctccataattctatattgggttatccgattttaacctttgcaatcatattttattgtattctcaatgtcccttggtccatatgtctctcaattgaacacgagagtaagaatgtgttattctcgtaaagttatgatcattgattcttttatacttgagtgaaagagtaaacacaaatatgtcanatatcacatattggtatgcatggtcacacatatttcatgttctact

SEQ ID NO: 218103 - DNA, 344 bp, Glycine max
agcttataagaaattcaaatggtcataacttttaactcggatgtccgactctggcgcataatatatcgagacgctcgaaattgagcaacggaagcagttgagaaattcagatggtcataacttttcacacggacgtcaaattcaggcgcataatatctagagacgctaaaaattgaacaacggatgccttcgaggaatacaaatggtgatagcttttaactccgatgttaaagtcatgcgcataatatattgagacgctcgaaattgaacaacggaggctctccataaattcaaatggtcatgacttttcactcggaggtcagaatcgaggacataatttatgg

SEQ ID NO: 218104 - DNA, 359 bp, Glycine max
tccattgttcaatttcgagcgtctcgatatattatgcgcctgaatctgactttggagttgaaagttatgaccatttgaatttctcgagagcttccgttgttgaattaggagcgtatcgatatattatgtgccggaatcggacatccgagttaaaagttatgaccgtttgaatttcttattagcttccgttgttcaatgtcgaccatctcgatgtattatgcgcctgaatctgacatccgagttaaaagggatgaccatttgaatttcacgagcgcttccattgtgcaatttatagcgtctctatatattatgcgcgtgagtctgacattcgagtttaaagtgatgaccatctgaatttg

SEQ ID NO: 218105 - DNA, 567 bp, Glycine max
agcttcggctaaattagtctaaacttttgtaagctatttaagctaagtctagtccaacaagagggatctgaagactaagcttagtttaagttagtctaaacctaggagggttgtctaaattaagcctagtccaacaagagggatatgaggatgaagcttggattgattcattctaactagggatcgaggtttagtaatttaggctagaacctagaaaacaaaagcatgattgattagagaaacatctttatatacatcagctggtttgttagaaagacccaacatctttacgtactgttgtcaatcttacttacttgcatttttactgtttttagcgtagacttagtttaattctattctaaatcatcaattatcaatgtttctttcaacaatgccttatttatgaatttaaccctgtctaagactagttccctgagttccatactcagattcatccattttaattttaaatacttgacgatccggtgcgctttctcgcaaaccgaatttcccttgaacatatttgtataaagaaaaagtggaccaaaaagtaactgcaggggaaag

SEQ ID NO: 218106 - DNA, 616 bp, Glycine max
  unsure (1)..(616): unsure at all n locations
tcttatccaaggctcatcttggtggtgaagttccttcttccatggcttattccctagtggatggcgcctcctctcacctcttctcctttgtcttccactgcatctccatggtggaaaatcaccattaaaggacctcattgaagctcaaagatccagcctccatagaagcttcacaagcaagcttccatcaagtggtaatcagagcacaagagctttaagtaggtgctccttaaacctccattaatcttttactttaccttctcttccattgttgtttcttcatttttctccatgtatctcctcacatgtcttgtgctaaatgttgttagcatgattctttagagtttccaccgattaaacttgctatagaagctagatttgatttttatggttcagatttcttggtcttgttcttgaaccatgaattgtgttaagtttaggttcctttgagttttgtcttgttattttttgtggctgaaacctaaaccatanaattcttacaaatatattaaagtagaagaaaacctcaaaaatctagagtgacttgttcacctattgtagttctttcatagaagtcatgtctagtcatgaaacttgtcacataagaattcttatg

SEQ ID NO: 218107 - DNA, 504 bp, Glycine max
agcttatagatgaactacatctgtatgattcttacggatgaagttcatccgtatgaagcatacagatgtattacatccatatgcattgttttttttccagaatatttattaaattttgaaaaatttagatttaataacattattaatatgtttaatttttattacatatttttgaaattgtggataatttatttattacaaattatttatagtgtaagtaaaagattaaattatttaggtacaataattgaatttattttaactagtaaaatgttaaattagttgttagttatagttttctatatttttttttgataattagggtgcaaaatttttatttatttgaagtattttttatgttaaatgagatgttttctaaaaaactttattattggggttttggaggccctggcgggaaattttttgtagaatttataattatttagttattgcaaattaattaagttaaggtaaaattgaatttttaagggcaaatttgtatta

SEQ ID NO: 218108 - DNA, 523 bp, Glycine max
  unsure (1)..(523): unsure at all n locations
tgtttgaaggacagattctcattatacaaagcttgctggaactagttcagcaaaggccagttatgagtgtagatcagttcattgacaatgtggcctggcctggagcctgaccttcttttgtgggagataatgaaagttttacagcccagtcacctcaacaacatgagccataaccagaaacgatcactcatttgaagccaccatccctcgagctgttgatttcgcaaaaagaagattagagacgagatctaatgaggctgctcatcctataccagtgccaccatcagctgacgcaccatttccaggagtggatccatcttcaccttagcatgcatcagactcttccactcctatcttagagatacatgagggccattgtttattatcatgcngccttttcttgaccacttcgaggaacttgacacccatcgttaagcaatccgtgaagttctgcgacatgtcgggagtcgaaatgaaacatttattgcgcaatccataaagtttcgtaacattccagatgccg

SEQ ID NO: 218109 - DNA, 345 bp, Glycine max
agctttttgtccttaagtgaaagacaatttttatattttggctttatttctaagctttcttgttgtttctaagtttgtctttaattattacttcatacaccgtgcaagtcatgaaatgaaacacaagacataatacactgattacaagttattaggttatctggtcatttgggtcaagggttgtttgttttaaattaaaaatagaggtgtgcgcaaggtttgaagcaaatgcagaagtaaccattgtagctagttgctagtgtcatgttagttatgcattacgtatgcatgcttgatcattatgtcttaaattcacatgaagccaatttccattttggatatgta

SEQ ID NO: 218110 - DNA, 749 bp, Glycine max
  unsure (1)..(749): unsure at all n locations
tgtattgctgcatcccactaatatatggagttgtccaccgctttgcctgagaataacaatggcttgaccacgacaactctggaggcggttaggggcaatggtgtatccaataaacctgttgttcataaataaagaatatatcataccgagaccgacataaatgaactcacgtaatcattgcataattgttatactatatacattgaatgtacctgttcaaaatgattaacaccattttaccgacatatatttgcggtgcctataaaattaagaggtggttaacttctacgagaaataaaacacagcattgttcttggtaaaccgaacaaagtttaacttttacagagactccataagagttcatgattatataaatatacagcccnanggacctatttgcctgttatgatctagcataaagatctagtatatttaaacccctgaattatcaaaaacatctgtacaatactatgtattaaacttactataagtcaggtcacactttaatttatcaaaatctttgtgcaaccattagaggatgtacttcttagccaccagcttgaccattacaagtttttcaccagtacggccacaaatcttcccctacttatataaacgcagatgaccacctactatattttcgacccttgtcaatgcaccgcccaactgcgctcttcataaggtcacagcaaatcaccttctaacttcttacacgtctagcacgctcaactttataactattctgcccg

SEQ ID NO: 218111 - DNA, 506 bp, Glycine max
agcttctcaaggaagttttctcaagaaagcttctcaaggaagctacctagtctataaatagaagcatatgtaacacttgttgtaactttgatgaatgagagtcttgtaagacacaactcaaagttcaacttctctccatttttcttccttcaatttcgtgctcccccctctctctttttctccctctttcttttcctccattgaagcatcctctccaagcttcttatacaaggctcatcttggtggtgaagcaccttcttccatggcttattccctagtggatggcgcctcctctcacctcttctcctttgtcttcctctgcatctccatggtggaaaatcaccattagaggacctcatttaagctcttcatccagcctccatagaagccccacacgcaagcttccatcaagtggtatagagcacaagagcttcaagtaagggctccttaaacctctggtaattttttgtttaccctctcttctattggtggttcttcatttttct

SEQ ID NO: 218112 - DNA, 594 bp, Glycine max
  unsure (1)..(594): unsure at all n locations
ttaacctcatcgtctctcacagtctttagatttgggagccaatccaatccttgtgttcggactctcagccacttatgatagccgccaatgatcccattactgcttcccctaagctctctgtcctttcttcacgctgcatcccatgccttgcgaactccttgaagtaccctcgtgttgtggtcactgaaaccccgtgcgatgaaaggcgtgatgcattcgtctgatggcacttctctcatggggtagccaagctgtcttatggcgaggacgggattataattaatacaacaccttgttcccatcaagagaacatttggacatccttcgcatgaagatagaatcttgattcttccttccttctagcgagggaaccaattaacagacgcctctccatgctgccaaaagttggtcccaattcgcctttcctttttcgatgcacgagcggtgaccttgtagcggatagacgggcctaccttcttggagaaaaaaggtgtgaaaccagccacacatagagagccagtgcacaacaaacaattcttgcgctgctcttttcacatnctccgtcgaacgtgtcatacatggccaaaatggcga

SEQ ID NO: 218113 - DNA, 498 bp, Glycine max
agcttgtaacagttgtgaatcatgccgaaagtatgtaaaagtagttcatctctgttttcttccataactacacaagtaatgccaagattcacgcccgtgacctgcataaaaaatgggaaataaggtcagtcattaaaagaaatgcctaaactagtggaggagactgcagtgactaaagagagcacacggctctacggacttgcaattgcaatatatcagcctacttataattatatttttctaatatgattccaagttgcaagaattcttcattgagtaacctcattgagtagctatatatgcatatagctacattgttgacatttttggcaagaatacatcttggaacctctaagctaatcaacatacaaacaagagctagaagagaaaaaaccatttttcacataacctagaatgataaagaggttcatatagccttacattaaatatcagtcccttaatactatataatacttgtacaccattgaatgaaatatg

SEQ ID NO: 218114 - DNA, 602 bp, Glycine max
  unsure (1)..(602): unsure at all n locations
tacccgcactattacccacaccatacatcaaacctatcaatgttaagaaaatgacatcgacagaaatgcagttgagaagggaaaggggcctaagctttacttgtgatgacaagttttcccctagccatcgttgtcctaataagcaacattttgttctacagtgggaagaagaggatgatcctgcatttcaaccagatccaccagacgaggttgagacagctggtgaccccagtttgcaagatcatcatttgtcttataatgctttaaaaggctcatcaggtcttggaataatgaagtttcaaggatcaataaatggattgggagtgcagattctactagatagtgggagttcagataacttgctccagcctagactatctcaatgccctggagttcctgtagaaccaattcctaatttgcaggttttggttggaaaaggaaatgccttgattgctgatagattaattcaagacttggaggtgaagattcaaggtcatacactgaagctaccagtttacctacttccaatttctggtgctgatctantgcttgaggctgcatggttggcaacaattgggcctgatctttttgattatagtact

SEQ ID NO: 218115 - DNA, 582 bp, Glycine max
agcttgttactggtttgcttctctgcaatggggttgtataaatgatgaaatgcttatagaaggcttttcttgcttttttgtccttgatacataattaggttggcaagaatcttcatgttctcagtcagatagagggtgttgacctagatatgtacaaagatgttgtgcttcccagagtactggagcaggtctaattgctttattgtttctatttctaatcatcaaagacatggttaactttctaaccataaaaaaaaacgattccttttcctcaattatcatgggcaggttgtgaattgcaaagatgagttagctcagttctacttgatggattgtataattcaagtcttccctgatgagtatcacttgcaaactcttgatgttttgttgggtgcttacccccaacttcaagtcagtgaacttgcacatttttttgtattacttctggaggatgccttaatgtatatatgttttttctcactccgaaacatgaaaattcaggttagtgaacttgcacagttttgttttactaatataataatattatattttattgggaaaaagcccaaattaaatattgaa

SEQ ID NO: 218116 - DNA, 845 bp, Glycine max
  unsure (1)..(845): unsure at all n locations
ggatgatacctgctttacggacacttaaaactaagcttccacaatgctaatctgaactcagcctttttccccatattaagcttttgtcgttccttgctttattgcatgattatgcaagacggaatcactgtttattaaagtttataatgcatgcactcgatcggtatgtattatatcagcaaagcgtacatttaggtttgattattatgggagccttgactaatttgactttttcggcatatatccttgtgtttggcatatttaaaatgaaaaaaagtattttatatgtaaataattgttgtatgaaaatgtggtattagttgaattaaaattagacatgataaataaattcatatttatgggtattatcttgaattgactccgactttgacagagataccgctttgataggatataaatatatgatatactcgaactatttaagtggggatgaggatatggatgaatatcaaattatgtctgtacccatatcatattatattttttttcacaatatatatatatatatatatatatatatatatatatatatatatatatatatatatatataaaacgtgttatggctataattttntaaatataaatcacttaacttaatatcttaataattaaataacaaacttaaaaatatacatgtaactaaaaatatagatgaattcttaattttttaactctccttttatttgtgatctgggaatatttaatatatcggggtggagctacaaatatgattatattacgaaacttcattatattaattttattgttaaacaatattttacactaactttaagatttttataaaaacgaagtggtggtcg

SEQ ID NO: 218117 - DNA, 747 bp, Glycine max
cagctactgatttccatcttttgcacacagaattcaggcgaaagaatgtggaagttggaagccatgaaagtatcctttcaaagagatcttcattaaggtcatcaagagaaaaggtgttgaagagtacacgttctccattttctggtgattttctcttcaagtttacacttacatgctgatcattacattccattgttgaacaatctgtggagaaccacaaagaaatcagatgttaccaagcaatcagctttttttccatttccaaagcctacggtactaaattactaatctcaaaagccaaaccaaagggaatgaaaatttccaattcgacccttatatatatatatatatatatatatatatatatatatatatatatatatatatatatatatatatatatatttatatatataaaaaaaaaagaggggccctgaataataaaactctaaagggaaccctctcgggcaaaaataaaaaacatcccgcctttttttttcccaaaacttcttcctccctctctttttagacatatttcttaccataacgatttgtccaccttcttaacaaaataagccccctctgccggtcctgagaaagaattttttttattgtgtgacccctctttaaaaaaaccctctttttttgaaaaacccctctttgatcaaacaaaaccccctccttccaggtggtttttgcacttaaaaaaaaaaaaaatattcttccccttttccccggggattaaat

SEQ ID NO: 218118 - DNA, 614 bp, Glycine max
  unsure (1)..(614): unsure at all n locations
tgtaaacactcagttttgtttatattttattttaatcagaattcttaagtgaagaaaaaccaaattgggctcctttgagcccatcagacaaaatctaattgaaataaattaggctacttgaactcacttcacacaaataatgttcggtctaagtccaatttacaaacgttcagacaaaaacaaaaagaagaacaaaaaaaaaagaaatacgttaaagttaaaataaatgatagaaaaaaaaaaagagtctactttctcggcaaaattgtcaagtcttgggttggtctcctctgcaccttcatcaccatttttcaaacttgcactccaagatactgttgtcaaaaaaatagctaagcaattgaatcagagactagtgactggtcacaaatgaanaatggctataaatattgatactgaaagtaggttacgggttcaaaaataaataatactgtatttgaaagataaaaagagagagcaattttgtgagtggatgttagtgtgatgaaagagattgaggcaagcaagtgctgcccggctgggactgcgagtactattattcctaacacggtcaacaaatatatgcctcggaattataaatactatgggttaaatat

SEQ ID NO: 218119 - DNA, 451 bp, Glycine max
agctttattcaagacaagaatccaagaaagtcaagatatatgatcaagtttgatctcttagaatctttaggaagaagtttccaaattgaaacaaacaaaaggtttgaccaaagaattctatcatttcaaattgagatttgctctctggtaattgattaccagtagttgaaaatgttttaatacaattttttaaaacctgtaatcgattacataagtcttgtaatttgattaccagaggggattttcagaaaataatttccaagagacatatctattcaaatgttttatgaacgaccacttaaatgttttaaagagagtttttattgcccaaacaagtttatcctctcgaaagatcaagagtttttctgaactggaatgtcttatcctctcaaaaagattcttgggcaaccacttgcttatttataaggaatttttgattgatctttatttt

SEQ ID NO: 218120 - DNA, 616 bp, Glycine max
  unsure (1)..(616): unsure at all n locations
tgatttgtgagttgattttagccttaatttcactttgtttattaatcaattgatccaaggaaacttccaaagaaaaacgtccgattgatttttttttattattttattcaaagatattttgattattttattattatttttcaagatattttgattattttattattatttttgctttttttggtttaaccgaggttaaaacgtgaacgatcgattagattttgttttaacagtgattaaaccaaattacaacgcaaatgatcgattgaaattcattttatcatttattaagtgagaaaacggcttaaacaatcggttaaagctcgttacaaacggaagaaaagaaaccgaaagtgaacaaaataaagatgaaagcttaaaaaataagaaatgaattgaaagtctcggattcaaaaacttacccgttgaagaacgaagaacggatgaagaacaatgaagaacgacggaaaaccttcacggattcgctcatggaaacgtctcggaagcgttacggaagcaactcggcttggattttcttcacggaaacaatttttttcacccaaaatagctgaaatgcatagccagngggatganggatcattggaacagtcccatt

SEQ ID NO: 218121 - DNA, 663 bp, Glycine max
  unsure (1)..(663): unsure at all n locations
agcttcttcttcttctccgcgagccaagcgccaagcttcttcttcttctccgcgaacgagggttnnaggttagtctccctaactccccctcgcttgtaatatncaacattgttgtagcagtgaaagcttaggatagtaaccttagggtagaagacgagagtagaagacgccagaaaaaatggggaaagggggcttacgacggcggcttccggaagatccgttaggggttcttccggaacttccggaagaagctgttccgaaaacattctggaagaagtattcttccggaagaaaccaaaggtcttccggaagaattccggaagaagggtttttccggaagaattccggaagaagggttcttccggatgacctttgagaattccgaaagaactttctggaagaaagtggtttttccgaataaatccggaaaaaacacttctttcgaaagtttttttataaaaaaatatgcttggccccctttaaaagaacgaataaataattggtattgattgtcccggttttgagagttaaaaaaaaaagaaggtttgaaatttggttttgaaaataaaagggccgccgccccccccccccccaccccccccccttaaataattgaatttttttaaaaaaaaatcggcaaccccccacaagaaagggttcccc

SEQ ID NO: 218122 - DNA, 653 bp, Glycine max
  unsure (1)..(653): unsure at all n locations
tgcttctacatccatatcatttttatcccatgtaatgtaggccttcttagctttcttatcattaaaagctttcttttcagatttctccattcttttcttgaaaattggacaatcaaccctcagatgtcctggttgattgcattcataacattttggagtagaggatgaatcttttgcccttttctttgatttgaaatttgttcttctttgatttcctctaactcttagaaatttgttgaatcaatttacaaaaagactgagatcatcatcttcgtctattttatttgaatcctctttatcacgtccttcttggattgaagatgaagctttaagagcaattcctttctttttcttaccattctcctcatgctgattcaatctcattaattccatttcatgtcctgcaacttcccaaacaaagtagcaagagacatgttagaaagatcccttgattcagtaatggtcgatacctttggttgccattccctgcttaagcatctcaaaactttattaataagatcttcatttggaaagatttttcctaaggatgccagatgattaattatgtgtgtgaatctctcttgcatgtcctgtatgngttcattaggatttcatctaaataattcatattcatgagttaaagtatctatcct

SEQ ID NO: 218123 - DNA, 398 bp, Glycine max
agcttcatgtagctttttctagaagcttcattaagaggcttcctccagaagcttcctcgtggcttctttgagaagctttctcaagaggcttctttgagaagctagatccttatctatccacacccctctattaactaaattaacttccttaaaaataattaccgatgaaaataacgcaacaaatattcaaacatcaaacataattactaatagtatatagatatatatatatcagggtgttacaactctcccacccttttagaaatttcgtcctcgaaatttaccttactcaaacaaggatgggtgagcttctcacatctgactttctaattcccatgtggcatcttctcctgatgcacctccccagatcaccttgaccaacagaatctctttccctc

SEQ ID NO: 218124 - DNA, 632 bp, Glycine max
  unsure (1)..(632): unsure at all n locations
tgtaggattatggggtacccatcacatgtggtactaggtggcggtcgagcgatggtgcacaacaagttttccacatccacaaagcgcgcataaacccaccatcccctgttgcccacctccaactgagctcacgtactcccacgtagcccataacctcgtttctctcaacaccgggtccccatcaatcctcccaagcttccccaacatcaaagtaaatcaacattcaaacagcacaaattaccacagccaagaaaacagggcaaaggcagaaaactctgcccaaaacaccaaccaaaatcacagcttttctcacttaaagaccccagtaacaattccttcgatccaattcgttaaccgttggatcgactccaaaattttactggaagtctatagtacataagcctacattttgaccgttgggatctactagcaaacatccagaactcattctgcactactctttccacagccaaccacacacaagcatttttctgcacaaagccaaaatcctgctgcacctattttgacagcanaattctgcataagtgcagaattcgaannatcacccttctctcatccaatcttgcccaaatcanatcctacaagtcccaaatcatgtatcaatcatgtct

SEQ ID NO: 218125 - DNA, 577 bp, Glycine max
  unsure (1)..(577): unsure at all n locations
agcttcttcctcaacacttacaaaaacgatgtaagagaaactaataaagataaccggaaaaacaaaataaaattctctctctaaattctgaaactttctctctctccttctctttgctgaacagaacctaagcaaaacaaaagctagaaaatttaaaataagcaaggaatgaggcacaatgggtttgagtatttaaattttgagtgttgaatacatactcaatttttgaagttttatttgctaacattgcctaaaccttacatagaaataatgataaattgacccactacaagaaaaatgtttatttccgacgaaatttttcccacggaaaatatttcatcggaaatgctgaattttcgcatggaatttaccgaaggaataatttccatgggaaattagcaaaaaatcgatgaatgtttttgacggtcaattattctgttggaaagttgacaattccgacggattatacgaacgaaatgtgtatctgtcgaaaagtaaatttcccaaacatatgatgcgaaccatagcccattgagtcactatgtntttttgcaagcttggtatgttgatatgaata

SEQ ID NO: 218126 - DNA, 702 bp, Glycine max
tgactttaaaccttgacattggatccttcaactcatgaagtgtttctaggtccttatgctctttggatagttctatattagatatatccctgacatatcatcatatatctaaccaatgatatactacatatttatatatatattttttaaaccaacaaataatttatatattatgggtattagagataccatcagttacataaaataatcctcattgattaattggtattgcttctagtgattgaataatgatatctattaactagtagtttaaattataataattcgcataaaaaatctctctactctaccacagctttgcatatatgcacactttcaccaatatttcataggcccaccttgtttgtttctaaattatccacatttattcacagacacttccactatttcattgctagaaatactcaaaggccgactttgcacatgcatagcgttatactaataccacgtgttagacagtgttgtgagttaggtacctatgtgttggatgataatttctgaatcacgttattattttttgttaaaagttctttaacttttttctctcagcctctatttttgtccttgcattcaattatatcattgttatttaactctgttaattgaatgtggggctaaaagtagaatttttaagaaaaaaattggaagaaaatgataataatcattggactaattttatct

SEQ ID NO: 218127 - DNA, 505 bp, Glycine max
agcttcaagatgagcagtcatccttgcagcccataattcgtactcctcaccatcaaaaattggtggtgaacctgctgtgtatgatgtttctccctccattgtgatttctctcaactcacagatcccttaatgataagagctctagatacctatttgttgttttttttaataacagcaggcagaaatattaaagaatgaaagggagcataaagtaagaaattgagactgcaaaagcttgttttattctgatatgaagcaacgtatttaaaatcatggaaaagatagtaactgctaacaaaaagataacaccactaacagatcatgactagagaataggatcaaaactgctttatcctatcagtcaacatgacttttatttttcctaaaaaatagcaaaagaatcttatctactatagtttgttaaacagtttcaacagtcacatcttaacaattcaaaacaaaattgtgataaactcatcccttacatctaagtgactcccatgtg

SEQ ID NO: 218128 - DNA, 506 bp, Glycine max
tattctacttacaaaatcgagtgtcaattcttgaagaaagtataaagaccacctctctgatattaccaatttgataattgagaacaaaggctcaagattcttcaatgtactctaaaatttttttgctaagtaaacaaaaattagattaactacaaaagctaactagtaatctgttaaaaaaaaaaaacctcttctcaaccttgcattttgtaatggaagaaaacaaattaaaatatgcaatgataaagaaaaagttgcagacaataatataaaagaagacaggagatcatcaatgtaattgtggttaagttctggtgtttctgcttttatttcttagcataccaagcccatccattatattcaaaataaattttttagttgttatctaagaactttctaattattgaaaagtatgtatggacacatattttttcaacagatctacttggcatttttttgaaggagttcattacgttactactgcactcttaattttttgtagtttt

SEQ ID NO: 218129 - DNA, 546 bp, Glycine max
  unsure (1)..(546): unsure at all n locations
agcttgtttgaaggacaaattcttattatgcaaagcttgcaggaactagctcagcaaaggccaattatgagtgtagagcaattcattgagaaggtggcctagcctggaacccgaccttcttttgtagggaataatgaaagttttacagcccaggcacctcaacagcatgagctagaactagaaaatgatcactcatctgaagccatcatccctggagctgttgatttttcaaaaagaaaattagagacgagatccaatgaggctgctcatcctggaccagtgcccataccagctaactcttccactcctatcttagaaatacttgagggccagaccatactagtcctggttctgggcacttctcctccaactactccagtattgcaccaaacagataaagaggatgttcaggcatangacatctaggactagtaacaggaattttgatttctgatgatactttttgctttttaatttattattattattattttgggtttcgtacagatttcctttaggtctacatacactactagttttatttat

SEQ ID NO: 218130 - DNA, 665 bp, Glycine max
  unsure (1)..(665): unsure at all n locations
tcctcggggccattcctgcgaaggcaaacatttggaaagttaattttaccagtgggacactactcttaaagcaaaaatggcatataacctcctcccataaatacaaacatcaatgtaaatttagagcaagcttatgcgcatatttccttacgaacgttctcttgcacaagacattctattaactaagaaaaatgcacccatacacaatcaaggcagcttcgttacctagattatttacacgtacttccaaggtgtatttgttacttacatcacacacatctccttggctaaatttacatacaggcatactcaaagcattttggggtaccaaaaattgcacatgtgcacatcttggtatttctaatacctatacatacgcaaacttcatgatgaatcttgactatcttcacaaaaaggtgctacatttcatgctttttttttttcaagtttttgctacttaaagccgcatgcaaattcaagcatattttcctttgctgactaaaatcgtattcaaattaaaaggtatattttttgtaatatgttttcttcacataacatgcaacacatttatatacatttcttgtgagacatntttgactaccaaaaattggatatgcatacattcaatatttttgtattcatacccaaagtgcaaattgccaaag

SEQ ID NO: 218131 - DNA, 303 bp, Glycine max
agcttgaaggcaaactggatgcattggttaacttggtaacccacctggccttgaatcagaaatctgtacctgtcccaagggtttgtggtttgtgctcctttgctgaccaccatacagacctttgcccttccatgcagcaacctggagcaattgagcaccctgaagcttatgctgcaaatatttacaatagacctcctcaacctcagcagctaaatcaaccacaacagagcaattatgacctcttcagcaacagatacaacccttggatggaggaaataccctaacctcagatggtccagccct

SEQ ID NO: 218132 - DNA, 515 bp, Glycine max
tctatagttatggaataatcgattatcaaatgtggttattgattactacgatacacgaagaactcctaaggtttcctaacacaatataaatgattactaaacgggggaatcaattatctggaaccaccacgacttccttctgttggaactatcttatgtaatcggctactaaaaatggtaatcatataatttgatgattcttatcaaatttcaagagaagtgagttttgttgcttgctctaacactatgtaattaattaccaaacttggtaatcacttacactatgccgaattcattgcttctaagaaactatgagattaatacatttatcttatcatgttggattcctactaaacctatatgataaaactaacgtctagagcacttgacctgcctagtctaaaaacatttgatagaaatgtcacatcttaaaacacttgtttggcgtcgtaaacttattaaaaccaacagatcctaacactattcttcaagtcttcaatcactttgattcaaca

SEQ ID NO: 218133 - DNA, 528 bp, Glycine max
agcttgaagtgaaaaatgttaactggagcaacccaatttttacatcaaagcctaatcagcatcaacactactattttaatctttttctcataaaggattcaatcctactgatgttgtggtgcaacagagtaatgcaaggtctatttgatgccagtaagtaatccttttatttccaaattcagagcaattccaacaaaaggttccatgaccaaccctaattattaaagaactcagttcactgatatgtatgaataaatgatgcaagaaagcatgcaaactatagaacaacaaagaaattgtttcttctgcagattctagataatgccaaagcctaaagaaacaagctaaagtattatggttcacttgaaatattaaagtggaagaaatgtaacaagtaatattgttttttgatgcatcagaacaaatgcaacaagtaatatgatgctattatacatcacggatatagcttaaaataaaaagcaaaagggaggaaaaggaaaactccatttattggactaaaccataaaa

SEQ ID NO: 218134 - DNA, 362 bp, Glycine max
tgtaatttccttctttttcgatattttgaggtgacaaaaagatttgtatcaatggtgggtacataaaattcagaagaaaaatattattgtttaagtgtggttatgtagtggctaagtggagacatgatctgaataatccttctactagttcataagtggattgtctctggagtaaaatagggacaacggaatgcacaaagatgggggttggtggctagaaaccataatggaaatacgagaggctttaggtttccaatgaccccttcaaagcagtttttgaagaccaatggcgtagatgaagtcccttatcagttggacattcatatttctaaagatgcagttgaataatactagcattctat

SEQ ID NO: 218135 - DNA, 458 bp, Glycine max
agcttcatgatgaatcaagattgattcaaagaagttttgatgataacaaaggtgatgacaaaaagttcaaagatcaagaaaaacttcatgataacaaagatgatgatctcaagaatgaaagaatgagttcaagatgttcaagattgaatcaagaacacttcaaggttcaagaggaaatttgatttcaagaatcaagaatcaagattcaaggttcaagcttccaagaatcaagatcaagattcaagactcaagattcaagaatcaagataagtatgaaaaagttttttcaaaaactaagtagcacatggatttttctcaaaacttgtttaccaaagagtttttactctctggtaatcgattaccagattgatgtaatcgattactattagcaaaatgtttttgaaaaagatttcaactgaatttacaacgtttcaattgatttcaaaatgttgtgatcg

SEQ ID NO: 218136 - DNA, 600 bp, Glycine max
tgttggccatggatgagatcaactttgttgggggaggaagcatttcttataatcaataacctaggcaaaatcagaggcttagaaaagaagagagaaaaccaactcttcaagagaccatgcttcaatatatggcctagaatgaccaaagaatgaagttgttgtcccaattgaccaacatacaatccctcttatcacaaagaaagtcaagcaaccttcacaacctaaaccaaatcctaagaaggaggatgtcaatgctgtgatgactagaagcaagatgattcaaaaggactccgaggagaatgaaggttctttcccaaaaactgtagatgacatccttctaagaagaaccaagcaactaggaaagttaaggttcctactgatgggaatcctatggcaagcaagaagggtgagaaggaggtactgacacctcctcagataagtgttcctttccttctcaaatgaagaccattgtgactgagcctcacccaagtgtggggaaggaagatcctccaaggaagacagtcattccaaaagaccctagatggagtaagaaaaatggagatagcatcaccattcaaactcttggctatggagtagatg

SEQ ID NO: 218137 - DNA, 397 bp, Glycine max
agcttggataaggtagcttcggcagtgtgtactggggtcaactttgggatggatcacaaggacgactataatttttatttagttagttattgttgtgattgttattgttaccgttacgcatcttgtgaaatcagctggatttctgagtcttctaaggttattcttgctcattttacccgtggatggggggatctagtgatccatttgctttaataatatatttgggtggctttagatgttaactaaactgcatattcgtaagatgatgaaccatatagatgagttttctcagacacatgttcttttcaataatggcatacattgacagatctagtaagtcacgtgattattccccttccttgttattttctttacagttcccatacttgcctaaact

SEQ ID NO: 218138 - DNA, 557 bp, Glycine max
tgtaatgcacctgatgacatacctaagactgtcgtacgaactcttaatcagggttcatctcctatgagcatggactttcatccaattcaacaatactttgcttcttggtctgctgctcttctaaaggctttttaataacattgatttgatttatcacttgcatgtttttgctatcaagtttcaatttgacttttatttgatgcaatatgtcagttggtacaaatgtgggggacattgctttgtgggaggtgggttctatggagcggttggcctcaaggaatatcaaagttcgggatcttagggcatgtccaatgccatttcaggttttctctttaccttaatgtatgaatgatctttatatgaatttgtgcttacctctgagactgtcatgttgtcatgactgaagaacactaattatgatcaatgcacgcggctcttgtcaaagatccgggcgtttctgtgaatcgagtgatatggagtcctgatggagcattgtttggtaaactgagaatttataattcttcaatgtttaaatgatatgatatagaataccttga

SEQ ID NO: 218139 - DNA, 465 bp, Glycine max
agcttagtaaagtttagcttgagtgcaagtgttagaatcagtgttgtaaattgcacaaggccaaaatccgccataaacatatggcggatggcatggtggacaggaaaaaaatacacacacacataaatactaaaaaaacatcagtgtgggggaatttaactcttgggtcaaggaagcaagagtcgtgcattgtaggcctgtggacaacttcactcagcacttctctttggctgcttcgagggctactaatagaaagtggaagatttggtggatagcagccacagtttctatttggaactataggaatgatatgatttttaaaaatcaacagtttgtcatctctaagttggtggataatgcaatttttctcacctggtcttggttgagggggtgggaaaaggactttgccgtttcgtttcaacaatggtcctcaactatgtcttttgccttcacctaatgtgggaa

SEQ ID NO: 218140 - DNA, 651 bp, Glycine max
taggaaagtataaagttgaagtggtctaggcaatgaaaatagatcttatttgaaaatgggttgaatattgagttgcccaaaattgttttgttataattctggacacatcatgcagctaacaaagataaacaagagtgaatgaaaagcaaaggtccacgagttctgtcatgtaagtggtcaaaattgaaactacatcaaaaagccaatgcctttttgagaaacaagataactcattgctgaatcttatcattcagtattcacctctaataaagtcgttatgattacttcctcttacaagagagatgaacacatttgaatgtgaccatgtcatcataaaatttgcattagaggatccatttccctctcactcctttcatgcaacattgtccgtttatgcaccaatttttaaggttgaagtttaatgctggccaaattaaactcaaccatattgacacaggatatgacaaaaaaaccaataaagcagttaataaacaatatatgtataaatcatactgatgatggcaattcttgtcgagtagttttttccttgctgtagatatccacatgctttgaaaagtaattcttaggattttgtaatttatccttgatttttgcacagaaagaaaacctttcactacctgagattacaaa

SEQ ID NO: 218141 - DNA, 606 bp, Glycine max
agcttttattaataaaatcatggtcaaggcaggctgagaaggcagagatgatgcgattatgaaaagaaaacaatcaaatattatttcatgagatctagtaaaacaaaagcatttaacatctatgcaacaacattggtggcaacaggttcctagaccatatgaagacagatccatcaccatgctgagaaatacaataggtggcatcctcagtattgaaaaatgtgtcaaagaaaaaaagctgctaagctaactaacaaggcacagcacacagccaattgtaaaggagaacatgaagcagcctaaactgacatcaaactgccacttgacatcaagattaaatttgaaacaatcagacgcaagtggttgaaacttcacaaggcaaagataaagtgttgtaatcctagccacaccttcatcaacatcagtgcacaaagctcaacctatttatgaaagacttttttccatacactgctgtttgcccttagtatcatgaaatccaaccaacaaatttgaggcaacccagaagagcacaacctaacgaaacccacttagttttttgtaattgtagatatgatgcaagccataatgccatactgagaaatccaa

SEQ ID NO: 218142 - DNA, 674 bp, Glycine max
  unsure (1)..(674): unsure at all n locations
tgttattattttactcctccactacttattttctggatatgttcatgttaattaatgcctattaaatattttaatccccaacatatgaacacggaagattccagccaaaagatataattgaacacagagaataccacttttttttttggtctagaagaataccacctgtttaagagaacatgcatttacaagttattggtggttttttcttcttcttatgatagcatagaagaatattattgtgaaaattctgaagataatttgtcttatcacatgaaagtttgaggacacaatttctgcccaaaacataagctcccatcactatctacttcatcaacagactacatatatgtgatatgattctaaaaacaaaacacttataaacagccagttcagttaaatccaagcaatacttttccaagtctgccaacccttaaaatatgggttagaaaattaagctcgcccgccaatcacatcaaaaaggaaaattaaaacacgtccacaaaaatatttaaatcaaaagaaactcacgctgatacattagtttgtggaaaaattctgtcttcactttttccatactnagggtccgtgactgattcatcagctaatcgctatcaagtttcaaatatatcaaccaaatattgagataaatgccacaaaataaaaaataaaaa

SEQ ID NO: 218143 - DNA, 534 bp, Glycine max
agcttgagttcctatgactaagtcacaattgagcatttaccctaacttccacaagctacccacacatccaataatggcacccatgtatgcacaaaccaattctataagcaaaattcacaaatttatgcgcaaatgccattaaggcatttcaccgaacacttggtgggtgcacttttgggtataaacaggaaaggaatgagggcaatgcggcttgcccaatcatttcagaacacaacctaggcctaaggccatcccctacaaccccccaattcaacgaatcaaagcatgaattttccctaaaatgtctcacgaaattggtcaactatgtacaatttagagcataaaaaggcatcaatggaaagctagagaccaaaggatagtgtacttacttgcatggagtgatcaaggacactaaaatggaagcaaaaagcacaaaatgggggcctagggtcagaaaaaaccctcaatcccgcgggtgctgcgttcttgagtgaaggggagaaatttttggtgaaaaaaactgcacaccccccc

SEQ ID NO: 218144 - DNA, 580 bp, Glycine max
tctcccccattttctataaatagggggagaagtgaagtagaaaagggttcagccccttaggcacttctctctctttcgaatttgcttaggaaaattgtttccgtgaagaaaatccaagccgaggcgcttccgtaacgcttccgagatgtttccgtaagcaaatccgtgaaggttttcgtccgttcttcaccgttcttcatccgttcttcgttcttcaacgggtaagttttcgaatccgagactttcaattcatttcttatttttttaagctttcatctttatttcgttcattttcgatttcttttctttcgtctataacgcgcttttactgtttatttaagccgttttctcacctaataaatgataaaatgaacttcaaccgatcattggtgtcgtaatctcatttaatcactcttaaaacgaaatctaaccgatcggtcatgctataacctcggttaaaccaaaaaaagtaaaataatcaaaatatcttgaaaaataataataaaataatcaaaatatctttgaacaaaataaccaaaaaaatcaatcggacgtttttctttgaaagtttccttgaatg

SEQ ID NO: 218145 - DNA, 445 bp, Glycine max
agcttttgaaggtggtatgctttggggaagaaattaggtgaaaatggcttcacctctccccccttttaaatttttacatcagacacactcacccaggcgagctaaatttttttttttttttttacaaaattgggttattcattgttatatttcttctaaaaatcctataattgcatataagcttaggagaattcaggatataattcaaggaaacaaacaagcataaaacaggaaattaaagagcaaagttagagatactagactgcctcataggagcacttctttaacatctttagccggacgcaggttgatgatcaatcgatcatgggcctagcacctgttcgtacctaccccaaagattgaacaaagaaagtggcatcatgcaaatgtgaaacaatactacacgatgcatgcattacctttcacttacccctattggttatct

SEQ ID NO: 218146 - DNA, 585 bp, Glycine max
tgagatgaggaagtgttgaagggtgaaactttttgcttttattgttgaccacagagtggtacctggagatatgtcgcgggggtcaggagaccttggggacgtcaagtggggtgctattgcccaaaaccaagcttgaccaatcccgacccaacccgggcatagtcggtcagtgagaacctgtgatgtacctaagcaggcgagctcctggcagtcaacagataaaaggaacaaacaccacaaagcaaggaggcttgtggtggctggccagctgtgaattttgtgtgatatgtggattatggcctctggtaatcgattaccaagggtgggtaatcgattacaaggcttaaaaatgaagacaggaggctgagatggtctctggtaatcgattaccaagggggtgtaatcgattaccaggcttgaaaacgaagttaggaaattaagggagcctttggtaatcgattaccagcctgtgtaatcgattacacagagggatgggtcactggtaatcgattaccaggtatgtgtaatcgattacacagtgcatttttgcatattccatgttctgacgctgtgtaattcgagttt

SEQ ID NO: 218147 - DNA, 452 bp, Glycine max
agcttcagatcactaaggcggattcctatatttggttttatctgcacttcctccatatccttttccacctgaattgactcattgactgccatgtgtgttttttttcaaaggaatatcatcatatacccaaaaaatattaactagttgcctagaatagacctatatcacaaaaaaaagctaatctttcataataaaaggaaataaaacaacaaacttgtacttgtacagagaattttttttggaaatagcatcctaaagtagtgctatttacaataagactcaacagaaataaacctgttctacaaatctgttctaataataaaaaaataaaaagtagtaagtagtaacataattattccttttatatttaaaacataaaaaatgtaactatcctctaattttttttaatcaactctttcctcggcctacataaaatttcattggatcccttt

SEQ ID NO: 218148 - DNA, 616 bp, Glycine max
  unsure (1)..(616): unsure at all n locations
tttgtcctgttgacttcatgttgtttttttttattatccatacaatgcgcaggccgaaaatatgttatctgatatatatccaggaggatctcccaaagttggctccacgtattgggatcagatccttgaagtgggagtcatctctgtgtcagggcgtcttctgaagcgcttacagaagttcttggagcaggtgaggacttgaatattatttaatggtgtaagaatcactttcaagaaaaccagaatgtcccttacaatttgcaagctatagttccttattctgattttaagcagtggcacaagccaactatattactatgttagcttttgttatttccattatggtgattgtatatgcagatacaaaacactttctttggcctccgttaacagttttagtgtttgaagttatgtgattgcctgacacggtatcataggttctctgagcgattaatttagagttcaatactctctcactgagcaatgcacaattagttccctctgtcatctgcagtttattaacattttcaatttcctttttattgtgattttcgccttacattttctggagaattgcgccaaattccacctatacttntatgctcctatcctattg

SEQ ID NO: 218149 - DNA, 386 bp, Glycine max
agcttatcattcaagaatttcgaaaatcttttgtgttattcacattccacccaaagattatgtttactcattttgaggtcttcataatctttgtgtgcttgtgaactttctctccatagatcatatctttattctttctgataattgaagatcattcagctccctcagatccttttgaagatcttttaggtttttttccaactcctgaaagttattaagaaaagtagattttatttttggcaatcgtctcatttttaaaacaaagcttggactctttttccttgagaggtacacaagctccacatgtctgagtatactcattcagtgaaacatttacttgatcttgaagattttctcaagtttaaaagatctttggatagtttttt

SEQ ID NO: 218150 - DNA, 314 bp, Glycine max
ctgataggaacgttgatgttggctacgtccgagtacgtgagctcagtcgaaagtgggcaactggggatggtgggttcatgtttgatttgtgaaagcgggagaattcgattgcgccattcgccgatctcctcctagtaccacatatgacgcgtgccccataatccactatgcttgaggtgagaaagcgtggaggagttagtcttactacttttgtttgttgaccatagagtgagacttggagatatgtcgcgggggtcagagacaccttgtggacgtcacgtggggttctattgccctctaccttatttgaccac

SEQ ID NO: 218151 - DNA, 401 bp, Glycine max
agctttcttaagatagatctagcgcgtccttttctcttagagacctccccccatgtggaggttgtttcatgttctccaactgtgcaaaatcttaatgctcataatctgaatgctcaagattataatagctctagatcaagatgttcaaaatgacacgcaccagattgcactaattctccacttatgctatgctcctaatgatccatatgtataaattgatgcctacctaatctatgaaaaggcccatctatttcaggatcgaatggttgataacctaaagaatagccccttcttcatacactacattcaacctgcacacaaacttatgccctgtcctgctaataaaagtgttaggaatagctacagtttccctcaattgacatccaactgacttgtaattt

SEQ ID NO: 218152 - DNA, 352 bp, Glycine max
tgggaagtccaatggatctcgcatggatgatcgattcactatgcagacaagagacccccttatatgcgatgaaacatacgtgtctgcagagcgcaaacctcatggaaattgtgattacaggggaattgctactataataagctacatgtgatgaattatgtctctacttttacatgactatgattaagattttaatacatgggaataccactatgttgagttgttagacgcatcaaatggctttgttgcacaaatacactattcttatgtgcagcatatctcaatagcatgcgttgactactgtgatgaccagtcccgacatgggctatgacatagaatgtgaatttgaaga

SEQ ID NO: 218153 - DNA, 626 bp, Glycine max
agctggacgagcttcaacatatgacgtcaccgttgacgcatttattgggcctgatgcaaagccctgttggttgaaaactacttgacctctaactgttttaagatgtttctcacaaacggtgctcgtcccaacaagctatctatgcatggattttatgcaagacttgtctgataaaccttacctatcgtacggccttgcactggcctattcctaattccccgaccctatgcacactgcatattgtttgcgctcacttcagacaaatggtccaacaatgcccttacttgatgactctatgcatgtctactacttttgctactataacatcttgatcctgacgcatgatgaggatttatggatcatgggcctaggatgagatggccctcgtgcctatttggtttaccaacatggaatgaagccgcacagtagacgtgactgcgctaccacttaccttggtttatcttttccttgaattcggcgttgtattgaccattatttcaaacaaatcttctcttgtcgttcgatgcataggatgataaatatgcctatgcctgcatgctcatgatcaaggcagtcaagtgttacaaatttaaccaaatgtttattatgttcaattttacttaaac

SEQ ID NO: 218154 - DNA, 293 bp, Glycine max
tatctgctgctttagttacgatgcactacggtggctagccttagcgtcactcacatgcatgtggtgatctttgacttactacaagaacaatgtgatagtggacgcgatacttgggaagctcccgccctctagcatatgcacattcatgggcctgatgcgtcttagagcagcttctaacaacttgctatttatagcacactcttactgataaaagcttctgaatatagatagatatatatatagatatatatgtattgagaagaacaacctgtgctaccataatggtgtgaaaa

SEQ ID NO: 218155 - DNA, 480 bp, Glycine max
agcttttttgtaatggatatgattttcactaacaaatatggttaaacattagactttgaatgtatcatccaacgagtgcaaaaaccaacttatttaaaatcaaatgtggactatcgtccaatgctagtaaaacagagttttcaaaaaggttttcaagtgcagacttgtgcaacaaagtgtatcaaaatcaacacaaaagaatactaatcaagtagctttagagagaagtagaaacacttggatttataccaattcactcaaacaaagctatgtctagttttcctttgcaaatcaataaagggttctactaatcaaaacttgattacaacaagtctatgtaccaaaagcgagtatttttcagcctctatgcattggcgagtattttcccccaatactcagcttttttcaccaaagtatatgtaccaaaagcaacttttttgcccttcgggccttccatcactcggaaaatcttctcaattt

SEQ ID NO: 218156 - DNA, 663 bp, Glycine max
  unsure (1)..(663): unsure at all n locations
tgaaggtaggagaagatgagtggagggagagggagtgaagaggcacgaaattttatgcctcaaatgaggtctgaactttgaagtgtaattctcaaatgatcaaagttacaacaagtgttacacatgcttccatttatagcctaggtagcttccttgagaagcttccttgagaaacttccttgagaagcttctttgagaagcttccttgagaagctagagcttagctacaaacacccctcaaataactaagctcgcctccttgagaaaattcctagagaagctagagcttagctacacacacccctctaatagctaagctcacctccttgagatgagaagctagagcttagctacacacactttctataatagctaagtcgtcatattcccacatggnttcttcttctccaattntcaacaaatatattcaagggaaatgaaacaccggaaagcataccgggtcatcaagtatttaaaattaaaacagagtgatccgagtatcgaacttagggaacttgcttattagacaaagttttattaacgagtaaggcattgttggaacacacattgacaattgatgggtaaaaacagaaataaactaattctatggtaagaataataaatgcaagtaagttaaagttgacaacaacaggtaaaaagtgt

SEQ ID NO: 218157 - DNA, 713 bp, Glycine max
tcatacctcacaaaatatatatatatatatatatatatatatatatatatatatatatatatacatatatatatatatatatatatatatatatatgtttaggtagaaagataccttggatatgcatgtatgtagcaaaaaaaatttcacaaaatatatatatgtatgtttaggtagcaagataccttggatatgcatgtatatagcaaaaatatctcacaaaacatatatacgtatgtttaggtagcaagatacctgggacacacatgtatatagcaaaatacctcacaaaaatatacgtatgtttatgtagaaaaatacctcatgaaaaaaaagagagcgagccagaaaagaattataagaaaaaaaaatgaaagagaaattattaaaaatattaaaaattattggggtgggtagctaaaaaaaacatggttgtgaaagagataactccagttttttttgaaaaatgcgcttgtcataaccagttttgaaaaaaatgtgtgtacacatttgaggggaaatgctttaaaaagtttttcaaacacccaaatagactgggtgaatgcccaaattatagaaaacatttttgggaaaactaggtgacttaaaaagggaaatgaaatccgagcccaatgggacaggaacataaaaacttgtggttgagggtccaagggtgcatgcatgaacattttgcaaaaatatcctaaacatat

SEQ ID NO: 218158 - DNA, 557 bp, Glycine max
  unsure (1)..(557): unsure at all n locations
ttggagtttccaagtgccaattcgtcttcttctttagtccagtcttcttctggcttcaattcattagagggctttccttctgtgtccagcatcttgggatgttcccagcctttgatgacagctttccaggttctgctatccagtgatttgaggaaggccaccatccttgctttccagtattcatagttggttccatccagaataggtggtctgttcactggtcctccttctttctccatgttcatcagaatttatctccctagatctcactcagtgatttcgagtgccagctctgataccaattgaaattctgatactggggacagatgtcgtacaggatgtcacgacatcacgcttcagaacatgcagattatagttgacagtgtggacagtttaaacaagaagataacacaagagattngttaacccagttcggtgcaaccttacctacatctgggggctaccaagccagggaggaaatccactaaaatagtgttagttcaaggtctaacagccactgtttacaaccttctcacctaaccactacccgtgcgatc

SEQ ID NO: 218159 - DNA, 746 bp, Glycine max
gtgttgagtgatcgatgttgtgccctctttgcgaaacacaaattgaaaatgcttttaatacgtttatcacatgcaacacgagtgaaggatcctggaagaatctacatctaaagaaaactatttttcaagcctgatatttaagctcttccattatctaagtgtaatgttgatgcctttcgggattcattgaatgtgactggtatgggagcttacacccgagatgacaaggggagggtagctgctgtgaagacagatttcgtgaatccatgtttgcaggttccaaaaggagaagcatgagctcttgcaagagctattcagtttgtccaatcgctgggtatcaataatggatgagtctttttacttaacaataaacaagacttaaagtaaattttaatagcaattttttactttaaatagttgagtctttttactatcatatatatatatatatatgtatatatatatacatatatctttatatatatattatttctactaaggtgtgggacctttttttcttataaaataatatttaaaactcagcctgcgcccaagttgtctaaattctatatttaaatattttcatttaaccctctaatatgcccctaaaggaaatttttaatttacaccattgttttaaagttcaaacgagactgcaaacccttaattttttgttgagcggccattttattttaccgaggttacgtttcattttaatttttcttggggcgttaaaatatctatcg

SEQ ID NO: 218160 - DNA, 611 bp, Glycine max
  unsure (1)..(611): unsure at all n locations
gacactatgaaactcagcttctcaggaagttttctcaagaaagcttctcaaggaagctacctagtctattaatagaagcatgtgtaacacttattgtaactttgatgaatgagagtcttgtgagacatacttcaaagctccacttctctacctcttttattccttcaatttcgtgctcccccctctctctttctctccctctttcttttcctccattgaagcatccttcccagcttcttatccaaggctcatcttggtggtgaagctccttcttccatggcttattccctaatggatggtgcctactctcacctcttctcctttgtcttccgctgcatctccatggcggaaaatcaccattaaaggacctcattgaagctcaaagatcccgcctgcatagaagctccacgggccagcttncatcgagtggtaatcacagcacaagagcttcaagtaggtgctccttaaacctccattaatattttgctttaccttctcttccattgtgtgtcttcattattttccatgtatctcctcaaatgtcttgtgctaaatgttggtaacatgattctttagagtttcactgcataaacttgtatataagttagata

SEQ ID NO: 218161 - DNA, 594 bp, Glycine max
agcttgcttgtatagcctttttctttttacagtatagtttctatgattgtgttagcaactaaactatcaacccacatggaatattccccaacccaacagttcagtgttccctatgcacaaactcatcactctgtattggtgactcttcccacaagacatcaccaaagccaacctcattgctttatgcactttataccgaatacttcagatgcaacaaccctcctatttgctcactgcccaccttgttttcctatactagaaatttccaataacacatccagcacatgtgattcctatttgatgtatgaaatcaactttgtataagagaatccataacattttgtgactacctctaagttttacttaattgctttgcttatagtttttctcgatatccctctacctctagtggctacattatcccccatctgatctactcttctttttagggcttctaccagactttgccatacatgacccaaccacctaaagagaaattttaccatctttttgcaatatgaactacacagactttacccctaaatgcatccactcctaatctatcttgactagtatgtctataaacaatgatta

SEQ ID NO: 218162 - DNA, 646 bp, Glycine max
tgtaggttgaagaggtgagatctaaatatggttatggtgaatgtgttttgagagatttataacttaatacaattatagagagtaagcttgaatatgagagctttacaacttaagataattacaaagagtaagaagtgccctaagtgcaattctaacctgagagaaattgcggtaagcgtgaaaagttgtgcttaatgccaaaagtggactccatcttaacgagacacgctcgtcaagcgagatctgcagattataaatatgtttttcagcctgaaaaatacaatttcacgcctctctctctcaaaactctgtccaaccaccctagaaactcctcctccaccacccacgaccaccggtggccaccacgagctgccattgtttgccgctgaaccaccacactgagaggaacattttaatcggagcggaatcctcataatccacctcaaggattcggtggagaaaaatccctcaatcctttcttttgtagcttctttgaggtaatcttgacttctaagtctttctcttaattagttggagtttctcttagtgtctcttgtgtggttggatattgaaatacgatggttttacacttcctttgaaaacccttgaaaatgagacattgtaaaaagtaatcttttataaaatt

SEQ ID NO: 218163 - DNA, 440 bp, Glycine max
agctttaagactattcacataagttaacaagaagcaataaaggatcaactgtgaaaatgaattgcattcccatacctagatcttctccacaattccttcgaatttatatatgcttagatgcatgcaagaaaggattcaaggctaactgcaaaccttttattggtcttgatggttgtttcgtaaaagggtactatggcggtcatttgcttgcaacagtgggacaagatgcaaacaatgccttttttgtgattgcatatgcggcagtaaatattgaagataaagataactggaagtggttcctcactttgttacctgaagacataggagactacaagcaatatggctggaatttcatgtcagacatccaaaaggtgccattaaatataaaaagttgatttcatgcctgcatgggataattttgttgtcatgctagcaatatg

SEQ ID NO: 218164 - DNA, 624 bp, Glycine max
tagaacaatatacttggccttcatttaactgtctttgggcttggcggccacgatcaacaaagtactttcgacacctactatatgttgatttgaccaacgctgttatcggaatgttgcgacaatccttctaaaccttatttttacattctgagaggttcattgtcatgtggccataccgacgtccttctctatcataagccatcgtccatttctcctttgaaatgcgatcaatccatgttgctatggctggacttagttgacggaatttttctaaattttgataaaaaatgtgtttgcaaggagtgtagcctgcatgaaattagttagcaacaacaattttaactataaatcaaacttaaattaatgtgaccatgataaatgaaatgttacccaatttcttcaacatttctttttgtttggcattattgaatttgcgattgaagttgcttgctatgtgtcgcacgcagtaaacatgataaccatggggaggttgtcaaccaagtgtttcgttggccacaacagactttatactcgcgtgacgatcagatatgagacaaataccatgtttatttgtgatgtgttcacgccagtgtgccaaaaaccatgaccacgcagtttacgtct

SEQ ID NO: 218165 - DNA, 553 bp, Glycine max
  unsure (1)..(553): unsure at all n locations
agctttaaggataagtcttcctgttgctccctctatctctaacactttaatgttgcaaattgtatggaaacatcgagcgcaatacagttcccaccccaaaccctgaaccaataccttatcaatcacaatattatctttagtcccattattcacaattatcccatgcaacctatgacactttagctttatcccaacaaaaaaaatatttgaaccaaaaaaatgttttacctaacttctttttgcatcattttccacctatttttttgagtcccatcttggggatcatactcacacgtacttcagtacccctacagtggagccttcctcatcaatccgaccaaacgagcttcagttcacagcaaatccaggcttacctaacgaagaacacggtccctttagtgaggatgaagacaaatttattcacaattaacctangagggagatgacgaggaagaagcctggtctgtttcaccaatcacaaccatattgccatgctacataccaccccatatccaaaaatttgaaaaattctattttcaagattttgaacatg

SEQ ID NO: 218166 - DNA, 709 bp, Glycine max
  unsure (1)..(709): unsure at all n locations
ttgagccaaaatcctgactcaccataaaccttgacccagggtgagaatgtcaatccttaccctcggaagcaaaaaaggaatagaagggaaatttccaatcaaagaaaaagagaaggaaaatttccaatgaaagcaaaaaaagaaaggaagggaaatttccaatcaaagaaaaaaagaaggaaaattccccaatcaaagagtgggagaaagcaaaaagaaaagaaaggaaattcccaatcaaagaatgggagaaagtaaaaaaggaagaagaagaaggaaagaaagccctgatcggggatcgaaggaaaaaacagaagaaatatgcagagaggtctttggaccggacaatatctgaacaatacagaattgtcaccaaatgaacaaaaaagaaggaaaggaaaccacgacctaaaatggtcttctccctttaattaccaaccaaaatcccgtgcgctagcgaccctttttttttctcgccccgcactagacaaaaaaaaacggaaaaaagaaaaaaagccagaaaaatcaaaagccaaaaacacacaaaagccgaaaaacccaccaaaagaacccattcccaagggaagccctattgatccatgatcacgcatgtaatntttgatttgataggaagtaatttgcanagtcaagtcatgacatatctatggntcngaattangatgaaacacttacctgtgcgagattgata

SEQ ID NO: 218167 - DNA, 409 bp, Glycine max
agcttgccttgccccttgatatatttgagggactcatggtcactatgaatgacaaattccttgggataaaggtagtgatggcatgttttcaaagcccgtactaacgcatacaactccttatcataaattgaatagttaaaggtaggaccacttaacttttcactaaaataagcaattggatggccttcttgcatcaacacagccccaatcccaacattagaagcatcacactcaatttcaaaagatttttgaaagtttggcaacgcaagtatgggggcattagttagcttttgcttaaaaacattgaaagcttcttcttgtttctctccccatttgaaaccaacatttttcttgagcacttcattgagaggtgctgcccatgtgctaaaatccctctattaaaacttgc

SEQ ID NO: 218168 - DNA, 685 bp, Glycine max
  unsure (1)..(685): unsure at all n locations
tctacttatgtggcagggcgggcttccttcactttcttgtctcccacgcgagctttgaccactgctcttccttcccgcgatgcttcttttcatgtccgcctgagtgggcttatagcctaaaccatacttcccacgatttccttgggcatttatcaggctagttatgccgccgttgtctttgcctaaacccattccgggttcataaccgttccccaacataactcgggccatcattactgctgcatcggacagacaaggctgcccagagaaggagtccacggaggaaatgctgaccacctcaaaagactggaaagtggtttctaacgattcttttgcggcttccacataaggcatagaggatgggcagcttaccaagatgtcttcctcgactgacacgatgaccaagtgcccctccactacgaatttcaacttttggtgaagtgtagagggcacaactcccattgagtggatccacgggcgccccaacagacagctgtaaggggggttcatatccattatttggaaggtgactngacaggtgtgagggtctanttgtactgggagatcgatctctcacctaacctctncgcgagtgctgtcgaatgcacgaaccaccatctgactaagctttaagtgggaagcattgaatggtaatttctccaagtgctcttcggcatcacgttta

SEQ ID NO: 218169 - DNA, 441 bp, Glycine max
agcttcttgaagcgtaagaaacaaattcacttttatgggatgttttccaaacatataattttaaaggaaaaaatatgtttactccgtttgcaaaattcttgattttagatgctggctctatattttaccattgaacattttgatcccgaacaaaataagtattattagtccattgagacaatactgtacaaattagattaaccgcatgtttgtttttcagtttcaaaccgatgtttggagtaaaatgaattttacaaaagcatttaaatccttccttttacaaaactaattttgcggaacattacatttattttgaaaattgggcactacatttttaactaaaaatcaaacatgcactctaaagactttcttatgagaaatggtacactttgagcaacagtgcttcatatttctatgataattataaactacaatttttac

SEQ ID NO: 218170 - DNA, 584 bp, Glycine max
  unsure (1)..(584): unsure at all n locations
ttttgagagattaaatttaccttatagagagtattttgtgaatttgactgcataacaaattaaaagtaaaacaataaatattttaatgatatgagacacttaaagaattaaaattaatcaaaatatttaacaagaataaaagtgtattttattaatgttaggagtaattttacaaaaatgcgttaatttttttatcttaataaattagttaattgggtcttaaaaattcagcaagagtaaaaataataataattnatacttcttccttctctttttctatttataagacatttcttaaaaagactatttgtacttttatataatacttttttcaaaaaaaattattaattattttttaacccanatatatttattcattttctcctgaacgccatanagtaactaaatacattcttttttcttctctcgtaaaaaccacacaacatgactgaaacatattaattccttacgcaaaaattaagatttgctctgcattatatatttgagtgtagattttagtgaacatatccaattttgggacgaacacatcatacgtcaagaattataaaaaaaataatgtattt

SEQ ID NO: 218171 - DNA, 514 bp, Glycine max
agcttgagcttggttcaaccccgtaatccaaggaatggcaattctgatcgccaatacttcaacaacatctcatagggatgaatgactcgggcatactttaagcttatgcatggaaaatgtaattatgaaattgagatgcccgaagaaacaccatttcctagttaaccatgcattaggtaccatgttcaattattttgtttttaagtgaaatgggtttatgatcccaacatggttggctcatggtgcctaacacatgaaactaagaatgtagtgtgaagtttcacgcttcccctttttttgtttttgttttgtagaggaaaacgcaaggatgagcaaacatgaaaacaaatggtatgcaattttgcagatcaaaaagtttgttgaacgcatatgcatgataatgccatgactcatgcaaaatgtgaggctggaatatgataacggacaaatgcacgatatgtccattatgatgttatgaaaagatgcttatgcgatgcatgatatgaatgcattt

SEQ ID NO: 218172 - DNA, 586 bp, Glycine max
tccacaatatccaagcaattcaattccaaatatcatgaaactaccctaagccaagaaaacagagtagaggcagaaaactctgcccaaaacacattcaaataccacagctttccttattgatataccccagtaacattctcttcgttccgatttgttaaccgttggatctccttgaaagtttttgtggagattcctagtacataaataaacattttgaccgttgggatctgctagaaaatgtctggaacccgatatgtactactcttccaatgactagcaatgcacaagcattattccgcacatttggtcaagttggttgcacaatttgacagcattttgctgcacaatttggcagatttcgaaatccaacttgcccacatccagtgttgctcaaattggatcctacaagtcctaaatcatgtatgaatcatatttgaaccaaaaacaagcttcagatcaaggtaaatcaaaatctatgtatccaaaacccatcaatttagtggattttaaagtttgaaaagtgaaaatgagacttgcgtaattttagggtaaactctcatctcaatcaagtctataacatttgatt

SEQ ID NO: 218173 - DNA, 552 bp, Glycine max
agcttccattttcaattgcgagcatctcgatatattacgggactcaatcgtacattcgagtaaaaagttattgttgtttgaatatgctcacatcttcagtattcaatttcgagcgtctcaatatattaagggacttaatcggacatccgagttaaaagttattgtcgtttgcatttgctacgagcttccgttttcaattacgagcgtctcgatatattacgggactcaatgcaacctccgacttcaaagttattgtcatttgaatttgctacgggctttcgttttaaatttctagtgtcttgatatattacgggacttaatcgaacattctagttaaaagttattgtcgtcagcatttgctcagagctttcgtttcaaagacgagtgtttcgatatgttacgggactcatccgaattaaaaagtattggcgtttgaatttgctacgagcttttgtattcaacttaaagcgtcttgattatgttacgggactcaatcgaacatccgagtaaaaggtatattgggttggatttgctacaagcttccattttcaa

SEQ ID NO: 218174 - DNA, 559 bp, Glycine max
tcattgcctaacaagccaacttacaacagcaagccccaagagactcagcataaggatgcacagaccaaagttgcgtatgtaaaaaaattgtatgaccaagtgaaggtgcaaattgcaaagaagaatgaaagctatgccaagcaagcccaaaagaaaaggaaggaagtggtacttgaacccggtgatgatcttggacatttgaggacaaatgttttccaagaaggagggaatgatgagaatcatgaaacaggccaaatacagtctaaaggcccaagtggagaaggacgaaggcccaagtggagaaggacaaagcccccgagtggagaaggatgaaggcccaagtggagaaggatgaaggcccagaggcagagacactatcaagactattaattgatgctgaaggccaagattaatttgaaggcccataataaatatgttctatttagttataatttttatttattgtaattctggcccatactggttagaaggcccatgtctatatttatctctttgtttagctacactataagtatgggtttttgttatgaataaaaaa

SEQ ID NO: 218175 - DNA, 481 bp, Glycine max
agcttgttaactgttagatcattgtcaaatttgaacaccaggtttggaacttatttttgcacattcccacagttgggatttgtgaaataatattttctgtaagagaaatgtccctcacacgtaactttcttttctcgcatatattcaaatttgtcccattagaactatgatcgcagactctttaactgttcaatcatcgtgaaatttgaacaccaggtttggaacttatttcctcatattctcatcgttggaatttgtgaaataatatctaggagagataaatgtccctagcacaaagacattgaaatagaggcttcaatcccttctccttctctctaacgcttggaaaccttagcagagcaaccagagaaaaagcatgaggaatcttatgaattgctagagactctccatattgtgagaatcatttttgtataatttggttgtggtcttggacaagatttactagattatcgcgataaat

SEQ ID NO: 218176 - DNA, 640 bp, Glycine max
  unsure (1)..(640): unsure at all n locations
ttaattcaagatcaagaaactaagatcaagagtcagataaagacttagtttatttgttaaaagaatctcacattggttaataaggtttggcctcaaaagcttgattttaaaatgattatataaagctttaaaagatgttttaccagcacaaaaataagtttttttgcactggtaatcgattaccaagtattgtaatcggttaccagagacaaattacataaaaatatttctagaaggattttgaaatttgaatttcaaatgttgtaatcgattaccacttgtctgtaattgattatcagtgacaaaacttcataagttaactttgaaaagtcatgaccttcaaaacataactgtgtaatcgattatcaagacattgtaatcgattaccagtgagagaatttttgtaaaatattctgaaaagtcacatctcttcaaaagtttttgaaaagccaccaaggacatataaatatgtgacttgtctatgaaaatatntagagttttctgatgcaatcctacccccacaagggcattagatagaagactccaagtagatcgggctagagatgcaagagaagccctatggttctcatgagccttanggtagaattcaagcccatgggctaagtatgactccacttta

SEQ ID NO: 218177 - DNA, 443 bp, Glycine max
agcttgtggctgaattattacggactaactaataaagtttataatttataaggctttggatttgctattaatgttggaggtcttatatatgcttcagccaccttctctctttcctcgctcaaactattgtaaaccaaaaactccaccttctttcccaacttcatgatcatgtggcagtttatattataacaatgttttagtaacataatgatactatttttagaataatcacacaggaaactaagctaaattttgtcccagagtgatttgtttctcggggatttgaaaatcactatcattttatgtgtgtgtctgtgctgctatacgttattcatctgctactattgggttggatctgttgaataaaaaaaaatatatctggtaaaagtttgaaatctctgttggaacagaagtattttcaaagaaaaatacctattgaaaaa

SEQ ID NO: 218178 - DNA, 649 bp, Glycine max
tgaagtgtccagttgtgatttttgttttccagttataattataaatttgactttattttctaactatctaaattcttattttatattatcagatagtctttttggggatagacaacatccatgcgatgagagagagctttgttcggctccgagaatacatggacactcatggaagaacgtcatcagatggaatgtcctcttttttggttagtccgtgaatgttaaaacaaaatgtaattatcatttttcaggtagtgtaaatttatttggttcctatatagacctgcacaatatttatgttttagtccttacaccttaaaattaaaaactacttgttttagtcccaatacatacactttttaagtcgcttaatccctatagcttctgcgtgacagggattaaaacgggttaaaaaatgtatgtgtagggactacaacgagtagcttctaggtgtaggaactaaaacatacatatggtgcataggtataaggacccaatgagtaattaaatcatttatttttaatagtatatatttgatatttgaagagtgatactactattagctgtataatgacacttgtagattagatatttaatctttcttcatgatgcttaatatatatcttaatattatttaatacttttttct

SEQ ID NO: 218179 - DNA, 362 bp, Glycine max
agctttgatgcaacatttggagaggttaatgaaacaacgagatgatgcgctccatgagaggttggatcaaatggagaatagagatcataatgaagaagaaaggaggagaagagggaatgatagtgttcctaaacaaaaccgaattgatggtattaaactcaacattcctccatttaaaggaaagaatgatccggaagcctacgttgagtgggagatgaaaatagagcatgttttctcatgcaacaactatgaggaggaccagaaggtgaagcttgccgccacggagttttccgactatgctcttgtgtggtggaacaagcttccaaaggagagagccagaaatgaagagccaatggttgata

SEQ ID NO: 218180 - DNA, 583 bp, Glycine max
tatgaccattcgaatttctcaagagtttccgttgttcaatttcgagcgtgtagatgagttatgtccccgaatcggacatctgtgtgaaaagttatgaccattcgattttctcgagagcttccgttgttcaatttcgagcgtctcgatatattatgaccccgaatcggacatctgtgtgaaaacgtatgaccattcgattttctcgagagcttccgttgttcaatttcgagcgtctagatgagttatgtccccgaatcggacattcgagtgaaaacttatgaccattcgaatttctcgagagcttccgttgttcaatttcgagcgtctcgatatattatgtccccgaatcgggcatccgagtgaaaagttatgaccatgcgattttctcgagagcttccgctgttcaatttcgagcgtctcgatatattatgtccccgaatcggacattcgtgtgaaaacttatgaccattcggatttctcgagagctcttcttgttcaatatcgagcgtgtagatgagttatgtcctcgaatcggacatctgtgtgaaaagttatgaccttctattttatcgagagcttccgc

SEQ ID NO: 218181 - DNA, 407 bp, Glycine max
agcttttcaaatgggtaaaaggctcacattcactttcttctacattatattcaaacttgtccaaataaataataaagtcatctcgactcaaagaaagtcatataagtctcatacaattaatatagaacctatatcctaatgtcacatcctatcagagcgtggtgttcccgtgtcctctagcatgaggttcttcatagtcatccacctattcatctgctcccccgaacacaagttcaagatcatcacaggatccaaacacaacaacacacagggagtgagttatcacattcctagctaatagagaaacaagacaattaaatatacatattatataaatgagataccacttgcttaaacataactcacgtaacttcaccacttcgtcattcaaaattcactttttaatt

SEQ ID NO: 218182 - DNA, 605 bp, Glycine max
  unsure (1)..(605): unsure at all n locations
tggccatattcctaattctcctctcctttaactaaacatcttgttaatatttgggttattgtatatttcttaatactcataaaattctggctcaagtttcaattctcactttcacggaggtaagatcctaaattccaaatcaatttatggattatttgattttaattgaatcattgtgcttatacaaacacccactcatattatgggttaataatttgattcatttttacgggtgttgtaagtagattatggatgcaaggaaggtgttctatgaaatgcctgaaagaactattgtttcttagaactcggttatgactgcttgtgttgagagtctttcattgngtgatgggattgagtatttttttaggatgtggggttgtgcgtttgagcctaatgagacttccatggttgtgttgttgctctctacttgtgttcttcaagctccatccatttctatttcttttttattaattactaataatactatatatgctattgtaattgtattaataatgagtcattaataatactatatantgtatggctactatatatggctattactngtagttgaattcaatgacttattttctgatctccgatgc

SEQ ID NO: 218183 - DNA, 429 bp, Glycine max
agcttattaatttgaactcgtggttgtacataagttcaatgaatttaattttaaaagctacagtgcttatttttccacccacatactacagatactgcagaatttctgccttaaataagctgcagtgcttgtacataacttcaattaatttgaatctgctctgcaaatgctgcagaatttctgccttaaccaaattaggattttccacccagataccatcaatcagcatcccccacaagtgaagaacaaatgggatgcaaactcaggcttgttgtggcagaaagggcataagtcactgtcagtttgaatttgcctcttcgctaggttatccttagtaggaagtctatcccataacaacctccaagcaaaggacaaggctatcggggggaatttaatatcccagagttgctggaatgccaagtactgaac

SEQ ID NO: 218184 - DNA, 335 bp, Glycine max
tattggcactaattggctatgaatgtaaataaggcttctgacactactgactaacctatcctgtcactacattctgcgtggacctaatcttcatacgactacactatgtcacatcaatactgaacttgaaaattcactgaatcttttggactgactcacttagtgttttgctaatacatcataattctattccaaaagtgaaatatttaacaaaggctaacaattatatacttacgtaattattatgcaatataatatacgtaatggctaacaattatatctaagatagtactatagaaacgtcactctattgaacgaagtgtctactgtgtact

SEQ ID NO: 218185 - DNA, 479 bp, Glycine max
agctttcataggtgaaatcaggtgcagccatttcccttagagtcctctcacgaggtggaggttgtgtcatgttctcagactgtgcaaaatcagaatgctcagaatcagaatgctcaaaattataatgctcaagatcaggatgttcaaaatgaccaataacagaatgcacaaattcaccagttatggaatgctcagaatgatcaaaaggtataaaatgatgcctaactaatctatgaaatgtcctatctatctcaggatcaaagggtttgaaatcagatggaatgcctctagtcatacactacattcagcatgcacacaactagttgccttgtcatgtaaataaaggtgtaggtttgagctacagctaccctcaaatgatatccaaatgacttgaaattttgtgagccaccttataaaatgatgagaagatagcccaaaaaatttcagacaaaaatcaaagtctaactatgaaagctaaa

SEQ ID NO: 218186 - DNA, 695 bp, Glycine max
  unsure (1)..(695): unsure at all n locations
tgggaactccaatgtagctcgcaaagatgttagtaacaaaaagcagacaaaaaagtcccttatatggatgaatttcccgttctgttgatgtaagacctgatggaaattgttattacagggaaattgcaactttaatatgttagaggtgaggaatcatggctctacttcaacaagacttgatttaagatcttcaaacatggaattctcaatatgttgagttttttggcacataagatggtcttgttaaattattagactctttgtatgtccagcatagcccaatagcatccgttgacaagtggatgaccattcctgacatgggttatgtcattgtaattgaatttgtaaacaggaatcactttgtgttggtatacaacatattcttaagagattttttagtattgtaaccattaattgatttgtttgctaacactatatgtttttctttaataacctatatgtatttgaaggatgattgttccctttgtaacaccctgaaatattactaattataaatcgatgtttaattgtatttatcatggttattgactatatggctgactctaatgagttgacgtatgtctcgaattantcatgtgtgaatttcttgatgtggatgttgagttatgtggacgtttgttgagctaagttgaaattatgagaattcaaaaattacctaaacctatttgagtaaa

SEQ ID NO: 218187 - DNA, 548 bp, Glycine max
agcttttcaaatgggtaaaaggctcacattcactttcttctacattatattcaaacttgtccaaataaataataaagtcatctcgactcaaagaaagtcatataagtctcatacaattaatatagaacctatatcctaatgtcacatcctatcagagcgtggtgttcccgtgtcctctagcatgaggttcttcatagtcatccacctattcatctgctcccccgaacacaagttcaagatcatcacaggatccaaacacaacaacacacagggagtgagttatcacattcctagctaatagagaaacaagacaattaaatatacatattatataaatgagataccacttgcttaaacatagctcacgtaacttcaccacttcgtcattcaaaattcactttttaattatcaatcacattacacaagaatcccacacttcgatcaagatataataacacatcaattagcaagcatatgcaatagttatgctaagactccaatttatatgccatgtggaaccatgtcagtgaaaaaccaccctggggcgc

SEQ ID NO: 218188 - DNA, 675 bp, Glycine max
tggccatattcctaattctcctctcctttaactaaacatcttgttaatatttgggttattgtatatttcttaatactcataaaattctggctcaagtttcaattctcactttcacggaggtaagatcctaaattccaaatcaatttatggattatttgattttaattgaatcattgtgcttatacaaacacccactcatattatgggttaataatttgattcatttttacgggtgttgtaagtggattatggatgcaaggaaggtgttctatgaaatgcctgaaagaactattgtttcttagaactcggttatgactgcttgtgttgagagtctttcattgggtgatgggattgagtatttttttaggatgtggggttgtgggtttgagcctaatgagacttccatggttgtgttgttgctctctacttgtgttcttcaagctccatccatttctatttcttttttattatttactaataatactatatatgctattgtaattgtatttaataatgagtcattaataatactatatatgttattgctatattatattgctattacttgtagttgaattcaatgacttatttctgatctccgatgcttatcataatggtagagatacaatgtatttgtcctataaacctttggttatattactctatggattttaa

SEQ ID NO: 218189 - DNA, 529 bp, Glycine max
agcttataataacatggccatcattcacaaactttgtatacatgcatctattagcatcactactagaaaaaccatcaacaagtaaagtctcattaaacttttcatgccattgtttaggaacttgttttaaaccatatagggatttcaaaagtttgcacattttgttctcttgaccatccaccacacaccccttaggttgagtcatatatatctcttccgctaaatcaccattcaagaaagttgtcttaacacccatctgatgaatcactaacttatggattgtagctaaggctatcaaaatcctaatggaggaaatccttgtaataggtgcaaaggtataaaaaaaatctatgttaggtttctaagtaaaccctttagcaatcaaccttgctatgtatttatctataaaatcatcacgattatacttcctcttaaagatccatttacatccaataagatttgcaccctcaaatagatatactaaattccatgtattattctttttaataaaatcaatttcaatcctaat

SEQ ID NO: 218190 - DNA, 722 bp, Glycine max
  unsure (1)..(722): unsure at all n locations
tgataagaaagaagaaagtattatgcaataacaagataaattaggtgtggctagtaaagaaaataaactatgaaagtaagcaagaaattaaagtgaaagaaatgtaaactaggcggatcctaagagtgtttggatgacctcatttaaggtttccaacaaaatactcactatcctaaagaaaaattgcctaaaagtattacacacaaatggaagtagggtgacctattggaggctcccaacttacttccaatgaaaggcctttttgttataaaatttgaaagcaatgaaggtaagtaaattctcaattaaaaaaattacaaaaaggttctcaatttttggtgattgttctctctttggtgattcactcaatttggagtgcttcttagtccaatagctcttaaggttgttttccccttgcttcttgactcaaattcttcaagggatgacaccaatcctcctttccaattccctatatggcaactcacaaacaaggaaacaaagagacaagcaataaccaaagacccaaaaaatgaaatgaaagctaaaccaatagagttttaacaagacaaattttcaggaatttttcaacaattaaagcacataaaagaaagctaggactcanagagaaacttagaatgactctagagtagagtanaanaaacccaaattaaaaagactcangaaacctcctagttttggaacttgtttttcacactaatttt

SEQ ID NO: 218191 - DNA, 467 bp, Glycine max
agcttttaatatgtgcttacgagtgaactggtctatacttatgttattcactcaacagttgtgtcttgattcaccaattgtcattaacaagttccctttaggttgaacatcttgacttcatttgacttttacaaatcttttataaaggcttgctatatatgccggttattctctgatataccactggaaaatgtaaagggttttcctcatataattgtttcatctaaatttctcacgaagaagattgggaagtggttgctcaactgggtggtctttctttaggcgtattgattctggtaaaatacataaaattttctggatggctttattacttgttaccaaaacacctttttgttggaactatacattcttttaactttttattgcaggatacaccctggccttgtaaaaacattatgggtaatttcaataacttggttgagtatgccactactgcattcttttgc

SEQ ID NO: 218192 - DNA, 675 bp, Glycine max
ttgaaaagtaatgtagaagctattgacaaatattggtacagttgataaatattagactcataatcttacaagagtggagttgataaatattagactcataatcttacaagagtgtgagtttgaatcattgttaatataaaaatcttattgctagacaatctgttaatatgtccataagcattcaataagctttgaagcatgttgtgaaccttaaaatccaactcactctcactccattgggaaaaaaataagcttccactgaaattagcatagttgacttaaaggcaatttaatattttgattttgcaaaaagtcaccgacaatattcatttttagtaatgtgtttttaatattttctttttgacatattttttatttttagtttcagctttaattaaaattcattgaaagctataaaagtataagattcattaaataagtgaaaaacactgaatttttaattttcaataaattttaataaataaaatagagttcaattcattgagttgataaaacaaattctagtgaggttgccactatactacatcatcaaagttatgtatcgatttatgtgcggggaccatacattcttgcatataaaatctcgaaaggagttttgtgtccccactcaagtaaaaccgcatactacatttaattgagatgtgaaaaaaataa

SEQ ID NO: 218193 - DNA, 397 bp, Glycine max
agcttctagtctcaattttgagcgtctcgatatattacccgattcaatcggacatccgagtaaaaagttattgtcgtttgaatttcctacgagcttctgttttcaatttggagcgtctcgatatattacaggactcagccggacatccttgtataaagttattgtcaattcaattttcttagagcttcggatcaaaaatttgagcgtctcgatatattacgggactcattcagacatccgagtaaaaagttattgtcggttgaatttgatacgagctttcgtttttaatttggagcatctctcgataaaatacgacactctgtcgggcatccgagtaaaagttattggcgtgtgaattttctaagagtttccgttttcaatttgggagcgtctgata

SEQ ID NO: 218194 - DNA, 584 bp, Glycine max
  unsure (1)..(584): unsure at all n locations
ttgaataaattgaaacgacaaaaactttatacacggatgtctggttgagtcccgtaatatatcgagacgctccaaactgtaaacggaagttcgtaggaaattcaaacaacaatatctttttactcggatgtctgattgaatcgggtaatctatcttgacgctcaaaattgagactagaagctctgagcaaattgaaacgatattaactttatacacggatgtccggttgaatcctgtaatatatcgagacgctccaaattgaaaatggaagctcttataaaattcaaacgacaataactttatactcggatgtccggcagagtctcgtaatatatcgagatgctccaaattgaagacggatgctcgtatcaaattcaaacgacgataactttntactcggatgtccgattgagtcccgtgatatatcgagacactcacaatttagatccaaagctctgagcaaatttaaacgacaataactttctacacggatgttcagttgagtcccgtgatatatcgagacgcttgaaattgaaaaagaagctcgtaccaaatccaacgacaataagttttactccgatgtc

SEQ ID NO: 218195 - DNA, 363 bp, Glycine max
agcttgtacgcgatgccatatggctattacttgcaaatgcctattctgaagccaagactactgcatggttgaatgaattgtgcatgcctcgggtaactgcaataacttcttcgctgcttgacgattgttttgtggaggcatccaatgctctaatgtcacaaccaattactaaaggagcctatatatatgtatgtacaaaaaaaatgtacttattatgcaaaatatatttttcctcaagcaattctttatatggaaatgtctaagcaacatgagttaaattattagctacaagttaccttatctaatgcccatatgctgaaatgagcgcgatattcttcttgttgaatgcctccattttcaact

SEQ ID NO: 218196 - DNA, 298 bp, Glycine max
tagggactatgattctccaccattacaggggctggaccctactgttggagattgcagccaccccaggattgatactctgtgctaaatgattgctgactgagaagccttaagatgctaacaacccggtgccctgctgcagagtgagcttcgattgtcttcatacatgcatagacattgataatataccagtactattatggcaagcgccttgctctgagtcctaaaccctactcagtgacacagctccgtacctactgcatctcctatctactgcttactgaatagactggtgctgttt

SEQ ID NO: 218197 - DNA, 414 bp, Glycine max
agcttgaaagtgtgtaaccaaccattttctcattgtagaacaccggtaacgtgtatactatcattgtgatcatctttttctctgtcattgaaggtgccacttgagctgtcaagtccctccacctctgggcgtattccttgaatgactcatgctcttttttacacatgttttgtagttgcgttctatccggagccgtatcataattgtactgatattgcctaacgaaggcaaccattaagtccttccaagaatagactcgggaaagttccaagttagtgtcataccctaatttcgtccggggattattacttgacgacatgcaacctttgattggccgtttcaagatacttggccccctttgttgcacaatatgtaagtcttgagacccaccggagtcaaaaagaaccagggtta

SEQ ID NO: 218198 - DNA, 710 bp, Glycine max
  unsure (1)..(710): unsure at all n locations
tttcgattcattctatgtacccgtagtggtccacattgtgtttcgtgcatttttattctcgttttgtttactttttatacccccctcttgacgtgcttaagccattttacttaagtcatttctcgcttaacttaaaaataaaataaatttccaccgaatgtttgaattgtattatccattaacttcggttaaaatcaattccgaccgttcggtcatgccgtaaccacgttggaaatcaaaaagaggtaaaaaataatataataatcaaaaaaatatctttttagtgaaataaagcggaaaatcaatcggacgttttctctttgggatttctcattcttaatcgaattaattaataactaaagtgaaactaaggctaaaatcaactttgctagtcaagctcgtccacaaaaataggcttttgaagtttgtcatttcaattcctcactaagaaaaatggatcatttttaaggtccaacgccttagaatgaccaccacttaagtaaaaaagaatcacttgataagaaagaactacgtaggtatgattttctcatcccanattgaggaatacgtaggagcaaagggaaacacccttgtcgaccacaaaaaagaaaaaattaaaagggtataaggattcatgaacatanaaggacataaaaataaagtcatgtttcacattcgataaaagctgccgtcctttggacgggcgtgtg

SEQ ID NO: 218199 - DNA, 524 bp, Glycine max
agcttatgcagcaaatatatacaatagacctcctcaacctcagcagcaaaatcaaccacagcagagcaattatgacctttccagcaacagatacaaccctggatggaggaatcaccctaacctcagatggtccagccctcagcaacaacaacagcagcctgctccttccttccaaaatgctgctggcccaagcaaaccatacattcctccaccaatccaacaacagcaacaaccccagaaacagccaatagttgaggcccctccacaaccttccctcgaagaacttgtgaggcaaatgactatgcagaacatgcagtttcagcaagagaccagagcctccattcagagcttaaccaatcagatgggacaattggctacccaattgaatcaacaacagtcccagaattctgacaagctgccttctcaagctgtccaaaatcccaaaaatgttagtgccatttcattgaggtcgggaaagcaatgtcaaagacctcaacccgtaacactgtcctcatctgcaaatg

SEQ ID NO: 218200 - DNA, 599 bp, Glycine max
  unsure (1)..(599): unsure at all n locations
tgtctcagtgtctatgcgagacagaaaccaacatgttagccatcatcgccaagtaccaagaagagttgggtctagccacggcccacgagcatagaatcgcggatgagtatgcccaagtatatgcggaaaaagaggctagaggaagggtgatcgactctttacaccaagaggcaaccatgtggatggatcggtttgctcttaccttgaacgggagtcaagaacttccccgattgttagccaaggccaaggcgatggcagacacctactccgcccccgaagagattcatgggcttctcggctattgtcagcatatgatagacttaatggcccacataattagaaatcgttaggaaacttgtatggtctctcagaccttgactagatatgatttctttttttgaaataaaatgagttggtcccatgtttctactccaaaaagcttgtgcaaatcaaatcactcctacgtctcatctctagcatgcattttctttctttacccactcctcacgtttggttntttagggaaaacaccataactaaacgcgccgcaagggatccctatcgcaccagatccaaatctagaacgatgggtgatcaag

SEQ ID NO: 218201 - DNA, 467 bp, Glycine max
agcttttcaaactattttgatgtctgaggttgtattcttgaatcagtaatgtccacactattctcttttttgtatttttaataacatgatggtgataaaatgttgaggatatatgctttcttttgttttagtttttcttgttggaatatatttttttatgctttagttcaaaatttatatttttaaaatataattagaaaaaaatatatataaatttttaagttgattattataaaaatatttttttatttatatgaccatttatatttttaaaatataattggagaaaaaataaaaaaaatgaaacataataaactgaaagtatttaattcaaacaaagaattcaaaatttaagaaatttaaattggtttatccaaccaacaaatttaaaaaatctaagcattttaattcaacaacccgcggaaagggttgtttttcggtgaattgacagtgacttgtaaaatata

SEQ ID NO: 218202 - DNA, 661 bp, Glycine max
  unsure (1)..(661): unsure at all n locations
tgggtggaaactacaggtaatcagatatgacaatatgtgacaaatttaataagttctatgaagatgcggacatagaacaatagttgacagcaccttattctccttaacaaaatggcaccgtagaaaggaagaataggactattatggagatggctaggtgtttgcttcatgaaaaagaattgccaaagagattttgggcggaagccgcaaatattgcagttttcatgcttaacagactgccaacaaaagctttgcaaaagaagacaccatttgaagcatggtatggctataaacctgagttgctcaatctgaagatatttggttgtttgtgctttttcttacattcctcgggttaagaaggacaaactatacaagaaagcagaagctgtaacctttgtaggctatagcttaatttcaaaggcctacatgatctatttgccacatcatgacaaagtaattgttagcaagaatatgagattcttggagctggatagttggaactgggaagatgacaagaagattgaatntcagaaggagaatgagaacatagacaaagaacctgccagaggaacaagatcactttttgatatctatcanaggtgtaatgtttctctcatggaacctgcacgatatgaggaggctacaccaataaaaaatggat

SEQ ID NO: 218203 - DNA, 338 bp, Glycine max
agctttcagaaaatgtcaatgtcgagcatatactatttttcttccatgtttcagttgtatgtagcttgtatcttcttcacagatagggcatgcatgatggtccttaacactgtatccactcaaattcttgtatgccgaaaagccattaatgggaaaaaatagcattgcatgcaacttggatgcctcattttgatacccatcaaacatgacaatccctttgtcccataactttgtcaagtctttaatcaagggactaagataaacatcaatgtcttttcctaagtgtcttgggcccaatattatcataaacaatatcatgtattttcgcttcatgcaca

SEQ ID NO: 218204 - DNA, 566 bp, Glycine max
  unsure (1)..(566): unsure at all n locations
ttagcttgagggggtgtgttgagaatcaaaataggatcaatttcatattttgtctttattatcataattatacgaacaatatctcctataattaattgtaatttatctatataaaggagcatccacagtggacacatggattcagtcacttatccctctatattttttctcattttactacctttattgaaaatctaccaaacctagatggagtcttttgtcatgtatattggccttagatatcaattttatttcttgactaaatcaaatgtgattcatgaacatagttattgattgtgtgctgtaccagcacgatagccccaccacggcctccagctgtgcaacaaatttcagtttgtggagcactttaaaatcatgtgtgtcacattgcaatctgcagcccaaattgctgccattcgcacactgctattacacctggagggtaaagccccattttgccccattctctgacttttcatcgtctccaagacatatntgcatttctggccattcccagcatttaccagtatttctggtcaaccgagtctcttactacttcaatcatg

SEQ ID NO: 218205 - DNA, 512 bp, Glycine max
agcttgttcgcacatcgttcgcgtgtatgatatccactcgacaaggtttgaagtagaggagacctttaatcctataatgcaacgtggcggacaaaagtgggcagttaacttgaatggccattattgtcaatgcggaaggtattctgcgtttcactatccatgttcacacattattgcagcttgtggttacgtgagcatgaactactaccaatatatagatgttgtttacaccaatgagcacatcttaaaagcatacttcgcatagtggtggcctcttgggaatgaagcggcaattcctccttctgatgaggcatggacactaatccctgacccaactacaacttgtgcgaaaggtcggccaaaatcaacaaggataaggaatgagatggattgggttcaaccatctgaccaccgacaaaaatgtaataaatgtgggagcaaaagcacaatttgcgcccatgtcaaatgcaatctgaccgtgggaagtaatcattttaattgatttatgtatg

SEQ ID NO: 218206 - DNA, 592 bp, Glycine max
tgctacattgatgcatcttggctacggaatcttcgatttgggcacttaaattttggaggcttaagtttgctatcaaaggagaagatggtaagaggactaccctatattaatcaccctgatcaactctgttaaggatgtttacttggcaagaaatttagaatgatttttccaaaggagtcaaactcaagagctaagaagccacccgagctaatacatgttaacgtctgtgggccaatcaagccccaagctcactacgtaaaaataaatatttcctctttttcattgattatttttcaagagaaacatgggtctatttcttatagcaaaaatcataagtcttttccaccttcaagaagttcaaagctgcagtagataaagaaaattggtgagagatcaaagccataaggactgatcgaggaggagaattcacttgcaaaaagttcaagagtttgtgaagagaatgaattagacgtcccctgacagtctaagacccccaatagatagtgtggcagaagataaaatagacgatccttgatatggcttgaacatgctcaaaagcagaactgccaaagaatttaggcaaagctttgca

SEQ ID NO: 218207 - DNA, 367 bp, Glycine max
agcttgaaggcaaactggatgcattggttaacttggtaacccagctggccttgaatcagaaatctgtacctgtcgcaagggtttgtggtttgtgctcctctgctgaccaccatacagacctttgcccttccatgcagcaacctggagcaattgagcagcctgaagcttatgctgcaaatatttacaatagacctcctcaacctcagcagcaaaatcaaccacagcagagcaattatgacctctccagcaacagatacaaccctggatggaggaatcaccctaacctcagatggtccagccctcagcaacaacaacagcagcctgctttttccttccaaaatgttgctggcccaaacagaccatacat

SEQ ID NO: 218208 - DNA, 661 bp, Glycine max
  unsure (1)..(661): unsure at all n locations
tctatagttatggaataatcgattatcaaatgtggtaattgattagttcgatacacgaagaactcctaaagtttcctaacacaatataaatgattactaaatgtggtaatcaattatctggaaccacaacgacttccttctgttggaactagcttatgtaatcggttactaaaaatggtaatcaattaatttgatgattcttatcaaatttcaagagaagtgagttttgttgcttgttctaacactttgtaattaattaccaaacttggtaatcaattacactatgttgaattcattgcttctaagaaactttgagattaatacatttatcttatcatgttggattcctactaaacctatatgataaaactaagtctaaaacacttgtcatgcctagtctaaaaacatttgatagaaatgtcacatcttaaaaaacttgtttggcgttgtaaacttattaaaaccaaaagatcctaagactaatcttcaagtcttcaatcactttgattcaacacgcaagaccacttgaataagaaaatgtgggtgtccttctaaattaaaagggaaggcttgtgagaaccatanggtggagacttactgtagaatgtgggttatataaccatacagcgatgtgaacattgcttggtcattcatatgttag

SEQ ID NO: 218209 - DNA, 479 bp, Glycine max
agcttcatttgaacagtcagctctttaaggaaaaaaaaaaatcctcttttctagcttatgtataaataaaatactaattggacaacgactaacgtattttgttgaactagattttgaagggtatgatgcacgagaaaagaaatagtttgtttgtgtatgttttgagcgtggacatatgtaaacttggtaatgtaaaaaaaaagtgtcaaattgagtttatattgaaattaaaaaaaatccctagaaaagtaatataataaaagaaagataacataaaaaataataaaaacattatcttacaaagctttattgttattaaaattagaaaactttctcataacatattttatcgtatcatccgctacttaggtcgaattctcaaaaaaatatgattctaagtaaatgttcttgcattactgtgaactgagtaaatctatctgaagagtacatgacatggatgcaccctacaacttagatca

SEQ ID NO: 218210 - DNA, 611 bp, Glycine max
  unsure (1)..(611): unsure at all n locations
ttccagcattaattgtgataatatcaagggtgtacttgagatttctgaaccatttcttgtccatttcattcttaactcactttctcctcaatatggtccttttaaatttttttacaatatacataaagacaaatggtctattaacgaattactaaccatgcgtattcaagagaaagagagattgaagcatggggcacctgaaagtgctcatatggtgactcataataaaggaaatgggagaagagacaatggtgttcttggagtccacaagactgtccaaatgaagcggaatgaaacaaagattgattgctttttctgtaaataggtgggacataagaaaaatgattgtctcaaatacaagaaatgactcgaaaagaaaggtaattttacctttacttgttttcactactacaaaaaagactttntgcatcggttatttgacacttttcatgacggttttcaaccgtcttcgaaatcgtcatcatgagaattcaacactttacatgatgatttttaaaccatcttataaactcgatcttagaaactcgattttatatcggtttacataaaaatcgtcttagaatgtctttttttgttttttttataaaaat

SEQ ID NO: 218211 - DNA, 443 bp, Glycine max
agcttgaaggtgtgtaacccaccattttccatagtagaacactggtaacgtgtctactatcattgtcatcattttttcgtcattgaagtgccacttgagctgccaggttctccacctttgggcgtattctttgaaagatccgtgcccccttttttgcacatgttttgtagttgcgtcctatctgaagccattataccaacactgcctaacgaaggcaaccattaggtcctcccaggaatggactcgggaaggttccaagttagtgtaccaagtaacaactaccccagtaagactttcttggaaggaatgtatcaacaattcctcatcttttacgtatgcccccatcttccgacaatacatctttagatggttcttggggcaagtagtccccttgtacttgtcaaagtccaacaccttgaacttgggaggggtgatgatattgg

SEQ ID NO: 218212 - DNA, 654 bp, Glycine max
tttgtgtgggatacccagtgtgagtatagtttccaaacccttaaggaaaagttgacgaccactcccatgctagttttgcctaacctgagagaagcctttgaggtgtattgtgatgcatcaaagatgggtttaggaggagtgttgatgcaaaatggccaagtagtgacctatgcttctagacaacttaagactcatgagatgaattatcctaccaatgatctagaattggctgctgttggatttcccctgtggttactttttgttccacttttttcttcatacaaatatattcaagggaaatctggtttgtcgaaaagtgcaccagatcgtcaagtatttaaaaattaaaacggatgaattcgagtatcgaactcagggaaactagtctaagatcgggttaaattcagaaataatgcattgttgaaagaaacattgataattgatggtttaaaatagaattaaactgggtctaggataaaaacagtaaaaatgcaagtaagtaaaattgacagcagtaggtagaagtgttgggtctttcaaacagacaagctgatgcatatagggatgtttctctaatcgatcatgcttttatgttctatgatgtagcataaattactaaacctcgatccctaattgactgaatcaatccagctt

SEQ ID NO: 218213 - DNA, 503 bp, Glycine max
agcttatggtagattagagtgaagttcatcctgatcccgagaggtataggagacttgtaagaaagctcatttatttcaccattacaagacctgatatctcttttgttgttggagtagttagtcaattcatgcagaattctcatgttgatcattggaatgttgtcatgcatattcttagatatattaaaagagctcctgtacaaggattgttgtatgaagacaagggtaatacacaactatcaggatattgtgatgcagattgagctggttgtcctatggataggagatctacatcaggttattgtgtcttcattggagggaatattatttcttggaagagcaagaagcaagttgttgttgcttggtccagtgcagaagttgaatatcgatccatggcaatggttaaatgtgagctcatgtggattaaacacattctccaagaattgaaattctgtgaaagtgtgcaaatgaagttattctgtgataatcaagctgctctttac

SEQ ID NO: 218214 - DNA, 688 bp, Glycine max
  unsure (1)..(688): unsure at all n locations
tatcaaaatgcaccttaagtgcatgtttggaaaagattaatttcatgaaatattcacttcttttttgaaagttctcttggaaagctaacaaaaaaaaaaagtgattatctctagaaaataagttgaatcaaacatgaactaaatcttttaagagcctaaaagtgattattggctgcaaaaaagacttcaactaaccaaatccatacaaaacaagcactaaccaaagttctctcatgtacaacattgacaaaaatgtgttctacttctaatgcgccctttccaatttccaaattcagtttctaaacctttgaagagctcgagtgattactgaccgtaaaaatcatattctcagggccaaaatgcagtgagttatggcgctttattacttgcaacaaaaaaatgcgcaatacctgttatcaaaagggagataatgctttgaaaacttttaaatagatatcattctcttcaaattaaccaataaatgtgccacaactaaaatgaacaattacccaatcaaatccagatgaagactgactcattcaaatgcattgtataagtttacttgcatgacangagcattttcataagcaactaaatttaaattttacctatataaagctggtaggtttgctcggtctaataagctatgaaaattatccatttaatgcacattaatccataggaatca

SEQ ID NO: 218215 - DNA, 469 bp, Glycine max
agcttgtgtgcagtaatataaaatgtgtccacacacagtcacttgttgctatccagtgtattgttagccttttttttcacattttttttttgcttactcccttttactttctttttctcttttttgttttctattttatcttgtaaaacacaagatgctctagttttaatttaactaatttttaaactagtcaaaataacttataacctactgctcttaaaatgatttgcaaaatacactgtttcacttttgattaagaattacaaaattcacacacaaaaagatgacaatggaacaaattttatactatctctatattgtaattaaaattaatattataaagatttgatagttatattaagttgttcataaattatttttttttatcaatcattcaattcaattttgaataaaactataataatggtttaaatcttgaaaaaataatataaaatttttagaattaaaa

SEQ ID NO: 218216 - DNA, 696 bp, Glycine max
tcacagcaaatgatagaatgtctatagttttatcatttgacaatttattgttattatatgtcttatccttcatatatatagactcttttttttcatctttttcaactgtgaatttttacataattcataaattttatttgataccttgcatagcattgcatttagcaaatacaatttaacatgcttggtttataagtattgacacaaaaaaggcttatgaaaataccttgtattgcatgttgctagggcttattaaaaatatcaaataattttacatgtgtctgtgaaatcagacttattaatgatgcgataaattatgtaactatcatgtctctcgttgatgttgctaaaaaaattgtttaggaagtatatggattaaaagtgcattcttcaaaaagtttaaagatcgagaacataattaacccattaaattattatcaataaaataaccttaaatttaaaatacaaacataggtacatgtaatttatattatcaattattgataaaaaaaaatataataatgtttatgtgaacaaaatatttttttgaccaaaaaataaacgcatgtgttttatattcaaaatcattttacagtttaatatttaatgtgtataaaacagtataattgtagcaagctgaaaatagtttatgaacatatatataagtgttatcataagtctggcaaacatgtttac

SEQ ID NO: 218217 - DNA, 598 bp, Glycine max
taaacctgttatcgctgctcgcattaggaaattaataatgcgaacaccatgtggtcacccacgcctggaaggagggatcacccctgaccgataaggtccaaacctgcgcaataacaacagtagccagcattattctttgaaaaagaatgctgggcgataaaggccctaatatacggcataagaaaaaagaaatgcaagacatgccgtatattagaataagtgggggactacaataaataatttgttcgaagaggatggcatgtataaatcgcgttgtaaaaccatgatattcctactagaagaacaaaatcctgcgatcttgtagcataataaattaccagtggtgaatagggttgcccaataaatcgaaccacattggccaaactattgacaaagaagtgtgttaaaatccgttcatgaaatggcataaagataatagatactgtcctctagagacgcgcgaggagagaatgggagagtgatactcgggatagcctctcccatgtttgcgaagtatatggggcaacattgtcttttacttcttcaaggaggtcgggtccaaaggtagtctaaacgctctctcgggagagaggaaacg

SEQ ID NO: 218218 - DNA, 958 bp, Glycine max
  unsure (1)..(958): unsure at all n locations
cactcactgagcttatcggttctcccgctccccgcttgtatcatattntnagttataattgcctgnannantccncctcnccncctcccggccccggcnattgatgacctcgtaggtacgngccacgatctataaaatactgctgcatgcctgcagggtgactctatatgaggcgcgggtactgattttaatatccctaggagcgtcgtaggtaactcactggccagtgatatcaccctctgaactgggaaaacatttgcataccccaccaaggtcgtctggcggaacagccaccgtgcccagttggtagaaagaggaataggcccacgcgcgacaggcgtatcgcacatatggagactcagaatgggggatggggcctaacacagtatggtgcccttgcacacctgagcagtgtttaacacactgggaggggaactgctagtagaagctgtttagatgcacacagtgggacataatgacgaaggattgccacaacaacccgtgacgcagaacgactgagagagcgagagtggccattnactngnntaaaacacatacgatagaagacgtcccggcttggaataactgcagagggtgcttgaagggttatgaacagccgacagagactggcatatgatatacgcgtccattttcaattgttgattattcacagcatcttcacatcatggaacaaagagagcggggatctttcatatggatacggaaagcaatggaggaaccatgggggggactagatactggttaaataggagtatgagtacccaaacagcttattggccctatgttgggcctgttttatatgaggaaacgtcgaaccattggaaatacaacctacgtcgaactatttgcctacaacgttgggtgagagaacgaaacacttctgtctctaattattcagatgcaacggtagcggtttcctcacgcaaccctcgaaaag

SEQ ID NO: 218219 - DNA, 404 bp, Glycine max
agcttgcttctacagtatgggaaaaaaataaggagaataaaatgatgcttcttccattcttacattagtaaaaaatggacaatcatcagccaaaatgatacttgatctccttcccaaaacaataattttttatgcaacatagaaggcacacattggctagaatgaatccaatcccttcatagcaaaattaaatagtttggtttagcatccactataaaaaaatgttgaatacatggattttggcccaatcgtgattgtggctaccaaaactcccaatgttgtagtagctcctacaatgaaattggttatcttgatattcatggggatcaaatcatcctaccttttaccaatttgcctcagcgtggttagaggcatgatgttataaataataccaccatcaaaaa

SEQ ID NO: 218220 - DNA, 651 bp, Glycine max
  unsure (1)..(651): unsure at all n locations
tgctatttcttttggcacatttagtagtcttgttagtatgttttccctttatgcattctacacaagtactaaaattagtaaagttaacattcctaagaatttcttcctttactagtctcttaattcttcaagagaaatgtgccctaaatgcttatgtcgaaacgtagacaaattttcatccataatacttcgcttagtaccaatggtggtatgtaaggctacgagacttgtttcaaaaataggatctattgaaagcttaaataaatttaactaaaaaaccacaaccaacaactttattgtctttaatcaatttaaaagaaacatcgtagaaaagaaaagagaaactagtatatgtaagcctagaaacagaaaccaagtttctataaaaggacaaaacataaaaaagtgttttctaataacatacaaaaaccagaattcatgagaagtttaaaagttccaatagcctccatgtatgaactcatatgatttccaccatagatgctttgttcacttcccattggatttcgcaagtttagaaattcttgtacattattagcaatgtgaatggtagaacttgaatcaatccatcaagtattggtaggaaactcagtanaatcttattcaagcaaggcaaaatacctttcttttcaa

SEQ ID NO: 218221 - DNA, 455 bp, Glycine max
agcttgtagggttcaccccaaatgccgtagtcatatgctaaacttgatcccatatctacttgataattcaatggtagccataaccctagccaaggttcatcaacctccatttctccgagaatacgacttcaacgcaacgtgtgcttgtcacagaaaagccccggggcgcttcattgagcattgtagggctctgaagcgtaaggtgcaaggtctaattgatacgggctggctgaaatttgaagagaatcgcttgatgaatcctaacattaacaagcgacaccatacatggggcaattctggaagctgttgttatgactcatcaagatctttaagtttatgccataaaccacagttacaatgttaaatgatatagataaaaaggacattctttcacgaacacatcttttggttattcaacttccaacggcatgtgagtgtaaacccttggcctgttt

SEQ ID NO: 218222 - DNA, 604 bp, Glycine max
  unsure (1)..(604): unsure at all n locations
tctcccctattttgctatcaatggggggagaagtgaatatgataagggttcaaccccttaggcacttctctctctctctcgaatttgctgaggaaaattatttccgtgaagaaaattcaagccgaggcgcttgcgtaacgtttccgtgagtaattacgcgaagagtctcgaccgttcttcaaaattcatcgatcgttcttcattttcttcaatcttcaacgggtgagtacttcaaaccaagcttttacattcattctatgtacccgtggtggtgcaaattttgcttcatgtgtgtatattcttgttttcattcactttttatacccccttttgacgtgcttaagccatttgtttaagtcatttctcgcttaatctaaaaataaaatatactttcaccgatcgtttgaattgtgtcattcgatacttttggttaatatgaattccgaccgttcggacgtgccgtaaccacgttggaaatanaaacagaggcaaaataataatataatcataaaaaatgtcttttactggagtataagcgcataaaatcatcagacgttntctctgtgggatttctgattcttaattgaatcgactaataactaaa

SEQ ID NO: 218223 - DNA, 605 bp, Glycine max
agcttcctttacaataaagataagagaaagatgaaggattgaagaaacacaagtggtagggatgtctcctctgcctctaagacctcacaataactcacaaactcatctcaagctctcaggacgacttcctcttcaagctctggtctctgcagatcttcacacaacaaaatctctcaaactctctggaacttggacctttctctctctagaaaaccctcacatacagaagctccttgagaaaaatagccaaactcccttccaaaaatatgatttcaagcttaaataggtggttttgtttgtgctcatgcgcttagcgcaattatgaaccgcttagtacgcattagtaaatttcggcttagcgcgagattttctcaacgaatggactgaagcggtgcgcttagtgggatggcccttcgctcagcgaacatgcacaactcatccttcttccaaattcttcctcgcgcttaaccgaagagtgttgtgctcaacgattggcttgctaaacccatagaatggcttaatgagaagatgaaaattatcactttccaaactcaccttaattaacctgaaattgagagaaaatgattattaaacatacaaaatgg

SEQ ID NO: 218224 - DNA, 591 bp, Glycine max
tgagatgaggaagtgttgaagggtagaacttcctgcttttattgttgaccacagagtggtacctggagatatgtcgcgggggtcaggagaccttggggacgtcaggtggggtgctattgcccaaaaccaagcttgaccaatcccgacccaacccgggcatagtcggtcagtgagaacctgtgatgtacctaagcaggcgagctcctggcagtcaacagataaaaggaacaaagaccacaaagcaaggaggcttgtggtggctggccagctgtgaactttgattgatatgtgggttatggcctctggtaatcaattaccaagggtgggtaatcgattacaaggcttaaaaatgaagacaggaggcttatatggtctctggtaatccattacctagggatgtaatcgattaccaggcttgaaaacgaggtcaggaagctaagggagcttctggtaatcgattaccaaggggtgtaatcgattaccaggcttaaaaagggaacagggagatggtggaagcctctcgtaatcaattaccagcctgtgtaatcgattacacagaggaatgggtcactggtaatcgattaccaggca

SEQ ID NO: 218225 - DNA, 640 bp, Glycine max
agcttaacaattaccttattaaaaatcatgatttatttaaaatgacataaaaaataataaaattatcatctagttaagaaaaataacaagaaaaatgaataaatatattaagaataaaagtgaaagaaaatataaaaaattaaaaattattatttaaaaaaactgttatttaatgttttaaaaaacaatagaagttacttaaaaaaacatatgtttaccgaactgttaaacaaatttttcaaatatttaaaaaactaaaaattaattaaaatgtgttattaaacataacctaataacactcattaataagacactaaatttaggcttttttttacgttaatggggtaattttttttcaaaattaccaaaattaataccttttgagttatttatgaaaagaattaaattgtcattaaaaacacgattttcaatacaaagatatggtgcgtgcaaacaaaaattttctttttcaaaaacaatgaacaattctggtttggtttaaaataatgggattaagtgaaatcggacgtccttgaggattcaacttaatttttaatataaactaaggccgtttaacagggaatttggttttttttttaaaacaacgaattatagggggttttttgttagctaaaattta

SEQ ID NO: 218226 - DNA, 518 bp, Glycine max
tggaccgttggacgtgcattgcatgaaaataattagtataaaaaactaactgatcgctataaacatagtttggaaaaacaaaaaggaagcatcattacggcatgtgcaatgcattatattaaaaataggacaaaaatatatttttgattactatattttcatcaaatcttatttttattctttaaacttttatattctctaatttgatccctaattctttttttaaacaatgtttttagctatttttcacagattttcattaacaatgttaacttgagttgtgtccagcgtgataaatattgtgcttttttaaatttttttataaatatgtaaaaaataaattatcattttttaaataaaattatcatttttttttcaaatatattaaaacctaacttttaacgacttcatctctattttgatttttaccttcattattattatttcttatttgttcattgaaccgaggtttcgaataaggatgagaacccgcctttgcaatcatgcacatgaaaaaa

SEQ ID NO: 218227 - DNA, 282 bp, Glycine max
agcttgactttggtttagacatgattgatacatgatttgggacttgtaggatttgatttgggcaagattggatgaggggaaatgtggttttcgaaatctgctctttgtgcaaatttttgctgtgaaattgtgcaccagaattttgcacaagtgcagaaaaatgctatgcatttgctggttgtggaaagagcagtgcagaatgagttctggatgtttgctagtagatcccaacggtcaaaatgtaggcttatgtactagacacttccagtaaaattttggaat

SEQ ID NO: 218228 - DNA, 578 bp, Glycine max
  unsure (1)..(578): unsure at all n locations
tgagatgaggaagcgtaaaagggtgaaacttcctgcttttattcgttgaccacagagtggtacctggagatatgtcgcgggggtcgggagaccttggggacgtcaggtggggtgctattgcccaaaaccaagcttgaccaatcccgacccaacccgggcatagtcattcagtgagaacttgtgatgtacctaaacaggcgagctcttggcagtcaacagataaaaggaacaaagaccacaaagcaaggaggcttgtgtggtggctggccagctgcgaactttgattgatatgtgagatatggcctctggtaatcgattaccaagggtgggtaatcgattacaaggcttaaaaatgaagacagaaggctaagatggtctctggtaatcgattaccaaggggtgtaatcgattaccaggcttgaaaacgaggtcaggaagctaggagagcttctagtaatcgattaccaaggggtgtaatcgattaccaggcttcaaaaagggaactgtagactatggaggcctctggtaatcaattaccantctgtgtaatcgattacacagaggaatgggcactggta

SEQ ID NO: 218229 - DNA, 445 bp, Glycine max
agcttcttttggaccttgaacaagcaatcaactcctctttcagaaccatgctatgtgctcgcgactggtccctttcttcccttcgcaacttgagttcattattgctaccccatagagctccgcgaaatttgttccggccatagtcttccttgcgagccctcttggtctcttgttcaagggctcttgcggtaattgcattctcttcccgtaacccggcacactccttccgaacgtgtgtagcagccaacttggacttctccttggcgagttttgcctttcctaactcgcttttgagagcttggacttcctcgtcctcttccggtgcttcaaaattctcttcgctgacgacttttaacttggcgagccaatctaaacctcgtatgcgaactttcaaccattcgtggtacccaccaatgatgcccttacgaacccctctaagctcttg

SEQ ID NO: 218230 - DNA, 562 bp, Glycine max
  unsure (1)..(562): unsure at all n locations
tggagaggatgcttcaatggaggaaaagaaagagggagagaaagagagaggggggagcacgaaattgaaggaagaaaaagggagagaagtttaagtttgagttgtgtctcacaagactctcattcatcaaagttacaataagtgttacacatgcttctatttatagactaggtagctagcttccttgagaagctttcttcagaaaacttccttgagaagcttctttgagaaaacttccttgagaagctaaagcttagctacacacacctatctaaaaactaagctcacctccttgagaagcttccttgagaagctagagcttagctacacacacccatctaaaaactaagctcacctncttgacaaaattcatcgaaataccaaaaaaaagtccctactacaaagactactcaaaatgccctgaaatacaaggctaaaaccctatactactagaatggtcanatacaacgcccaaaagaaggaaaacctattctaatattacaaagagagtggaccaaccttgatcatgggctcaaaaattgccctaaggtcatgagaccct

SEQ ID NO: 218231 - DNA, 224 bp, Glycine max
agcttgttcgcacatcgttcgcgggtatgatatccactctacaaggtttgaaatacaagagaccttcaatcctataaagcaacggggcggacaaaaaagggcacataacttgaatggcaataattgtcaatgcggaaagtattctgcgctttactatccctgttcacacattatttcaacttgtgggtacgcgagcctgaaccactatatataaatggtggtta

SEQ ID NO: 218232 - DNA, 717 bp, Glycine max
tcatggtgaatcaaaggtgattcaaaggtgttttgatgataacaatgatgataacaaaagatgacgacaaaggtgatgacaaaaagctcaaagatcaatcaagaacaattcaagagttcaagataagaatcaagaagaattcaagactcaagaagaaagtctagagacaagaatcaagattcaaggttcaaagatctcaagaatcaagatcaagaatcaagaatgaagagaagactcaatcaagataagtattaaaaagtttttcaaaactttgaatagcacatgagtttttgacaaaaccttttaccaaagagtttttactctctcgtaatcgattaccatattgttataatcgattaccagaagcaaaatgagtttgagaaagttttgaactgaatttcaacgttcaatttattttcaaaaggcttaatcgattacaatgttttggaatcgataccagtgccttgacgttgaatctattcaaggtgaaagcacacctttacttaaagcttgtgaatcgatacactaattgggaatcgataccaggactgttctgataatcaaagatgtactctcaaaaaggttttgacttttcaattggtttaagttttctaaaattatactctctaatggcctcttgccagactgagagcttataagcaggcttgattgctttcagaattactttccatcatcctttcagcctgaattttttga

SEQ ID NO: 218233 - DNA, 470 bp, Glycine max
agcttgacgaaatctagatggcgatgcctcagcaacagcttgtacttgtttctcgggcacagcaaagcatacagaatgctcactactagcctacataaatactgaaaatgattaatgccatttcttatatatcagcgtggacaactagaaaaattgaaaaaagttataaatgcacctgagatatcatgataacattagctccaacatcttttactgcaccaaaaatagcactggccgtacctggaacaccagacattccagttctgcaaaaaagcatcaaagaaaaatttattggaatctacaacttggacaattaatattggttaaagaaaaccttaaattaaatagaaatccctcggcaggaaaaaatgccaactattcatcatgtaacacaacttgcatttatgactcaccccttgacgtttacaaatgccaaagttgcctatggatgcaaaatctttgacaaaatt

SEQ ID NO: 218234 - DNA, 604 bp, Glycine max
tgtaatgtcagaaaaggctaacacagaaaatatgaagcgcggatgattactagaagcatttcacactatattagagaataatgccacaatttaacttcttgtcatcttttcttttgattttccctttaacaatttctatgagcagatgatttttatgtgaaattgcgaatagctaatactctaaagttagtcttcattaatatgagatcatgatccttgaaatccatggtcctattatggtcttcacatacttcaatgttgtcctgattcatgagtaaaggaaaaaaaaaattgaaatattcatttaagtgagtgtacatgtatattaagagctgtaaaaaaggataaggtcaatactagaatttattttctggctcagtcagctgtgaaagattcaagagtgaaatagaaacttagaagataatcgagattactacggcgtaacataatttggtactccttttcattatactatgatatagctatgtatttctatagcgagatcatatactaactgaatctgagctgacataacataggaattgacagatttcagatatctaatatagcactagaaaagtctttactctaacattgtcccctc

SEQ ID NO: 218235 - DNA, 540 bp, Glycine max
agcttgaagtgaaaaatgttaactggagcaacctaatttttacatcaaagcctaatcagcatcaacactactattttaatctttttctcataaaggattcaatcctactgatgttgtggtgcagcagagtaatgcaaggtctatttgatgccagtaagtaatccttttatttccaaattcagagcaattccaacaaaaggttccatgaccaaccctaattattaaagaactcagttcactgatatgtatgaataaatgatgcaagaaagcatgcaaactatagaacaacaaagaaattgtttcttctgcagattctagataatgccaaagcctaaagaaacaagctaaagtattatggttcacttgaaatattaaggtggaagaaatgtaacaagtaatatttgtttttgatgcatcagaacaaatgcaacaagtaatatgatgctattatacatcacggatatagcttaaaataaaaagccaaaaggagggaaaggaaaactcctttattggacttagcccataaaaaaaaaaagtaaa

SEQ ID NO: 218236 - DNA, 676 bp, Glycine max
  unsure (1)..(676): unsure at all n locations
tgtaatttccttctttttcgatattttgaggtgacaaaaagatttgtatcaatggtgggtacataaaattcagaagaaaaatattattgtttaagtgtggttatgtagtggctaagtggagacatgatctgaataatccttctactagttcataagtggattgtctctggagtaaaatagggacaacggaatgcacaaagatgggggttggtggctagaaaccataatggaaataggagaggctttaggtttccaatgaccccttcaaagcagtttttgaagaccaatggcgtagatgaagtcccttatcagttggacattcatatttctaaagatgcagttgaataatactagtattctattgtaaaaataaataaaaaaatgcactaaatggcagaagatatgctatcaatttcggcgctaaccatgattcttatcataaggaaattgttgacggtggaaactaaaactcgagctagtgtgggaaaatctttgatattgtttttgaaaatttgaaatcatatataagtcaggatgcattgaaataatgttcattntccattatcattntcaatcaaattaagttctaacgaacacatattcatgcctcaccggcggtaactacctactcccatatatatatatatatatatatatatatatatatatattatga

SEQ ID NO: 218237 - DNA, 463 bp, Glycine max
agcttcttattaaataatttaaaaaaaaaaaaaaaaaaacgtggttgcactatagccagcatatgttgcacaatcacatagttgatctcacttcaagtctatagttcagctttcatagacctgaattggcgattaaagctgctcaaaatcatacaataaagaaccaaaacttagagggccagacacaaaaaattcataaactagctttgtacaattttgatatcatagaaaaagaagagataaaagtctagttttgattataggatatgatatgttccaacctagcattaatctaaatatcagtaagcatgcatttttcccaagctagaggttgagatcgagtcggcttcaattgcatctgaattacgcgagtaaataggcattttggtccttgacttttgaccctttttgcaaattattccctatctttttggaaaggtaaaaataatccctatctttccat

SEQ ID NO: 218238 - DNA, 776 bp, Glycine max
  unsure (1)..(776): unsure at all n locations
tcctcggggccatttcctgcgaaggcaaacatttggaaagttagttttaccagtgggacactactcttaaaacaaaaatggcatacaacctcctcccataaatacaaacatcaatgtaaatttagagcaagcttatgcgcatatttccttacgaacgttcacttgcgcaagacattctattaactaagaaaaatgcacccatatacaatcaaggcagcttcgttacctagattatttacatgcacttccaaggtgtatttgttacttacatcacacacatctccttggctgaatttacatacatgcatactcaaagcattttggggtaccaaaaattgcacatgtgctcatcttggtatttctaatacctatacatacacaaactctatgatgaatcttgactacctacacaataaggtgctacatttcatgcccttttcaagtttttgctacctaaagccgcatgcaaattcaagtatattntcctttgctgactaaaatggtattcaaattaaaaggtatatatttttttttaatgtattttctttacataacatgcaacatatttatatatnatttttgtgagacantttgactaccaaaaattatatgtacatacatccaagtattttctatcatacccaaagtgaaaatgccaaggtattttgctacctattctaaacctacacattcatgacgagcaaaattctaaacatctaggcgagggaaaatatatagtgtggcccatactgatggtggcaaaaaaaaaaaaaaaa

SEQ ID NO: 218239 - DNA, 412 bp, Glycine max
agcttgtgcaaatcaaatcactcccacatcttatctctagcatgcattctttctttctttacccactcctcacgtttggttttttagggaaaaacaccataactaaacgcgccacaaggcatccctatcgcaccagatccaaatctagaacgatgggtgatcaagaggagacacaagaacagatgaaagccgacatgtcggctttgaaagaacagatgacttccatgatggaggccatgttaggaatgaggcagctcatggagaaaaatgtggccaccgctgccgctgtcagttcggctgccgaagcagacccaactctcttggcaactgcgcaccatcctccctcaaacatagtaggacggggaagggacacactggggcacgatggcaaccctcacctgggatacaacca

SEQ ID NO: 218240 - DNA, 673 bp, Glycine max
  unsure (1)..(673): unsure at all n locations
tattcaagtcatggttgtcaaaatcatgatctgtcttataaaatcatttgattttaacatcaagcaccccttgacaatctgaatcttgagttgaatcgctggagagtaggatcacagagggattgcttttgtccatgtttaatcatgggatcatttatcctggtgaggcagaagacggacaaaatcacaaggttggggtcatatgatccagtttgggcaaaacccctttttctccttcaaacaatttcctttccatatgtgactatgtgacttctctaacctaatctccatcaattgttttttgaattgtgtgccattggacctctttcacaactgttgaagctttaccttgtgccactattgctactgcgggttgtgggtagttntggcactgtcaattgcacctcctttacctaacatctttctttgtgggtctctcttactcagtcactctcatctcattctctggattatctttcttttcttttctatggctgtcctcacagtctatagaattccttttgagtcatagatgcttctctcacagagggtgaaccactgaatagaatattntaattagcttgtatgtaatgtcttatgactcgttaatatgttattagaattcttatgaatttttaatcagggcttaattgcttctctcatcatgacatat

SEQ ID NO: 218241 - DNA, 439 bp, Glycine max
agcttctaaactttgtacaagaatgaagctctgataccacttgttagacaagtggcctcagatatcttaagaagggggggttgaattaagatattccaaacttttcttctaattaaaaatctatcttactttttacttaagttatgaattcccttaatgacaatcttcttaaatattaattcaaatgaagcaacttgaattatgaatataaagcaataataaataaaggagattaagggaagagaaaatgcaaactcagttttatactggttcggccacacccttgtgcctacgttcagtccccaagcaacccgcttgagagttccactaacttgtaaattccttttacaagttctaaacacacaaagacaacccttcctttgggtttagagattctttacaacaagaaactcacagtctcttaatcccttagagaatg

SEQ ID NO: 218242 - DNA, 694 bp, Glycine max
  unsure (1)..(694): unsure at all n locations
tgtctcagcatttatgcgagacggagaccaacatgctagctatcatcgccaagtaccaagaagagttaggtctagccacggcccacgagcatagaatcgcggatgagtatgctcaagtatatgcggaaaaagaggctagaggaagggtgatcgactctttacaccaagaggcaaccatgtggatggaccggtttgctcttaccttgaacgggagtcaagaacttcccctcttgttagccaaggccaaggcgatggcagacacctactccacccccgatgagattcacgggcttctcggctattgtcagcatatgatagacttaatggcccacataattagaaatcgttaggaaacttgtatggtctctcagaccttgactggatacgacttcttttttttgaaataaaatgagttggtcccatgtttctactccaaaaagcttgtgcaaatcaaatcactcctacatttcatctctagcatgcattttctttctttacccactcctcacgtttggttntttagggaaaaacaccataactaaacgcgccgcaagggatccctatcgcaccagatccaaatctagaacgatgggtgatcaagaggagacgcangaacagatgaaagccacatgtcggctctgaaagaacaaatggcctccatgatggaggccatgttaagtatgaagcagctcat

SEQ ID NO: 218243 - DNA, 485 bp, Glycine max
agctttaaactctatttttaattctatttttctctctaaatgtatattacaatgcatatatttgtaaataattaatgagctcaaatatttaaaatgtattttttttacataaatcttataaaataagtgttagaaacacattttttaacattatccttaacacatttaatggattgaaattgtttaaaaattacaaaatcatttcatggagtcattaaataagatgaatcacacaatttttttataattttaagaaatttcaatcaagaggatgtgtatttaaaagaatgagtgaaaatatgttactaatatttctcatcttgtaatattttgagtctgattctttctaattggatagggaaatacacattatttttgtgggagccacaataatattttcttcgtcccgttataaataatgtttaaggtttttttaaaccgattaaaaaaacaagtattttaaagtgttttgtgtatttcaaatg

SEQ ID NO: 218244 - DNA, 544 bp, Glycine max
  unsure (1)..(544): unsure at all n locations
tgcatccatagctgcaaagaagaagaaattaataaactggcatgtttactaccaaaacaaatacgaaagaaatccttccaagaggccaactattcgggtagctntcttttcatgatatactatcaaattactttttctaattttagaagaggcccccttttagcattttctttttcacaagaatagccataattggggatatcagctaataaccttttatgtttcacgatttgatttattatctatagacaggtttcctgggtttcttggggaataaagttgatgctattgatcattatactgcaataattgataatttgagcaaacaagtaagtactgatcaaatcatacaatggatatgtcaatgtcacccttatccctttgtgtaatagnaactatttttttacaaattgtgtcatccagtcattctgccaactcttatcacttttataatattttgaagtaatcaaattatggtaatcggatatcattgttatattcagaggagataatgggctatgcttttatagttcagtgaggggac

SEQ ID NO: 218245 - DNA, 416 bp, Glycine max
agcttgcttatgtagagagatagagtgtggaaattaggagtgcgagtgacaatgttagcttgcatgacagggaaatagtgaaggtgaaactaattattgtaacccggtgagttgtgtgaaccttaactgtgaaagaacgactagcatcaagtactgatctttgcatgaatctttgattactgaatgtatgcatgatgtggaaatgatgaaggccatgttgaatttatttcagccacttagccaaacaactaccctatattaatgaatgattgaatcccttgcaccccttttgagcctaaatgttaatgaatgactcattgaaaggagctaaatgcaaatgctatctttgtacaccctatcttaagatataaaagatcattcttatggattaagacaaatttgttccaaatatgggg

SEQ ID NO: 218246 - DNA, 373 bp, Glycine max
tgaatgtgacaataatatagagacaacattagcccctatccttcgttgagggacattattaagaaaaaaatcgaacgtcttacattaacctcacatgtgctcaagtttctgagtatgctcaaattcagatattgataaaagaatatttacccataacctctgatgcggcggtgcattatcactgtctaatagctcccccattgtgatataacacgattactatactgacttataaattattgatgtggaggtggacggacgaaatatactgagcaaatattatgaggcgaatttaagaactgttcacgataacgaaccaatacaaattacgattaatttgtataactatggttgatgctgttctggatggcat

SEQ ID NO: 218247 - DNA, 558 bp, Glycine max
agcttttatccacaacaatcgcttgaatccgttcaaggtccaacgccttaatgatctcttttacttttatcggttaaaatgaacctttcaaaagtctaaaatcaaccctatgcgtaactttcttgctttcaaagaactacataggtatgagttcctcatcggaattgaggatacgttggagcaagagccccgctcttgtcgacctcaaaaagataaaaacataaaaaagggagaatgaaataaagattgaagtcatgattttgcacatttggattaaaggctgtcgtctgatgtgacagacgtgtggggtgctaataccttccccacacgtaaacaattctcgaacctttgatcctttaaattcatagaccgctttttggtttttctaaccgtttcctcaaataaatgttggtggcgactccgtgtatttttctttccttgaagacacacccatgagtcttacgtcgcccttctgccgaagggtaggttgtgacaattggcgactccacttgggaatttttttaaaaagttaaccctttaatctatgggcatttttta

SEQ ID NO: 218248 - DNA, 590 bp, Glycine max
  unsure (1)..(590): unsure at all n locations
ttgaatgcactattcaatggagttgacaagaacatcttcagactgatcaacacttgcacagtggccaaagatgtatgggagatcctgaaaatcactcatgaaggaacctccaaagtgaagatgtccagattgcaactcttggctacaaaattcgaaaatctgaagatgaaggaggaagagtgtattcatgacttccacatgaacattcttgaaattgccaatgcttgcactgccttgggagagaggataactgatgaaaagctggtgagaaagatcctcagatccttgcctaagagatttgacatgaaagtcactgcaatagaggaggcccaagacatttgcaacatgagagtggatgaactcattggttcccttcaaacctttgagctaagactctcggatggggctgaaaagaagagcaaaaacttggcattcatgtccaatgatgaaggagaagaagatgagtatgacctgnatactgatgaaggtctgacaaaagcagttgtgctcccgggaaagcagttcaacaaagtgatgagcagaatggacaggaggcagaagcccatgtncagaacatccctttcgacatc

SEQ ID NO: 218249 - DNA, 474 bp, Glycine max
agcttgtccttggtttagacatgattggtacatgatttgggacttgtaggattcaatttgggcaaaattggatgagggaaagagtggttttcgaaatctgcactttatgcagaattttgctgttgaaatgtgcagcagaattttgtataagtgcagaaaaaatgcttgtgtatggctggttgtaaaaagggtagtacatatggggttttgtacatttgctagcagatcccaacggtcaaaatgtagacttatgtactagagacttccagtaaaattttcgagtcgatccaacggttaacgaattggaacaaaggaaatgttactggggtatttgtatgtgaaaagttgtgattttgagttgtgttttgggcagagttttctgcctttgccctgttttgcttgggtttgttagtccatgatgattggatgtggaattacttggatgttgtggaaacttgggaggattgatgggga

SEQ ID NO: 218250 - DNA, 581 bp, Glycine max
  unsure (1)..(581): unsure at all n locations
tcttatccaaggctcatcttggtggtgaagctccttcctccatggcttattccataatggatggcgcctcctctcacctcttttcctttgtcttccgctgcatctccatggtggaaaatcaccattaaaggaccccattgaagctcaaagatccagcctccatagaagccccacaagcaagcttccatcaccttgccctaatccatttggtgaaatagtcaatggcgattagtaggaattagattgctcctggggcttttggcagtggtcctagtatgcctattccctataaggcaaaaggccaaggggaactcaagctatggaggatgtcangaggggtgtgtggaatgtctacaaactcttggcatcgcctgaacctccttatgaagtcaagggtgtcggccaataatagccggcgcgcaccacttangttgctagggagcgacccctgatatggaggtcacagattccttcatgtagctcttgcatgagatagtctacttgttggttttttaggcatttaagcaatgatgtgttcaaccctcttttgaatagctcaccatcaaggatggcgttgtatc

SEQ ID NO: 218251 - DNA, 392 bp, Glycine max
tattattctcaaacatgagttggggaggacccaatactaatggctttctaactagatgattgaaatgatgcatgtttatgtgtgtagctctacgatgccacaaccaaaaatcatctatttttgttaccaaacaacctcaactaatgaaatgaggcatgttcaatgtctaaaatatagaaattacctatcattttacctataatggacaacctccccgggacatggtttcattattaggcataaattcttgttgaattcgattatgaagccttttgccacatagttggctaaagcttaggacgttatgctttagtccatcaatatataaaacaattctttatcaaggttttgaatggaattccaatattttccttctcccataattatccctt

SEQ ID NO: 218252 - DNA, 406 bp, Glycine max
ttttgtctctcttattaggcaatggttggccctctctctctctattgtgaaatcctcatcttttattcttttctacttttgcagcaacaacaaatttaatcatcttttcaccgacgagcttgtccctttcaataccaaccccgacaagatgctcgacctccaacacaccaccaccttcctcccctgcaccaagatcaaagcctctgctgattcctctgtcaccgctgactctgacctctgcattttcactactggcgcccgccagatcactgatgagtcacgcctcaacctcctctagaggaacctctccctcttcggcaccaccattctgactctcgttcgttactcccccaacgctattctcctcatcatttccaaccctggcgacattctcacctacacacat

SEQ ID NO: 218253 - DNA, 344 bp, Glycine max
agcttctaccttggctgagattggttctattgttctttccactagcgaccctcactggaagtcccagctttctcacatggcttactccatgtggcgccgccacaacctcccccttggcatttccaaacccccctttcgccccgccagacccccaataccccaattggttcgttccctcaatttcgcttctcctttcttattgcaaattctgttatttaaatctaattacctcaatttgatttatatttttcaagcctctgatttcactctatccttctcttctatcctttaaaactaaagcttcttttttttttttttgtgaccttctgacctgaattgggaaa

SEQ ID NO: 218254 - DNA, 635 bp, Glycine max
  unsure (1)..(635): unsure at all n locations
tacataaaaggcagcctttaagggctagcccgcgggcccgaaccctaagtggatgcacaaaacaacttttagattacttttttgttgtttggttaagttaaggagatggaacaaggagcacaggtgtgtcatatgagaaattcaatcattcttcattcttacaatgtaatgtccccagtttcagatgctctttttttctgggtgggctgcctctatctatcagcaaaagcccatcaaagatcctaatcgaaattcaattatgatatgtgcaaattgggttgggcctattgaagtctgtaccttctaaaacatattcttcagaagaaattatgcaataaaatttttgtaaataaaaaaggggaaataaccctaactgtgcaactaaatgaactaatgaagttcccaaattcctctttgctacattaacgtatatgttaactgtgaaatatcccacccgaggaatactacacatgaacgaatctagtaatatattaatttaatcagcaacacattccataataaactggttctcagttgttaagggttntactcagttgattcaacaagagcgtgagttggtatanaagttcttaanaatgttttcaatttctacccataaaaaaaaattgattctc

SEQ ID NO: 218255 - DNA, 441 bp, Glycine max
agcttgctaacccatggaagctcctaatatctcccacactttttggggtgggccattcgtggatggccttgatttcccagggtccacatggaccccatttctaccaactacaaaacctaagaaaactatattatctacacaaaaggtacacttctctatatttgcatagagggtgtttttcctatggactgaaagaacttacctgagatgtcctaagtgatcatctaggctcctattgtacactaaaatatcatcaaaataaacaactacaaatctacctatgaaatcccttaagacatgatgcataagccttataaaggtgcttggtgcattactgagcccaaaaagttggtcttgaaagcgaattttcactcatcaccctttttcatcctgatttcgggataaccacttttaagaacaatttttgaaaaaatattggca

SEQ ID NO: 218256 - DNA, 583 bp, Glycine max
  unsure (1)..(583): unsure at all n locations
ttagtctctatagatcttcacacagcaaaatctctcaaaactctctggaacttggacctttctctctctaaaatctctagacatgcaaagctctgaatcccagtccaaactccttatctaaaatctgatttcaggcttaaataggtgaccttgttcgtgctcgtgcgcttagcgcaattttggaccgcttagcgcacattagtgaatttcggtttagcgcgtgcctttgtcgcttagcggatggactgaagcggtgcgcttagtgagatgaagcggtgcgcttagcgaacctatacaactcatcttcttccagattcttccttgcgcttagccaatgagtgttacgcttagtgggcgctcgctaagccaatggactggcttagccataaggtgaaaaacaacacttttaaaagcttgcctaattaacccgaaattgtcagacaatgattattaaacacacaaaatggaagtactaagtatttattacctatacttaacatanagtacttataacactacaaactaaccataaattggggaagtttgatacaatntacacaggttttacacacaaaagttagtc

SEQ ID NO: 218257 - DNA, 607 bp, Glycine max
  unsure (1)..(607): unsure at all n locations
agcttgtaccacatttcattacatagagaagacaaatagcaaactacacgttagccacccatgaaaatggagaagcaacataactttcagttaaataccactatttgctagcttggctcacttcctagaatacattgacaaatactttaattataagttgatttattttatatagtaagttagcaaaaatgcttgaaatggtgtaaggttgattaaaaggagacaatgtgtcaataaaatttctaaatctagcttatctccactaaatttttggtgtttgccttgttacaatagaaagtcgtacagttgaacctgtttgaattttactaatccccaattgtttaatgcaaattattagaaagttgatattaacagtgtgataaatatgtgatatttttaccaaggtctagcatgaatggtaaataattgagtcttgattatgtggatgaaaaaagctttgttagtaaaaaattacctactttggtgaattgtcttaaaagggaatagttttttataccctttatgcattccaaaaagagagtaatanttcatcaatagaattatagtcattgcaatcatttttcttagggtggttgaatactttttt

SEQ ID NO: 218258 - DNA, 522 bp, Glycine max
tatcaacacttttatatataacaattactggatttggtttatgttgatgaaggtatatggtagcatatacttcagatcatctttcttcaagtgagtttgaaccccaaccgtaggaaaggcagtaaggcacatgttgtgagtctagaccactcacaagtattttagtcatgtgatgagcaatttatgtagtaacataataacatgcgagtcttcaactaataagttttcaagctatgattatgaatttgctctcttcctttttgtttaatgctttctaattgtggtaagtgtgtcataaagtgttttgttataggaaagttaaaacaagttaattgttgacaaaaaatatttttttaggcacaattaattacttatacaactaataatgtaataaattggtgagtgtggttatgtttgctaagtcaaccatcaaatctaatctgtgaataactgaaaatgaatagaacttatggcggtctttttagatatgtcttgttttttagagcatggtgaggatagatc

SEQ ID NO: 218259 - DNA, 381 bp, Glycine max
agcttgcttctacacttctccttgaagtggggtctccaatcacctttcctctgtctccattccactaccactgatcttcaagaagcaaaggactccattgatgaaggatatccaaggcctacaagttctacatggagctacattatgtggtatcagagtatcttcatctaggtgatcttttgcttactctatcttttgttcgggcaattcactttaatttctttttgttcatcgtcttctccatgtatctcctccattgtctagtggtttggtgttggttaaattacattcaaaaaaataaaatgatcaaaacttagatctacacttgttcttgcatttccatggggtccaacccatgcctcatcaattaaggaatgcttt

SEQ ID NO: 218260 - DNA, 677 bp, Glycine max
  unsure (1)..(677): unsure at all n locations
tccatcaagtggtatcagatcacaagagcttcaagtaggtgctccttaaacctccattaattttcagctttaccttttcttccattgttgtttcttcagttttttctccatgtatctcctcacatttgttgtgctaaatgttgttaacatgattttttagaatttacaccgattaaacttgctatagaagctagatttgattttctatggttcaaattccttgttcttgttcttgaaccatgaattgtgttgagtttagattcctttgagttttgtattgccatttttttttgctgaaacctaaaccataaaatacttacaaaaacattaaagtagaagaaaacctcaaaaatctagagtgacatgttcacctattatagtgttgtcttagaggtcatgcctagtcatgaaacttgtcacataagactccttatgttntgttgaattttatttttcttgattctttatctaactcatttgttcataagtgtatgaaatttttttagcctattatttgattcgagtcaaatcttgcatgttaattagtccttaacatgtccatgcataattcttagagactctttgattgtgaaccttttcttgacttttanngttccttatgattgtgtctattgtacatttgangtttggtgattgaattgctggctgaattttga

SEQ ID NO: 218261 - DNA, 520 bp, Glycine max
agcttcttgatggattcaagtacttgctatgcgtgttactttataagcaatttcttataggatattgaaatcaatatatatatatatatatttgcggagtgaaatacctgtcctttttctttgaaattgaattgtttgttttgcactttttcttttggctaaatattcttctgtagttggcatggcatgacattgggttcaaccattttttgctttcagaatataatattgagacatctctgattaataatgctttcattcgtaaactacaatgaaaacaaaagccttcctatattgacatgtactcaacgagatatttgaatctgtaggtgcaaagtgatgaagtaccccattgtcagttttgtattaacatcttcgtgaagcatttatggtccactgtcttatatttcttatttacaaagttttgcttttgaccttttctctgatttcactgaatctgttttcccttatattgagacccaaagtattttttgggcatatgttatctttggttgattat

SEQ ID NO: 218262 - DNA, 692 bp, Glycine max
tgatgtgagaaagcgtggaagagtcagtcttcctacttttgtttgttgaccacagagtggtacctagagatatgtcgcgggggtcaggagaccttggggacgtcaggtggggtgctatttcccaaaaccaagcatgaccaatcccgacccaacccgggcatagtcagtcagtgagaacttgtgacgtacctaaacaggtgagctcctggcagtcaaccaataaaagaacaaagaccacgaagcaaggaggcttgtgtggcggctggtcagctatgaatcttgagtggtatttggaaattggcctctggtaattgattaccaagggtgtgtaatcgattacagggcttagaaatggaaacaggaagttaaaatggcctctggtaatcgattaccaagggggtgtaatcgattacagggcttaaaaatagagacaggatgttaagatggcctctggtaatcgattacccatggtgtgtaatcgattacatagagtaatagggcactggtaatcgattaccagttaggtgtaatcgattacacagtgtaatttgtaggtttccatgtgcagaagctgtgtaactcgagttttgggcactggtaatcgattacatactttggtaatcgattaccagagaggaaatcccttgagaaggatattttgactatgcgtaaccattatgggacgcattgta

SEQ ID NO: 218263 - DNA, 383 bp, Glycine max
agcttgatgattacctatgggcatatataacaaccttcaaaacacctattggtctctcattgtttcaaatggtgtacataaaagcatgccacctacaagtggagttagaaataaaagatcattgaagttcctcaacttggactctgtggcatccagagaaaagatgaaagtagagctacatggactttaagagatgtgcctcaatgcatatgaatcatccaagctctacaaagaaagctctacacagagaattaaggatggaacaacaagtattgctttgcaactcaagattaaagttgtttcctagaaaattaaaatcaagatggagtggtcctttacaatcaaagactttaagccttatggagatatagagatagaagact

SEQ ID NO: 218264 - DNA, 541 bp, Glycine max
ttcttccgtcggtgctcccctcatggggtaccctagttttcttatagcgagcgcgggattgtagttaatacaacccctcgttcctaccagcggaatgtttgtgtatcctccacatgagaaaaggactccttcctttccttccttccatcgggggaaccaattgattgttctacctcctatcccagccaaaagctggtcccaatctattctcctcttttcagtacacgagagatggctcaggagcggacatggatgccttgtgtcttgcaggaacaagtgtgaaaccaaccaaacacagagggcgggcaagcaacagatgatccgtgcgctactcttttcacaccttcggtcaaatgtgtcaaataaatctgccaagacagctaccaccggactttccttgctatggtggtatgcaaggaaagcgtcgattgctgctaggtccaccaaaccatccgcgtttggaaagaggacgaccccaaaaattaacaaagctaacacatccataaacgggacccaatctccttgattggccatacccctc

SEQ ID NO: 218265 - DNA, 486 bp, Glycine max
agcttgtcatatgcgactttgaattggtaaggctctcgaggcaatccatcattgttaactgcctcacaataaatttgttgacatgaaataaaaatgagtaggcatttcactagaaaaacttatgcataagtttatgtggaagcaaagctaccatgatgattcaccaagatgttttgatgatgccaaagctcaaagagttgtttcaagattaaagaatcaagcattcaagattccactcaaagattcaagaatcaaatgaagaaatcaagaagcatcaagccaagtcaaagtaagtagtaaaaagtatttttaaaaaaaaacatcaaatagcacactttttgttttaaaaaggattttctgaaatcttctaagttaccagagtttttactctctggtaatcgattaccatttggttgtaatcgattaccaatgaccaggatgggtttcaaactggtttcagtgctttacaacgttccaaaatgattt

SEQ ID NO: 218266 - DNA, 559 bp, Glycine max
tctcttcgacctttggcaagcctttaactcgtctttcaagatcatgcctttgacgaacgattgatcctttcgtctctttggagcttaagctcactgctgctgccccataaagctcctcggaacttgttttagccatgttcttcctttcgggccctcttggtttctcgttccaaggcttcggcgatggccatattgatgtcccttagttcatcatactctttccaaactttgatggccattgatttgaacttctctttgactacttgggctttttcaagttccgcctttagggtttgcacttcctcactctcctccagagttttagcctcttcctctcttgcagccttcagctttgggagccaacccaactcttatgttctgactatcagccacttatgatagtcgttggtgatcccgttgctacttcccctaagctccttatctttactttgtactgcacctcatgccttgcggactccttgaagtactctcgcattggggtcactaaaaccccgggcgatgaaaggcgtgatgctttccttcaatggcgctcctctca

SEQ ID NO: 218267 - DNA, 451 bp, Glycine max
agcttctacattcaatttcgagcttttcgatatattacgggactcaatcggacatccgagtaaaaagttattgtagtttgaatttgctcagggcttcggtattccatttcgagcgtctcgatatattacgggactcaatcggacatccgagtaaaaagttattgtcgtttgaatttgctcagagcttcggcattccatttcgagcatttcgatatattacgggactcaatcagacatccgagtaaaaagttattgtcgtttcaatttgctcagggcttcggtattccatttcgagcgtctcgatgtattacgggactcaatcagacatccgagtaaaaagttattgtcgtttgaatttgctcacagcttctacattccatttcgagcttttcgatatattacgggactcaatcagacatccgagtaaaaagttattggcctttgaatttgc

SEQ ID NO: 218268 - DNA, 519 bp, Glycine max
ttgagcaaattcaaacgacaataactctttactcggatgtctgattgagtcctgtaatatatcgagacgctcgaaatggaataccgaagctctgagcaaatttaaacgacgataacctttttactcggatgtctgattgagtcccgtaatatatcgagatgctagaaattgaatgttgaagctctgatcaaattcaaacgacgatgactttttactcggatgtccgattgaggctcgttatatatcgagacgctcgaaatggaatatcgaagctctgagcaaattcaaacgataataactttctactcggatgtccgattgagtcccgtaatatatcggaacgcttgaaattgaatgttgaagctctgagccaattctaacggcggtaagtttttactcggatgtctgattgagtcccgtaatatatcgagatgctcgaaatggaatgttgaaactctgagcaaattcaaacgacaataatcttttactcggatgtctgatggaggcccgcaatatatc

SEQ ID NO: 218269 - DNA, 490 bp, Glycine max
agcttgtagggttcaccccaaattccgttgtcatatgctaaacttgatcccatatctacttgataattcaatggtagccataaccctagccaaggttcatcaacctccatttctccgagaatacgactcgaacgcaacgtgtgcttgtcacggagaagccccggggcgttccattgagcattgtaaggctctgaagcgtaaggtgcaaggtctaattgatacgggctggctgaaatttgaggagaatcgcttgttgaatcctaacattaacaagcaacaccatacatggggcaattctggaagctgttgttatgactcatcaggattttcaagtttatgccataaaccacagttacaatgttaaatgatatagataaaatggacatcctctcacgaacacatttttgcttattcaacttccaccggaatgtgagtgtaagccattggtctgtttgctcaagcaacctgcactcctgaatgttgacttcca

SEQ ID NO: 218270 - DNA, 642 bp, Glycine max
  unsure (1)..(642): unsure at all n locations
tctcccctattttgctataaatagggggagaagtgaagaagaaaagggttcaaccccttaggcacttctctctctctctcgaatttgctgaggaaaattatttccgtgaagaaaatccaagccgaggcgcttccgtaacgtttccgtgagtaattacgcgaagagtctcgaccgttcttcaaaattcatcgttcgttcttcattttcttcaatcttcaacgggtaagtacttcaaaccaagcttttccattcattctatgtacccgtggtggtccaaattttgtttcatgtatttttattcttgttttcatttactttttatacccccttttgacgtgcttaagccatttatttaagtcatttctcgcttaatctaaaaataaaactaacttccaccgatcgtttgaattgtatcattcgttaattttggttaaaatgaattccgaccgttcggtcgtgccgtaaccacgttggaaataaaaaaagaggtaaaataataatataataataaaaaatgtcttttagtaaagtaaaagcgaaaaaatcaatcagacgttttctctttgggatttctgattcttaattgaatcgactaataactaaagtgaaactaaggctaaanatcactcgcctagtcaagct

SEQ ID NO: 218271 - DNA, 554 bp, Glycine max
  unsure (1)..(554): unsure at all n locations
agcttgccacccagctcgcccaggcgagcagggttgcttcctccagaagcaacagccttctggaggaatcttctgaagggcccaagtgggcctggttgctatttgcacccccatttttactaagtacaccccctgcctttttttggtgattcttttttcgtaaagttacggaaacttacgaattttgtaacgatacttgttttctttccgtaatgttacggaaccttgcggattacataatcatccccttttttgacttacggaatgttacggaacctcactaattgtgcaacgatgcttccatttgatttccggtgtgtcacggaaccttacggattgtgcatcaatattttcttttgttntccggcatatcccggaatttcacaaattgcctaatgatgggtgccaagcacctcacaaggaccaaacaaaagttgcatgtcatcaagcaaaggtcccccggacgaaattagggtatgacagtngcccctctttacttgtcttttattggagataaaaagggaagtaagataagaaccctatttcgttcctct

SEQ ID NO: 218272 - DNA, 618 bp, Glycine max
  unsure (1)..(618): unsure at all n locations
ttgctggtaaaggtcttgaatgaagctcacgtagcccaagacatctccgtagaaggctttgggggaatcgtcaataacatcaaagccaacaactacctcaccttcgctgaagaggaaatccccgccgaggggagaggacataaccaggctttacatgtgtcagtcaaatgcatggaacacgttatggccaaagtactcatcgataacggctctagcttgaacgcgatgcccaaaagcacattggagaaattgccatttaactcttcccatctaaggccaagttccatggtggtctgtgccttcgacgacagccgccgagaggtaaggggagagatcgacctcccagtacagatagggcctcatacctgccacgttacattccaagcgatggatatcaacccagcctatagctgtcttttggggcgtccatggatccactcagtgggagttgtcccctccacactccaccaaaagctgaagtttgtagtggaaggacatatggtcatagtatcacgtgaggaagacgtcctgntaagttgcccttcctctatgccatacgtggaagccgcggaggagtcattataaacgactntccaatcttttgaggtagtaagcatc

SEQ ID NO: 218273 - DNA, 482 bp, Glycine max
agcttcccagttatggaaagctaaatcctctgtaggatcttccttgtaggtacttgatgtaaatatcttattatctatttaatgatgttttgtgtgttcactgtgctatcagaacttcattctaccatgcttttaccttgctcacgtagatgcatgtgtccttaagatcattcaacagtggaaactggtttgatttttagaacttgataggacaagactagtttatcgtatttccatgaggaatcggggtacggtaacctagttgttgtatgtttgtcttaattcggtcccggtcgagtttagtccaacaaaaggaatctgcggacgatactttatcaggattactagactatcatgaggaatcgagatttagcatttcaggagacaccatagaacacataagcattgttatgtagaaaacatccctttaacaccaggcacctactaagaagaccaacgtgatgtaagctccattggagctt

SEQ ID NO: 218274 - DNA, 368 bp, Glycine max
  unsure (1)..(368): unsure at all n locations
tcaagaggcaaagtgcaaacatccttcatttcaaaatgttcacttatgtgtattcaaagaattgatcaaatcataaaaaagataagggtaaatagtcacttttgtccttcaatgtgtgattcgctaacaaatacgtgtctgaaagatgaaaaaagtgcgactgntgtgtctagccgttctcatgtcgtgcactagttaaatacaaaggcctcacaggcacagtaaggacatatcctactactaaaatgattgactactatagactttatatcacactgacgtgatctgcataggtacgaatggtaacacacaccatacgttattatgacaactctatctcttagctaggtatctgatatatagactca

SEQ ID NO: 218275 - DNA, 565 bp, Glycine max
agcttttggtacaaaagaagaagaagaataacttcaaagagatttcaaggcttgtaaatgattgtaagagattgttagaaagattgattaaaaatgcaaaacaaagccttacttttatagactcttcatgtatggtcaagaaagccattcagaagagttataacttttagaaaaacttaaaacccatttgaaagggtcaaaacctttttgaagagttacatctttagatttttcagaaacaaacattggtaatcgattaccaaataagtgtaattgattacacaaagattttgagtgaaacaatgtgactcttcacatttaaatttgaatttcaacgttcaaggacactggtaatcaattaccaaatcattgtaatcgattacagccttttgaaaatatttggaacgttgtaaattcagtttgaaaactttttcaaactcattttgctactggtaatcgattacaacaatatggtaatcgattaccagaagagtaaaactcttttgtaaaggtttttgtcaaaactcatgtactattcaaaagttttgaaaaccttttaatactt

SEQ ID NO: 218276 - DNA, 486 bp, Glycine max
  unsure (1)..(486): unsure at all n locations
ttagaggtgctagtggaagtagaaagaagttgattgtaccctttaattaaatcttctctagatttgaatattacctcttcaccatcagagttgacagtgttatcaggctaaggatgtatcaaccattagacataggttggtttcttcctcattgtccttatcagacaatgaattatccaagtcctcccaagtgttcatgaggcttttagatgcaatcctaccccgcaagggcattggatagaagactccaagtttattgggccagagatccaagggaaggccctanggttctcatgagccttanggtagatttcgagcccatgggctaagtatgagcccgcttatctttgtaaatattagaatagatttttcctttgcttcgcgcccttgtatttggccattctagtaatatagggctttaaccctgtatttcggggcattttgagtagtctttgtaacaacgacttttnttgtttttcatgtttt

SEQ ID NO: 218277 - DNA, 494 bp, Glycine max
agcttgtcgaagaacatgcatgatataattataaaacatgtatatctgtctcccaagaagccattcaaattcaaagtggctgaggctagcttttgcttattgttgttgcatgcatgaataactagctatatattgtaagttaccaattaccacgtatatgttggctatgcaatactatattatcagttatcacgatcataaagtactacgaatgatgcacggtaacacgtttggataaaatttctgtgcactggtttccatgaatatctaactaacgtgggatgttttcctcgaacaattttttttttgggtacgtaatagtaacatttagttttttttttctttttttgatttaatacgagatccatagtatccgaatgttaaattagactggatcaactgagggtaatattacttattctttcttttcatattggtaagtataacctttttaatataaatttaattcttttgagcataaaatgaaatgaatg

SEQ ID NO: 218278 - DNA, 470 bp, Glycine max
  unsure (1)..(470): unsure at all n locations
ttctgccaaaatcccagtaattaaaatttgtaccttacaagatttagataacaactggttgttgccccaaactcgcagcacttgagttttaaaatcgttcagaagtataattgcttgcaaaaatgcagccttcgggctcttgaggcttgaagtgagagaaataaaaattctagttgttaaggaactcatggttagcgatcaattctctgatgatgatactcatcacatgaatatctatcttgagaggatcaaagttttggagcagtgaaaattcaacctctaaggagtgtgtcgctgagattttttttttttttttacaatatgcttgcaattaattagtttgtgttcaatcacaaattggcttttatgtaaattattgtgatattcacttntccattttgaaaaactttttatgctgtcctaaaaaatctttaattctatgagatataaatacattgttataaatagca

SEQ ID NO: 218279 - DNA, 1107 bp, Glycine max
  unsure (1)..(1107): unsure at all n locations
tgcgggttcctcgtatacgctctagcatacaccctgaccaccctccgttacacantnntatnacgatatttctcgtcataacacctattattaatatattcctgtaatatacccncccccnnaannnnccacgattgagaccatggcagaaccggggatcctctanaagacgactcgcaggcatgccaacctgcaggctcgttaaaagaagaaaactttgctataaaaagttatccaccacacgaatcaaaacactgagggcacttattttaaaaactaacaagcctctaaaatatatttttaaaatatttccataaacttatttaattttctggctcagaaatccctaaataaatctttttggtcgtattcgcaatttccttatatattaaaatttgctctcggagtgtttaatccgtataaccgggttcctttttaaggttgataatttaaaagaattgactggtgagaagaaatcatattatcacttcactacttcaaaacaaaaaggtttgaacataatctaggggctaataattatattatataacaaaaacttattctggagaacctccagctaaaaaatcggatcccttttatcttattacggatctccaacagaaattttaaaacacttcttctcgggcatcttcagaagtgaactcgcaaatgtacaaacaaagaagggattcttttggtgatttggcttgaaaaccacccacactccttaaatctggtgataggctacaaccctcaggacctatattttgtcgcacggcattttggaaccttgggactcccactttttccatggtcatggaaataaagagatgggaattttcatttgcattgaaggcgccccattggaggactatgaaggccttttagcttttaccacctcccaaaatttactagactaccttcttttcgtttgttaacattaaaataagttaaaatacccctgtctgtttctcttctcgtgtcagggntgatctaactcatctccaccatacaacgatcatagcgctgatctcatcggtcccgctcgtctgtattctaacgtcgagctacttataccgtcgatcacgactacacagcgacacgccg

SEQ ID NO: 218280 - DNA, 333 bp, Glycine max
ggatttggtccgaccatgccctgctgatttgcagctgggaaattggcgggtggaagaactgcccggcatttacacaacaagcattatgtaaacctttacggctctaaaagctctataattgggcctacgctttagagttttcattttgataaagctttgggtcttttgtctttgaagttataatacaaagatctttcttcatctgttcctggtctctaaccattctcattcattagcatgtttacttctttttctgaaacggcagatccgatgacgagatccccgaaagtactaatacctgtgacccgtctataaatttcgagcagaaatgaa

SEQ ID NO: 218281 - DNA, 565 bp, Glycine max
ggctcaaacacgctatgaccaactcaaccttattgaaggtaaacgcttgatggccatgtgccatgggcgcctatatcaacaaagaatgaagaatgtgttcgacaagaaagtgcgcttgcccaagttccacgaaagggaccttgtgctgaaaaagatgtcccacgctgttaaagaataatcgagggaagtgggcctccaactaccaaggacctttcattgtgaaatgggctttttccggaggggccttggtgcttgccaacatgaatggcgaggagctacctttacccgtgaactctgatgttgtcaagcgatactatgcttagaatctggggcaattaaggatatcattgcatgttcttttatttttatgtgttcttcttgggttcccccaaggattcccgtctgctgtatatttctcgtcacagtctttttaaaaagaagagaacaagagtttgaggcttcaatcctcactttgggctttaaaccatgtgcagtttgtgataacctgagcctttttccttagtccatgggatgccccaagcgcttaattaaaactgaacctgac

SEQ ID NO: 218282 - DNA, 1195 bp, Glycine max
  unsure (1)..(1195): unsure at all n locations
tacgtcgtgtcncgcgatgaccgggtcncttattcantcgctagtcgntcagagtcttacctagtacctggtcgctatcctcgactaccataagacatcggcgacgtgatcgtactagaatcgacgctgtcaacacntcatcgtcgtgaacggaatggatatatggttatacactctcacgatngatccgaatagactatagtgaatgtacaatcacgggatcgtgtcgtccgacataggtgtctaacctacaccttttccttcacatatatgtctattatctcgttctcctacacgaaagatcgacgatctaagcatgcacggagctacgctctcccagtcacatgacgtaagatggcctacattcgcgcgctgtcgagcttaccctgctccggcatatctttataccaataccaccgagcgtctccctctcacgtcgacggtacaccatcattaagtactctcgatcatcattatacccgattcgtgtcaaggtgcgtcgtaatcactagcgaccgatcggattataccctataaccgacctacacgtaagagcggcgctcactagccatcattctggcgctactcatcgccactcttgacgccgttgatcccgacctgcctctgagttatctacgaatgttgacgcaccgcgatatgtccaacgctctcacttaagctccttgcgattacatcgtctccgacgtctaagattccacttgaccacatgcgcggcactgtcatcctgtccacggagaacatgcacaggctgataagtctgatgacacgtgcctgctcagaggattgttgcacaccagactctggctgtaaactctgctatatgcgttgtaacctacgagtggcctctgcgtccgatcgtgactcgtcacgctagacgatcaccaggatcggcacgcatgctacctacagacgagatattcttattcatcgatgctcatacattcactctacgcgtcactcatcactcacactctatgacgtcccgctgtgagccgtcgcatattaactagacgacactcgtgtccgccgtatagtacgtctctgacctagcatgaactaacggatagttagactatctgcatactcttgactcacctgatacaccgcgtctgtatcttcgactcgtgcgaacccgntcgcgacagacgattattgctatgtctctcatccgccg

SEQ ID NO: 218283 - DNA, 476 bp, Glycine max
cttacaagtttgatatcaaacaaaatcggtctctattacattcacttcctacctcaataactgttttgactcaactttgttctactaatcaacttcagctttgtgagccatattaatgccaatctatatgttcaaggagcatgacattaatgtaaatgcaaagattcattgaccctcacctttgttcctttcaaaaattcagttgcctttggtgatggcatttgaattaccttccattccaagccatggctccactagcacagatctatttgttattgctgtctccatcttgttagtgttatttggctcactttgttattgcttggtaactcgcaagtccaagggaacatattacaatgacaagccatcaaaaagctctgttacttgtagagtgttcacattccaagaagtccaaaaagcaaccaacaactttcaagaagattttctttttggcatttgggggtttgggaatgtct

SEQ ID NO: 218284 - DNA, 716 bp, Glycine max
ctattaactatgttttttcttattaataaaaatccagacagcattaatgattttataataattcaatgcaccatatttaattaacttagttaaatatccttgacaatttctaagctacttaatttcacttcctggacaataattcatattatccaatttatactatctataaggtaaaaattacaaatacatgaaagtttgaaagcaccgtaggatttgttaataaaaaaacatgaagcaagtgggttcgaagggaacttcatgaatccttataattttgttttaatcagcataggtatacgtatattaatataaatgaaagacaaaaatgggtgccccaaccattttccgtataatgtagattcatggagaaaatttaacaatcaatatattttctgacatacttttttaatattgattaaaattataaattaaatttatagatcttgatttattttaactagtattttaaatttgcaatttattgaataaatttttatttatatataataataataatgtaaagttaccaaccaattagatatttttaacatttaataaaatattattaattaaaaacttggaaaaaaaaaaatttaaaaatttataaattatatttttgaatttattactaaaaaatttcaaataggggatattaggtaattttttttaaaaattaaaatgaatacgggggttaaaaataaaggattttttaa

SEQ ID NO: 218285 - DNA, 462 bp, Glycine max
gaggtccgagtgtgcaatgaatatgtgtacaaagagaatgggagactaagcatcaaaaaaagaaggtgcatgagaatgatgagataaatttcaaagacaattttctaataaaactgtctttgaatacttaatttctaagataatttttataaaaccgcccttggatatataactatagaagcaaagcttcatggggaatcaaaggtgattcaaaggtgttttgatgataaccatgatgattacacaagatgatgactcaggtgatgacaaaaagctcaaagatcaatcacagaaagccttaagtgaatcaaagatcaatcaaagaaccaccttatgtgaatcaagaacaattcaagagttcaagataagaatcaggaagaattttatactcaagaagaaagtctaaagtcaagaatcaagattcaaggttcaagatgtcaagaattcatatcaggattcagg

SEQ ID NO: 218286 - DNA, 1019 bp, Glycine max
  unsure (1)..(1019): unsure at all n locations
cacgcacagcacggtgttctaaacgaccatggactgcctaaccaggtcaaacactatatataacggcaatcgctgaatgaaagtnaacnaccgaggancaatgaatgatacccttgtgacccgaagcaactngaacgatggagctggatcctacggtgatggatccatcgagacgcacgaccgttatattatgtcttaggagagtaacagccgatgatgtaggagggtacgactcgaccactgcaaaccaaggtcacagaacagaactcgacacgaccgaggcgtaccgatgatagaggcatctaaggaatggagagaccgcaaattttacgtagaaacagatccaacaaagcaagaccgcgccgaaagggaccctcacactgtaagtagtccggagatgtacagggcaacagaccacgaaccttgctgcggcgcgggtcacgaccagacgaatactgtatgtgcggatcctggagatatgcactacaaagacccgacatgtggcctccagaactgtagtatagacacgcgaccatatcaaatcatagccgaacggaaggccccgaaaagacggactatatgcaagactggaacttggaggtgcaataagtcgaatgggattactagggacccgcgccagagacaacaggacacactaccgttgggacgcgggtgtggaaccacccgggacctcaatatgatagaacaaaaacgctaactcttctgatcaagagagaggcggggtggaataaaccaacattcgaacgaacggctaggccagcgagaggcacagatcataacacataggtctgacgaccacgaggtcacaccaacaagctcatcactcgagcatgtctaactgtatgcgacagagcagtgccaaaccagcgaagggacgcccaccaaaacaacgcagacacagtgagactcactaccccaccgtgtcgaacctataacgacggggagagcagacaggaaggcaatgtatgcgacgccacactacacccgcgcgtctaccg

SEQ ID NO: 218287 - DNA, 1035 bp, Glycine max
  unsure (1)..(1035): unsure at all n locations
ccccgccgcgcacagcatccatgcccttctgcccgaccgccctctccatcattacattcctcctcccacacctgcaaacccgcncncgtgaacttgtcttcccgtcccggacctaatgtgggcatcagcttgcttgcgttatcattaacagcgtaacaacgtgatgtatgtatctccgatgtatttaaaatccgcacctagcggtaatatccaacaaatgatcatggatttattttagacaaatgaatacgttttgtgaaatcaatcctcatcccagaatggcctattcacatgctcatggggatatcttcattgacatcgattatgacttggagaccgtcattagtaggtggagcaaccacactttctttcctttgacttatacttgaaaaaagaatatcccgcactatattcgcttctagcatgcactaatgcaaagagaatatattccttccagggtgaggagctattactctttaaaaactcgcctcatagcttttcttaggacgggagaactcacatcaataccaattaaacacttgacgatttcacctgaagattccattgacctcccccatgtggttgtttatcctaaaccggaggcgacatctctagtntacctaataccgaagactcttcgacgtctctttttatttcacaatcataacacctctcattgcaatttcatctataaaaaaaatgcggtgccccccgcctcactttaatttcagccaatcgaaccttaacagcccccttgctaaagtaattaataactgaaaatttcctaaaatcgggaggaagtatcctcgaccccaactaaaaggattggggttatttctcttgggcaaaggggcattttcaaaacacaatataatgggggcttcgaagctcgggtcaaaatagtttcacccccccaccattctatctacactcactatggttcggcctaagcattcaaaacttccctctggcaaacaaaagagtccctctctcaccatagagggttccaattatctccactctactggtccgcct

SEQ ID NO: 218288 - DNA, 548 bp, Glycine max
  unsure (1)..(548): unsure at all n locations
tatatactatatgatgaactaagttntatatagctcttaggtgtaataactatttaaatagccaaagccaagcgctaaatataattaaacttatattccgtccaagcttaaaaacagctatttatatacaagatatatctttaaaataacaaccagtcacatggatattgtcaaataattgaaaacagtgtgtgggcctgttattatcaaatcacttgtaaaacttaattatatgaagagcacttaatgattgataaactatttactattaatatcagataaaaattattggatagagattattttcttccttcgacatgtttaatcatcatttgttttaaaaaccccctgatttataatttaattaaaaataatgtttgtcctgagggctacttccatcaaaagtggaaactatttttttatacttgccctttactcctcatcaatcataatctgtgatttttaagatataaccctcctccgttgacatccaatttagcatattaaagaaaaatggtgcgccattatacaacattgataaataagtt

SEQ ID NO: 218289 - DNA, 909 bp, Glycine max
  unsure (1)..(909): unsure at all n locations
agcatcgaagactcctcctntatcacgtctcagtaaatcgacctctatgcttnccttctctcctttttctacacactcagcctccantacncnnnagccncctgatgattctttgcatatccgggacctggatantctaaaggcgagctgcagcattcaagcttattcgaagccccttgaattgattgccaagctctggtcgttcatgaatccttcgccgaaatgattgcctaaccctggtcctgcatcctccaatatcaaatcttattccgagccccatgaattgattggcgttcatgcatccttcccattgagtcccgaaccataccaattgactgcccagctccggatatgcctaccttatcaataaaatctattcgaagccccatgaattgaatggcattcctggatccccccaccattgaaactggaacccgcccaaatggatggctaatggtggtccggccatctccaccaatctattgttaccccatgaaatgaatgtggtaacgcattcctcacctttgagttcagagccttacgaaatgactgccgcgctctggagatgcctcctctataattaaatcttaatccaagccccatgaaaaaatggcacttaatgcatgcccctccattgaggccagagcccaccaattgattgccaaacgctgttcgcgcatccttcacaatttattccggaccccctaacatggtggggattaatgaatcctacccccttgattctcaaatcccacaaattgatggcttggccttgtgcagccattcctcattaaaaactctaatctagcccctgaattatttgcctttgtggcctctccgacataaacttggaaccacaccaaagagttgctaaacgtggaccggcctacccccacatcaagtgcagcc

SEQ ID NO: 218290 - DNA, 724 bp, Glycine max
ttgaactcgtgcacgtatgtgacactgtggaatactcaagcctgagatgatgaaatgtcgaatggtgaaaatttctgcttttatttcgcgaccacaaaaagatacctgcagatatgtctggtggggtacgagaactccgggaccgaatgcggggtggtaatggcccaaaccaagattgacccatcctttacccacccaggcatatgtagaccattgagaacctgtgaagctccttagttggccagctccttggcatctacatatttaatgaagcttgaccctttgcattgggattgttggtggctaccctcttgaacttgaccggatgtgagacatgactttcgtatccagtcccatggtggtgtataattaccagctttaaaaaaacacctaaggtaaatgcccctggccacctattccttggggccaaactaaaccaccttaaaaacatgataaagggtgggctctctttaatcggaaagatgccgccctaataaaacaaatggccccttttaaaaaagatggtttttttacaatgaatcgcatatgagtttcatttattacacttgcgcatattacataaatgtctattgctcttccgcgtacgtctattcttagttaccctatacccgttattcttaaaaaccctttcattttagcgatcacttgtccctatagagttctacataccacttgcgcagttctctcaattctactcatctcc

SEQ ID NO: 218291 - DNA, 372 bp, Glycine max
cagcttttattattgacatcaggggtgaagctaattaaattctatttgtttggagaagggtatatggctacacctttgagcatgatgtatttatttttttaacttggggttatttttttaattttactatgttagcaagttttgttgttcttgattgatgcccctttggcaccttatgaattcttgtattataattggcacaacctaccttacgacaggatggcgaagaccaaataaataagccaaagcgttcgtcttcaagggaaaaaatgaacggagtccccaccaacgtttattcgagaaaaaaatgttagaaaaacccaaaagacatctatgaattttgaaaataaaggtttgcgagttgtttacaca

SEQ ID NO: 218292 - DNA, 1030 bp, Glycine max
  unsure (1)..(1030): unsure at all n locations
cacaccgagcggagctaccgaatcactgacgtgctcctcactcagtggctcgtcactgatgtcagacgcggtgagccaagacgcttcacaccgtgatcgttcgcacccncatcgatcgcagtgcgaatgtttgagcccctgcatacaacggaccacttagaaatcaaccacccttgctactaggatatggcaacaggcgccacgtcgatacattaaggagttgtgctccgcgcgcccctctcagacanacaaattgagacggtatccagcgaacaactattgtgtgcgtgggttgaacaacccgcaccccccagccaaggtggtatgcaacagaatatactggcgcttactcgttaatgggaaaaacgtactgacattttacacacttctaagctgcccttgaggttgtgagggccagtcaaagagaaatattgggcccacagacanaggaaccgaattccccacattatgttgacaaggtacaagcgtggagcagaacaaagggaaagaggtcaacccgagaaaaaagggctaaccaagggttgtttaaggcgccaatcgaagcgaaattaacattcagaaatttaagaaattcaaggaacaaatcctttataaaacccgaaatataacccttaaagaaaatttttttaaagttcttaaacaatgaaaccattgagccccagatttcttttttgctttattaaatttggatataagagaaatctgcttcttttcttataaaccaaaagaacaaaatggctaacttttgcgatgggtgagccctaaagaagaacaaacgacctcgaccagcacggtgcttaaacggcccagaaaaaacataacaatgggggtgccccaaaatcgcaacacaggaaggggtgatccgtggaaacggagcttcgggccacaaggggattaacctccatgggaaagaggtggactaggatcactcagggataaaccttgtgggaaagcgccaaattgggctcaccaaaggagggggtatctggcgagaaatcagaggtgtggg

SEQ ID NO: 218293 - DNA, 452 bp, Glycine max
agctttaaggaaaattaatatgggattgtgctataatttaaattattaacttattgtaatttaatttattttggtgggaaatggcactatgacataaccatggaactcatcccacttccttcaaacttctatccctctttcttttctttttttgaaacttctcctttgtggttgagtttgatctatgttttttctcatatctatcccaagtcacaggtaagttagtttttccactcactactaaaaaatatacatttaacatcggcaggttaacatcggtttccgaaaaaaccgatgttaacaaaagcacggtggcatacttgtaattaagattagtttattaacatcggttttatacaaaaccgatgttaacacaaatgccgtggcaatgttaacatcggttttttaaataacccgatgttaacattccctaattaacatcagttttttaa

SEQ ID NO: 218294 - DNA, 550 bp, Glycine max
  unsure (1)..(550): unsure at all n locations
tgcttctacatcccaaatctagattgggcagattgtagaagctagcttcatgatgaatcaagattgattcaaggagtttcgatgataacaaagatgatgacaaaaaagctcaaaagtcataacaaagatgatgacattcaagaatgagttcaagattgagtcaagaacacttcaagaggaaatttgatttcaagaatcaagtttcaagattcaagaatcaagaaaagactcaatcaagataagaattaaaaatatttttttcaaaaactgagtagcacatgaatttttctcaaaaccttttaccaaagagtttttactctctggtaatcgattaccagattattgtaatcgattaccagtagcaaaatggttttcaaaaagctttcaactgaatttacaacgttccaaattgatttcaaaatgttgtaatcgattccaatgatttggtaatcgattaccagtgtgtttgaacgttgaaattcaaatttaattgtgngaggcacatcctttcacaaaaagctttgggtaatcgatacatggggttggaaat

SEQ ID NO: 218295 - DNA, 439 bp, Glycine max
agcttgacacaacactctgagcataaaagtgtgttttcttttttaaaatgtatataagtgtatggcaattaaaatatattaaatgttcttgtatgttgacatgggtaataagatactttctacacatgcgcgtgtgcataaatggattacatgagtttggtctaaatcaaaggggctagcacgacatttttgcgttaatataagcattatcttgtaaaactaacttctaaatgtttgttctcgcaggaaatggccccgaggaaacttgcctcaaagagatccaggaaggataaagcggccgaaggaactagttctgctcccgagtatgatagtcaccgctttaggagcgctgaacaccaacagcgctttaaggccatcaagggatggtcatttctccggaacgacgcgtccaacttagggacgacgagtataccgattt

SEQ ID NO: 218296 - DNA, 288 bp, Glycine max
caatgtggatggaccgatttgctcttactttgaacgagaatcaagaactttcccgattgctagcccaagccaaagcaatggcggacacctactccacccccgaggagatccacggacttctcaactattgtcagcatatgatagacttaatgacccatattattagaaacccgctggaagtttctattgtcgctcagatcttgactagttataactttcctgataaaatgaagttattccaccgttttactcccaaaatcagtgtgaatcaagtcattcccgatttta

SEQ ID NO: 218297 - DNA, 538 bp, Glycine max
gcttggcctcaaacttgctgatgatatgctgtcaaaaactccaacttttaaaactcgtccctactggaattccaaaataagaaaaaggctttctttctctctttggcccagggaaggaaactgaacaccatctaaggttggcctattaaaattctcctcagaaaatctgtctttgaaatgatataaagctgcatttttaacactgctaggcttatggacccacacaccatctatgatcagaccttgaatagcattgcgcctccttctatgattaatcagtctatgaaaatagttagaattgttgtccccttcttttaaccacttcagtctggcctgattcaaaaacataagctgcattccaaagctgatcctgaaggtatttcttgagctccacttcagcttgagacaaagttctatcattaatacctacctccaaaacgttcaactccatctttaaatttggatttttctagcattaataacacccttggataagctccactgccttatgccaactttaatgaactttagcttttgc

SEQ ID NO: 218298 - DNA, 522 bp, Glycine max
tgtagcagtacaatggaaaactgcattcagagctttgtacagttggaaatgaacttaagcgtgtagagaaagataaagctattgtactggagtcccttaccatgttaaagggtcaacttactttgtctatggtaagtttgctcctctgtagtgtgaactatttcgattcagattcaagtagtcactgagtaagagagaaagaaatacttggaatctttgtagatgcctactactgttataaacataagaatatgtttagtgcaattttttttaatgaggatagatgattagaaagaatcttatgactaatttaatcttgattttggctaatggggatgtttagatgaagatgataattctggaatacaatgaatgcagtagatttttgtaaaatgtttttaatgataaaaacgatgcctttttttacgtaactatctcgcacagggttgatcttattgtacacaacctcaactctagggggtttacttaaaaataaaaaacgatgcttaattctggagctat

SEQ ID NO: 218299 - DNA, 890 bp, Glycine max
  unsure (1)..(890): unsure at all n locations
caacctattataactatcaccccccttttacgcatttttcttccccaaccagatactatcncccnccncccgtgattgtttcttccaaccgggccggaaacttaatgcaaccggcggattctaattttaaaccttggcgcccatatcttcttcaaatcaccaaaagagggcattgtctaaggctgaagtgcgtgtctacagtgggaattttaaataccaggtgtgggtggactactttctctcttgaaccacgcgggcgatggggctttaggaaacaccatgggtcgcgttgctaagtttttggttaatgaaagataatcgggaaggaatatggggaaagcatgatgaaattgccatgctcggatgagctaaacccacccaaaaagttatagggttcttatgacgacgcttgtgaagaataagagctgaaaaaacctaagggaaaactgttgaaattaaagatacaactcccctaggggtttaaagacagaatggggtgtttaaaacccgaaaccaagaaagaacctagggcctggaaggcccaatggaggcagtggtacttatataaaagggaggaccgtttaaagctcgaatctttaacctcgacaatgcccccgtacgcaaacgtagaaatagatatgggacgcccccctccctatcggaaaaacccatggaacaaaggacctgcccacctcgagtgtctccttataacacaactgacaaagaaagcgttctgcgggtacaccaaacaacaaaggtgcgggatatactctctgaggttcttaacaaacgaacactctcccctcttcataagcttctcaataaccccccgtcattcaatgctttcactcatcaacactagcatctctcttccactaccttatcccccg

SEQ ID NO: 218300 - DNA, 1061 bp, Glycine max
  unsure (1)..(1061): unsure at all n locations
cactcagtgactcgacgcacagcgagagagacacgnactgacagcaccgcgcangacgactgattctgngagccagtcaccaaccacaacagcncacgacgcgangacgaactcacgcttcacaggatannnnnnnanngntcgcgnngagcatggcgactcgaagngcccctcgccagannccgnnnccacganctcangccaaanacaaagccccgcgganacaacaaaccacanaantgaaccaccaacgagcacaccagangctttctatacaaagcgcacaccanaccacaccgacaaagggggnggacccgggaataacccaaccacacagcacacgaccgcacgagcaccaaagaaaaaatgcatatgaccaccaccgcgcacatcacaaccaccccgatgcggaacaggacaaacccacgaaccagccctaaacgccagacatccagacatagaggtcgtcccaatgccagccacaccagccctgggagaaaaaggggggacaacgcccaagcacagaccagggggaacgcgcggggactcggaaacacgacaatacaggaacgaaagacagaaacccccctcaggccctcaacccctgcaatgcgcaacaaaacgagccaggacgggaaccaccgcgaacacccggagcccgccccgccaactcctaagcccgaaacccacaagacacccacacgacccacagcgcctaaaccaccgacgaaccaaaggagccaaacgacccacaccacacgtgccaacccccagagaaaccaaacagataaacccaaagcgcaacaagccaacacacccccaaaagagcaactggaaacaggagacgacgcccagaacgaacaccgccacaaacccgccccaacaaacaaacacccacccaacacgcaacaccgaagccactaacacgcacacgcgcgcagcccgacccccgcaacgcacccaagcaacaacgtcaggacacacccgagcagccgccatccgtaccacgcgcaacacacaaaccccgcaccggcgaaacgacgcaaccacgcgccaaacac

SEQ ID NO: 218301 - DNA, 614 bp, Glycine max
cctttaccccataattcctccaaatttgggccaatttgctttgaaccaaaatcttcttttatgaatgaagctctcctaccacctaagacaaggtagaaggagataaactgtacaggatcaaagttcaatcaaacaatcatactttcagcttaaaatgggtgcaagggataaatcaatcatgcaccaggtaagctttttagctaagtggctctcttcaatcaaaatatggccttcatcatcttcaatttcacgcattcattccatactcaaagattcatgcaaaaatcattactcaatgttagtcgttctctcataattaaagatcacactctcaccaggttgtggctaatgagtaccttcacaatcaaactgtcaaactgactaacattttcagtcatgatcctaatcaatgttctttcttctttaatgactgcacacttcattcaaacatatgatttacgcattccaaattcactcaaatcacgccattgatcacttcaaaccaattacaaacacttgaatgccaaaatcaagtttcaaccactggtccattcaagctttgtacaagctatcaacccaaattaaaaatttaacctaaaatttaaaagctaaaa

SEQ ID NO: 218302 - DNA, 789 bp, Glycine max
  unsure (1)..(789): unsure at all n locations
cttgacttagacccccgcttgcatcgaggcgacactatanantactccagcgctaaggcgtgttgcccaccatcttctcataggttaacctttcatggggtccctatcaaggctatcatttgtctctgcctcattgaaggcgctacttgaacagtcagaactacccacctctgaaaagggatgcttgaaagaaggattgtctttcttgtccatgatatgtaacggcgttgtatgtgcggccatctcttagttatactgatactacctaatgaacgccaccgttaggccttgctaagaacggacccggcaaagactccagctaggatgacatgcaatgacttcccccacaatactctcttagaagaaatgcatgaaccactttttatttattccgtatggccccatctatcgtccatacatttttaggtgattctatctggaagagggtaccgtggtcatcacaaaatctaacccctggaactttgaggaataaccatgtccggaccaagcccaactctgcatgttacctaagcacaacttcctcttcttggatggtgggaaacccctcctacgtaagcgcgaaccttgcgtttctatcctacggaagcccctctcttttacggatgaaagagtgggcacacggccactttagaacttctggtgcgttcacaaaggatgcctacatggcgggccttgtgggaataccgattaacccggaacccaccccatgcggcttggaaatatggggttcccccggtgtgaagacccccccgatccattggtgtttat

SEQ ID NO: 218303 - DNA, 455 bp, Glycine max
agcttaaaagaatcagaggggctcaaacacgctatgacttactcaaccttattgaagggaaacgcttgatggccatgtgccatgggcgcctatatcaacaaagaatgaagaatgtgttcgacaagaaggtgcgcttgcgcaagttccaccaaggggaccttgtgctgaaaaagatgtcccacgctgttaaagataatcgagggaagtgggcctcgaactacgaaagacctttcattgtgaaatgggctttttccggaggggccttggtgcttgccaacatgaatggcgaggagctacctttacccgtgaactctgatgttggcaagcgatactatgcttagaatctggggcaattaaagatatcattgcatgttcttttatttttatggggtcttcttgggttcccccagggattcccgtctgctgtatatttctcgtcacaagtcttttaaaaa

SEQ ID NO: 218304 - DNA, 574 bp, Glycine max
  unsure (1)..(574): unsure at all n locations
ttagcaaactaaacctcaattaaagtcaggacaatggaatctattaacaaggctttcatctgagcaacgaagaaaggtgtttccctggaataacaattactaacaacctatattgaacacagtaaacaatgtagatctatactgtgaattaaatcatgttgtgtgagtactaatatctagtatctctctaaatctatacatcctatataagttctcctttgttatccacactatcctcgtataataggggagaagtctaatcaagacaaggcgatggcggtattggaacagtgataatgaagataatagatcctctcaatcctcaccaatcatatgaattaaagagctatatagtatcacgtaaccacaggatcttccctctactttntcagccaaaatttataagatcctaaagtttcaatgcacaaaaccactgatgattaaatgaactaaacatccataccaatcattccaagcccaagagaaaccaaagaattaaccaaataggccattatgcccaaaaacttcaaaatttctaactttgatcaattagattgctagtataaaataaaat

SEQ ID NO: 218305 - DNA, 1014 bp, Glycine max
  unsure (1)..(1014): unsure at all n locations
aggaggagggaaggagaaagacgaagcaaacaaagttaaaaaactgacggaatctacgtgcggcaatgcaaagccaaaaaggcnnccnaagatgaccgaggcaatgcaannccgggcaataaaaaagacaggaagcgggcaaacagggaagacgaaggggaaggtggagattttggggagcggacagaaaaaaaagaacggggggggagtgtttgataggggaaagaacgacccccctaaagaaagaggggcgcgggagaacaaaacacacggaggggagagggcgaacggaataaagcacacgaaagaaagggggagaaaggagggcggcggcggaacggaggaaggaaaaggacggaaagaaggagaaaaaaggagcagcgacgggcgcaacggcgcaagcgaaaattaatagaaaaagagaaaggagacgcggaaagaagaaaaggaaagggaagagaaaaaaaggaaaacgggggggggggagacaaaaaaggcaaaaagaaggggacagaggacagaacaacagaaaagcaaaggcaaagcaggggcggggggacgaaagacaggaacaccagaaaagagcgcaacggaaaaacgaaaaaaaaacggagaggggggaaagggaggaacagagaagaacgaacacgagaaggaggcggacgagagggaagcaggggaggaacggggggaaaagaagaaaggggcaaaaggaaagaagcagacggcaacgcggggacgaggcgggagaagcgaggggagcgcaagaggggaaacacagaagggagggaggccggcgacaggggtgggaaaataggggacgaacaaggggaaaaaaagggagaccaaagacggagtgaacaaaagagagaggagggaaaagggacaaaaggaaggggagagagaagggagcaagagggggagaagggggaaagaaaagaaaaagacagggaagagaggagcggacgagaaaaaagggggaaaaagaggagagaaaggggaaagagcaaaaag

SEQ ID NO: 218306 - DNA, 792 bp, Glycine max
  unsure (1)..(792): unsure at all n locations
agccgagacggtcagaatggaatatcatcacgactgaaggaatggtgtagtacagaatagaacgaatatttgactaaagaanacggnnagtgaactgtctcccgaccaaaataaagagaacaacagacgaacaaccccaggaattttcattttggaaaaaacgagcagggacaaccgataaaaagaggtccaccagaaacacaaggaaaggaagaacggcacagggaaaggatatagaagataaaacattaaggggatggggacacgaaacacaaatttgcacaaggagattttatcacaacaccatcttaaaaagaagagggggtcaaaaggacaataacagaatctaaaaaccaaaagaaaaggagcaaagaaataaccaagaaatccgcctgggaaaattaagaaaccagcccaacaagagggggaatgattactgtataaacgaacagcgaccgacaaaaattatggaatgaacgaagcaagggggtcttgtaaaggactgggcaccaataaaaaaaaggataacacctccaataattgaaaatggcaaagatagttaaaacatacaaacacggaaggcgaaacgacaaaatcaaggaaaataaaatccgaaaacatctcctccctctaaaaaacatcaaattagaaagtaaagcctaaaaaaagaaagataaaagagggaaaaacaaaactcgttaaacatacacaaacggttacacaatctattcatcaaaaaacaccaaccactaacggattgcacaatgaacacaagaagcagacaaagcaacg

SEQ ID NO: 218307 - DNA, 914 bp, Glycine max
  unsure (1)..(914): unsure at all n locations
acaccatctaatacgtatatagtacaggatttacccaagcgatggttggcctaccatagatcatggtaaggagacgaaagaccacatagannnnnaacnaaagcgcgatttgacacggtgaccaccacacataaaatagaatcctgtggcagttcccgagagtcgggttaaaacttttttggctactataagggaaacagaggtattacatacagagggcgctactggaactgcagatatagccaactttaagtggaattgtttgaaagaataaatggtatccatgcacatgttctataaagggatcttatactgagccacatcagaggtaatctgaaactaccttatgaaagccaccattatgcctttctaagaacggaaccccgaaagctacaagtgaaaatacccgtaaaaactaacccgacaatactttttttgaagaaaagcataaacaacatttcatctttcgcgaatggcccgctatttcttaaataaatttttaaggggaatatttaggaaagtgaggcccatggtcctattaaaaattaacacgccgttcattggggggaaaaaccatgttgggaacacacacaaattatgccattgtgagaaacgaaaaaattacctctcccttaaagggaggtgagcgggtactccagagggtataaaacattttttttcaatgattattatgaggagccgctcttttttaaaaaaaaaaaggtgtgtgagcaaggggcgatcactataaattctggagggctcagcgcaggatggcgaaaaaaggcgagacatcgtacggggaatatccgtaaaaacacccgacctcgcaacaaaggtgatattgtggaaatttaagtgtctactccaccacgtttgaaagaaatggccaaaacattactggggctggagcc

SEQ ID NO: 218308 - DNA, 488 bp, Glycine max
agcttcttaattccccttttaagaaggttgttttatgtgttcattgtttctatcagtactttattattgcatgcttgtggcttgatcacccatatgtgtgtactgttaggggctttagcatggaaagatgtattgtctccttaaaacttgatagagcaggattaggttatcgtatttctggacacggagtgcggtaatttagtttttattatgctatgatcataaagctgttcaattaaactaagttcaataagagacatctgtgaacgaagtttaattagaattaggctaaactcatgagacatcggtgtttagtacttgagccttcaacatagaacacaaaaacatctttaattagagaaacatccttaattgcatcaatttgctcagtaagaggacccaacacctttaaatatttgttttcacacttgctcacatttaaggcttttgtaattagaatagaacatacttttacttttattcacaat

SEQ ID NO: 218309 - DNA, 421 bp, Glycine max
gctcgcccaagcgagcagggttgcttccttcaataacaactttcttctggaggaatcttctggaaggcccaagtgggcctgagtgctatttgcacccccatttttactaaatacacccccctgcctttttttggggattcttttttcgtaaagatatggaaacttacgaatttcgtaacgatacttgttttcttttcgtaatgttatggaaccttgcggattacataaccatcccctttttgacttacggaatctcactaattgtgcaacgatgcttccatttgatttccggtgtgtcacgaaaccttacggattgtgcatcaatattttcttttggtttccggcatgtcccggaatttcacaaattgcctaatgatgggtgccaagcacctcacaaggaccaaacataagtcgcatgtca

SEQ ID NO: 218310 - DNA, 522 bp, Glycine max
agctcttcgattcattctatgtacccggagcggtccacattgtgtttcgagcattttggatctcggtttgtttactttttatgccccctgttgacgtgcttaagccattttacttaagtcgtttctcgcttaacttaaaaataaaataaatttccaccgaacgtttgaattgtattatccattaactttggtcaaaatcaattccgaccgttcggtcgtgccgtaaccacgttggaaatcaaaaagaggtaaaaaataatataattattcaaaagacatcttttagtaaaataaagccgaaaatcaatcagacgttttctctttgggaattctcattcttaatcgaattgattaataactaaagtgaaactaaggctaaaatcaactcgcctagtcaagctcgtccacaaaaataagcttttgaagattgtcatttcaatttttcactaagtaaaatgggtcatttttaaagtccaacgctttaaaagatcaccccttaaaaccaaaaagaatcacttgatt

SEQ ID NO: 218311 - DNA, 974 bp, Glycine max
  unsure (1)..(974): unsure at all n locations
cgtctcggcctgacganacagacatcactntacagagctacaccactcatcggttantanncgcgtactgacgtacgtaactgcagtggctagctatacattagattaacctcgcatcacccgataaaattatnnnnnnnnnttagctgtctaccttctgacactcattaatactcaagcttcctcggggccattcctgctaaggcaaacatttggaaagttattttacaataaatataacaatcattacaacgcagggccaaaaacaacttttaatggcccgaatgcaaaagcccctttataaaaaaaccatattgggggccggccattatatgacacatccgatttgcacacacttaaaaatttttgggaaaacattttcaacacaccctaccatgcacatatttttttgacaaaccttttaaggctacaccctaaatatacacacacacattttttggaagcgctttttttgtccccactcacaaacacaaatttttggaaaaactctttaaccgcccctctcccacacttgtgagggcccttcccgctatttatattccaatttgcgagggttttttataacactttgtggaggggttttataacacattttcgagggcggtctcccgcccattattataacaatatatacaccatcccggaaaagtgtctttctcacactccctcactgggcaggaggtctccctctttgggggcccacacatttttaatatttataaccacccccctcacacatcttgcatagtcttatcctctttttcatcaacaacgacaacataatctaatctccacggtaacctctttttctattataataacattaagcggccgtggatcacataacacaaatactgctactacatttaccaccccgttatcggataaagaagaacgaaacgaacaccaaactcattacatcatcatctctgttatgccgtaaaccaagaccg

SEQ ID NO: 218312 - DNA, 502 bp, Glycine max
agcttggacgcggttgacgcgtatgtggaagattgggtgtttgcccgaccagaaaacctggtcaacgtttttacaggaaacgatggtccattaaaaagctgaccctgaaaatatatcaccgtcaagtatagtattctgaatatgccattttttatgaagagatgatatttatctgaatgataagtatcatcttactctgtaaacagctcccaacccgccttgtccaagtttattaaaatcagcgaattcatttgtagcagctcgaatggtatcaaaattgaattgcaatgactcaccaaatgtaatttcatcttcgggactatcttctcctttaacctcacctgaatggggacccccctgaaattatgtgagctattcaaaatataacattgagagatattatttctcatatacaaacccagaaggaaatggctaaattggcttcctccgctatcttttttttattcttagctataagtgaatgagtaaagcatgcgttcaa

SEQ ID NO: 218313 - DNA, 1081 bp, Glycine max
  unsure (1)..(1081): unsure at all n locations
agcaggaggagcgcgcatgataacgaggacggctacacagaatgcgaggcacangaacagatagctcnnggagaccaaactgcngcatacaacgacaactagtgacaacaancnntcaaggcnncnacnacgagggttgaaatcgatggtggaacgcatctggaaanggaggctaataaaataaacccccacggcaactcaacaacgaacaaaaaggagagaagatctctgattttattatatatacaacgcgccaaagaagagggggagagatttttttatacccaccaccaccaccgcccggaccgcggaagaggagcgtggagaagacggaacaggatagcgagccggcgacacaaagaaacaaaatggcgagaagcacgaaatgcgtagcgccggacggaacgaacgggaagagggcgaaccaggacgccgaacaaggagcgacaaccaggcggcgggggaacagaagagagaacaagagagccgaacgggaaatgagaagacgccgaagggagaaaaggagaagagaaaggggaacaggaaagcgaagaccgggacaagaagagagggcaaaggagaggagcaaaagggaggcgcaaacacgaacggagacgcagatggaagagcaagaggcgacgaacacagaggaacaatgacgaagggaggggaaagggagagatgaaggacagataacaacgatgcgggaaggacgacgcggacgaagacgacaggacaccgaggagaggcaaagagggagcgaacagagacgcgcgcaaggaagagaagaggaaacagagggaaggtgaaacgggagacgggggaaagcggaaacgggggagtagcgcagaacgggagagatgaaacccgagcaaagggagacgagaaggggaagtggcgaccagaggcagaggacgagcacggcaggggacaaaacggcgaagaggacaagaaccgatgcgacgggaccagaaaggacgacacgagcgaggaaggacgcgagcgacgggaaaaaacaccggggggacacgcgacagagacgcgagaaaagggtgcgaaacaggtaagcaaagaggcgggg

SEQ ID NO: 218314 - DNA, 496 bp, Glycine max
agctttttctttcttcttctctcttgctttctcacttctactcttttctttcccttctttattttattaaactttttctttttcttcattttctttctttttctacctctatttctttttcttggtcatttatttctttctccacgaccattattggtttttcactctcctgacttgtcacatctgttacctcctctttctttttctcagtgccatcctttacaacaatttgtttctccaaagccaccctatcttcatcctcaactaccaaacgcttcttgtttcttgtcatcacagcattacattcctctttgggattcttttctatgttcgccccaaagctattggatgacttttcagctaattgtttggctagttggcccacttggatctaaaggttcttcaatgctggctcagtgcttttggtgatttgacatggtcacctgcatgaattgagtcaaagcctcctcagcttgggtgcccttttgaaaatggt

SEQ ID NO: 218315 - DNA, 401 bp, Glycine max
tctttttgactatatctgctgagtggtgcttaatctttatcttctttcattcgttcattaacttaaaccaagacttattgaaaatagatccaaggctataactcctcatggagcacatcatgtggtatcaagagcatcttcatttacgtgatgttcttatgcatacctggccgaggggttcattctttgaacatacacagggcccatctctggtaaagattcttatgaaggatatgactacactagctcaggtgtggagtgtgctctcatactccaacttgggccctacatcacatacttttgaattgacagtggatagagctaggctgacctttggcctagactcttgcttgatatgaacatatgagcactgatctctatccagatgacctctatagccc

SEQ ID NO: 218316 - DNA, 481 bp, Glycine max
agcttaatttacgagaaaggtaaaccacagactaacttgttacatttccaacagtaaactcgttatgaaaatctgagatttatctacttccatagtaactggctatatgtttaagtttgttttcagtgcccatagtaaattggtgtagaaagagcttaaaattccaaatgaatatctaatttctggccaagatccatttaacatgaataaataaataaattggcaattgtttaatgtctttgtacctgaaaccttgaggaagaaaataagaaacatatttgcgaatgaaccaccacaaacttcatgatttagacatgtgcttttatgcctaaattaatttttctgaatgtaagtgacaactaccactttgatggaaagtgccgaactcgttcaccaattatagaaaataccaaacttggtcactctatctgaacgtatattttggtaaaaagcgcccaaaattaagttcaacttttcacct

SEQ ID NO: 218317 - DNA, 344 bp, Glycine max
  unsure (1)..(344): unsure at all n locations
ctaataaagctaaggagcggagttgaactcgtttattccattttatcancagcagcaatgtacttttgggtcaccaatccacacacaaacacacagacaccggcattttccaacattcccaaagacaaagtcctaggataagttaataacaactccaatctcttgcactatcttgtttccacattattattattattactactactacttgtgtagcgtgtgtgatccacattgctgcttgttgccctacccatgatcttggaactgagatgagaagtcacattgattaacaagagcagcattacaactcccaagttgaagtgcttggagacacccattatgat

SEQ ID NO: 218318 - DNA, 888 bp, Glycine max
  unsure (1)..(888): unsure at all n locations
aacgacatccgatttatagaacaaaatgcctctcgaggaataagtatataaataataatagtataatatagtataaaggggaaaccgagaaatgaacttgccttcganaccnnaataaangnaaacacccccccccccccaaggnnnannnagatttttttttttgagaaaaaaaaagaaaacaagataaacataaattatacccaaaaaactaaataaagtaaaaaaaacatcacagtaaagacaataaaactataattaacaaaaaaaaaaaatcaacaatctaggaatttacaaaaaatataaaacagaaaaagcttataaataataaaaaaaatattaaaaacaaaatgtggtatcaaaaccacaaaacattaaaaaaaactacttaaccaataaattattaattatacaaaaataaaattacatgaaagaaaaacaattaaaataatttaaacagaagaaaaagaaaaaagaactaaattgcatacataacacaaaacacttaaaatcatctaaaacgaaatacaacaaacaaatcacacaagaaatagaagaaaaaaaaaataaataaaagcaaaaaatcgaatttcacaaaacatataaagagcataaataaaacaaaaatgaaatagacgaataaatggaaaaaaaataattaaagattttttgttgtataaaaaaaagcccccctggagttataaaaaaaaaaaacaccaaacaacacccacaacacaaagagagaagaaaaaaataattaaaaaaagtgtatggtggnggttnnnnnnnnnnnnnntnnnntattattataaggtgtaaataaattangaacatccatactccacatacacatatgtataggagggttgaanngtgctcatggtntag

SEQ ID NO: 218319 - DNA, 874 bp, Glycine max
  unsure (1)..(874): unsure at all n locations
gcgctgcgagcgaacaacggtgcagaccatgtccgcactcggcactccacgagaagcgacacagaagcgcggacgggatagcgaacatatgtagataaannnnnnnnnaaagcggtgtcggtgcgagacaccatagaatactgaagcctgtacagaaacttacctgcacgtatcctaagcggtcacaagtttttttctttcgccaaataaaccaacccggggacaggcgagagaagaagcacccaaccactctgcagccaagaaaaaggggcgcaaccagaaaggagtcacaaactgacataaccaaccgggaggggggcccgaaatccgcccacagcaagcggcccgccacgaaactgctgaaccacctaaaaacacccacggcacaaaagaacacaacgcgcggaaaattataagagtcagctccagcccgcacccaaaccgaggagatgggaggcaaacaccaacacacgcgcgccacaaacaacgaagcggcccacgaaacagacaggaacgaaaaggggcccctaccacaggccacggacaccgagcacaggacgcgcgcaacgccccgcgcgggagacacgcgcagacgacacccaccgcgagcgtacacggcgagacgcgacgggacgaccaccgggggccaaacacgcacgacgagtcacgccacgcaccgacgcgcgggagaacacgccgcggcgacagcacaaggccgacatgagcacgacgccggcgcgacgacgcacaccagaccacgaagacacgacgctggaaataacgcaagcgggacgagaaagccacgacgaccgcgcccaagccgacgacgagaagacgacggcgaccacgacgagcggaccagcgccgggcgcgg

SEQ ID NO: 218320 - DNA, 400 bp, Glycine max
atactgaaacttttgcccctattactcatctaaaagcaatacacattttactatcccttggtgctcatcatgggatgatggtgtatcaaatggatgtaaaaatcatatttctcaatggactaattaaggaagaagtctatgtggaacaacccctggagtttgagaattctatctaccttcatcatgttttcaagcttaaaaaggaccttgtatggtttaaaacaaactccttgagcttggtatgaaaagctaagtttggttataactgaaaatggctttaaaagaggaaaagtagatactactttgttgcccaaaaattatggtaatcaattcctaatcggctagatatatgtggatgatatcatatttgatgctcctaatgactctttatgccagcttt

SEQ ID NO: 218321 - DNA, 908 bp, Glycine max
  unsure (1)..(908): unsure at all n locations
aacgcgacacgaggcagggggacggcctcgtagacgacatgagccgagtaccgagagagcgacggtaaaacacgaggatgannnnggnnangaacgtgaatcgtgacctagcgaagcccgaagaaagagaaccgtgacgacgataaaccacgcgaggaggaaaacgagggctacccactttatcacgaccacgaaagcaccatcgggggcaacaatccccagaccagacacgcggaccacggggatctacccgacaattctcaagagacaaagtgccgggagaggtagcacaactccgactgctggactatacgggtcgcacaaaataataatgacaacactacacacgggtaacgtggggggacaccatagatggttaggcgccccacccctgaggcatggaacggagaaggaaagcgcgagtgggaaagaaaaagcacagcagagtctccaagtggaaagcctcggagacacccaccaaaaaggaggggcggggaagccaacgggatcagacgacaccaggacgcggaccgacgccgccccaaacgaagaaagacagggtcacgaagacgatcaagcagaggagcagaagtgccaacgagacgcgcggagccaacgagataaagaggatcgagcacgaacgcccaccacgcgctcacgtcgcctgatctaacatgcacgtcacaaaacgacgacacgagactgacaggaaagatcacgaagaagccccgcgaatgcacggagccatccgcacacccattgccccgaccaaagcacccgacagcgcacgctgaacgctcgcgtcaaccaccgaaacttgaccggaacaacgaccagacacgcaacggactaaaacccccacctagagaacgacaccctcgaccgaaggcagccacagcaacacgagg

SEQ ID NO: 218322 - DNA, 938 bp, Glycine max
  unsure (1)..(938): unsure at all n locations
atagaaaaacggaagacgaagaatacaaaaaagaacacgagaaatcaaatgggagaaaagaagttccanaaacnccccaaagggatggacgagatgaaccntatgaaaaccnaannaanaggaagaacaaaaggaaaaacaacaagaaaggagatagggaaaagagaaaaaggagaggaaagggaggggggggaggagaagaagagagcaaaaaagaaaaggagaagaagaggggaagaaagagagaaaaagaggagaagagaagagggaggaaaaaaagaagaggaagagaaaaagaggaaaaacgagaggagaagagaagaaagaggaaaaaagaggaaagaagaggaaaaacgaaagaaaaagggaaggaggagaggggggaagaggggaaaagaaaggaaagaaagagggacaacaggcaagaggaaaagagaggaaagagagaagagggaaggggaagagaaaggaaagaaaagaaaaggaagagggaagagaagagagaaagaggaacagggaagaggagggaggaggagaagaagcaaaggagagacgggaaaagaagagagcggcagggaaaaagaaaggaaaaagaagaagggaacgaaagagaagaaaggacgaaagagagagagaggaagaaagaaagaaaggaggagagagaaaaaaggacagaggaaggagagaaaaaggaaaaagaggagatgggagaggagaagaagagcaaacagaaaaggaagaaacaatagagagagagaggggaaagagaggaacggggaaaagaagaagaaagagggaggagggaagaaaagacggcgagaagcagaaaaacggagaggggcgaaaggagagagaagagagaaggaaagtacgagaaagagggggaggaaaaaagagagagaaagagagagagggaaaaaagagagaagagaggaaag

SEQ ID NO: 218323 - DNA, 687 bp, Glycine max
gcttcccaagtttttaagttattcctcaaaactgtcctaagcaaagttcccaaagtcctattaacaacttccgtttgcccatcggtttgggggtgacaagtggttgaaaataacaatttaatgcccaacttgctccacaaagtcctccaaaaacgcaaatcatcaagcctaagtataggatgcctatatttaatggtgatgttattaagggctctacaatcagaacaaatgtgccatgtcccatcctttttagggaccaaaatcactgggacagcacaaggactcatactatctcttacccaacctttgctaatgaattcatccacttgtctttgaatctctttggtttcttttgaattacttctataggctggcctattgggcaaagaagctcccggaatgagatcaatttgatgctcaattccccctcaaggaggtagtccacttggcacatttggtggaaacatgtcatgaaaatcctgcaaaagaattttaacactagaaagcacttaaaatcatcaaaagtgttaggggcaaaatctgatttttgcataacaagatatagaacgactgtttaacaccaaacaaccctcttgacctcactttttgtgggttaatacctctccctcactctaagggttccccctttcttttggaccctctttttccctcccagtggttccctca

SEQ ID NO: 218324 - DNA, 1137 bp, Glycine max
  unsure (1)..(1137): unsure at all n locations
acgaccgccctgtaacntgctantctctacntagctcgccantantncgtcgactctagangtccctgctgcactacatcgctgcaatctcgcgtgntaatgatncattagcttattatattactatggaaagtactgatccacgtccaacagagtcgcattggtagactggtgntgccnttcgcactactccgctacgacattctacagagccatcgtacagactgttgtgtgccgtacctcactattcatggctacggtccatangcgtggctcttgttcttttctaaagtgcgtcactcaaccgacgtgttcctntagtttcatcagatggctaccgcatctattactcgtacccatttcctctcgctgtggtcacagacgtcagcacacttgacacgtacactggtacgttaccgtaccgagacgcgcacatgacgtgcattcgagatcatcattcatagactgtggggtatgccgcatacaattgtcctctctcanagcgcttgccaccacaacatccgcacaagccaaacacctaacaatttctaatacatgtcaccagagcgtattccacaagcccatgtcaagaaccaacggcccacactgcacgataaaactcttcgctccaaccacacgtaaaccacaagatccacagtcttgtgcttcactatagagacacccagtacacattcgtctttcgagttcaatttcgtttacccgttggatcgactccaaaattttactggaagtctatagggataagccttcattgtgaccgttgggatctactaacaaacacacagacctattttggacttttgtttcacagccaaccacacgcatacattttgtcgccaaagcaaaaaacctggtgcacctagtttggcagcgaaaatacgccataagcggcggtttccgaaatcgacactccctcaattcaatgttggtcaattcaaatcctccggggcccagttctgggataaaacatgtgtatcgcaatgtcgtgcttccatccacggcagcacagaagtaagagcccccacaccttctcttcaaggggatcccaggcttgaacgtgcacatcacaggcggacactgtaggcaatctacctcgaaaagtgcaactaataattc

SEQ ID NO: 218325 - DNA, 437 bp, Glycine max
agcttgaaccaagatcaatctcaatggtcttgtttctaatgagaccatccctttttttcagataagctctttctgcctctcccacttctcgcttggcacaagcacaatgatccaaccaaatccccaacacttgcttggaaatggggtccaaatggtccctgatgatctcctccatgcgttccactccgccattttccgtcagaacgcgaaccattatggctgtaggagaagaaacagtgcggatgtaaagggaagaagaaaagtatggttgaacctctggaactctctccagagtctgcctatgtttgtctagttgagtgtcctcatagaaagttttgaggtcatctggccaaagcacatggtctttccggggaggccaatcaagaatgagaagtagcattgttggactactggggatcatttcaaacacaaaattt

SEQ ID NO: 218326 - DNA, 1042 bp, Glycine max
  unsure (1)..(1042): unsure at all n locations
atatgtgcatatattgcgcgcgcaatcacgattaacacgactcactgctctcttatattgtattttcagacgcgaccacatgccattatcatattaataatctttcaaatggaaatgataccatagtgtgtgattttacacccaacctcactgcaatagtgaataccacgttgtctcatgtggacctatgcgcttaaactgacagagtgatgatcaacttcctgtgagactaatatgcacaacagaagtcgaatgcactctctcatcttatgccacatatggtgggccactcctctagtgcgctctcaggttttcaaactaaataattattaattaccacttacactcttcactgaatattataaacaagggacaattcttgttggaatagcttctacccccgtaacaccctctatggactttggcctgtgacatacttaaagactctcagacactaagagggctattgatggaaatatttgcttggccgaaccaatagtctcaacccaccattaacttaattacctttcttgcggcttctttatacacaaatcaaacgtacaatcgctcaaagccatcaatttttcatggccaatttaccgcctcgctcatattaatgctcaagatgtggagaagggatgccgatcatgtaacatcaacgaaactgtccataaattccgtcgtttcatctcaccgaatgtcaaaaatcctctgcggacggggaacgatctgtctctgtgatgaaaccaatggtcgccgacaagcaattaaaattaaatagtaaatcttcccggcgcaccatagctagagaggtgacgcactatcattgtccttcggtagtattgctcgcctattgctcatagatctcttcgaagttcgaatcgaatacctaatgcatctaatgactgctgaattagacgcattcatgtattctgacgatcacatcacgcgcatgcatcgtatgcatcactacatctccgcttctcncactactcacctgaatgcgatggngcggcgtcactcttcactgattacggaccgt

SEQ ID NO: 218327 - DNA, 1035 bp, Glycine max
  unsure (1)..(1035): unsure at all n locations
aaaccgacaatctacacgcgagacaagcccgggcgcggagagaaacgcgaagaaacaacccaggacccacacataacccggccccccgcggccaatgggccgtgaccacgccnnncnnanaaaaaaaccaagggagaagcgacgccgaccgccccgaacgcggacgcatcagaaccaccgcagacccgaacaacgaggggacgacagacaaccacaccaccccccaccacccccaagaaaaaagggacagacgacagcggcgaaaaagacacagcagacaacgaggacgaccggccccaggcagagagcacgaacgcgcacgcgccagggcgcgagaaaggagcaaacagggggcacgcagaagcaccaagcccggcgacaacacacgacccaaaacaccgaccaaaacgacacaccggcggcgggggccgcgcagagccgagctcagcaccacgaccgccacaacagacaagcgccgccacacccacaacacacggaacaagacgccccaacggtcgaaacaacgacacacagaccgcggccacaaggcaccagggcatcgacgacgcaatcggcacgagagacaggaccaagcacaagccacaccaccagcgaccacagcgccaaacgacccccaacagcaagacacccgccaacgccaacgcgcggcacacccgcgccagaacccgaacccgggcagcacacgcacgaaacgaccgacagcgaccacgcgaccgccaagtcagcgccgcacagcgaccccacaccgacccagaacgacaccaacgcaggaagcggcgaacggaaacaagaaaggcgcgggcagacgaccgggcgcaagccggaccgagaggaccggcgcacaacggcgcgaccgaacgcagaacacaagagagcagcgagcaagaggacggacaccacggagcggaaagcaagacgcgacacaacagaccaagacgcaacacgaacganaccacgagcgaccaaacaggagaaacccacagccggtggcagccggcgcgcgacgagcaaccc

SEQ ID NO: 218328 - DNA, 1381 bp, Glycine max
  unsure (1)..(1381): unsure at all n locations
accggccgcacggcgactaaccgccagttccggacaagatcaccgactatctgaccgcacagatgcgctgggttcacatccgtcattaaacctatggagngtcacgaggggctgtggcattccgtgagcagttgaacgaactcgcgcgacgtaataactctacccgtcagtcgatttgcgacacagctctcattttattatattccaccgncctagacgtcgaatgtgacgaatcggcgaccgacggacgtggcgacacactactcgagcgacgcacaaacgagcttaccgtagcacgcacacgcagcacgtactcacgaacgacgcagatggcacgacgcgtgaactgaacagctacgacgacatcactgcagctactcaggtctgagacaatgcgacgactgcacgtaaggatcgatccatggatcgaccctgacggaccagcgtcatacatcgagcgcagcgcgtagaacaggctatactcatctcaccgagatcgcgactgcgcactanaccagacgatccgctgcatggtacgcggcatcgtacaattccaccgantgcgtacatgtcacgaacgcacgtatcgcgcggacgaatctacccactacctcatcacacatactcacactgctgcaccgataccacggtccgactcaccgcctcgtattcgatggcgctatccatgacgcactgacagcagcgcgactgtatcgactctgcaccgcanagttacgtagcgatcactagacgagctagcacacgcaaactcatcggcagaaacagcgccaagcgtcgccgcgtgacagcttgtatgcgaatacaacggtaaagcacacagctcaaccacatcgaacgtgaacgtacactgtactgtcgacgtgatacactcagatcacaacagttagcgctcagctatcgatcgtcggaccctacgtgttatccgcctatccgccatacgctacgcttcgctcgatcgacactcacacacgtaangacgctcgtatactcattcgtcgcagatcacgactgcacgcgacgcacgccagagcagactgatactctcgacatctgtcaccggtactcgcggacgcagagancgcaatccatagaacgactcatcgcaagcagatgcatacacgatatctatgtacaggacgatatactggatatcactcactgactgatcattatgcggatgaatagactacgcaaacttactatgtacgtcactacgacgtgatatcgatcatgacatgctgcgtcctgcgcatctccacangatctcagagtgagtatcaggtctcatcactgntaatcatcgtgtcgatgataagagtagcagcggcaagtacatcgacagaccgnagctgcatcagct

SEQ ID NO: 218329 - DNA, 916 bp, Glycine max
  unsure (1)..(916): unsure at all n locations
gcacactctatatcgatgctgtcacgtccaactccaactcanaacactatactgcttatcgcaacttctctgatcgtaccacctactagatccactcacnnnnnnnnnnccgcgccatgaaccgttgttgcacccggtagcaccacacncganctgcatgcatgcaagcttctgatgccacctcactcccacggagactttgttggaaattaaaggatatggcgcattcccatagtgggcattggaggcttggggaagaccacacttttcaaggtggcggtcaacgacaagaggatggatgaaccttttcaactgaacaagcgggcggggatcctcggtgaccttgacacttggcacaaaattattaaaaatgtcaaccatgctttagttccaaccatttccctggcttaacatgaaatcattaaccatctagaaattgacccagcccacaagtcattcaagaataagccttctggccaaaaggtcttactcaggcttgatgacctatggaatggaaaacatgccaaaaggatagagttaaacaagtggactcagtcggcccataggaaacaaaatccaatgggcgctgaaccaaacccactggtccaaggaacgctcccccaaaagcataaacaggccttccaaggaaaatggccaacaatccttcgcacgggccgccaaggaagccaagaaaaccttgagcgaccaggcgagcgccggctgtaaactagcacagcctagctccccaccgcaccacaatccatcccgcgcccctcacgctctcaaacccacacatacaaatcagcactcctccgcgaccaccccacccccgcagcccacctctcccacttgacacaaccgcgacgaggcccaactcctcggccaccgactgcccaggcgcatcacaccgaatccg

SEQ ID NO: 218330 - DNA, 293 bp, Glycine max
ttaattcttccatcacaaacagaaaattgcgtacattttcattatactgataggcaggcacaggctgagaatcccaggcaagtgattgtgaaagcacttgattatccacaacgaacacctttgaaaaaaacatcatcaggaaagtggtataagcattttgtggtgagaaaaagagaataaaaattccatactcaaacttccccaatttaaacctgccattaatttgatcaattcaatatataacaagtataccaaattcatttataggattgtcatggaaaaccttaagcact

SEQ ID NO: 218331 - DNA, 248 bp, Glycine max
tagttaacctatattgaaaaatccccatttatttattcccaataagaaagaacagaaaagatgtcccctaaccttgtaatcttttactcactctaaaaggtcaaaagcgggtgaagtaccggttttggcgacacaaaaaatagttctcataattgtgatacacaccattatgacccccaggggggctcctcttggcagccctttatttctccaataaacgtttttctgtaaaaatcctttacctgaga

SEQ ID NO: 218332 - DNA, 1235 bp, Glycine max
  unsure (1)..(1235): unsure at all n locations
ccccaacccgtacgtcatgtgtctcgactactctccgccgagtccatcgcgtaacggactttgtgatctacaagtgctatacttatccattaattcaatcacgacccaagtttgagtgctgtgtgccctctccacgacctctcgcccaatgatacatcgacacctttgatattacgggcgctaactatagtaacgagccgccagctcctatgaagatttaatacgcggtgatcaccaatggtctggtgccgcacttcgaaggcgcccctaccctcctatacaaatacgatggcaatctggcggaagcgctcggcactacacacattatcgaacggtcgcatcagntctgctccactgcgtatataatatattatgataccactcgnctcgatatctcactccgtcagtatcgaccgaatcgcgaatattataccatcttcttcttaaacagccggcggtgaagcaattatatgcaacatagatgctgcctcggtgctttataatcatgtgggcgcgacgaaactctcacgttcgcatacaccctgaaataggtaattagggatgcctgacgcccaacatttacacagataaagattctgtgctcggttaaatttacacggtaactggggttttccttcgaagattaatcgctcgagcacttaaccatagcgtactacgatcgaccaatttaaccaactcggtattaccatcctgaacacaattgctcgaagacaaattattacactgacgatcatacatccgacggtgtcacggaaggattgcggcttcaccctaataagtccatggccgttgctgtacaacattagcgatagtagcacgaacgcactacgaacgactagatgatcttcgcttaatgacgatgattatagtcaataatcggaggcgattaaaggaccacaacttctgaccctaccccacgcccgtcaattgatgggcgaagtctgatagggctgggcgtagcgggagacctcaaactcatatttaaatcgcctctccatctatgtgagccatacccgataccagctgttataatcacttatgcatgctatatctgatctctgaccgcatcgcaatatcgtccatcaggcgaacgatcgagcgatcatcagctctcagatggtctaacattgtactacaactccgtcggctgcgtcgttagagaaatacactggcagtcgtccaccggcacacgtacgatcatacgcgtcgcaccg

SEQ ID NO: 218333 - DNA, 1009 bp, Glycine max
tgctctcctgatctaaaggatccttcttctcaactatcattatctgctttatctgacttaaactctaaccagccacgggagcttgatcgttgtcctccccgaccggtaactaatcgcagcctgcagccttcaaaatttataagagatacctccaaacttgcgtcaacccaaaggcgcacgcagctcgatcgaccacaaaacggtgcactatgggctagggagcgaacacgggcggctaaaccaaaacttcttgacgtccgcttggcgcgaacaaaggcgtctaaaagcgccctacctggacagataggccattcgaagcccaaattaaggagagtggcaaagagagggttcaaagactgggaagaatgtgtccgagaaccattaggtatattatggaccccaaggaacctcggggaccataccctcggacctcaaatttcctctgctaaacacagcctcgtgctacggaatctatccgggggagggagtgaagaacccccattgcgtcttgaaaactgaaatactctttcctactgggaacgcgcccattctactctcgagaaaaccctcctgcctctgggcaagggagggggtagcatatctttagcgtgggaggaggcgggcgtaaatacctgcacctgagaggtgccaaaatctagcctagtaagaagctcactaatccaagtgctcaaacggctccaagctcattcctatttaatacaccgccccggggggtagaaccccacatggcggggggctgttacaaacttttatcactgcacaacggacgcgcagtccttacgtatctagtatgagccggtctataacacatcccctagcaaccgcagctcaaaggtacacgcttctcggcacctctttaggcccgaggatacatatcgcgcgtcgtaaatcaagcgtccaagtataacccgcatgacctcacgcgaaggcatctttatcccttaacacgaacgccctggccacctacaggacaagcgtgggcagatct

SEQ ID NO: 218334 - DNA, 1242 bp, Glycine max
  unsure (1)..(1242): unsure at all n locations
ccactcgactcgcacgtgattctgatccatgtgacacctggcgtcggatcgaatctactttgatcgtaatctctggtgtgtatggttctgtctcatcgcacgtaattactccgntacgtctgaacgcggcgcgctcgtatgcgattcgattggcacttatgctatctaccgtgtcgcattacatctatcgctcattatactttgtacatgaatatattgangcnatagatctctatactatacatggtgtgatcgattcttctgttctccacacacccagtatcttgtgtggatgaaactgcctgttatgtgcattctacgtcgtactgtaggtgactgtcgggcaacattggcagagggattttcgatgtgatcgcttgccccgtgggcggagcgacatgggcgaatatggacgtctctgtctgaagggctactgagtatttggttgtaaaagtatggctctccaaacgtcccacaactatttccgntgctaatgatatggattgcctattagttcccttagaagtgaactttcacaaacggttgagcgcagccgaattactatcgtgcaatcctaccttgaacagatcacaaaaagcctctgaatgggaagaaactctgattgcccttctgtgtcacatcactagattaacgaacaagcgttcgccgatcgaaattaaggaaacacctgacacccttgtttggctacgaatgcctggcgggtcttatggtttcttctcggcaaaatcaccagtacacaatctttggccacttctttcgcagcaagtcttggcagttcaagttgaaccaaccccgaaagcgttatatgagcgagacagatttataagaggacgcccctcaagccggtaatacccgactaccagcccgaattaatttttgcgctcttcaaggcgcggaaattgcacagccaacggagtggagaagattatctccacatatattaaaatggactaaatgtcttgcacactcaaacccataagtcttggtgtcgttcgttactccgagaatagatggcttgggcgcacgacaagaccaggtaatgtacttctgctctcagatggcttccgtgcacgctactaactcactctacacacatacaggccagatctgtgggcgttgatctactgaagacctctcattctacacaagtaatctagtgtgagtgcgcaacatagccactcttctcgagcgattctctccattctcacagcatatgacacg

SEQ ID NO: 218335 - DNA, 983 bp, Glycine max
  unsure (1)..(983): unsure at all n locations
gcacgatacgcgaggactcgagccacgaacgcatcacacagacncacccttccactaattacctctacaattangctgtccacagntacctnacacccccaccaacgtgngatgagcccgtgtacctacccananncanaanacaaaacaannaactcgcggacgccaacccctcacaaacacacaacggactctgtaaaggtcccacacggcgcttccgggaatagacaatcctccgacatggaaaaccaaacaacaccccccgggcgaagcggcccaaaaccacattcaactcaacgccaatcctccgcttaacctcaaaaaaaaacaaacaatccccacccgaacgcccgaaaccggactaaccaacaaacccgcgggaaaaaaaaataccgaaccgacgggcgaggccgaaacccaccgcggaaaacaaaaaagagggacacaatacacatcaccataacaaagacaccctttagaaaaatcaaaccggaaatcaatccggacgccacacttagggaaaaccccaacccaaagcaaatggacacaaccaaaggcgaaacaaaagccaaaaacaaatcgcccaagcaaggccgcccaccaaaaaaaggctttcgaaagtcgacacctaaaagtcaccaccaaaagaaagggatcactcatctaagcgcccacaccctacaaagagcacccccttaagtaaaaaagcaatcactccgagaacccaaaccaccgcagcgccgcaccatcccacgcgcaacaccgaaaccgcgacacaaaaaagtcgggacacgagcccgcctcccaaagacaccacgtgaggcaatcatccccggacagcatcagcgcccacgcacaaccaacaacgccaccacccaacagtaccgaccgagcggtccacacagaaccctacacaccagctacagaacaccctgcaccaaacacaccaccggccgaccagacagcgaagacgcaggaagccg

SEQ ID NO: 218336 - DNA, 372 bp, Glycine max
  unsure (1)..(372): unsure at all n locations
catgattgatacatgatttgggacttgtttgaattgatttgggcaacattggtgagaggaagtgtggttttcgaaatctgcactttatgcagaattttgctgtgaaattgtgcatcataattttgcataagggcataaaaatgctatgtnttgttgggtgtggaaagagtaatgcataatgaattctggatgtttgctactagatcccaacggtcaaaatgtatgcttatgtactagagacttccagtatactttttgagtcgatccaacggttaacgaattggaacgacagaaatgttactggggtctttaagtgagaaaaagctgtgatttttgggtcgagttttgggctgagatttctttctttgccct

SEQ ID NO: 218337 - DNA, 1398 bp, Glycine max
  unsure (1)..(1398): unsure at all n locations
tgcgactctcagcgcgaccggaccttcantgccntatacgtgcccctcnacactagatctcactacgtatccagtacatctgtatcatgttcattcagttntgacgagaactatacagtcgtcaaataanctacactancatnnctatgccctncnnncnntctcacgagactgcnacnagattgtanancccagctangatctcatctcccancacttacncccgagaggnancccatanntanacagnatctaacactcgcgcgggccaatggcacaagcttgggaatatttcttaatagacgggaacactcttattatacgctctgggccggtaattcacatgagggacacaaacagctgggtgtcccctcggtgcgagaaaacattggntaatatccggcctcaacacatattcccaccaccaaacattacacgagaccgggaaagcataaaaagtggcaacaggcccggggcggggccctaaacggaggtgaagcccaaacttcacaatttatatttgcggcttggcgcctcaccttggcccggcctttcccagatccgggaaaaaccctggccggggcccagcctggacattaaatggaaatcgcgcccaaaccccggaactcccgatcgtagtaccaccccagcaaccaacatgacctacactatatcaaaagacaccgaacatgttttaacacatagcaatctactatgcacctagcgccaccgcgttaaactaaaaccctctactgtaagggagcaaacgcgcaacacgcgccttctcaacacggtaacacaatcctaccagcgtctttatggaacattcataccactctccgaaccaacgtcgccatccactacacacggcaccgcttcatcattctccattcactcgcaattctgcgccctaacacgactacagccttcctcatgacaccatgntcatatatctaacctcgacgataatcatcacaccacgccattatcctacaccttgtccgaccaatcgtcacaacacacacatccacccccaccctcaacataagcacgggcgctcacctacacgagcggccatatatcgcctcaaactggtccacacattacntcctgtcgtggatcacacaatcccgcacggactcgcagcaccagtccactgcagacaaagactctgccctcgcaccagtaccatcgctagcgcactcaacgtgacgacgttgaccgctatatccgtactctacaacagatcccgcactgacgacacatctgatcccgcacacaaatgttacaatcaccaaccnctatcctcgttacatccacgctctctctaccacctcctcacaactcatatattatcatatntactctgctctccgcgaagtgacgtgcgcacggccg

SEQ ID NO: 218338 - DNA, 1114 bp, Glycine max
  unsure (1)..(1114): unsure at all n locations
atcccgcatccgctnttcgccgtaacaagaaatgtacagctcattccagctatctgaactgcgacaaattgtggctgcgagagtagacgagaggtacaccggtatcgtatgcatantanantannannanatcacttgatgactgcgcacaatgcgngataacgctgacactatatgataacacaagcattgcatgcactgccggatcgccctctaacaggaatacacacgtgtttcccgatctattaccatgtaccctcttatacttgacgacagagattatcagatatacaaatcgggaccggctcctctctgaacatacatgtctttgattctgggcaaataacaccttgagcgctaatcccaaactttaattctccgtttggcaacactacactcactatacggccaagcttagccggaatatgccgaaaaacgccccggtacacgatactgcaccatttaccaacaagtacggcgccagtcctagaactggacgaacaggcggcctgatgccggcatatatcttccttacgcattctgtgcgggactttgacacccgcatattggtgctactcataaggaccaatcatgctcatgaagcgcgcatagattaagccaagacccgacaaccggccaacaccctgatgacgccgtaaaccattcagagtgggtagataattagtagcttactaaaattgtcttactcacgtaagtaacctgacccgatgatcgcagtatatacgcctgcgtcttcatcaaatacccgatccaacgaatacgatccattctgtataacataatcctatgccacgatacgtccgatctactacttattcatcttgcagagcaatctacctactgacactatcgtggatcagaagttgacacatctacttccttaccacaattatattatatctccataaccccgaatgcatcatcgataacaccgtaagctcaacgcttgtaacatattacattctatcttgtaagcggattgtctctaaccaaacctcacaactatgcgctatacaatgatctcgaagacgtactattactgatgtaattcaatcgtatgaactactactatcaagacaacagtaacacggct

SEQ ID NO: 218339 - DNA, 1451 bp, Glycine max
  unsure (1)..(1451): unsure at all n locations
gggggagaaggggaggaagggtaaaggccagtacacaaaaaagacaaagaaagagctgaaacgaaacgaacgtncncccnnccnggcgggatgagacctgatgacatcgcgacaaccncnnnnnannnnaannnnannacagcaagaacgaaggagaaaacacaaacaaaagaaagaggggttgtagttgttataaagagacgcanactgagagaagagaggaggagagagaaagggggactacgaagaacaaccgacggcataaaacagaccaaaaggcggaggaagcagaagggcagaagaaagtagaagaaagaggaggagaagagagaaggaagagacggaggggaaaagaggggaggagagggagagaaagaagggggaggcaaagaatgaaaagggagggacgaagagaagagaggcaaagaggaaggagagaacggaagagtgaaaaaaataaaagaaaaggagggaaggagacagggaagcagaaggagaaagggaaggaagacggacgaaatcagaagaacagagaagcgagagacaaaccgaagaagtgctgacagtagagagaagaagaaggatcacggagaagaagaagagagaaagggagaggaagcaggacaagaggagagcgagaagaaaggaggaggagagacaacgacgagaggagagaagaggagatacgacagtgctaggangactgaacacgagaatgagggagagaggacggagaagaggcgaacgagaacaggagagacgagacgagagggcgacgagagaagagacaggacgacggagcagcgcagggagaggaagatacgacagcggagcagaggaacgcangaagggagcgagggaggcggtgcagcagcgagagggacagaaaggaaggcagagaggcgagaggacgggcgcacgagacacgaaaacagcggcgtgcgagaganaaagaggcacaaggcatgtacgcgcgacatagacgagtagaggcacgatgngcangggaganagacgaggcacggacacacagagagcgagagaattgcgacagaaggaagacgganggtancgcaggaaagagacacatggaaggtagaacgcgtngacgatgcgagaggacagagtgcacgacatgcgataccacgatacgatatacgcacgaggatagaggagagacggtacgaaggagcacacgacacatagaagangagggatggcggangaacgangagctacangaacgtaaggcgtaggagacgaaacgaggtacgagacgaggaaggcagggaacgagtcaagacacgagcacangangcggagactggacgggagacggacagagagacgagcgtatacacgtaaggagtagaacgagacaggtagacacagagaggagagcgagnagatgacagcgcacgcgagacgtgaggggcgtgaggcgcgtagaa

SEQ ID NO: 218340 - DNA, 939 bp, Glycine max
  unsure (1)..(939): unsure at all n locations
cgaacgacgagcgaaacagggaagcaccacaaccgcggacgtcgaacaagcaacggaaagaggaaggagaacaaacaagtgaagaaaaaaaannnnnaaaacgagcatgcagaacccanaaananaacngaagacgagaaagaaagaaagggaaccgagacaagaacgaatatttatttattaagaacgacacaagagaaagagcgggaagagacaaaaaggaacaagagaaacaccacacaaccagggggacaagatgcaagaaaaaaagcagaagacgagaggaacagaacacagcagaggagaaacaagaggaaagagagccgacaaagcgacaccgagacgacggagacaaaaagcgggcagaagggaaaaaaccccaaccggaagacaaaaaaccaaaggccgcgggggcaagaaaagggggaaacaacacccacaaccgagaaacacagaacgccgacacgaaatcacaggagggaggtagaaagcaacagaagagaaaaccaacgcccaacgaagagaggacgggacaaagagacgagagggaaaacgaagacgcccggagagccacaagggacaggacaaaacaggaggccaaacaagcaagacggacggcgaacgcaagacacggaagagggagagggaaaagaaacaccacgaaagacaggcgaaaggcaagaaaacgacacgagacggaaagaagaacgcgcaccaagaggacaaagcacgcgaagtaaggagggcaagacaacaagaaaaggagaaagggaataatggaggagcaggaacagcaagaaacgaaaaaagacgcacaggaaacagaagaggaagcgaacgacgaagagcgggaatgatgacgcaagaccgacgaagtacgacgaacgggcacgaagaacacagagcggacacgcgaagacgaagaacgaggtaagaacg

SEQ ID NO: 218341 - DNA, 560 bp, Glycine max
caatgcatttattactaccaatgatcatacatggacccatacctgaaattaaccaatctcaaaaccatcaaaattttaaataatatcaaggaaaaaaaattaacacaaacatgataatattaaaattggtagaatattataaaaaatttataaatcacaaatattatattacaaaaattataatgaccaaaaaattagccgtgaggaaatccactatggtgattcctcccttgcgtggtaacaaatttttttggagctaaatgaccagcttaaaaaatcggtaagaaatatgttttctaacctcaataagggttgggggaaaccatccgatccttcaggtggcaggggcccaacaaaaaatgggaggtggcacactaagtgggaaaaaggggggtaccaaataaccgaatgaaccttaaactggcctttaagtacttttatttggctcggcgcctggaataattatggtggggccggggttatattgggtcctaaccataactggttcatgggccccttacaaaacctttcaaacttttaagcaaacataccccttctta

SEQ ID NO: 218342 - DNA, 183 bp, Glycine max
cagcttttaactaagcttgtctcgtttaatttattacaagcatttctaaatgaaaacctattaagcggtttagagaaatacttatttttttattaactttcttaaagaatttttaaaacaaaggtataaccagcatggattaagttaattcaaccctgtctgtaataacgcggaaaaaattta

SEQ ID NO: 218343 - DNA, 1271 bp, Glycine max
  unsure (1)..(1271): unsure at all n locations
accgacgtcgagtgnagtgagcaacgtntgtgatcgtgcagctttcgatangncatcgctactcgatatagtcganacgcgtagcagtcgtcacatgacataagtgatgcgatatgacgtggatatgtatcnnataatcttctaaatatctctgcanccngtgngtacgtatctctcatatgccgcctgctgctgactaaccgcattgctgagtaantaaactctaacagagatcgagacgtatcgttcacatgtaagtcgatcgaactgactcgtctgatttctatctgtcagtatggaaacacgtacttggacatgaccgaagtcgtcacatatctactggcgctatgtcatacntagatgttaggtagatctccatctcatacctcgatatagacatatcgtcatctacgtacacgccgttatcgactatcactgatcacaccgttattgaggatgttattgcattgacacagtgtgataacggtcgagactaccgtgtgccacgtaagatgtgacgcttgttgacgatcgaatacctacaatatcaactaacgtacctctcctcgatgctgactttagatgtgtcgatggaacgcgactgacgcatgcatgatgattgatcggtgtacggtccgactgacagtcgtccgatcgttcggactccagtcactgtatacggtgcgtgtgttttcgataacagggacgttcataatttatgccatcactgttggctacgacgacggggatgatgctgtctactgatggcgacgatgatgatgaatattcatggtcggcgtatcgatcgtatattgcggtccattgttacatgattgattggtgcacggacatctctcgacagtatatcgatcaatgctgaagatcgtatgtcgacgtgaacgtatcttatgaccgttgaatcatgatcgggattaagtatctacggcgatcattacgttgtacgactgatgatgtgggttatcatcaagacgtatcatagacgatggtggagttcatcgtgtgtgattacgactcgacacgatgacggtctgagatcgacgcacgattaacgatcatggatcgatgatcatcgacgtaatgacgaacgatgattatatatcgacgctccgatgatcagtcgcagagcgttcgatgaacgatcgatcgagcgatgcatgatcgactcgctagaaaatntactactcgatctnatctatacactggccgactgaacgatccgcatgatcgcgcaacgtatcactggtgccgct

SEQ ID NO: 218344 - DNA, 263 bp, Glycine max
aacttattctactttacaaaatcgagggtcaattcttgaagaaagtataaagaccacctctctgatattaccaatttgataattgagaacaaaggctcaagattcttcaatgtactctaaaatttttttgctaaaccaacaaaaactcagattaactaccaaagccaactattgaatttgttaaaaaaaaaaaagaaacctcctctcaaccttgcattttgtactggaagaaaacaaattaaaatccgctatgaaaaaaaaaa

SEQ ID NO: 218345 - DNA, 505 bp, Glycine max
tcctatacatatgatagagagggttcacatcaataatgtggttctatcatatgctaaaagttttacgattccatgcaaccatatacatctaggatacatgtgggcatgtgcatttgagttttgcttaaaataaccttattttctatccagaagtcccatatgtgtaatactattatcccaaagaaaaattataatttttgctatattagattactaatagaaactttcttattaactattatgaataaatcaatatggagattatagtgtttatctattttttaattttcaaaatcctttatgttgaatagaatgaatgaatggctatagaataattagccatatgaaaaacccaatgtactatgacagaaattcctaagaatgatatcatgactttacctagccattgaaccaatttgcccaattaatgaacatggagatgtacccacatgtagaggtatacatgcatcaccattatttcatttttaatttattgtgcaaaaat

SEQ ID NO: 218346 - DNA, 533 bp, Glycine max
agcttcgtccacaagatcttgggcgttttttgtatgtttatgcaaaaaaccacagtttcttggtgttccaagaacacacacacccacattataagaggcattccaaaagggttttagtatccttagaaatgccaaaacttgcccaaagttaaatggttaaaacaaataaacaaatcacataatgggaaggctattggctagaagaaagacaacagaaaaccaattggaggggtggtttttcctttttcatttttttatatgaaaaaaataaattataatataaaaataaaataaatgaaacagaatctacagagaaaaaaggtttgataggcaacaacttaaacattccttccacaaaacaaggtggagtgaaactaactaaaatacctcaaactatctgaatcctcaaggtagatagacgaagcaaccaagggtacaagtgatttggacttagatatctaaacccaaaaaacacctactttgcaatagcctgaaatatgccatggttacattttgttgggaaagtaatgagg

SEQ ID NO: 218347 - DNA, 189 bp, Glycine max
ttccttataattgcattggccttctttcctttatcgaagtgtcattggttggctttgctttcatcaaaacattcatattttatattttgacatttaagatctttaaacacaagaaggcaagaatcacattttcttttctttatgaataacaaaggcgatctaaatttatcctctgtggaaaaaaatcga

SEQ ID NO: 218348 - DNA, 516 bp, Glycine max
agcttcaaaaaaaagatggcctcggcaaactccttatttccagaagggaattctatcaatagacctccaatcattaatggagagggttaccactactggaaaacccgaatgcaaatttttattgaggcaatagacctaaatatttgggaagccatagaaatagggccttatatacccaccacagtagaaagagttacaatagatggcagttcatcaagtgaaagtataacaattgaaaaacctggagataaatggtctgaagaggatagaaaacgagtacaatacaatttaaaagccaaaaacataataacatctgccctgggaatggatgaatatttcagtgtttcaaattgtaagagtgctaaggaaatgtgggacactctttgattaacacatgaaggaactacagatgttaaaagatctaagataaatgcactaactcataagtatgaactaattagaatgaatgtcaatgaaaatattcaaagcatgcaaaagagatttacacatatagta

SEQ ID NO: 218349 - DNA, 395 bp, Glycine max
aaggtctatgactcagtctcatgggtttttttggattatatgctgcaaagaatgggtttctgccacaaatggagacactggatgtctgcctgtctcagtcaataagcatttctattcttatcaatggcagtcctaccaaggaatttgctcctactagaggtttgaagcaaggtgatcctttagcccccttactctttaatataattggagaaggcatcacaggattgatgaacgaagcagttcagaagaacttatatagaagctatatgggtggaaagaaaaaggaacccattaatattttgcagtatgcggatgacacaatttttgtgggtgaggcttattgggaaaatgttattgcttttaaagctatgctcaagggatttgaattggcctca

SEQ ID NO: 218350 - DNA, 890 bp, Glycine max
  unsure (1)..(890): unsure at all n locations
ccgccctacacgatcgaggaacagccactcactactcagcgattagtgatgaagctgctgaacgagtgacgtaagagatatttcattntntattgctgagcttcgantccgccatataacctacacatgagaagggacggcaaaaagggaagactttcattttatacccataacaaacagagcagggaagcgtccacatacgcgctgaccagcccccaaaataaagtcgacaccaggcagtcagataacggggagaagacacgtctgacagtcagacacatgtcaccaaaggagaaacaccaggagcaatcggttacacaaaggtcaagaagcgacacacagtcgcgaaacgctaaacgtcaaagaaaaccacgtcacgtaaggagaaacgacaaacgctcatgcacggagcgagtacaccacgcgcgagcacaaacgacgcgacaatggcgatgcgccaacatgacacgatacaaaccgccacaagacgagacgccattacatcacagatggtacgaagcggcgtacagacatcaaacacgcattctttgagatgatagacaagacaagacggccacaataggccaccacgaaggcgacgacaaccacactacatgacccgctaacacagataggctgccacttgagaaaacagcgatggccatatcgtcacgatactatccacactcgagtaatcgatgaaactatcaccatgacaacacgaaaccggtaatgatcattccaaagacatactcagaaacatgtcaacaagcgaagcaggggctcgcttgcacacgaccacgccgatgacgactggacattaacaacggcaatccacctcatatagcagaggactgaaaacaagggatgccacacacaacgactatcgc

SEQ ID NO: 218351 - DNA, 1106 bp, Glycine max
  unsure (1)..(1106): unsure at all n locations
gagaggtggatctgtacatatacgagtcactctgacgangttgaatacgacgggatctttccgattattttaacgccatgaacacagacgtccncatagcaagagctgtgagtgaancatgtttgaaaccgttgagataacgcagaatgtaggaagcaaccttagaataaggctattgggggaaaatagtacaaaaatgttttattatatttgcgaggaagagcgagaaacgcgggaatagagaagtggaggatgtgattgtagagtgatattgtatagaggcacaagaacgttggacaacggcgtcgagtgagattatagcgtcatcctaacagaagatgtcancaatggataggcacaatgcgcgaggcgaattgtggacctgtggatcatggataaaggaaaggagcatagaggtgggaactatgatagttacatccaccacaggataggtntgaattaaaaagaatggagtttagaaattgggagtagaaaaaaaaggtctggggggaaaaatatggggcaacgtatataatagtggtggataaagcacaaaagcaaggattgtttccttaccaggtgtaggggaaataggtataaaggggataaacataagagatagaaggatggaaaggggttttactaaatattgggggggtgtggtgcagataagaaattaagggagtggagtttaaatttacctcaaaaagaaaataaattgagtgtggagaaaaataacaattatcgagctgatgtttaaagttcaaacaactggaagggggaggaaaacagggttaatgtatactggaagaatgaaaattgagaaatgggaaataaaattaaaacagaactccagtcattgctttgaagaatgatataggaacttgggaggggagaactaggataaagggattacttgggacgccaaagaggaaaaaatttgggttgcccaagggaaagttaaggattatataaggacaagaaaaacaacggcattagagaaaggggaaatgggttaaaaactacatctaggtgtgttcaagtatggttccggtaatatagtagaaatgaaacggcaaatattgtcgtgatgggtagaattttgg

SEQ ID NO: 218352 - DNA, 966 bp, Glycine max
  unsure (1)..(966): unsure at all n locations
ccacatatctataatttctccatccctctctatcctctcttattcacgttaaggcgaacctagcttattttattatattncaaagctgagccctgattccactcagctgatctgccgtaaatcatctggctctgttgaaggcattcctttttaataataaggcatttcacaaggatctaaatgatccttaatatccactacatgtgaacatatattacttgtataacaatgctgcgtagttggagcaaaaccggcaaattcgtaaaatctcacaccaccccttttggaacaagaacattacacccaagtcctctcgggatgtcctaccggtatcgcttcttctaaccccaatatttctatgtcgcaacataaaaacgccacgctataagatccgtatacctcataatgaaaaagtaccatcanaactgtgagcctacaatctattggtcctagagtgaaatgagagcactatcatgctagcccagctcttacccccaatataccaccttcatttacaccatcttcttccacttgatcaaacacaaaacatacccttgtgagccgaggaacacatgaatatcatacacccacgaaaatgtccaattgagtatgataccgaggtggtcctttggggggacaccccgagcaatcattatttttcggttgggactaattcctatccatcactattacttctaaacaaagattgcataatatgtgacaccactattcgaaaggctatcgagataaaaacgtatatctaactcgctatattaaataagtcgacacccatttactacatctcccagtgcgaatcggaatgactgtcctccacctggaaacatcgctaccccaatttcacagctctgtaccgtaacactactgatgtcccctgtatgacgaatgtcgatgttccctgcgacagactgttcaatactcccgacaatggcctttaacaaacaaacc

SEQ ID NO: 218353 - DNA, 487 bp, Glycine max
gctttggagatttcaccacggagcatgccaattatggctattatggatagagttggtgggttcgaatttttgaagcacattgttttcaaatttcaacagtgttggagattggataatgtgtgtacttgactactacttgtgctatggtttatgggttttctttgcatttttcttttcaaaagaaaatgtagccaatgaaaagattcttagtgcatattaattgtaatatattttcttttattgaatattataatttggaaggtcaaatgttagatgataacttcttggagtttgtattttgatagcctagtcatttaccaggacttgggaaatgttctagatggtggccttggtcttctatgcattttgggccttggaaacaatgataccagcccccaatattatcattaaaaaattattgacctcaattttctcaagaaccccatttaaaagctagtgttttctacacaattttctcgaaaaattt

SEQ ID NO: 218354 - DNA, 917 bp, Glycine max
  unsure (1)..(917): unsure at all n locations
ccacgccacactaacgctacgaacgactgtactcttgtacgtatgactacacctaaatgtcgttcagttacggtngactctacacataatgtaacnaaaagcccagggggttgagccccttggcacttctgacactgtagaatactcaactttccttatggccggattgtgcctatctttctctttaacccgtgttcatgttgactcagctcccgaagacaatccacttctattccaagtataaaccttccccaccanaggttagaaaccacccaaccctttccatcaatgcttagacaagaaggagaaggaatccttctcccctcattttgcattctttaccgaaactgctagccaccctttctcacccaagagccatcctgctcctttatatataccaagggattgctatgaacccgaaccccctcataagggaatgatcctcttggttcgggaacattaagggttcaagaatccaaacaatggatggtcgaagttgttgaaggataaaggtaaccaaaatgaggaataacgcaataaggcattccatcccaaagcctttgcatgcaatattacaagggcccccaccatctgtaaccactataaaggcccccgacatgaaatctcctcgaacctgacaagggttaaaatctatggagtaaaatgccacccattcgggaatgggaggaagggcctcctaaaacccatggacccggcaaaaaccttccagtcaatccactggggggcgcaaaccactggcgggcttttgcccagaaaaacgaattttccattataaatgagccccctcaaagagacccctttctccgcaatcttttaatataccaaaagggttggcacggcgcctttcaccccattcttaaacatcgagccctccgggttctcaactaaaacacaag

SEQ ID NO: 218355 - DNA, 940 bp, Glycine max
  unsure (1)..(940): unsure at all n locations
ggctgacggatcgagtaatacaatcaatacggaggcanacgtcgtacgaaatgattgcctaccatacaatcgactnttccccccnccccacgccctgganatganatcgattggcggtaccgggacctttaaagtcgaactgggagcatgcaagcttcaagagttaaaccgtcgaggggctcaaaatattattaaaacgaaaccttcttaggagtaaaaggttagaaacattttagtcccagaaaggagaaccgtcaagcagatgtaaaccgggaaaaaaagaaagtggacgaagaggggatcccaagaaaaaaaaagggcaaattaaaaaaaggagggggcggggccagcaaaaggaacaagtctgcaaagtgggcgagtggcggtttggggcaatccatgaaaccaaggactaggagggagaaacactataataacaattaaaccaaaacatatcaaaaaacaaaggcggctagagataacaaggaagcacctttgcatacaataccagcgggagggcacagaagtaatctacttacatacaagaattaaaaccggaggaagaatcagggagtccagccactgataccataggaactaggccaaagaatagaaagaccggaaaaaaaaagagtggacgatagatttgaaaaatgagacggctgaactggaatcgggaagatcacagcacgactagacggagcgaaaaaacaatacaagggagcggggtgaacacgaataatcaatagggaaccgaaggggcatcaatgaaatgaataagtgaacacctaaccagaagacagaacgaagtcatcaggctgtgatagacgggcataatgatgagaacaaccgcgcagccgaaacaacgtggtacaacggcagcgcagcgaatacggtacatgaaaaatgcgaacatgcaaatctccaacgcatgataacg

SEQ ID NO: 218356 - DNA, 323 bp, Glycine max
cctgcaagcctgcaagcttgacgtaaatcacatgactgttttagacttttccttctgagacgcttaccaaaaactgcataccaagaatatatactttgtgaaacatgtcagaaggggaaaaaaattcaaccttattttcaaacaaaaaatttgtttccacctcaagaccactggtaactcgttggccaatgtaccaaaatctcacaagtaagaaagttctcggaagttcgaatgtccaatccacagggactttgtttggacttaaaataatgccaacccaatttaaaacccagagaaaagaatttaaaataacagattatgaa

SEQ ID NO: 218357 - DNA, 383 bp, Glycine max
tgtccgccaactttctataaagagggggagaagtgaaatggtttagggctcacccccttacgcacttctctctcttttaaattcgctctaaaaaaactgtttccctgaataaaatccatgccaaggctcttccctaacgcatccctaacgtttccgtgagtgaattcgcgaaagttttcgaccgttcttcgacgctcttcattacatcttcatcgatcttcagacttcaatgggtaagaaccttgcaccaagcttttctattcattctatgcacccagggtgcgccacattgcgtttcgtgtattttccttaccgcgcatttactttttatacccccctgtgacctgctctacccttctatttaggtcatttctcgcttaacc

SEQ ID NO: 218358 - DNA, 459 bp, Glycine max
agccttggggctaaagacctatataacagcaccatggttatagtttaagaagtttggggtgaagagaataattttagaagcttcgcaaatccagtttggattacaggtcatgcccactgttcacgtaaaataaaattcggtttctggaaatttgtttctgcttcaaactacaatagtgttttctgctgattaatggaaggctaagtctccagcgcggttttctattgaagagcacagctctctttgaagtttcgctattactattgaatactgatcagttattcctcttcaccaaatactctgaatttggcgctaataatcgatgcatgcttaaagcttgattaatagactctgagcctaaattacattcatgcttaatgatcaagttcgtacatgagaaataggggaatatgtagcttaaccacaaaaagaaaagcctatgtccattttcgcttaata

SEQ ID NO: 218359 - DNA, 963 bp, Glycine max
  unsure (1)..(963): unsure at all n locations
cccaccaacgttgacaaacatcagccggtgctgctgacgcgcgaagatcagcggcgacaatgatataattataattnnnttnnnnannatgtcgtaaccttctttacggcccacaaaaccaagccagagcggcgggagactggaagaagtttgcattccacgcctttctcaggagcgcagagggatagggtgctatctagggtgtagcgacccaacacaaaagagggttggtccgcatatgagcgtctcctaaggggccggaggaaccagacctctatgtcccaaaaacctcgttagaggcaaaaacacggagccctaatcgaggtcagaggggtgcataaagcaggaagacttgctctacaaaactgaagccctggagaggtcatgctctcgattacggggcaaatcgaataccatcagatgctataacccgaaccccacgaggggggacacaacgaatgagtctcccagagcaactactcaaatcgggtacccaccagataaaatggattacctggctcccgcataatgccgagaggtgaacacaaaccctcgaaccggagacctaaggccaaacaaacacacacccctgggcgtaagacggtggttacaaaagattggccgaacacccccagccgaagaactcggaaccaacgaaaagcgaacacgcgctttcacaaagaacggcgcactactcttacttgaagtgcgaaccaacgccacgcccgatgctccccctccttaatcnactcgaccgaataccatatcgagaacgccctcgaggccatcctcccagagactaacaaccgttagactctggaaataaacacaaacgatggcggtcgtcctaacgtcgaaacacgcaaaaagaagcaatacaggcgccttgacgccccacacacgcgctcagaccgcgtggtgagcacacaatgggtactcggaaacggaagcgcgcgcatgccg

SEQ ID NO: 218360 - DNA, 482 bp, Glycine max
agcttatgcgcatatttccctacgaacgttcacttgcacaagacatcctattaactaagaaaaatgcacccatatacaatcaaggtagcttcattacctagattatttacatgtacttccaaggtgtatttgttatttacatcacacacgcctccttggctaaatttacatacatgcatactcaaagcatttcggggtaccaaaaattgcacatgcgctcatcttggtatttctaatacctatacatatacaaacttcatgatgaatcttgactacctacgcaataaggtgctacatttcatgctcttttttttttttttttttttgaggggaatattaaccatgtcccctcccttctcatggattagcatcttgcctaacttgaacttacttaggttagaattaggcgttggatacttatttttttacttttttaaacaaacaaaaagtaaaagaaagctgcaaaatacaaaagatacggg

SEQ ID NO: 218361 - DNA, 1168 bp, Glycine max
  unsure (1)..(1168): unsure at all n locations
ccctaccggtctaatatcantgtcgagtanttgactaccgatgttttctatgtactcgtcttngtgcacggatgatggttgcgtgatgcgacgacttgctataaanntcaananaaanccagtggtggcatcctctgtaagatacaacaacaaaatactcaacgctagatgaacgttgctacgntntggatagagttaacacctacacctattactgttgtttagcgatattcgcgaaggatggatgagtgacgatgtatcatgcatggaaatctgcttggagtgagaatcttgtttgaacaacgatagagcgttagatattatacgcctacgtgttcaataaacggtcgtataattgtggactcgtttatcgacgacggcacataaacgatctggagaagctctctgagaacgttcggaagcgccgacggtactgaaatttctaggtgtcaaatgggagggttataagagagttcaaatactaagcccttgaaatgcctattcaaggaacttggggaagaacagcttctggacttgggcctcatagatcataaaccatcacgtctccataattgaacaatcagagctactttcctatgggcccaatatttggttgtttgtaggaagtacacatctttcgtatcccggacgtacatctttagggatgtacaatctcagttccgagaagaacgttataatatgaatgtttatgggcactctggctgaaggaggagaaggtctgctctctaatattacccactgattgtcttaaatttccgtctttccaaactctctaaaagcccactggaatctgtggggtggtcggaccaccctacatctttcggttgagtggctcactaaaaaggctgtaatttagggtcttaagactagaatggatatactgtattcggggaccatggtatgaatatgatctgtggctcaaatatgtgctatgacaagaaagttgctgattcttcccattcatcagccctactatacacagaaatccgacccgatgaacacatgcggcgcacacgcatatacgtgactatacggatacgactataaataagtcctctgggtgattggctgtgttgtgcgcaatactctatcgacgccgtcagagacgactcacaacgtgtttgctctactacgatgaatcactgcc

SEQ ID NO: 218362 - DNA, 318 bp, Glycine max
  unsure (1)..(318): unsure at all n locations
tggccagatgaaataccgggggacaagccttgagaaccgagcttgaacagggctcttttgatggggcagagacctttgctggatgggtgccgaatggaggggtttccggcatagccaaaaagcttggatggtgctaggcatattgatgaatattgtgaggtgttgattggggttttggccaagcaggaaccgaggtcacggcatgagcatccctttcttttctttttgccccggccattctgaatcttttgttgcttgtgctggcaggggcgacatantcgaacttccctattttaggcctatctcgatccctctacc

SEQ ID NO: 218363 - DNA, 500 bp, Glycine max
tctatagtttctagaataatcgattatcaaatgcagtaatctattattttgaaacaaaaagagctcctaagtttccaaacacaatctgaatgataataatacgtggtaattgattattttgaactacaaagaccctcttcttttgaaactggcttatgtaattgattacaaaaatttataatcgattaattagatgaaagtttaaatatttcaagagaaataagttttgttgcttgttctaacactttttaattgattacttaaacttggtaatctattacacaatgttgaacgtattgcttcttagaaactttgagatcaatacatacattttctcatgtttgataaccactatgcatggttaaagaaactaaatctaaaacattcaacattccttgtctaaaaacatccaatacacaagccacatccttagaattttgttgacattgcaaattattaaacccaaagatcctagactagatttcaaagccttcaatttt

SEQ ID NO: 218364 - DNA, 451 bp, Glycine max
taacatcatgaaaatttcttaaatcacattatttttatatgggtattgctaattggggtttttaaagatattagttaagaaattaaaagaaaaaagtatttattatataattataagaatattaaaaaaatcattaataatgtaattttatgtattttgataaaaaaaattaattttttaattaatattttaacagcactcggtagtatttgtattttttatttattaatttttcgtttaaatataattttaatccttaattcttgtaacataattacacttttactttaaattttttattttttatttttgaaaaattttatattcaacttttttatttttgatgaattttatccttaaatctttttgggaaaaatttatttcacacttttgtgttccttaatagataaatgatgaataaattcttaaatttcttaagagaacatttatt

SEQ ID NO: 218365 - DNA, 546 bp, Glycine max
  unsure (1)..(546): unsure at all n locations
ttggtcgtgtttgtgctgtaaagttttcttatcctcacttattctcttggttccccagggagtgttagtgcatcctatatgttttaatgaacaaagagaaagatggctacatcaatttatatttttttcattatgggtttattggacctaattaatttacctttctaccagtttgcaactaaccaaagtgattcttatttttgttatatgtttgtttttaaaggattctgtgacaaaataattttgttttgtgtttcatgctttgctaaggcacaaatatatacaagagagttacaacaaaatctcctaaggttgggctatacagattgattctccaaataaaactcctaaaattgtgtctagactaaataaattgatttacatgatcacaaactaatactatgggatgacaattacacacagattctgttatctcattatgatctcattacccccctcaagttagagtatgtaaattacatatcgccaacttgcacaacanagaggtgaaactgagtgagaccaagggccttaataaaaatgtca

SEQ ID NO: 218366 - DNA, 521 bp, Glycine max
agcttgttgagttctttcacttttctggtttaaatgattgataattaactgacagccaaaatcatttggatttgcgggtacaaaggacaagcgtgctgtcacgacccaaagggtgataaattttcactttcattgttattttacattaaacattcattcctttcttcattttccagaattggtatcggtgctcatttagtaataaatacttcaattggtttattacttgttttgtttctaggttactgtttacaagcagcgagcaagtcggctagcttcccttaacaagcgcttgttcggtattaaattgggtgatttctggtaatgtgattgaattttgaatggttgacgttcttacctatcagttattcagttttttggggaatgatagctataaatgtactattgtccagttttgttaaggaaggactttgtcttggccagctcttgggaaatcgatttacaatcacattgcggtgaggactttatctttgcatgaaattcaatttcctatgtgaaac

SEQ ID NO: 218367 - DNA, 493 bp, Glycine max
gttggtgtcttctcaatcccttcttaaatacttgccattcttattccaggtattagacacactaaactgaaatgctgtcttttcatccttctgcagaggatatgtatttgctgttagtgtccacagagctcagcttcttcttcaggtattaagtgtaaaacgctttcaccaacagcaacagcaacagcagcaaaattcaaatcccgcaccaaaggaattaagtcaatctgaaataagtgaaatatgcgactacttcagccgtcgagtggcatcagaaccctatgatgcttctcgtgttgcatcattcataactatgctcactttacctgtggcagtactgagagaattcttgaaattaattgcttggaaaaagggattatcgcacgcacaagttggagatgttgtttcagctcaaaagccacggattgagttatgtcttgaaaatcattcttgcgttgaatatggatgagaactctgagagctcatctgcatt

SEQ ID NO: 218368 - DNA, 384 bp, Glycine max
aatccaatattcttatggcctaccaagtcacttttgacttcatacaaatcaatcaaaatttggtttttttttttgcacaatgactaactcttaatcgacttacagataaatatacaatctcaacacttagtcttttctctcaagaggtttaaagagctttgagggctttttcaaactatacaaaaatttacaaagagctttttacataaagaatttgaataataatgtgtaggtttgtatctcattcctttaaatgacaagtgtatcctacgccttagtaatattggactaaaagtttgaatattataccctaaagaccattcttgctaaacttgtctctctcaacaaagactatttgtatatataaagaggaaacaaattgtc

SEQ ID NO: 218369 - DNA, 408 bp, Glycine max
caatagaaactatatgacttggagaattctatgccacttcaaccttttgaacaacaagtgaaggacctcaagataacccaagctgacctttgggaaaagctactatgcaggagtctattgtgaggcagaaatcaagatgcatatggatcaaagagggggacaacaacacatcctattttcatagagttattaatttgaggaggaggataaatgctttgaggggggtgcagattggtgacacctgggtggaaaatcctaacattataaaggctgaaacccttcatcattttcagaacaggttcaatgagcctcacttgagcagacctaacttggatggggtttcatttaaaagtctgacttctactcagagagaaactatgattgaacccttttatagaggaagagata

SEQ ID NO: 218370 - DNA, 445 bp, Glycine max
agcttatgcttttaatttagcccatttaaatataagtatgagcaacctttctttttcagaagccaagcttgaacttcaagtgttcaacttggctagatagacttgtttgcacctttactgataaatgactaatcagaaaattaaattcacatagaggaatacaatcattatactaatgtataggtgacagacacaccttacttttgcatttaaccttgtagactgcctctctgaatgatgagacaaagctgttattaattctgatctgccaataaaaaggcaggggaaataaaaagtattagctgtgaaatatagaggtgagaataagaacagaaccaacctgtgcatgatgaagatctggctcaatgtgtttcctaaataatggaaaaatgctatcaataaggtaatccagtgaacaagaatctccaatgtcatagcgaacttt

SEQ ID NO: 218371 - DNA, 961 bp, Glycine max
  unsure (1)..(961): unsure at all n locations
cgcacaccccgcgcacgctctctgtatcgcactcaccgttctgcattgnattctaagactgaatgctggctggggatgcagtcggcaattgatcaatgtgagaannnnnnnnannnnnnnnnnagatgccttgatggacgctggcacatacgagacacaagcccaaagacggtcttttttagaagaagaaacgggaagctgcttatttaaactattcctataagactcgcgcggaaggtacctgatgaccggctgggaaaagagcgaggaaatggatggcttcatctcaaaagaaattttttaaaatgggtgacacgaatccaagttaaaatacctttctaacccaattggaaaatacaatggacatcattttaaatgaagaaaaattgttgtaaaggagattgtgaggaataaaaaatatattcggatcagtatcattattccgccacgaacacctccgtatatatttacatcatcatacccctatgatgagcattgccatcgaactatctcagaacaattgtcactggtggcaccaattcaacatcaccaccattggcatctcaaaccatttttactagggccaatatagccactctctccactctgacttccaccattatctcacccccccgaaaggataagataaaaaacatcggacttactcccaattactttctagcattggagcatctttgtaaaaaccaggacaccttaaaattaaaagttccaaaggtagacctagttttggcttgctggaaatccccaaaccaaaaaagagagaaataacctcgaacgcgaccctaacgcctctttgaatgttgaaaagaaaagaaacttactaacaccgggcgacaactcaatgcatatcacccctgcaggctgtacacaatcgatcctatacacgaccgcggacactcgggtcaacgaccacaaccaagggcgcggaactccatcatcc

SEQ ID NO: 218372 - DNA, 626 bp, Glycine max
gctttggggctgggaaaaaaaaccatataacagcacctttgttctagtttaggctctgtctcttctatttttcgtttttagttttggtctctcttctctttcgcttttattttcgttttttacaatttcagttcacacttttagttttatcaataaaatttcgttctctatttgattaatggaaggctaagtccgcagcgttgttttctcttgaggatcaagcacagttctctttgaggttctattattactgttaaattttgttcagtttttcctcttcactaattactctgaatttgttgctattaattcatgcatgcttagtgcttgattaattgtctctgcgcttaatttacgttcatgcttaatgatcgtttatgagtaattggtgtgtgtgatgcttaatcacataatgaatgctttatggtaaattccccttagtaatttaatttaagggtgggattaaggggttaaactgataagggataaaattctcccacctacgataagaaacttgcttgtgaatcaaggggaaccaacctattttaattccgataaatttctaaatcaattttcctcgctgggtaaattaaccaaagcaaccaacccccccccccccccccctt

SEQ ID NO: 218373 - DNA, 213 bp, Glycine max
tctcagcttcaccttaggagacggaccattccaagtgttggagaagatcaacgactatgcctacaagattgacttgcctagtgagtattatgtaagtgccactttcaatgtgtctgacctatctctttttgatgcagatggcggagcctttgatttgaggacaaatcctttttcagaaagggggagggatgaagacataacccaggaccatga

SEQ ID NO: 218374 - DNA, 329 bp, Glycine max
ccccccctcggcccaaagtgcatgaaaataccaccattttagtgcctaccactaagactactccaaatgccctgaaattcaaggctaaaaccctatactactatggcacccttaacttgtacccttaatttgtatggttccctacaaacctattctaatatttgccaagaataagtggacccaaccttggcccatgggctcagaaatctattctcacgttcatgacaaccctaggaccttctttatcagctctcacccaattctcttggagactcttgcttatggctctggtgactgcccccttactatggaggatagtatcatcccct

SEQ ID NO: 218375 - DNA, 1139 bp, Glycine max
  unsure (1)..(1139): unsure at all n locations
gcgctcggcgttggaccaagcgtattctttacatatacatgtcggtagacggtggttactgtntgagtatagaatgacgcgatactcatgtgatgaacctattaacgannnnnnnnactctttggcacttggtgacaccctagaataccnaagcttatgagccggaagatctctcttgcccaaccggagagagtaacatctttattctttgctcatgactcttaaccaccgtgttaagaatggttaccccatattccgtgtagggactctgcatggtgttgagccacaagaatcttttgggcggaaccttagctccccatgaggtggaagattatttccaatcccgacatccctgggaaaaaatttgtatggacacaaagggagacttccttgtatataaatctggggatgacgccccccatgtaactaacacaggcgcatcattgtggtcacctatggtatgtgtacancgacggaaagatggatctcaaaagacttatattccacggaggaaccccgctattatgggccccaggacgcacgaggggttctcatagatccctcttgaaagaaatgctccactatcttctcaaaaaaaagaggcgtgtggcttccccccacgtattttgggggcgaagacgaatttttgacgcgacaatctctctcaccccggtggtttttatcttaagaaacctacgccacggccactctcgggggtgtagtttctaaacaagagccatattctttcttgtgtatggagaaacactcactacgcaacacgacagccgggtgagagaccctcttttgtcgttgtgtgcggcgcgagtgataatacttttcgttggggagcgacaaacaccacattttgtctcgtgtacctatcgatggnggccgggcgcccgtcccgcacgcngctacatactattctagcgagggaagtgcgtgttctttctcttcatatacgtaacatagtagactatcacctcgtcttggtccgctcgtcacaccatcgcgtcttcgcttcttactgcgcattcactcctccanatcagcaactgtgtgcgtgtcaccacgcaacactctcacgcatctcgtatcgtctgcagcaaccgtgacgatcgcatgactcgcgatacgcg

SEQ ID NO: 218376 - DNA, 483 bp, Glycine max
  unsure (1)..(483): unsure at all n locations
agcttgcagccattagaagagaatgagcatgtgattcgaattatgactaaaaatgttagttagtttgtcagattgattatgaaggaatgcattgaccatatcccggtgagagtgtgatccttaaattttaagagaaacgactatcatttaatactaatttttgcatgaatctttgaagtatggattgaatgcatgaaattgaggatgatcaaggccatgtttgattgtgatagccacttagccaaaaagctgaccacgtgcttgaatgaattatcccttgctcccaatttgagttgaatgaattattgattgattgaaccctgagcctatacaatgttatatcctgctaccttggattangttgtaggagagcctcatccacaggaaatgtggttcaaagcaaatttgtccccaatttgggggagtaattattcaagtaaaattgtcccaaatttgggggaagcactgggtaaaaattgaaat

SEQ ID NO: 218377 - DNA, 322 bp, Glycine max
cctaacggtgtctaaatatatgggccattaaatctatcatgtgttgacagtaattatatgggccaaacttctcttggatcttaagcaaccagctgacttctcctttaagaccatgctatgtactcgagatcggtctctctcttcccttcgaagcttgagctcattgtaggtggcccacacagctcctcagaatttatctcggccatgctcttccttgtgagccctcttggattcttgatcaagagctcttgcggtagctgcattgtcttctcgtaactcggcacactctttccggatttgtgtagagactaacttgaatttt

SEQ ID NO: 218378 - DNA, 495 bp, Glycine max
agcttcagaactaggattggtataaaataggcaccaattatagaacaaattttgagccaaaacaaaaagcacacttcgctttcactttttttttcctggacactgatttttctgttaacttgtgtgatttttcttattttttttcttgaatccaaaatcgcttggttctttttttataattttggtccagatgtctagaaaattcaataaaaatttcagctcaaaacatgtagtgaccaattcccagtaatttatacaagtttgtatgttcaagttgccagcaccagtgatttcaacctagaaatcaagagtagtgtttatgttgcttaaggcttggatagttacaatttgtgtttgcttatgctcaattatcttgaataacacaattcaagagagcttaagacttatttgattcacaaatccagacactacttagcaccacaactcaacttcattataggcatcatgtaggaaaacttgaaaacaaaaaaaaaa

SEQ ID NO: 218379 - DNA, 340 bp, Glycine max
tcagcttgctcgcgctaagcacaaagacccccgattgaatggctgaatggttcagctaagcgcacatcgctggactaagcccaacatctttactgtgaggtgcaccttaaacagtgggcttaacggggatgatgcgctaaatgccactttctctttgtgaaaacttattatagatgtgctaagcgcgccattctgcgctaagccccagattcattctttaagttgagatttcaagctgggcttaatggggaaggatgtgctaagcgccaacatcattctggtttgaaatcattggaagtgcgcttaacgcatgtagtggcgctaagcctgaatcactcta

SEQ ID NO: 218380 - DNA, 489 bp, Glycine max
agctttgctgatttaattttcaccgacgaaaggatcaaagtgggtataaaaagaagcaaatttaatcatcctgcttggacgaatgaaaaaactagggcaattaaagaaggtgagaatgaaggaaaaacccatgctatgactaccattcctatacagcccagtttaccaccaacccaacaatgtccttactcaacccataacaaactttcttcttccccaccacccaattatccataaaggccatccctaaatcaaccacaaagcctgtctaccacacaaccaatgctaaacaccacctttaacacgaaccaaaacaccaaccaaaaaggaattttgcaacaaaaagcctgtaggattcaccccaaattccggtgtcatatgctaaacttgctctcatatctactcgataattcaatggtagccataacccctgctaggtttcctcaaccttcatttttctgaggatacgacttgaacgcaacatgtgca

SEQ ID NO: 218381 - DNA, 243 bp, Glycine max
aatacagatcaaaatatttattgtttagcttgcacactgactaacactcaaccatcttaaagacgaatattccatctcaacatttattcttttctctcaaggtgttcaaagtgctttgagaggatttcgagaatttaaaggattatacacttaaaagattatagaaagaatttgaatatgaacacctacgtttttgtgtcatgtcttcagaaacttcttatatatatataggtcttatttaat

SEQ ID NO: 218382 - DNA, 460 bp, Glycine max
  unsure (1)..(460): unsure at all n locations
agctttgagggtgcgtancccaccatcttttcatagtagagtatcgataatgtgtctaccatcacgatcatcgtctccctttccatcattgggggtaccacctgggccgccagatccctccaccttttgggcgtgttctttgaaagatccgtccccctttttgcaaatgttctgtagttgcatcctatccggaaccatatcaaaattgtactgatactgcctaacaaaggcaaccattaggtccttccaagaatggactcaggaaggttcctaagttagtataccaggtgacagttgtcctagtaagactttctcaggaaaaatgtatccgcagtttctcatcttttgcgtatgcccccatcttcagacagtacatccttagatgggtcttggagcaagtagtccccttgtacttgtcaaagtccggcaccttgaacttgggaatgaccatgtttgggta

SEQ ID NO: 218383 - DNA, 420 bp, Glycine max
tgtgcaaatcaaatcactcctacatctcatctctagcatgcattttctttctttacccactcctcacgtttggttttttagggaaaacaccataactaaacgcgccgcaagggatccctatcgcaccagatccaaatctagaacgatgggtgatcaagaggagacacaggaacagatgaaagccgacatgtcggctctgaaagaacaaatggcctccatgatggaggccatgttaggtatgaagcagctcatggagaagaacgcgggcactgccgccgctgtcagttcggctgccgaagcagacccgactctcttggcaactacgcaccattctccctaaacatggtaagacggggaagggacgcactggggcacgatggcagccctcacctgtggtacaaccgaacggcttacccttat

SEQ ID NO: 218384 - DNA, 416 bp, Glycine max
agctttgagctaattcaaacgacaataatgttttgctcggatgcccgactgagacccgtaatacatcgagacgctcgaaattgaatgttgaagctctcagcaaattcaaacgacaataactttttactcggatgtctgattgagtcccataatacatcgagacgctcgaaattgaatgttgaagctctcagctaattcaaacgacaataacttttttactcatatgtctgattgagtcccgcaatatatcgagatgatcgaaattgaattctgaacctctaagctaattcaaacgacaataatcttttggctcggaagtctgattgagtccccgtttctattgagacgctcaaaatagaattcttaacctcctagctaattaaacgacaataacttttttctcggatgtctgattg

SEQ ID NO: 218385 - DNA, 937 bp, Glycine max
  unsure (1)..(937): unsure at all n locations
cccccgctcggcggcgtaccactgacaaccggtgctaggcagtaactantctctatcgtaagatgaggagcatcgctacgcaaattttattnnnnnnnnnccgcctagcccttctttacgcgcactataaatactcagcctcagaaatcaatttcgagcgcctcgatgtattacgattactctatctgacaatccgaggaaaaagggatgcggcgggtgaagattgctgagagctccaccacctcacacttctagccgcctcgatgtgattaccggaacccaaatcacacatcccgagtaaaaagatattggcgggtgaaattgctgagagcttcaacaatcaaattccgagcgcctcgaagagttacgggacccaatcacacatcccagaaaaaaagctatggccgcttgagatatgctcagaaccaaaaaaatcaatttcgagcagtcccaataataaacggagctcatccaaaccaccgggaaaaaatttttgggctttgaaaaacgccgaaaggtcaaaaaacaatttcccgccgccccaatggtattcggagcccaattcccccttccgcgaaaaaaagacagggcgcctgagatacaaccccacccctacaaaataaaatctcgggcgctcgaaaatgaaaggcggcccaataaaaacccgccgagaaaaagattgtggctcgtgaataactccaaagacttcaaaacaaatcctcgagccgcccatgaatatggcgggcgctcaacaacacctcaaggaaacaaaattggggttgtaaaaattatgggagacgtacaaaaaaatcttgagcgccccgaatgtgaaggggaacactcacaacacccccgaaaaacaaagtggctgcgtaaatacgccgcggagcgacaaaacaacattaaggcggccgccagatgcacggagggccacccg

SEQ ID NO: 218386 - DNA, 356 bp, Glycine max
  unsure (1)..(356): unsure at all n locations
agcttgctctaaatttacattgatgtttgcattttatgggagaagttgtatgccctttttgttttaagaatagtgtcccactggtaaaactaactttccaaatttttgccttcgcaggaaatggcccccaagaagcttgccttaaagaagtccaggaaggacaaggcagccgaaagaactagtttccgtccggaatatgaccagtaccgctttaggagcgctgtacaccagcagcgcttcgaggccatcaagggatggtcgtttctccgggagcgacgcgtccagctcanggacgacgaatatactgattttccggaggaaatatggcgccggcgggggcatcactggttactccc

SEQ ID NO: 218387 - DNA, 850 bp, Glycine max
  unsure (1)..(850): unsure at all n locations
atganccgatgacntaccttaataaagccgcactatataatatttaagccctggaaaaaactttntatatttaataaacgttggccaacctttttttaattaattacgaaatcccttcctaacattcaaggatcatcttgaaggcgcgacttggaatcttgaagcattggtttgaaatttaaatctgaaaaacccattttggataattgctacaccatattatgatcatcattaaaacactaaagcccattggatctacacatgtgtccctcccctttgagattggaggtgtagtgtacgaatgcgctacagcggacccttaatgtgatacccgcattaagcgcttcttttttccggagacccctgcaaggtattggctaaccgtctttaatgtggccctccaccttccaggttagggcattgtttatgatttctcaagttgggaccctcaaagcaagcctccattcttccctatttttggatccccgctaaaggtaacggtgtgacattggacattgggtccgcgaccttaagatatggatttattgtttcatganttggctaaacgccggcacctaggaggacgccatgaactacttcacccttttttgagtcccgacatcaatgtattaagatacaccacgtgatcgtgttgtccccgcttctcagatatggccgacaaagatcatggaacgcctttaacgacgctcctagtaaagaagcactgtgtctttacgcctttttatgacgcccaatcgatatttatgtatatatgagagtatacgtgactcatactcttcgaatacgtatgcttgttnatgtatgacaactgacgctagcctctaccgcg

SEQ ID NO: 218388 - DNA, 368 bp, Glycine max
gggtttgagaaagaaaacttacaaaacttataccaaagtttgaatgcttgataacgattgaacattccagtctctgactttaacacttcaaaacttcaagtataaatagacttgtaggaagactaatcattggctctaaatgaccttttttcgtttgatgatcttctggtatgaaggtgtccattgagggattaaatgcatgtcagcaacttgtcaaagcatactattaaaggtagtgacagatccatgtttaagtgtatgggaaccattgcccccataatatttttttttacttgaatatacttaaaaaactttatttttacccttattaaaatggtattgcccacacaatttttttaaaatgaatg

SEQ ID NO: 218389 - DNA, 219 bp, Glycine max
tcagcggaaatagtgactgtgcgcaccgtgtttggggggtggttatggctggccgacgcttgggggggggctggtgttttggtgtggctaaggaaaaaaggttgccgaaagatatatatcatggatacacttattgataatggaatacgtggacatccaatgagagacggtcatagtaacgcttaccaataattttctgatatatgtcatggttaggat

SEQ ID NO: 218390 - DNA, 448 bp, Glycine max
  unsure (1)..(448): unsure at all n locations
agcttgttcaggagggcagcagtgaaatgngactgccactacccttctctctctcttggattgactatatatatgttttttattgaactaccaaattaatatatatatatatatatatatatctatatatatatatatcaagcaataaatactaccagaggtactacaggatagcacacgagagaagaactccttaaattgagaacaaaaaacagaaattcatttgcccacaaaaaccaccagaaacctgaccttacagaacacactctaattaaaagccatagacatagctgaggaccattgatgaaaagggaccattaaagtccttttcccgcccccctcagccaggacgaagtgaaaaaatttgtgttttccacccaccttagagatgtgaaaaggttgattatgaaaagaagatattcattggcggaacctttcatatttgacc

SEQ ID NO: 218391 - DNA, 405 bp, Glycine max
cacaacttgcccatcacctaagcgcactggatttttatcttcattacccggcagccacatccgtagcccctggcttctctactcacatacgagacactaacttcacatgcaagagattccaaaacacaccacatagataaaaacctaacctctctgtatctagccaatttacaatttacatcaacctagatacgtcacacaacattaatgctctaacattgtccctcatattttactgtagagtcactcgaaatttaaactcacaaacacgttccagtgacacttaaattcaattataaaattaaaaattgagtacatataaatgagctctctatgattgcatcctagatttgcaattgcgtcataacgacaacctacactataatatcagagatttaatttgac

SEQ ID NO: 218392 - DNA, 968 bp, Glycine max
  unsure (1)..(968): unsure at all n locations
cgaccgacgaaagtcgcacaccttcacacccccactcgttctcaaggtaacaaacaatacatctccnncccgcgctgattgagccttccaaacccgaacccaacagagactgcaagcttctaccaaaggactaccacggacaaagccttttataaccccaaggaaccttggggaacaatccacggattgaaactcactacaacacctaagtgaaaaatcatgataaaaaccaagtcacgtaaggagataaaggagctttcggaacccgacatgggaaaagagcgaggagggatttaagtcccataggacaacatagactcggcggggtatgcataaacgacgcatgttggggcctatacatgaaagcacattgcacaatcggcacaaatggcaggacaatgctgaaccgaaaacggctaactattcaaagggcaagggcaaccagaaaaaaaaacacacaaaccttcgaaaaaaaaaaaggaaaaaggaaccgaaccctggaaaaaccagtcacaggtcgaagggaaataaacaccttaaggggcgccacaaaggaaaaaaggacccacgggagcaaacaccccacggtgaaaaactgccaaactaaaacaaccaagaaaaggcggaaattaaagaaggcaccgaagacaccacatgataagccctattccattcggggagtaaagacgacataaggcccagatcatcagcaaaccttgggccgctgggacaaactaacacgctaaaaagaaccataaaaaccctaacacgcccggagcttaaggggacgatgggcaagataaaaaaactgacccacaaataggggagcaagcgttctacgggggcccatgagggcaaacagcaaccaaaaaactcgaaagaaaaaaggtagtaaccggggagaggcgatcacaccgcatgacatgaacacaataccaacctagggtcaacaagggaggcgacggaag

SEQ ID NO: 218393 - DNA, 526 bp, Glycine max
agcttatggacatcaacaaacaaaaaaaaaaatcatcatttcaatcattaaacacacaaccaaaacattaacctaaccaaattaaagcttcccttacctttcaagctttttccccaagctaagttttgacaaagagaatggagaaatagaatcttgagatccaccaaggatttcctacaatcaatagcaccaacacaccatacccagggctccaatttgggtcactccaaggaaaggaaaaaagtaaagaaatggagcaaggagatcaaaggcggaatgaggagagcttacccactccatggcagtcaaagaagctctaaggaagaagacataagccaccaaagacaaaagagtaactttgagataaagaaggagataaaagggagaagatgagagatggaggaagctttgcatgtttaaagctttggaaaaatagaaatttttgctaactggacctcaacttcctctaaatatacccctcactaaaataaaatacacatattttaagtccattttcgtgaaaacc

SEQ ID NO: 218394 - DNA, 783 bp, Glycine max
  unsure (1)..(783): unsure at all n locations
tcttgacntcgtgcatttcgcgactcaagcttgtctacacctctagtttgcatggatatttttggctcatctactgcgcaggcatggtgaattttcaagcttcaaagtgcatatgggtgcaatggtcgtctaaggttcaaggttcacaagaatgtataataattatatgacttacttaaatggggtaaattgcactgaattagaaacatcatttgcaccacaaatttcagagaattccatggatttcatgttggaatgggaaattaccaactcatgaataccattagctagaagtgaatatatatatatatatatatatatatatatatatatatatatatatatatatatatatatatatatacataaagatgatccttctggatctctctttgttcccgtgtgggtcttctctttggtccatgggaatatgatgaggctggcagctttttttaccaagaacaaagtgatatgcaatttccttgggcttctaaagagcatgagtgcatggcataaccgatgggaagctttattactcccttatcttgacatatacttgtgccacacggtaccttgtttttggtactgtacattcacactcgtccacggcacgtcgcgcctatctttgtattttccaatagtactcttagtctcttccagatcacgagatgccgtgttgatcatcgccccttgcggctacgctctcaaattgagctgccgctaaccatatctttcctgttctccccacttctgtgtagactcgctccgtcttctcttaagtac

SEQ ID NO: 218395 - DNA, 1462 bp, Glycine max
  unsure (1)..(1462): unsure at all n locations
agcgagacatgcgcttantcgagtctgtacttacgataanctctagtgtgaaacgtagctatgactntaactttcgtacgtatctgtacgtcactgtatgnatatgcatgtcacacatgtatatgtatgtatancatacaatatcgggcacngagagtgangttgatgtacgttttcgcgattatcccagtgagaatnctcaccttgataagcaatggcaaggccttggctaaatcaaatataaacatatagacacgaagttgagaaatgtgagagagtatcgtatcgttttatatangcgcnagtgtgactcgcactaaagagagggtacgcggtcgtcgcacattggtgtcacaaaacgatttcgtnctatctcgactatatctgactgttggaatatctccactaggatatgagtgacgcgcctacataagggtacaagacaatatgcatcttataacactgatacggatatataccggtatacaccgtaccatcacgtcgcggggccactgaaaagcgaagacctaagaggtatacagagcccctcggtggaggtgagctgaagccagagaccanctctgcgattgttatgcggatggcagtntcgtctgctatcaccaaccaantccgcggtctttcgataagctcacatccatacggggatcgaggcgcggcttttgtgccacgaggaactcgcacctccgttcctagacatttagagggtagcataacggaagttataacatggtaattctcctcaagcgacagaggaaaataatcgaggcgcgctcgtgatcgaggagagagcaacccacatttgggtgtaacatactcgatgggggcgaaaggttatgaactacaacgaaaactaaattaccttggaagtgtctaatggtccgacggctgtgggaccaaaacaaaagggtaggggcggtcgctcacaaacattagacaaataccacgggagtgcaaggtgcgagtcaaattaggaatcaccacattgctaattgactcaccagacgtaatcaatcacacaacacactngtggtagaatagtcacgttcgaggagttaacgaatacagtaggtagatacacgatatgtcacaatgttaatgccgaacatattgtgtatatcgcagggtgcgaaatgagcatcgttcacagacatgaatgaactatcttcttgattaacgtatagatacaatcagatcacgctatcagattcttaactgctatgtcgtctcgcagagtacatagaactgacatactacatgtgacacgatcataaaacggctcgcgtcgtaacctaactgctaatgacgatattgcaccatggagatacggtaaagacgtgcgtaccacatgaattatatacagcagccttcactgtacttaaccaatatctctcgttgctgatttacacgctcactatacgatattacacctcactcatgcacg

SEQ ID NO: 218396 - DNA, 953 bp, Glycine max
  unsure (1)..(953): unsure at all n locations
caaaggtgtgtagcccaccatctctttatagtagaatactgtttatgtgactaccattaatgtcacacataggttgtttaatcattgaggaggccacctgagcttgccaaggcacatccacactgtgagcagtaatgatcttgaaagatttctgtgccccactattctgcacactggatgtgtaaggtggacttcctaattcgcacgcgcattcatcaccggacacctcggcctacaggcagggcaacccctttaaagttcctttccaagacatggacccccggaaaaggttcccagattagagttacccaagacaaacacgtccaccagataagatagtaattgagacaggaatgtagtcaacaatttccctcatgagttatgcaatatactccccaactatgttcactaaaaacaatatttaatagagagccaccggggccgngaagacaccctccatactactactatgaaacacgcacacctaacatttggaggagagtgtgaataatctctccttcatcatcaccgcaatttactatcgagcatgtctacagaaactaatcaatcgccgtatcagaacgcagagactaattcaactgtctctaataatgagaacctcactacataataactctatcaccaacaaatcacatcaatcgacatatatcatacgcctatcgtacaacactctctactcctcaactcacaataccacacacacgcactgttatacatacacgcacatcacgatcatatcatcattgcacgtcctcatcaacgaccaaccgaacagtacactatctactctacaacatctcangctcttacgcactgaatcgaaacaagctattatacactaacgtacacatacaattatccgactcaatcgcatcgctcattcactaaccaccngcacgctactcagtcgacttcgaatagaacactaccgt

SEQ ID NO: 218397 - DNA, 906 bp, Glycine max
  unsure (1)..(906): unsure at all n locations
ccgcgccccaaagaccactcccccacacgagaaacaaaccttggacaatacgtgtcactctaaacgcccccgtccnncncccccgnnatgaaccgtgaccttccgggaccccagagngancggaggcagccaacaccatactggaacatacaaccggcaaacatattttttatgggggaaatcacggagggcttcaaacccccacaggaaagaaataacagaaaatatcttaaggtcataaactgcccaaaattctcctaacaaaaaatgaaatcaatcatggagtgattaagaactgaaaactaactagaacctcacctaaacatttatggtaaatagctctttcactacggcaacattctggcctaaatattaccttgcaggctaccactgggagggaaaacaactatctaagacataagctcggctttgggctaactgctaagcaaaaaaaggaggccctcagcaacaaaacgccccaacatggaccatactggctgaacctgagacggctctcccccccaccggccctttaacatgaataccctgaaaaaaacacacctctgcagccggaaaataaaaactcggcttccccccccggacacaactgacaccaccgcacaggctcatccatcgtacgaaaccgccggcacaccgcaacgcaacaccacccccacgggacacaccccccacaccaaacaccaaaagcctcacccaaagttattgtttaaatttttaacccccgtgggtagggaacgagtttgtggttcccccggtntttttntttataaaaaaagaagacaagagaagacccnnnnnntncccccccagaaggacataaagcctgtctnnnccnnnnttttnttttttnnncacgcaggttcgccgcccccccccccccgcagc

SEQ ID NO: 218398 - DNA, 213 bp, Glycine max
tgtacagaaacttacctgcacgtatcttaacttctcataagtcattttctcggtcaaattaatcatcctggaaacagatgacagaagaagcagccaaactctttgaagtcaaagaaaaagggttactaccaagaaagcattccacaaatggatattaactacccgggattggagttctgaaatactgcccaacaataggggacccctctctga

SEQ ID NO: 218399 - DNA, 415 bp, Glycine max
cttgaagggtggaacccaccattttccataataaaaaactgggaaaggggctactatcattggcatcatttttttcatcattgaggggccaactgagctgccaagttctccacctttgggggtattctttgaaaagacccgagccccctttttgcacatgttttggagttggatcctatccgaagccattataccgacactgcctaacgaaggcaaccattagggcctcccaagaatggacctcaggaaggttccaagttagtgtaccagggaataactacccccagaagactttcttggaaagaatggatcaacaattccctatcttttgcggatgcccctatcttttcgacaatacatctttaagatggggtcttggggccaagtaatcccccttggactttggcaaaagccc

SEQ ID NO: 218400 - DNA, 433 bp, Glycine max
  unsure (1)..(433): unsure at all n locations
tctgtggtgcacaagaattctattatttaaatattcaatttcccaaacaaaaatttgggcatcataggtctttcatatcaaattatttctttaatcaatctatagcttttggaaagctcttcaagagctccaaanatatttacataatctacataaacaacagttatgaaaaatctattttttcatattttcatgaaaaatacatggacaaataagatcatttctatatccttcctttagcaagtactcactaagtcaattgtaccatgtgcgacttgattgccttagtattattctctagaatatgcattattgggtcaattatatccttcaggaagttttatgcaaatatcattatcaagagagtcgtataagtaaattgtacaacataaaaacatccattagatctaaactaagtcctccatgggctact

SEQ ID NO: 218401 - DNA, 394 bp, Glycine max
agcttaagctccttcaactgcacaagctcttaatatttgaagagtatccttgtggaaccttcacctgacgaagacactgacaaaaacttatcttctccttcttggacaaaatatggcaggctgggggcaagtaaattttcttcccatcataccttggatgcaaatgtgattgtatacccatatcaggtagatcttgacgggtattcaagccatccttcgtcttgccttgaatgttaaagagcgtcccaaccacactgtcacaaacatttttctccacatgcataacatcaatacaatgtctaacgtcaagatcacaccaagtcggaagatcaaagaaaaaggacctcttcttccatatgcaactctgacttttatcctttttttggggccttcc

SEQ ID NO: 218402 - DNA, 435 bp, Glycine max
tcccagttatggagagctaaatcctctgatgatctttcttgtttgtacttgatggaaatacccggatatctatttaatgatggtttatgtgttccctgggctatcagtactttatttaagagtgcttttggcttgatcatgtagaatcatgcctttgggaggatcatttaatagtggaaactggtctgagttttaaaacttgatatgacatggcttgtttattgtattatcacaaggaatcaaagtatggtaacctagatgtttgtatggttgtcttaatgcggctctaatccaatttactccaacaagaagaatctgaagacgattgatgtgccatcatttttctctatttcttaaccctttttggcctattttaaatactgaatatgcttaattattcatcttattaagcaatatttattattttgggcccct

SEQ ID NO: 218403 - DNA, 1759 bp, Glycine max
  unsure (1)..(1759): unsure at all n locations
tccgcttagcccgcaagtctagcgtgtgttantgtagtcgcagaatcntctcagtagcacgtacagcactctttgtgtcatcatcgnanatcantgnanctatctaagtgttcacatcacntatgtagatgatgtcgctcgngcgtgcactntacacacagtagacgttgaangctcgttgagatctcttctcgcagtgacaccgtggaatacatttctagatagatcgatcatctagcatacgctatacctaatantgcctgatcaacgagacaatcacaacanacacagatcgtctatgtatcgatctttctctcaggtatgcgcgccaatggcacngaccacacgacctcaatgagcgagacgtacacacatctcgctctctgactcatcttcgtgaggctctcaancacaacacacacatgatatctcgcgcgtgcgctatatacgacacgacacaactctcgcaacgttgtacactgtcagtcgctcatcaacgngcggctgcaaggagagatgtggngtgcgtaacgttgctgggcccattagcatcggagaccaaggaatagagcgacctatatgtagatatgcgctgtcggtacgtctcaancgcgtgagacaacatggccgcgaggcgagaagcgtgtgtcgtgtaaattatggacactcggcgcaacactcttattgtggcgcggcggcaatatatacataggacgggagtaacatagtagtgatgagtcgacagacgagtacatccacacaaggcgctcacgnttaatancgttctgtgaaataggacaataatctactcttaggtggcaccatatgaggaggcgcacatagaccncgttacaaggtactgtttctaaggacgtagtgtggacacgcgggcgtgaacatatcgccgacataacgtcctctatgggagantggcttaagtcangatctctcattccttgcagataagcccgcgtctcctgtttattattcgctggacaatagaatagcgtcttctctctagtacaaatcggcgagaggggtcaatagagatcaccctctatggagtaggcggagtagcattctgggctgttataactaactcgtggcagctatcntgaaagtactctatctctacagtacaaactgctatgatctgtgtaacgcgcgcgcagtgattgtgaatactgtgtgtcgggcgcacacgcgcgctctagtantntatcaatacatatcgcgtacgcaagtatacatacgtangagaganatgcgctcgtcgtgtcgtgtgcgtatacgacgagacagcatctgactantagcgcgcgtgcgtgcacgtgctgtgtatatgagcagcacgactgtgtatagcacacantgagcgagagaaatnaagggcgtatttgtgtgtatacacacttacagatacacgcgttcgtagctctcagcatgcacgtgacgtgcttcgcaanactaataactctcgacngaatacattctattgagaaacacacctgatatgctcacatgcggngtatacgcgacgttcattattactgcggactgtagccantatgactaaaatagtctcatgctgttatgcgttacgcacgcaccgatagcgctcacgacnattgtcgtataatgctcctgtactcatatatgtatacgcgtttactatcacacacantgatgcatagtgcacgaacgtactgangctaactcatatttatgcgtgcatccgcgcgtgtacgtctacgtccgn

SEQ ID NO: 218404 - DNA, 1031 bp, Glycine max
  unsure (1)..(1031): unsure at all n locations
gatgagtgttgggcaaagaatcaagaaagtgtgtgccagcttttctcaccaccagattctgagcactctttgcgatttatgaggattggcaacatgagaggattatgattgatgctgcctatggtggagccttggggatatgactcctgctgaggctatgaatttgattgacaagattggcttccaatctccccaacttatctcagtcgcaagaaaatcgatggctacttggttctttataagggaggtccaacgagggtggcccaccgggatttccttctttccatcttacatggaataattacacatagcttggtatgggatatatctttgatagccctttgggttctgactctacgttaaacaacaagcttttgctccatgggaataaataaaaatactaccaccctggtctggcaaagaagcctttgtggtcgctattggtatctcttctgcgagtataacaccacttcacagaataccttgtggtgcttctcttttggctagacacattcctcgaacgttacatacgaggccaacacctgtgaagtcttaatggcttgtgcaaaccaacttctcattacatagtaaccctcgcctctcgacgcgccaaatcacgcacatccgacatgctggaaactatgtttattgaatcgtgttacagacaccgcgaaatgcccaattccacgggtggtgtgggaagattattccattatttcttagtgatagtggccagtgngtctcttccatacacacgacccatatacgtntggctccgctactcttcttcatgaaagggtggagctagcgtcccacgacacatgctctatatatggcttctcttccctacatgtgtgcggtctgatgatcatactctcacgacactacagtacaatgcctagtcctgctttgagaggcttcatatcctctacatctctctctcttctacacaatatgtatacgtggtgcgcgaatcgacacccgtctcacaatatggtccatatgtttctcgataatagtcataataagcg

SEQ ID NO: 218405 - DNA, 266 bp, Glycine max
agcttgagatgaggaagtgttgaagggtgaaacttcctgcttttattggtgaccacagagtggtacctggagatatgtcgcgggggtcaagagaccttggggacgtcaggtggggtgctattgcccaaaaccaagcttgaccaatcccgacccaacccgggcatagtcggtcagtgagaacctgtgatgtacctaagcaggcgagctcctggcagtcaacagattaaaggaaccaagaccacctagcaaggaggcttgtggtggct

SEQ ID NO: 218406 - DNA, 432 bp, Glycine max
taaaggtgtgtagcccaccatcttttcatagtagaatactgtttatgtgtctactattattgtcatcatttgtttttccatcattgaggtgccacttgagctgccaggtctctccacctttgggcgtattcttttgaaggattcgtgccccctttttgcacatgttttgtagttgcatcctatccgaagccattatactgacactgcctaacgaaggcaaccattaggtccttccaagaatggactcgggaaggttccaagttagtgtaccaagtaacagctaccccagtaagactttcttggaaggaatgtatcaacaattcctcatcttttgcatatgcccccatctttcaataatacatctttagatggttctcggggcaagtagtccccttgtacttgtcaaagaccagcaccttgaacttgggaggg

SEQ ID NO: 218407 - DNA, 537 bp, Glycine max
agcttggagaggatgcttcaatggaggaaaatatagagggagagaaagagggaggggggagcacgaaattgaaggaagaaaaagggagagaagttgaactttgagttgtgtctcacaagactctcattcatcaaagttacaacaagtgttacacatgcttctatttatagactaggtagcttccttgagaagatttcttgagaaaacttccttgagaagcttctttgagaaaacttccttgagaagctagagcttagctacacacacccctctcataactaagctcacctccttgagaagcttccttaagaagattcctaaagaagctagagcttagctacacatacctctctaatagcttagatcacctccttgagatgagaagctagaacttaactacacaccccttataatagctaagttcacccccatgacaaaaaacatgaaaataccaaaaaatgtccttactacaaagactactcaaaatgccccgaaatacaaggctaaaaccctatactactagaatggccaaaatac

SEQ ID NO: 218408 - DNA, 483 bp, Glycine max
actatgaaactaagcttagatttataggaagaaccactatggtgtattggatgtttattttaaacattataaacaagtttgtaatatatagacaattatttgagaaataatagaatatttgttgacatggttttgtctacaccaatggccttggactatgggtggaaataggtcaggtcggcctacaggggcctacgagctggcctacataaagcctgacctgaactggcctatttaattaaaaggttaggctcaggcttttttaaaagcctattaaattaaatagataccaatatataatattattttttggatacaattagtttttttttttaaactatcagactttgattacacattattgttccataacttctattcctataatcaaggactttaattacaatttaagtgtgagtcatgtgtccttttatattcctcattattttgaatgactctcctttcttttaactttcctattac

SEQ ID NO: 218409 - DNA, 1247 bp, Glycine max
  unsure (1)..(1247): unsure at all n locations
gcccgacgcagagcgagnacntaaggcncgactacaccacagatgtatgacacaccancanggcactaaatcactacggctactcctaggcggcgatgatagagtcgcgacgagcggnnacgnnncncnnnactccacgcgcaattgaannttcgtagattcgaattggcatatgtgcaccannccccacannnnnanaacgccgnanacgaggggggcnagcgcgccgaggcgtaaagaccacgagcgaaggcggccgccatgggcatattattattgttcgtagacaagcagcgcacaggccgggagacgcgcncggacgagcgacggacanaacaaccggaccggacaagacagcaatccactcggcgtcaaccaggaggcgagaaagagagagcgaaagggccgcgcggcgggcataggaatacaatgccaggaactcacagcgcacggaacgcgagggaacgccacaacggcggacgacggagaacccgcagaaagcgaagggagggagacaaggacggggggagatcaaagagcccgaacctacggggatacggcctaagaaagaggtaaaagagaggggtggccaaacaagcaacgggtggacgaaagacggaggatatacgcacgaaagcaagaacaagagaaatagcagatgggagaagacgcgacgagaaagcccacaccgagcacgcgagagaatacaaagaaacacaagggggcaggtgtcgctccaagacgagcggctacaaggaggacgaacaccaccgtagtaggagcgccgcgccaacaaaacaggacatacggagggcgctgggacaccgcccgcgggaacaccaggccgcacagagagagacgaggaccgggggggagcaaacaacggccgggggtgagagcaacgaacaaggcgaattgctgacgacccagacgcagaagagaaaaggaggcgacgcaaaagatgctgcacaagacacacagaggggacgggcgaccacagcacgcagatgcggcgagcaggagacacgcgaggcgccaccggggaggcagacgccgagcgcgaagcgaagcgctcgaaacgggcgcgcgcgttaagcgaacgcgagcgcgcgcagaagacgcaatcaagcagagacgcggagagcacgcagacagacaataccgaaacggccggcagctacgcgccacaatgcacacgcgccagagaaggatgcgagaaccagcgagcgcgacacgagacgtagacg

SEQ ID NO: 218410 - DNA, 347 bp, Glycine max
accctataacgcaacggggcggacaaaagcgggcagttaacttgaatggtcattattgtcaatgccgaagggattttgcgctttactatccatgttcacacattattgcagcttggggttacctgaacatgaactactaccaatatataaatgttgtttacatgaatgagcacatcttaaaagcatactccgcacagtgggggcctcttggaaatgaagcgggaattccttcttctgatgaggcatggacactaatccctgacccaactgcaattcgtgcgaaaggtcggccaaaatcaacaaggataaggaatgagaaggattgcctcgaaccatctgaacaccga

SEQ ID NO: 218411 - DNA, 457 bp, Glycine max
tcaacatcagaccactttcagggtgctggaactacttttatttttttgatggggcctatgcacgttgaaagccttgtaggaaagaggtatgcctatgttcgtgtggatgattttctccagacttacctgggtcaactttatcagagagaaattagaaacctttgaagtattcaaagagttgagtctaagacttcaaagagagaaagattgtgtcgtcaacaaaatcacgagtgaccatggcacagagttagaaacaacaggttcactgaattctgcacattctgaaggcatcactcatgagttctctgcggccattacaccacaacagaatggcatagttgagaggaaaaacaagactttgcaagaggctgctatggtcatgctttatgccaaagaacttcctaatatcttctggctgaagccatgaacacagcatgctacatcccaaccgagtccc

SEQ ID NO: 218412 - DNA, 382 bp, Glycine max
tgaaccattttatcaattaacaccagttgagttttattcagaaaattaaaggttatctcttttatcttagggagagtgattctcctaaattcttgagtgattcaagaacaccctggctgtatcaaaggactttcacaacctttgtgtgttgccctcgctggaaagaaggattctttccttcctttcatcttcacccttgttctttcaaaccacaattccaaaaaatccacctctgcccaaaattatctcgtggccataactcccattttacccactcaaattaagtgattcttgagcctaaattgactttcaaaacgagacctttcaccttgttttggaatcacctcatttggagccctgtaccttcagttattgccatttc

SEQ ID NO: 218413 - DNA, 463 bp, Glycine max
agcttacaataaatctattttttttttcctgtctacactctagcatgaaaattcttttttctatttttgagtagggatgaaggaactggtggcctaatactcaatcaataaaaacagaatgggctaagaatgtttggctagaaaatttggagaccggtaaagaatggggcactttgttttaaaaacagtaaaatatattttcaaagttttttttatgattttaattataaatttaacaaatactacattgtaattttgttttcaaatatacataatttcaggtcatgtttaatttaactcaaattaatttcaaagcattaatacaccctttgcactattttctttttcgaagaaaaaaaataaaactagctgtacgaaagagtgattagtgacagagacatggtaacaaaaattggcaagagaaaacaggaatagagattagaaggtgtgaagaaagagtgag

SEQ ID NO: 218414 - DNA, 945 bp, Glycine max
  unsure (1)..(945): unsure at all n locations
cgtccaccgctagaagattttgaatcactatcgaccgatcatcgttangcttagtaaaattagtaacgatgctttataagaaaganggagganngngcgtaattgtttccttgcgcacttggatactcaacttgtactgagcttagtttatatcacccagagagaggaacccttttgtaactaccatggtaagcattcaacaaaagattaccctgaacacttttttacctaaagaaaacttgagggaaccaaaagaaatttaatgggtccgttgcaccttgagaaaagtcaaacctacattcaagctaaaatttttttattggaattaaatttgacgtcataaaactcgtatgtattcaaaatgaagaaattaaaaaatgttggtggtttcttcttaaaatctaattgattataatcaagtcgttagtttcgcaatgtaaatattacaatatccattaaattattatttgtttgggacaatataaaatttaaaaattggttattaacagtgagaaaaattcatatttacgactgaatttttttagcactaaaaagggaaattaagtcacacacaagacccttctgtgcaagttttttttctaaaatccaagcttgtgaaacctaatcgtgcaccaaatgatggtcattaaaggatcaaccttaanaaataaaatcttaattctgaattttcttaatagaaatgaaccaacactgttaatatgggggtgaaaaggaatgaagggacctgtctaaaatccaatttccaatccaacaaaattattgacaagaaaataccgcccccaacttaattatgaaaaactatggtatgggaacttcgactctttataaccaacctgagttaccgtattcgcccttttataatgtacaaaagtttgaaagaaaaatatttagatggcctaaattgaaccacacaaatttattccg

SEQ ID NO: 218415 - DNA, 600 bp, Glycine max
agcttgttacaatccaatattctttggcctaccaagtcacttttgacttcatacaaatcaatcaaaatttgttttttttttttgcacaatgactaactctcaatcgacttacagataaatatacaatctcaacacttagtcttttctctcaaaatgtttaaagtggtttgaaggctttttcaaactatacaaaaatttacaaagagctttttacataaagaatttgaataataatgtgtaggtttgtatctcattcctttaaatgacaagtgtatcctacgccttagtaatattggactaaaagtttgaatattataccctaaaaaccattcttgctaaacttgtctttctcaacaaaaactattgtatatataaagaggaaacaaattgtctctctcaacaaagactattgtatatataaagaggaaacaaatatatgaaatgtgaaaaaaaaaaatgcagattgcaaccccttgtacaataaagaaagagtgccaaaattagaaagatcataaacctataaaaaaagcgtattaatctaacactaatattaaaattaaccatatatttgggagaaaaaattgattaatatatatttta

SEQ ID NO: 218416 - DNA, 255 bp, Glycine max
tgctggaactacttcacatttatttgatggagcctatgcacgttgaaagcctctgaggaaagaggaatgcctatgttgctgtggatgatttctccagatttacctgtgtcaactttatcacacagaaagtccaatcctttgaagtattctacgagatgagtctgagacttcaaagagagaaagattgtgtcttcaagagaatcacgagtgaccatggtagagagtttgaaaacagcatgttcactggatgctgca

SEQ ID NO: 218417 - DNA, 589 bp, Glycine max
agcttatagggagccatgccaatggtaaagtgaaaactattgttataagttaactctatcaatggaagaaaactctcccaacttcccttcttctccaagacacacgccctcaaaaggtcctccaatgactgaatggtccgttcagtttgtccatcaatctaaggatggtaagctaaacttaatctaagcttggttcccaatgctctgttcaagctctcccaaaatctagaggtgaatctaggatctctatcagatactatgctagatggcacaccatgtaatctgacagcctcacatatatacaaggaggtcaacttctccaaggaaaatctgatattaatgggaatgaagtgagcagactttgtcaatctatcaacaataacccagatagaatctaaacctctaggggttctaggtagtcctaccacaaaatccatggaaatactgtcccactttcactggggtatctctaaaggttgtaacttccctgaaagtctctgatggtctatcttagccttctgacagactaggcatgcatacacaaactcactaacctcttcttttatgttgggccaccaaaacatcggct

SEQ ID NO: 218418 - DNA, 967 bp, Glycine max
  unsure (1)..(967): unsure at all n locations
cccacacatctgacctngcgtgacatagctggtctcaatccttcatcccttcgctacgtacatcgacttacgggccagacgaagaatcattgaaactanctacntnaannnnnnnnnnggatgtggacattgctacncacgtgaactctcaagcatgaagacggctggaccagaaataactcacgcggtggcccgactcttttattaaaggaaaagtccacattatttccattgccctaaatagcaccaacgactcattcggacactgtaatgccaaacaaactcacgcacgcgcactatagaggacaactccaaacgtccgaattgttcctcggcatacgtgaagactgagagctcatgaatcatatcacccctactcctgaggccaccccaaacccgcactaaaaagagaacgctccctcaagcgcgagcatactatccggaggcaactctttctagttttcacagaacaatttcacagacgtcctccacctccaagtggatacaaccatcatgagaccctaaacactgggaatggaagaaggaaaaacagtgcccaagaaaagttggaaagggtccctatcataaagctaggagggggctcatgaacaaaagtctttttacctcccctcatctttaatttgctgcgaaatcaggtgattgtcgcctccccaaaattacgccgcccaattattcccaacgccccttgtccttttcacccgatgtctcgtccaccccgaagcacgagaaactctaagatactccaccctcgtgtgcagccccataaccatgcttaacacgcactcgttcagataacaccggcgccgcgtgaccgtacaagcgctacactcctaccacgttaaaactagatcaacccgtcccctcaccacgcacacccgcacttgaatanccatcactaaagcacttgaacggtcatcgcgatcgcagagcaggaaagaaactccac

SEQ ID NO: 218419 - DNA, 1024 bp, Glycine max
  unsure (1)..(1024): unsure at all n locations
acacaacagcgatgccaacacgacaccgcacccaccacgcagccggatacacccttccaaacccatcacaagtcgcaacctatacaccntcacnncnnnnnnnnnncggatggaaccgaggacactcgagaacccccagagncnancngcaagcatggcagcnnggaggaacagcnaaggaaaaccccaaaccagctgggttaagcataagcaccaaaangggaactgggcgccaggcccaacacggtntcccggatacaaggccaaagcccctcaaagggtagggggatcccgaaagaaggcggataaggcatggaaaaaaaaaggcgagtctccacaaggccccccggaaaagaggggccagaacaacaaacccaggttggaaacccaaaaaaaagaaaccatgcgcaacccaaaaaagggggggggggaaaaaccccccggaagttaagaccaaggggaccccacaaacacaaaaagcgcacccctcgagacccactaaagcccgggaaaagaaaagggaaaaaccacaaaacgcgcccccgggagcgccaccaaaaaaaaacgagaacccggggactccccccaaaagagaagcaaacccaaaaataccacatccccataggggccccaacacccgctgaataaacaaaaaagaggaactcggaggggagaaaaacgcacagggcgcggaaaaaaagaacagaaggagcaccccgcggcaaaacacaaaaaaacccccccaaaaaaccagaccccacaccaggaaaaaccccacaggggcgacacacccgtcccacacaaagccggagaaaatagcccgccaacacaaagacgggggaaacagacaacacaccggagagacaaggacacacggccacccaccaaaagaacgacccacacaccaacaagacgcgaaccacacaggcgccgaccaccccggcaactacacacccaccaacgacaaagacacaccgcagacacaacagagaacagacaccaccacgcacacacaccaaaacct

SEQ ID NO: 218420 - DNA, 862 bp, Glycine max
  unsure (1)..(862): unsure at all n locations
aacgcagacgaacaatgancgacacacgcactcgatgccgtccaaatcaatgtgcgcacagaaaacacggggangagcgattatagagntttnttnatnnnnnnnnaaataggcctggcaaacagacannatnagcctgagagtaaaaattctattgggagctaaaaaaaggtggactttattgtttctgcatcagaccggagcaacaccacaagatgtaaaaggtcaatggaaactaacacgacccgtgaacaagcccaagtgccaaactcgatagccacggtcatcaccaataatgtgaagcaatggccccacgccccaaaagccgcttgagtagactacctaaaaaggggcaaggggaaatatacccaagggaataaaaaaaactacctgtactggcggtaataaaggctgaaaacacttcatagatgcagaaaggaagagaactgaagttttcattctaagggagtttttaatcgtcaaggaaggaaatattacacctctagtctcaaaggactcagtgcattgctttctgccgaaatcgagcaccaacgcccaccagaatattggaaaattggctacaacagccacataagacaccaagcagcgggaaagcaagaggtaaaagaaccccctgaagaaagcttccagaccgaataccttcacggctagaaaccaagcacggcagggaaacacccacccaagcggatacgggggatctaagaagaaccaacgagttaagccaaagacccgccacaacttataaaacgtaaagaagcagactagaaagcgcagaacgactaccagactcaccggagagccgcagctaaggaccacacctcgaaccatagagccagcaccg

SEQ ID NO: 218421 - DNA, 414 bp, Glycine max
agctttgagccaattctaacgacaataactttttacttggatgtccgaatgagtctagtaatatatcgacacgctcgaaattgaatgttgaagctctaaacctattcaaacaacaataacgttttactcggatgtccgattcagtgacgtaatatattgggatgctcgaaattgaatgttgaacctctgagccaattcaaacgacaataactttttactcggatgtctgattgagttccctcatatatcgagacgctcgaaattgaattttgaacctctgagccaatttaaacgaaaataacgttttactcgaatgtctgattgagtccccgaatatattgaggacgctcgaaattgaatgttgaaactctgagccaattcatacgacaattactttttactcggatgattgat

SEQ ID NO: 218422 - DNA, 328 bp, Glycine max
tccccattcgattccgagccgttcgttatattaccagactctattttacattcgagtaaaaagttattgtcgatgaattggcttacaacttaaacattcaactttgagcgtcccggtttattacagcgactcaaatcggacatcttgtgttggaacagatatatggttgttttggaattggtctcagaggtatcaacattccttttggagcgtcccgatatattacaggtactcaatcatacattgcgaagaaaaagttattgtcgcttcgaactggcttagatggtcaacattcaattctgagcgtctgcgtattttatgggaccca

SEQ ID NO: 218423 - DNA, 446 bp, Glycine max
agcttttaaaacaaaaaagttatatataaaaaataaacagaactaagataaaaaaaaaaacaaaaatctaataattctatctttttggtccctaaacttttttcacacttctgcttttaatgcctaatctaaattttgaccaagaaaatccctgaactccattaccacttttagaccttgtcaaataacattaattgatggcataatagcgacattgataatccaatgacttgtcacatcatcaaggagtttggcgggataatcacgtgtaattaatataaaaaaaaattgtaaactgtgtttttaatccctcatcaactagtctacgtcacatatctaagtggtatggaaattcatgaaactacacacaaagagtccagtttggactaaattggatttgttttcaaatttagattcaaaacacaattcaatctgataaaaaaaaa

SEQ ID NO: 218424 - DNA, 533 bp, Glycine max
ttaagagccatcattggatactcgtagaataaaaataacttttgtttgaggagagattaccatatgaaagaaactcacactaaagaagagattgttggagtacaagtgtaatgtgaagtttcacattgggtagaaatgagaaagatgaataccatataagtgaaagaaagaccataaacctaagccttaaggttgagttaaagtttgatgtcaagttcacttatatggttgttcatgactcattggtgtaaatttctccattgttaaccctcttggatttaacaaccaatgtatatgtcacatctataagtaattcttgaatttctcatattttatacatgtaaaaaaggtgataaagttgcaaccaaacacttctttttatgtgttttgtcctgcattgattatgagtgtaagtattaaaatttacattaacaatggctaaactaatgtattggttagacagatgtgtgtcaagtgaccttatcgatcttgagcatgaagttgaaacattggcgctatgaggagggtttatg

SEQ ID NO: 218425 - DNA, 303 bp, Glycine max
agcttgagatgaggaagtgttgaagggtgaatcttcctgcttttattggtgaccacagagtggtacctggagatatgtcgcgggggtcaagaaaccttggggacgtcaggtggggtgctattgcccaaaaccaaacttgaccaatcccgacccaacccgggcataatcggtcagtgaaaacctgtgatgtacctaaacaggcgagctcctggccggcaacaatttaaaggaacaaagacccccaagcaaggaggcttgtggtggctggccaccttggaactttgattgatatgtgggttatgg

SEQ ID NO: 218426 - DNA, 963 bp, Glycine max
  unsure (1)..(963): unsure at all n locations
ccaggccagatgttgacgaaggatctcgcctaataattgagcatgattgtctcagaggatgtcaacatgaggatcatgttgttctnnnnnnncttgtggacctcgctttagtgacatattaatactcagcctctatataagctgaaccattttattcataaaaacatattgattgtatatatcagaaaaattacaagtctattcttcttttattactaagcgaggagcgaattgttcccttaatttcctggagtggactccaagcaacaccccccggactgtatttataaggagctttcacaacccttctgtgcgtgtggaccctgccttggaagagaggggacgtccttttcctttccacatccatcatcccaaccccttggtttctttttcgacacgcacacatttcccagaagaaatccatccctctgggctccaaaattaatcttcgcggaccataaactccccatgttacacactcacattaagcgattcttgagcctaaattgaattttcaaaacgagagcctttaccctcggttttggaatcaccttcatttggaggcccttgaagcttctcgttattggcattttctataatttctgggccagccaccacctaaccctacgttttaccactcccattcattcattttatggccaaaaccaccttattaagacaccaccaaattaccaccctattttcgatccttcctttataatttaccgcatttccatacagtttaattctaaccaacctaattcgccctttggcctggaggtgcaaatatttgggggacaagccgccggtctaggattcaccttcgtctgttggaattccgaagatctcggtctataatctgctcgccgcatcttcaccggctatctctcacacacgcacgccatgttcctcttataaccttccgtacgattatggagccggcgacgacactgcacgctaccg

SEQ ID NO: 218427 - DNA, 340 bp, Glycine max
tgctctaaaattacatttgatgtttgtatttatgggaggaagttatatgccatttttgctttaagagtaatggcccactaaaactaactttccaaatgtttgccttcgcaggaatggccccgaagaagcttgcctcaaagaggtccaggaaggacaaggcggccgaaggaactaattccgccccggagtacgacagtcaccgctttaggagcgctgtacaccagcagcgcttcaaaaccatcaagggatggtcggttttccgggagcgacgccgccagctcaaggaccacgaatatactgattttcaagaggaaataaggcgccggcggtgggcaccact

SEQ ID NO: 218428 - DNA, 995 bp, Glycine max
  unsure (1)..(995): unsure at all n locations
gcacgcacccgtatcgcgcttaacttgttactctacactcaccgctatctgccgtgctagctacgctcagcgcgcagatattccggtggtagtannaaaannnnaagnacccttgtgagccctttgctnagcggaacaatgatatcgaagcctggcggattgggcctctcgcaacgaaaggtttttatcggctttttataaaggccatcttgttcactctggctgggccaacgataaaaaccggggtcattaagatgggtgggataaagcaaaacctgttgtgacggccttcccctacagtcctggttccccccaccccacaatgttgttgactcagcccatgacaaaaccttctcctttaccaccggcccattaatccaccaacgcgctcttcccttaaatctatataccataggcctaccttctcgacctttctacgacaaaccactccctttacgtgatccataaccccaccccgatcaatggactttttgagctttcaaatgacctcaaagattctacccctcattactaagtggcgccaatgccgggccgtggtccccctattcttacttggataatccaacggtgtgcccataacacccatcccacagggtcatcttaaccctttattttttcccgatgatatacaaccccccacgccaccgcgggctgttttgattgggagaatcccgcggggcgttcccttaatgcattggtaggggccctcaatcgtaatgtgcgaaggtcttcatatgacgcggccggctgtgaatttgtggaggaataccgtgtaaacccccgacattgtcgcagaaagcgccccacttggggcgactttgcaaaacgcgtgcgtcaaagggctcttatggatcatcgcggctgttgaaacttctcccacagtttggtccaagcccttcggttctatttgcacaagctccgcctacggccgatcaancacgaatgtacttcccnctngtcgcgtagcggacgcg

SEQ ID NO: 218429 - DNA, 279 bp, Glycine max
aacgaatctattagttatttaaaactgtaatattaatgccaggtcagaaaaccaccctttatcttatttaattttcaaccttttgttcgtgtcaaaagactaaaatatgtaatatgtaatgattatcacatttaaagaggtaatcaataaatagcaaattcaaacaaaaaataaatagtactaaaacttataattaacccattatattacttaagaaactaaattaataataatcaaatttagctttttttggtatatcaaaggacccaattaatccaa

SEQ ID NO: 218430 - DNA, 509 bp, Glycine max
aaactttcctttcttattaatcactttgaatgttatatcacaaaataaattatatttaaacatttaaggcaaagctattccgagtaatgggagagttgaccttttggtatattcttcaaactacaaaatatgtttggaacaaagaaatcttttcttgaacttggatataaatatagcactaaggaatataccaaatctgagatacttctcaatactagtttgtaaaagctaaatttctaacatactccatattttaatttctagttttcagcaaggtatttttgttgcttttaaagtgtaaatcggtttgaaaatctttttaatatttagttctaatcaagtttattattagatattattcaatcaaaactaattaaacacacaacacaaacttgagaagcaaggaaaggatattgaacatgagaatttttttattgattcacctataaccctgggctatacattcagtcattacaacttaattataggatcttctacgtggaaaaaaa

SEQ ID NO: 218431 - DNA, 1003 bp, Glycine max
  unsure (1)..(1003): unsure at all n locations
cactgtatccgcaacataatgctcggtacactctcccctcctattcctcggactcatattcgtcatcggtttanttcgccatacttacctatcagaccgtcccgcgannnnncctgatttgagttcatngcaattccaancccgggatccctaaaaccaaccggaggcttgcaagctgggaagtggaaaaacaactcctttgatcaaccggaagacccccctgaacccctgccttgcctgaacaaaattcctttccagaatcctcccaaccgctaaaccccgtggagccctccttaaaggaagacctcttgggtacccggcattggagcctcgccttaaccagaaaacttcaccttttaacactctttgtaaaaaaaaccccccttttttccccgtaaattggagaagaaaattgaccattaaatttcataccacaagggttctacctgagccccagaataaaaacccaggccaaaatttattttcaactcccaccccaaagaaaacctatattggcgggaaaaataaaacatttttgaaaaaaatatcctttacaaaaaagttgtcgctttagaaaacctaacaaaacaccccccaaaattacactgttgctggtccgcccccccccaaaaaagaacaccctctggtctccagggagaaaaaaaacagcggggggttctcaagcggggtggccgcccaaaaatcacccccccgaaaagaatggcggacaagcctgcatcacccctttctccaaaaaagacggcttctttaaaaggcaaccttcctttctatggccgcccccccactcaacctagccgaaccgggcgttgtcatacatggcgggatcatcacaccccccacatcaccctgccggatcaccacataactcatgccctcacccactccctcgccgctcaccaccctaccgattctcacacaaccagtgctccgccactccctcattggcaccatcatctcctcacacctctacatcgtacttccg

SEQ ID NO: 218432 - DNA, 957 bp, Glycine max
  unsure (1)..(957): unsure at all n locations
ccacagcacacagcntacgccgcacatgccanactaccactcaacagcctatttcctagcgacatgaccaaatgactaaactattcgtgacactctacacataataaannannaanttattgtgactctcctgancancgcgagcaccataacgacccaggcttctacaaaaagaaggctcccgcaacaagcccttatttcgaatatgggaacactaacacaagaagccctcccatccttatagggtgaaaggagtgacacccttctcggagaaacacccgaatggccatcatattataatccgagggcctggaataccatgaatacctttggcaaggcccatacgaaaaattgggctcttatttaaccccactccacctcaaaagatacctccatcaaaagccgttttatcattcggaacagcctttcccctaaaaaaccctcactagcccaaggtctggtgacggatcaaaaactcggttccaatccaccctaaatgcgagaacctatgaccctctgcgctatggaagggggaacatttaccggtttcaaatattaaaagacttggaaccgcgggcaccccttctagtccaccttgagggacgcccaacggccaagaagaccggatctagccccccctccctgctcttattgtccaaaaacactgcgaaaaaaccttcacaaacgccccaaaatctcccccctcctaacatattcgcccctcgcggaaaattataaaagggctctttatacaggtgtgcgcgtcggatgaaaattcagaacccactcacgcgcgtttctttagtaacacaaaaacgacaaatctctctctacatccatgcggcaaggagccccaccctctatcccttataatatccgccgcgaaccagccatcataccgcggctccgcccgcgagttcgcctccaattactcacaccacacccgcactgtccacg

SEQ ID NO: 218433 - DNA, 492 bp, Glycine max
agcctttaacaagtttcttcacaaataactatcatgaagcataaaactagcaagactacccatcatatctccccaaaccccatacccacgaaaatcaaaggagaaagaagtccacccaaacctgaaatttcgaagtcccactcgtagccacgcacttcacgactccaaaaacgccatcctttcacgatttggggaagaaatgatggccaaaggttggagctttgttggggtttcaatggagaatggaggagaaggaaaaagcaacgtgaggaagagggagagcttctgaattttctgctttggctgagtgaggagagagaaaagctttttggttttaaataaaaagggttttccctttttctattattttattcaagctctgccacatgtccctatttgagtggagcaaaagggcccacttttcctttttactgtgacccacacctcgcccacaaagtgaaaaaaatctgacctttgaaaccctaaaatcct

SEQ ID NO: 218434 - DNA, 305 bp, Glycine max
aaaaaagggagataaggtgaacttttagttgtgtctcataaaactctcatttattaaatttacaaaaaagtgttggacatgcttgtatttatagactatgtatctgtctttgagaagctttcttaagaaaactttcttgagaaacttttttgagaaaactttcttgagaaggtaaagcttaagtacacacacccctcttataactaagttcaccttcttggaaaggtttcctaagaagaatcttaaagaagttagagcctaacttctcatacctctctaatagctaagctcaccttcttgagatg

SEQ ID NO: 218435 - DNA, 516 bp, Glycine max
agcttcaagaattatggcctcatcaaaatacttgtttcccgtaggaaattctataaataaacctcccatctttaatggagtgggttaccactactggaaaacccgcatgcaaatctttatagaggcaatagatttaaatatttgggaagccatagaacaaggaccttatgttccctctataataaccggaagtgcaacaatagaaaaacctaaaacaaattggactgaggaagaaagaagattagtacaatataatttaaaggccaaaaatattattacatctgccttaggtatagatgaatactttatggtttcaaattgtaaaagtgctaaggatatgtgggatacactacaagtaacacatgaaggcacaacagatgttaaaagatctaggataaacactttaacgcgtgagtatgaactttttaagatgaaatgtaatgaaaatatacaagacatgcaaaagagggtcacacacataggtaatcatcttgcatctttaagaaaaaccttttc

SEQ ID NO: 218436 - DNA, 1125 bp, Glycine max
  unsure (1)..(1125): unsure at all n locations
gccacctcgccacacacagcaagatcaagacactctgctaagtagacaccggtacgagacaccacatgacaaacgatacaacaccannnaanactcacangaacgaacanncnaacnaannnnnnggaggcttgagtcccatgctatatacgcgacacnantnnnaannacacagccgggatggagcgacactgaaacacagtaataggagcgcaggaaaatgtattttctatnnccnccnccgcccggacccacacgagggaaaaagataccaacccaaacgccccaagcgaccagcgcgaaaagagcgagcgaagacagcgctgctcacgtatcagaacaacaccatgatggacgaccaactccccgagccatgcaacaggggacacccatagaacatccctcaaaaacccttccacagaaaacaatacgcggaaccacccgagaagcgcaatgcacgacacccgacgggaaacaccaagacacaaaaagagacaaatgagtaccggggccagaacagtcgacaaagcgtaataagcaatgcaggaccaacgaccgtgatagtacaggcaggaccaaggggacgaacgcacataccgaagatgccgccaagacgaacaataccgggaacgacacatgccggcgaacgacgacggggactcacgacggcgagaacaacgaacatgtgcgaaacgccacgcgggacaccgaccgtgaataataccgccgacaaagacaacgagagccgcatgggattgaacaagacaacgagaacaatgcaccgtgagagagcaaacaaaagaactgccagagataggagaagacgaacgagacgatcgcgcggatcgtacacacgacgacacacgatcactgaccaacgcgctacacaccgcacgcctgcgcgtgaacatagcaagagataggacattgaacgagggagcgggatcaaggcgaagacgcgacagacgacacacggacagaagacgacgatgagcgctcgccaacggcgataaacgcacgacacgagagagcaccgacagagacgacgacgcccacgagaaggcaaagaccgagagaacagaacgacgaggggagaacaaccaggcacgacgatgacgcccggcg

SEQ ID NO: 218437 - DNA, 1030 bp, Glycine max
  unsure (1)..(1030): unsure at all n locations
cgccacatctcttcatggtaggtcaccggaataccttgtgttacactatccaantactactactgttgtagttctgccacaccccaacnaatgcnttaatnaggacccncgatgagcctgtgtccatccgctatacacaaccccgggactgcaagaaagcaagcttatgaaggcctttatgaaaaaaatactattactggtttcttttgcttagaaagaactggacctggcgttgcaactattattcctattcccgaacaaatacaattctttacccacgaggagggatactcatagaaggaaactccctctagggtaaggaaagttgagacaagtttttgcttggacacttcaaccccttaccctatcaagggggagaaatgggttccttcccggatgggcactaacaattttcttgaaccttgctgatccaacgagacagaaaacttgacccgctaaatttctcccagtgtgagattagccttccttttcccctcttaagctttacctaagatcgagacggcagttttttattcttttccagaatgaaggaaaaaaccctacccccataacaaaatcattatttaccagaggcttccgcttcacatttatgaaggtttgttgggggtttacatctcactggaccatataaaggtatctctttcccacttaaggagaaaggcgaaaaacccattattcttctaggggagatccaacttggactccatgttccaggacattggataatcatgccagcctgagtgaaccaaaagcgtcctttgacataaaagagtgttattgtccggagacatacctaatcgcgtgaagggaaacggtcccacataaaggaaatccggagaatgtcttctttcttctcaggagtttaattttcacatagcaccttttggacacctcctggattaagggctctgagggacttttggccacgctattcgtttaacggacaacatgaacccaccctttggccctattaacccccacagaaggtctaagcctgggagtgcctcca

SEQ ID NO: 218438 - DNA, 793 bp, Glycine max
tgatcgggaccaattgaacgtcatgggctgacatgcggatctttatcttatcctggaaccgactagtggccgaccccggagaagaaaaaaagacgacgcccggccttccaccaccctgaaccttaaatttataacgcgccgattgaaacaacgtccctcgctcttgcaacaccaattattacttgcaatttgacctcccacaaagacctcctcaaactagccctacaaactggaagatttcaacctcgaacttttcccaccaaaaaccatccggacccttcttaaaacaaattggcgcctcagcgtaaaaaacacaaccgcacaatgaaacctttcacaaattgggaccctttcacgctcacacgtttatccaacatttaagcaatcataccttcactgacaaagggagccacgggcaatctgccacttcacaagcgattcaaagagaaccttcttctaccaccacccaccgtaacatcggaaaatatatccaacttcatcacaaccttaaaagccacgggaaacaggaacctctaccccaacttcggaggctggagcaacaaaaaaaggtgcccacgcgccgcgaaacaaaagaaaccccaaaaatatacctgcacaaaacaatcccgcaaacaacatccctggcccaccgctcaaaccccaaaaaagccccaccacccgaatactggggggcgtcccccgcttaccctcaccgcccaacacagaaccgcacacgcatccgcccgacacggactccttacgggcgacaacagcgcacaccccatagaattcc

SEQ ID NO: 218439 - DNA, 1768 bp, Glycine max
  unsure (1)..(1768): unsure at all n locations
accatgtcgtcgtncaaactccagtntagccgtngcnagcaaaanangcgntcgctgtgagccaccnagtnncnnttcctnacntacatctnagtcagcacgtgcttcttanntaatcantnnaccgtaaacgntnanntaaaanntcccctanattattanntacatcaaatannntccgnnncccgannttganantancaaattacnntncttcatnntantannacgggcnaaaaannannnntnnnnnannnnnnnnnnnnnnnnnnnaaatcaggannnnnattaggtatntgnnanccccnacttttcgcccanngnnaannnnccccnnncnnaagnnnagnnnnncngnnacnnncctagganncagnggggncnantctgngccannangggccncntnntgggcnacannaaccccccnancannataggggcnctnntccacnnccnancanntnannatatnaangnaaagcagggaagnngactanaanattttctnntcntnataaatgcnntncggcgtncnntncncaactaaaatnataannaaccccctgtccccctgcgcgtctgccttangaaaaatacganccntcaactnattaaacangaacaaananagcgtcntggtcgtctnttcccaacgagtgtcnccacatncntctggangtaggcccanaaaccnctccgagnatgggggtgcgacnacaaaactatggataggaagaaaaacctcattagcttggcttctacacaggaaatnacaantcaaaccngaaaacagaaaagnangatctgtcntnntgtgtctttcttaaagaacatatacccatacgggaaaaggaacaacacaaagtcgggtnctctntnctctggggcgggtngaaaacatncgctcaacatactcncccctccttctccttcttctggtnaggaaggnatnaananaantncnnccnacttttctaaaaacccacaangnagaatngnntggcgtcntcgggcaccnnctctcggtaaaatncncatccatgccaaaaataggtgntaggcnncctcatcaaacagaacnanataccccncntntnntntggggggtgncgtcttataaaaatacacctccccacatntcntaaccaaaatacgtcacaagtggtggcggcctctnttgggcgcccccccactatnagagacncagttcnntctttaaccanaagaggtgttgcccagagaaacctctntcgcgtataacctcctctgcccaatgggaggntattacactantncaattccactgttcgagtggngccacttncataacccattataaattttgaactcttttaacaacctcgggggctttgatcaaaaaagtttcagggatcatttttcaacttccaggtattataagtcacgattcttggcaaaatatacaattaataatcacctatgaaatagcttggaattttcttaactcctaggaagaccccctttaaagggggcatccaacattctccttgggggatcatgtcggttaaaccttgctggttcaacatatttccatgagattagaggaatcaacctgatccaccggattatcaaccacacgtttggggaaagcccaaccaggggtattcatacatccctttgaacttgaaggggtgaaataacagccaccttttacttggagtggaaggtggagatcctaataaacaatttccaaacccaaggccctcaatggacgcctcccccggcc

SEQ ID NO: 218440 - DNA, 195 bp, Glycine max
ccaaacttatgaaaagatttgataatcttaaacaccaagtataatggtgttataatggtacagtgatgcacatttgtgatgcgtggtttgggctattaatttattggtgctgagaatattatattggtgaccagataattatattaattaatgaatgtcttgagttgtgttggttgatttcttgatgatgaaatg

SEQ ID NO: 218441 - DNA, 550 bp, Glycine max
cttgttaaacactatttgtttctcatgaagggagcacaaactctttaagagttatagctttagtagtaagagtatttgcatattagtctggagatggaacgcgacacactaacatgcttttatttaagacctttttgctcataaaaaagggcccaatttcatatgctttgtcctggagtgccaaacaagattgtgtgacagattgtactaacggtgcaatagtagatctttggagtctgaaaaaactcttaagagattgaatccataggatttcagatgcagtactcagcctcaattgtggactatgccgctaaattttgtttcttgagccactataaaattaaattcgggttaagatatatacaagcccctaaagaggaccttttatcaatcatctattaatgaggcctagtttgcatcacataatgcaataagagatggctgttaagtatgaataagttgaattaatagaccatcggtaacaatatccttaaggtatttggaaattctcttactatttttgagtgcttctcccatctctgggacaaaa

SEQ ID NO: 218442 - DNA, 404 bp, Glycine max
agcttttgagcaaattaaatggtcataacttcttactcggaggtccgattgaggcgcataatatattgagacgcttcaaattgaaaaatggaagctcttgaaaaaatcaaatgggcataacttgtgacttcggagtcgaattcacgcccataatatatcgagacgctccaaattgaacaatggaagctcttgaacaattcaaatgggcataacttttaactcggaaggtccgattgaggcgcataatatatcgaaacgcctcaaattgaacaatggaagcttttgagctatacaaatggttattacttttcactcggaaatccgattcaggcacataatatatccaaacgctccaaattgaacaccggaagctttttgaacaattcaaatggtcataactttta

SEQ ID NO: 218443 - DNA, 767 bp, Glycine max
tgatggtaacattggagaggttaatgaaacaacgaaatgattctcttcatgagaagttggatcaaatggagaatagaaaccatattgaaattgctcaaaagcttccattgttcaattttaacgtctagatatttatgccccccaatcggacctccgagttaaaggtttgaccttttgaaatgctaaaaacctccctttgtcaatttctcaccgtgtcgatttatttatgacctcgaattgacccttgcgagtgcaaacttatgaccatttgaatggcttaaaacctccaattgtccattattagccgtcacatattatattccacttaattcggcccctcgatgtgacacattttgaccttttgaaatgtcccaaggcttccctatgttaattttcgcccctcgagattataagtcccctcatcctctccccccgggtaaaagtcttatgaccttttgatctgctcaaaaatcctctcttcgaaattatcaggcggccacttcatatctcccccctgagttcccactacgtggaaactttcatccaccatatgatgtcgtgacgatttcctaccgctattttacggtgctattaatttcatctgcgctgtaagcgactctgcgaataaggaggttgtgctcatgatctcctcacatacttgatttgttaatcacatcgtcgtatattgatcgccattatctgctctagatgtcgatacgtattctctgtatcgctactagcactcatacgtatatcatcctgcttcc

SEQ ID NO: 218444 - DNA, 932 bp, Glycine max
tccgcttcaacctgtttgaatcctcttttgccttctacctagtctttcatatctaatccatctcctattatgcaaccccgccccaccgtgatttgaatccatcccattcccaggcaccctaaagacaaccgcagcctgccagctttatggggaaaccaaagggaatcaaaagtgtttttgatgataccatgatggatacaaaacattaataccaaggggatgaccaaacgctcaaagaaccaatcaaaaaccacttaagggaaataaagaacaattcaagaaccacctcaagggaatcaagaacaattcaagaattcaagataggaatcaagaagaattccagactcaagaaaaaaatttagaagtcagaatcaagattcaagggttaagaatctcaaaatccagatcagattcaagactcaagattcaaaaatcaagagaaggcttaatcaagaaagtataaaagttttttctcaaaaattgagaaccacatgatttttttcaaaacaagttaaccaaagaatttttactctctgggaaatccaatacccaaattgtggcaatcaataacaagctacaaaaatggttttaaaaaagttttcaaaatgacttaccaccgtcccacataatttcaaaaaacttggatataaatttcaaggtcttgtcgctcatactactccaagtacgttcaactgacattaattttattgcaatgatccttagctaataaccctactactgatacccctctacaaatactactcatcgtataacgtattctaacctacccctcttcgtcagtactccgcatcttacacatgcctctctacatcaacattccgacttctactcagaccgcactacaatcatcacaactcaacaccactctactattccatatacagcccgtcattaaccccgtctacactccg

SEQ ID NO: 218445 - DNA, 538 bp, Glycine max
ttaaaatttgaattaaaacgttcaataactgctagttaatcgatttaccatcccaggtgtaatcaattacacaatttaaaatttgaattcaaatttctaatagctgttttaaatagtttcaactgctggtaattgattacaatacttatgtaatcaattacatgctttcaaaagtattcaaaatcattttaaaagcatttcaggaagcattttggccactagtaatcgattacatcctctggtaatcgattaccagagagtaaatctcttgtaaaaacattttaacttatattctttggccaaacctcttgttgtctcaacttggaattcccttcctaagtctctagagattatcttgatcatatatcttgaatttcttggattcttgtgttgaattaaacttgagaagcgcagcatgatcctcttgaattaaacttgagaagcacatggtccttttgcatcatcaaaaacataaaatggcctttgtttctacaaaattatctttgatttggtatatagagctcttgcgttggacaaa

SEQ ID NO: 218446 - DNA, 598 bp, Glycine max
cttgaatcagttgaacatttcccaacaagttcataacccaacagcttatcaagtgcttcgggtgaaacatttaaatcaatatcaccatccttgtgaaaagaaaataattgtatcacacaaaccaaaaataacatatcaaaaataaaaagttacttttgaatccaaaaacggacttcaattttaagcttattaactgcatcagctgattgaccaattaattcactgcattcacggtcccaaagcaggaattttgtgctttcatctccgtggttgaacatcacctcaagcctatacctgctaccatatgtaccaatagtgtaaaaaatataaaggtatgaagaatacacaacattttaaaagatcgcaatgacctaagcacaacttccttattgtattttccgcatgcacatgtgaagggcgccatctctggatcacttctttttatgaaactgaatgcaagttgtataacaccatgaatgattgtccataacaatcatagtaattgggccaacagttacacaaacaatttcttgggtgaaacaacatacacttcaaatgctgaaaaaaacttggcttggggaagggtaaagaattaaaa

SEQ ID NO: 218447 - DNA, 252 bp, Glycine max
aataaccatgagctcttgattgcatttccggaacatacttacattcaattttgcgatcatgcatgtagcatgccattccttcatagagtacacaggaggctaacttttcattttcaaccacctattctcaaacaagtatcagcggtgccagcccctaattaacaagctttgaatatggaaaacctattctagtatacatgttccattttgcctatgtatgcagcccccaatttatgcacaaaagggtaatta

SEQ ID NO: 218448 - DNA, 556 bp, Glycine max
  unsure (1)..(556): unsure at all n locations
agcttgtataaccatgtctagatatgaagttattgaaacaatcaagaatgttcttttaatgaatattggggctcttataccaatattgagaaggaaataataacattatattctctaacaccttttgacacacttttttatttggtgaaattgatgtaagtctcactaaatgagactcatttcttatttggcgcatctccttttaaactagtggaattcaaataaattttaaccaatatcagaagagagtctattagaaagagaattataattatgttacacgaggctgaagtgccctgaatagcagactgataaaagacaagaaattttgtttgcaggtacttactccttcgtactcactccaaggaggctttccccgtgaacatttcaataattgtacaacccanactcccaatattaacagcgaaagccaggtcagagctgttatctttttgcacaaccgcttgaaaaagctgcatgtatgaggaataagtgtctatagagaacgcatgagacatcgcggagttatagagttataaaccttaatagatatacc

SEQ ID NO: 218449 - DNA, 481 bp, Glycine max
actagcaggggtggcttacacaaagcccccaaatccttgttgtcttacaaaaagcctaagattgaagtcctagatgaagatgatgatgaacactttaccgtaccaaaatttggataaagcacatggtcatgtaaacaattgcctgaatcagtaggcagtaggttgacgagttggatatgcatactaagtgcagatgttaatgaactcttcaatgtgcctggtctagctgaagctcaagaccatgaggactattgcatgaatcttgtaattgatgagctgtatatgcatacttctcttaggacagtaagtaatgaagtatgttaactagcttggggagttgataaatatctcattttaagagctatgaatggtttgatttttagaatatagcataaattaaaaccttagggggattaaattttccttggtctttgggatcatcactgtttacatcctataagggctcacaccacacaacaat

SEQ ID NO: 218450 - DNA, 906 bp, Glycine max
  unsure (1)..(906): unsure at all n locations
ccccgtcactccatcaagttccgccactgtactcttgtatctttctagtcgatcgtcgcaggattttcnttcnacnnnnnnnncctgctgacccctgtacctcggaactataaattctcacgctccttggtcattctatactttttggacttggtatattgtctttagtcacacaaaccccttcaaggccgaggggcctaactcacttatgctgaattcttcacaacgacgccttataagtgtacaaatcggctgtccccatcctacctgctcatattcaaacccgcatgacaccgcttttcttcaatatgcaaaaatttgaatacatgctccggagtttacaaagacctaattcccctttgatccaaccaccataattgacaccctctataaaaaaaagatcaattacactggcttcgccaaaataaaatgcccaacatctgggcccgaaaaaaaaaccaactggacaaccaatagccctctggtggaaaccccaagccccccaaatacctggcaacctatcccaatattcatttctcccccaatttgcccactcaaaacggccctccggacccaccaccttgccaatgtttatcccgagaaatatttttgggcccctcaaaacaaacaccggaatacaatcatttttgcctgcgtccaaatgcgatcaaaaatcgccgggaaatttactttggcacaaacggcactatggctgaaacacctccccataacaccccaatctggtacgccctctcaccatagaggggcccccacaccaaggaagattggtggacccttttttttttttgaaacaccccggttacgccccactctgttctgggaatagaatatagtacacacacctaactataactctcacacacctctctccctacaacgacaccg

SEQ ID NO: 218451 - DNA, 936 bp, Glycine max
  unsure (1)..(936): unsure at all n locations
cgcatgacgctcgaaacgaagcgtatctaaactaaaccatgcttcatctaggacgtgaactttgctagaaataacatcgcggaatatacagcccacnaanacncnacgtgaacctgaatgcaatccntagcacaacccccggaacctataagtggacccgcaagcatgccaagctaacccatagggaccttcccttcgggtgtatgaaaaaagatatgaactgggacactgtcaagtttttaaaaagacaaacaacgggatacaaatcactttagccggtggttattgaataaatatctgaatttaagtcccaatgggctctagaactcatttaacaggaaggatataacctttttttttctttttagcagctatgcataggtaccataaaaaatgattacctgggtatgagcaacgaccctgcaacaatcaaaaaaccccttaatgaactttttttttaaataggagcaattaaagaaagctacttttctactaaaaagcttatttaaatcaggggttaaaacttggataagttaaacaaacttaaggctcatatgaaattataattagcctaggagggtattggatcaggatattaacaagtttaattgattttttttagtcaattagagtttaaatgaaataaaaaaatcctaaggaaatcaaaaatactttaaaattttttaagaggtgcacaaaaaactaacattaatgcagtaaggatcttaaaaaatttaaaaaaaaagccttttaaaagaggggtggggggaacctgtgcggaagcccacacccctaaaagtggaccccccgcccagcttaaaagaacgccggagaaaagtacgacccgaaccgattccgtacggatacgggggaaacacttcccacgcagatagaaagtccacttcggtctcgatccccacacgggccggataaccg

SEQ ID NO: 218452 - DNA, 468 bp, Glycine max
  unsure (1)..(468): unsure at all n locations
ntgacagtagtatataataaaactcagtcatgtctacatttatttcccactgaaaaaaaaaaatctggtctcattgctaaaagaattcatctatatttaaccttttgatttctttatccagtgcatagctttattaatgatgcttacaagttctacaaatctatcttaaacgatctaactcatttgtgttaaaaatggcaatggggtaaactcaactaaagtcgtataatatctatgaaagcaagtgtaataaaatactacatagttcacaaaagtaatcccttgggttcaacgtgcaagagtttacgaaacttcaccataatcattttcttcctgcaaaattcctttctctttttgttcccattcccatcgaattcttcaatgcaagggattttttttccgatgtgcgagaaactgaaattagatcaatttgattggactcttatgtattcttaaatgactaaaaat

SEQ ID NO: 218453 - DNA, 435 bp, Glycine max
ctgccaacttattcaaaaaaaagtttatttttatttttttcctaatgaacatggggctaacctcggggtcaaactaatgccggtcatgtctttttggttgccagggcaaatggatatttctttaattcagggttaagaatattgattttcaacgcagaacaaggatactccacactccctttttgttgttccaaaccaatttgtttgattaagtgaacttgtaattttaccgagaaatgttttactttttcttctttcataattttggatggaaaaaaatattccgaatgtaattaccattcagtaatgaataacagctttgccaacgccagctgggtacacccacatttttctgcatgcttggatccggtgactccgttaaatacactctgtacttgaattgaaataattccctggggagaatacctttaaacc

SEQ ID NO: 218454 - DNA, 498 bp, Glycine max
tgcatccataatacgtcaccatcgattgggccatacttaattttaatatttgatggacatgacgacgaagatgtcatagatactgcaaaataatctataactccataaattcacaagataatttataccttatttttccattatataaataaaacaagacacatttataaaaacgttattaaatatatataaataaaattgtaataaataacacaatatatacatttgaatttatatatttccacaacaaaatatattatacaaataatcaattttatatatattctgcaaataaattaaaatacatgtgaagacaaacatatatattaaaatccaaacaaatattaaagtgtaaaaaataatttaaaaaatatatatacaaaaataataataatgtacaatgtaccatatattttaaaacggaaattacctaaaataaaaaatatcaacctacaaactaaaactaccaccaccccttcatatatatatatatatata

SEQ ID NO: 218455 - DNA, 221 bp, Glycine max
aaaatgatttggacctcacaagcaaatatacccacatagaggcttgaatcatcttctggctagtgaaaactcacaacccttctgtgatgtaacacttcttgcactggatggttacctgagtgttgttgaggacaaaacaaatcttgacgcttgtcagagaaatgtactcctactgaagcaagcaagaaaagttctgaattttaaaaagttttttttttctt

SEQ ID NO: 218456 - DNA, 468 bp, Glycine max
tggaagatatgttcatgtagcatgtctagagaaggccaatgcatgttacttctttaccagactcttctctagataaagagaagcatattcaagagtcatcatggcatgacatggtggggggaaaactcattgtctcatatagtcttatacccaatgattctatctagtcatccaattatcacattagatatattatacaagagtgagaattacttgtacgtagttaactcgttggccaaatgaactacatatagcaatttcaacctcacaaacttttatctatctcagaactttatttatcatcgtaccaaaacaaaaagagtatcattattgcctaatgaaaagtgtattgtattatattttatcccatacaatcagacatatgtgtgtgagaaaagaaaatgtcatctttttttgtcttaatctcacatgcgagtgtcatctaacactttgtggtagatataaatg

SEQ ID NO: 218457 - DNA, 419 bp, Glycine max
  unsure (1)..(419): unsure at all n locations
ctgcagctagttcacatcttagagataatttctttctttctttcaaacccaagatgaagttaaaaaaatcttgaagatgcccacattatattttggatcaaaaggataaaatgttttcaatgttcaattctagtaatgagctggttgaaaatccgttggccgttgaaacagaaggacctatgattaaccattggacattacaggagaaaaagattctcttcgagaaattttcaacctttgaaaaagatttccanaaaattacatctttttcttgaccacaagacaactgttgactgtgttgaattctacaacaaagatcataagaccaattgtttagagaaagatatgattaattagaataagaagattggctggtaaagtcaaaatttgaaacatccaaactaccggtaaggatgggt

SEQ ID NO: 218458 - DNA, 385 bp, Glycine max
cacccattgttaagataattattgtctcttgctttcactcctcttgctgacaccagatttcctattcaacggaaacttacaaaggacaatcgatctatttaaaacaaggtaaatggaataccgttggcactaccaaaggacaatgatcatatttgaaaccaggtaaatgcccacatttaactaatgtctaacgactagggttatcactaatggaaaactcgaatgcagatctttattgaagccatagatttatagataatgggaagccattgaatttgatccctttattcctataatggtagagagacaagacactatacaacagacctacagaagaagaagatgatgatttcagaatttgtgaagagattcaataagtttttga

SEQ ID NO: 218459 - DNA, 280 bp, Glycine max
  unsure (1)..(280): unsure at all n locations
gcgcttactatgctactaaaaccttattctaccctgctgttgccttgatcaacgtagatgcatgtgtttttaggatcactcaacagtggaacatggcctgaatcttaaaacttgataagacctggctagtttgtcgcatttccatgaggaactcgggtatggtaacccaatggctgnatgtttggcttaatgcgcgccctcggctgagtctagtccaacaagaggaatccgccaatgatgcttggccacgattacgctagactatcataaggaaacgggg

SEQ ID NO: 218460 - DNA, 443 bp, Glycine max
tggattgattcagtctaactacggatcgaggtgtagtaatttatgtctccacatacaacacataagcatgattgattagagaaacatctttatatacatcaactggtttgttagaatgacccaacatctttacctactggtattagttttacttgcatttttactatttttagcctagacttagtttaattatgatccaaatcatcaattatcaattgtttctttcaacaatgccttattcctaaatttaaccctgtctaggactaggtccctgagttcaatactcggattcatccgttttaattttaaatacttgacgatccggtgtgctttccatcaaaccagatttcccttgaacatatctgtataagaaaaagtggaccaataaataactgcaggggaaatccaacatgcgccaccaacatttattcgacgataacatt

SEQ ID NO: 218461 - DNA, 481 bp, Glycine max
  unsure (1)..(481): unsure at all n locations
cttacgtcacctgcggcatgcaagctntgcagatttggtcttcgccagaaatttgattatgtgttccgaaaagaggcaaagttgatcatcctactatgacactgagaaaactggggcaaataaagagggtgagaaagagggagaaacccatgctgtgactgccattcctatacggccaagtttcccaccaacccaacaatgtcattactcagccaataacaaacctcctccgtacccaccacccagttatccacaaaggccatccctaaatctaccacaaagtctgtctaccgcacttccaatgacgaacaccacctttagcacaaaccaaaaacaccaaccaaaaaggaattttgcagcaaaaagcctgtagggttcaccccaaattccgttgtcatatgctaaacttgatcccatatctacttgataattcaatggtagccataaccctagccaaggttcatcaacctccatttctccg

SEQ ID NO: 218462 - DNA, 403 bp, Glycine max
  unsure (1)..(403): unsure at all n locations
agctctggagtttccaagggccaattcgtcttcttctttggtccagtcttcttctggcttcaattcattagagggctttccttctgtgtccagcatcttgggatgttcccagcctttgatgacagctttccaggttctgctatccagtgatttgaggaaggccaccatccttgctttccagtattcatagttggttccatccagaattggtggcctgttcactggtcctccttctttctccatgttcatcagaatttatctccctagatctcactcagtgatttcgagtgcccgctctgataccaattgaaattctgataccaatgccagatgtcgtacaggatgtcacgacatcatgcttcagaacatgcagattatatttgagagtntgaacagattaaac

SEQ ID NO: 218463 - DNA, 402 bp, Glycine max
  unsure (1)..(402): unsure at all n locations
catgaaaaaatagttgtaaaagaaggtccctcttaaatgaatataattattttgaaaaattagtcagtgactcttgacggaagaatcccatgttcacccactaatttttaagcccaactttaatctttaaaaaaaaaaataatcttaagacaatgatgttagttaaccgatataaaaatgtntatttttgtcaatcaaaccaacatgtacgatagaaaaggatacggttgcaatgtttttaaataattaggtgatttgattgaatttttaataattgagggactcaattgaacttttaattataattaagaaattaattatatattaagcctcttaaaaatataatgagctcattatacttaataaataattaaatcggctggcctaatatattggctttat

SEQ ID NO: 218464 - DNA, 416 bp, Glycine max
  unsure (1)..(416): unsure at all n locations
ctttttatctctggaacttggacctttctctctctagaaaccctagacatgcaaagctctgaatcccagtccaaactccttccacaaaatctgatttcaggcttaaataggtggccttgttcgtgcttgtgcgcttagcgcacgttagtgatttttggcttaacgcgcctttgtcacttagcggatgaactgaaacagtgctcttagcgaacctatacaactcatcttcttttggattcttcctcgcgcttagcccaggagtgttgcgcttaatggaagctcgctaagccagtatattggcttaacgagaatgtgaaaatagctttntccaaagcttggctaattaactctgaagttgagagaaaatgattactatacacacaaaatgaaaatactaagtatttatggcctatact

SEQ ID NO: 218465 - DNA, 387 bp, Glycine max
  unsure (1)..(387): unsure at all n locations
agctnggagaggatgcttcaatggaggaatttaaagatggagagaaagagagaggggggagcacgacattgaatgacaacaaaggagagaagttgaactttgagttgtgtctcacaaaactctcattcattaaagttaccacaagtattacacatgcttctatttatagactaagtagctctcttgagaagctctcttgagaaaacttcctttataagcttcttagagaaaaccttcttgagaagctagaacttagctacatacacctctctaataactaagctcacatccttgagaagctttcttgagaagattcctaaagaagctagagcttatctacacccacctctctaataactaagctcaccctcttggagtgagaagcta

SEQ ID NO: 218466 - DNA, 469 bp, Glycine max
  unsure (1)..(469): unsure at all n locations
ntgaagatttttacatttagcaatccagaagataaaggatgaatttatatctctaggtaacaccccatgtgcatggaattgctttaactacttcaataagtctccctttatcaactcccaaaattccttaagaaaaaagaaaactgaatccatccgagccaagactcttagtattaccacaatcctaaattgtatttttcacctttttttctttgaatttcaaagtaagcatgatattagcttctctagatatttgttggaaccccacaccatcaagcttaggtctattccaactctcttccttgaatctattttcaaaaaattccttcacctcattttttttatcaccataggatcctcaacccaaatctcatccttatgtacacctttcaatgcattnttcctccaattaatagtggagtggaaaagntatgtgttgcaatccctttcttttatccatgtatcccta

SEQ ID NO: 218467 - DNA, 369 bp, Glycine max
  unsure (1)..(369): unsure at all n locations
tatgttaaaaagttattgaagaagttaattattttgatgtgaaacctttttctacgcattatggctcattcattaggctaaagaacaaattgagtaaatgaatttattctcataaatattctcaaattattggttctttgtagaatttgacaaatttttctaggcctaacattgcatatacaattgatagattaggaaggtatactaataatcctgatcattctcattggattgccttagaaagggtttntaaatacttaaaaggatctattaattatgtcattcattatacaagatgctgtatttntttttttttaacgctacctaaccggaatatggggcggggccatatatatccttctttcttta

SEQ ID NO: 218468 - DNA, 458 bp, Glycine max
  unsure (1)..(458): unsure at all n locations
tgtagccttgtactattgcgtaagctgtaatttgtgaccgtgtgttatcgtccattttcaatctttgacaantttataacgctgcataatgtattttgctttttcttttcttcttaaaactaaactaaatgacatcgagcacgattagagatttagactttagagttcctcaaccctcatatacaagtttcttgattggctaatataatcgaaaacagtatttctgtcctcatgtttctttgtgtacagttcaatttcttttgggtgtttagaaatatttcaaaaaaattaattaaattattgaacttgttagaggattattagacaaagacaagtctaatccattaaagttaattcaccttggcatataatntatgaataaataatctatatattaaatactataaaataattggatagttgaatgtattcaatatcaaactatcgcatataataaa

SEQ ID NO: 218469 - DNA, 415 bp, Glycine max
  unsure (1)..(415): unsure at all n locations
agctntatgcctagagagggagggcatccttttttttttggagcaactagagaaagaatgaccgatcaacgtcaaaacagaagacaacttcttatagattattccaataaaaaagcaaaatccctttcctctcaaagatatactagcacttcatacattaacatctactccttcttnctgtgggattcgaacaacatattcaaaagtatggtctttgttaactaactagtgatattgaagatgaagattccttatctaaacaaattgataagagcaaaacaaaaaaaaaagaaaaactatcacgatcttttagcctatcatatagaagctatgtagaattgaaagaaaagatgactaagtataccaatgtctggacaaccttcaatatgagagaacgcattatttgtgatgggat

SEQ ID NO: 218470 - DNA, 447 bp, Glycine max
  unsure (1)..(447): unsure at all n locations
actcagctntcacattgaattcagcacctaaaggcatattagatgtgtattgggtatcttaacataagagatttcagatggactttgatcctaatcccacagccgaccttttcacgagatctctacttaacccttcggttaaatgatcggccaaattctgctgagttctcacaaactccactggtatcacaccatgcatgattaacttccgaaccatgttgtttctaacacccaagtgtctagacttcccattatacacttgactatatgccttagccaaagtagcctgactatcgcacctgatagacatgggaggtataggtttgggccacaatggaatctcatagatcagatttcttagccactcagcttctataccagctgctgctaaagctacaaattcatattccattgttgaacttgtaatgcatgtctgtttcttggatg

SEQ ID NO: 218471 - DNA, 409 bp, Glycine max
tggaaagagtttctctttgataaaattcgagtacccagcatgagcctgctaattgccttggacaatgacaaataaacagagctgtagatgatattgctactttatttcaagtacttgtaatctattcttcaattaataatatatagcagtgcagtattttttaagatatatatatatatatcaattaaactttatacgtaacatattcacttcagatattataaaaattagtttaatttattaaaatataaaataaaagacaaaactctctgtcaattaagtatttgactcaaattattaaccctgttaaaatgaaatagaccaaattctctcaaataagattcactaacttagatcacagattaagaattacatgagaaccaacatttcagatcaacttaataataat

SEQ ID NO: 218472 - DNA, 445 bp, Glycine max
  unsure (1)..(445): unsure at all n locations
tctaaaataagggtcaagctcgattagtatgnattttttgtgttgtaagcctaagtccagctaaaacgcattatttaattcacaatgaaaagttaaatttcaagctcaacatttcattaaaagaatttgggcttttatcactagttacaattagttgatacaaaaagctaaaattcaattcaaacattttaaatgaggctcaagtcaaatgaaagcttgatctgaatggacatnttgcaagctaaacccaaattgaggcatagttgaatcaggtaaaaatatgtccaaatttaattagtactcaaattctaaaactcaagccttaccttgtatcaagcgggtataggctgagttggttggaggcttgatattaatcacaagttataataagttaagcctaaatgctatattcaatggatggtgctcaggattcgagttccatcaa

SEQ ID NO: 218473 - DNA, 382 bp, Glycine max
  unsure (1)..(382): unsure at all n locations
gcgtgactcaaaagtcagtatgacagatcttttgagcacggaagatgacctaaatcaccacgtgcaaacgggcgtgccggccgcgactaacgaacggcgcagaagacgacgttagtctctacgagctatcacgcttntcgtcttacagacagcaaacagtttatacggataaccactcgggtatttacgcccgtcagcgcgactcaaaagtcagtatgacagatcttgtgagcgcggaagataacgtaaatctccacgtgtcaacgggcttgtcggtcgagattgacgaatggcgcagaagacgacgttagtctctgcgtgctagcatgctattcggctacagacagcaaagagttatacgataaccactctggcatttcgc

SEQ ID NO: 218474 - DNA, 392 bp, Glycine max
agcttcaatacgactatatcaaacctgagtgcttgtttaccccgtaaagagccttgtctactcatacactttatgctcattttcagtcttaatgtaaccgggaggttgatcaacaaatacctggttcttccagtctccgtgcaagaacgttgatttcacatccaactggaagatggaccatgatttttgttctgctaaagaaatcaccaatctaattgtatcatgccttgctatcggagcatagacttctttgtagtcaatcccgaactcttgtttgtagccttttgctaccaacggtgccttgaatttttccacttcgtcattctctttcagcttgctcttggaaacccacttcacacccacttgtcttttaacctttgggaagctctatc

SEQ ID NO: 218475 - DNA, 457 bp, Glycine max
  unsure (1)..(457): unsure at all n locations
ntactatagaagccaaaatcatctctatcacattcctagagtatgatttgtgaactaaataaaaaggaagtgttgaagctcgaatacaaaatctgaagctttttacattgataatttttcctacattaaaagtctgagaaaattagtatatccatgcactttttccatctaaaccattcaaaacatgaattactagaaaatatatacatgtgacttattttctcacaatatctactaagttcgtaaaaaacatattcaaatgactatatatttaatccacgtgagtagtagatttatcataaaaacttaatagattntagttgaatttgaatataaatgtgatttattattttttaattatctgattgataatctactaagtggtcttttccttcttccttgaaggctctatttggtagaaaggacataaataatgtggtcttgtcctctttccttg

SEQ ID NO: 218476 - DNA, 384 bp, Glycine max
  unsure (1)..(384): unsure at all n locations
cttaanttatactggttcactcaacctgaagtcgcccattctcctttacaaaataaataaagggatccactaattaaagtttgattacaaactagtatactgatttgccactcctagctttataagtattctctacgccattatcggcagaacccttatacttcctctgaagctaagaatacttaagtattgttttgacactaagccactcctggatttcacaaacatatagtttaaaaaatcacaaattctaacacttaaagaatgcgtttacaatcaagtatgaatcagtacaagaactttgctaagtaaaggataaactaattaagcattgtgtttcactcagaagtatctatattgagttccttttcgctttgactcaat

SEQ ID NO: 218477 - DNA, 464 bp, Glycine max
  unsure (1)..(464): unsure at all n locations
ctcttgcaatttatttaaaaactaatcacttataagttatgacttttgaaanaatcttcagaaacaagtcacttgaagaattgtgacttttggaaatgtattttttgaaaatagtcagtggtaatcgattacaattaaggtgcaatcaattacacatcagcagatgtgactcttcattttaaattttgaaaatcttaacgttttaaaacaatggtaatcgattactacattttggtaatcgattaccagagagtaaaactctttggtaatgattntgtgaaaacttcttgtgctactcaatgttttgaacaactttntaatacttatcttgattgagtcttctcttgattcttgaatcttgagtcttgaatcttgattcttgattcttgaatcttgaatcttgaatctttgcttgaaactttgcttaactcttgattctttggcatcatcanaataaccttgga

SEQ ID NO: 218478 - DNA, 219 bp, Glycine max
agcttgaagaatgatccggtttgagagcttgagatgacttatgagtgattgtcagatcctaaaggggaaagagaccatctcaccacttgtatttctgcaatctttcatcttgttcttctctttggtagaaaaaaagcctcctggaatggtaagctaaaccctttattggaacttccttgatggtacctgatgtaaatatatttccattcttttaatgaa

SEQ ID NO: 218479 - DNA, 267 bp, Glycine max
aacctaaatttacccctacagccaacaagtcagccaccattaggtctctccaaaggctgatgcctaagtggtcaatgggcccttattaaaacttgaactaaagcccctatatttgattaacccacaacatatttttggtcagccaactttacaaggattgggccattattagacaaactaaacactttataattgaaatatagtggtgacatttattcctcctccatttgggccatgatacaactcacaaccttggactttcttctg

SEQ ID NO: 218480 - DNA, 237 bp, Glycine max
agtacaaaattaattgagtgatgtggccactggccaacatgttttgcaaaattgggcctggatgtagattgccaacattgtctttgggctcaaggatgccaaataatatttgtagaatccccatgccacgttggcggcataaatacttttcttatctttttagatcacgcaaaattagaaagctgtataacatataatataaagagtacccagctggttacttagaaaatacaggga

SEQ ID NO: 218481 - DNA, 284 bp, Glycine max
  unsure (1)..(284): unsure at all n locations
aggcaatagtannattggtattggtaggtttttgaattttgggaattaaaaaggtattttgtnattattatttataaataattgaagaagaaatgaaaaatgggtgttttattatgaatatttggatttgtagtgatnagtaatatgttatgtaggtgataaaaaatgaaaagaaaaaaaaaaagaaaaggtgtgatagaatattttaggaaaatatggggttaagatagaaaatttagaaaataattaagagtaaaattgataaggattaaatataaaaaatt

SEQ ID NO: 218482 - DNA, 359 bp, Glycine max
  unsure (1)..(359): unsure at all n locations
gagaggaccaagcnccagcgcgtgaaactacacttcatcagagatgtgattgaatctgagaaggtgaaggtggagaaagtttcaacagaagaaaatccggctgatatgttcacaaagtccctctctagtgtcaagttcaagcactgcctggacttgatcaatttcgaagatgcctaaagcagtttggtagaagtgcagccctaaatcacaaagaagacacttgcttatttggagtcaaggtggagattcgtggtgtgtgactcaacaacacaatttgcccaactgagaaagccttcaagtggcgttgtcatacatgtttcagctattataccgaatgggtttggcccacaacataacta

SEQ ID NO: 218483 - DNA, 472 bp, Glycine max
  unsure (1)..(472): unsure at all n locations
cttttatgtctatntntccatgtgaagttagtggcatttgtatttggaaataatatcccggatggggatggggagattgcaagaggtggcattattgtgatacaaccaaatgtgactttttgatgatacttcatagcataggatctccatcattcaatgtggccataattagcaatttggatggagcactttctactcaaatagagagggaattttttttctgagtggcaattaaactaactttgagtagcaattacatgagtcgatactatagagttttgcttctgagtgtagcattcatattgatatttgcttttcggaatgatgatcgatgtangtgttcattcagtcattttagattactattaattaccaaagtaattgttttaaattcatacataattaactttgacttaacaacacagccatctgactgagacaagtgtgcgagcggcgaattctgatgtgtatg

SEQ ID NO: 218484 - DNA, 441 bp, Glycine max
tgaaatttgcaaagcgaagatatatatcttgtgattatgacatgaccaaaagcaagggcaagggcaaagatccacttgaaggacttggagggcctatgacaagggctagagcaaggaaagccaaagaagctcttcaacaagtgctttccatactatttaaatacaagcccaagtttcaaggaaaaaagtccaaggctgtgagttgtatcatggcccaaatggaggaggactaaatggcaccactttatctcaattctacagtgtctagttcgtctaaataatggcccaatccttgtaaagatggttgaccaaaaatatgttttgagataatcaactaaaacggctttatttacgcttagttcaagttgtaataaaggcccaataggcaacctaagcattatcctcttgggagaccaaatggtggctgacttgttggctatt

SEQ ID NO: 218485 - DNA, 397 bp, Glycine max
ttcaagaaaaaggaaggcatttcaaggacgagaacgcacggtataaggcaagacttgtggcaaagggttttacacaagtggagggggtttattactatgaaattttctcacctgtggtaaaacactattctataaggatcttgatggcaattgtaaattagtatgatatgaagttgcaataattggatgtcaagacaactttcatacatgaagaccttgaggagaccatttatatgcaacaacctgaggggtttgcagaagattagacgaaggtatgtctattgaagaaatcactgtatggtttaaaataaaggttgcgctagtggtgcaagaacagttgatgaatttcttctaatgatagggttaaaagtattatgatagttgtgtctacatcttg

SEQ ID NO: 218486 - DNA, 434 bp, Glycine max
  unsure (1)..(434): unsure at all n locations
ctcttctcacttgttctctgtcgcgcgcactctcaatcatatcctttccncaggaaagagaaacaactcaacaaactgccacctccataccaaaggaaaatcgatgctccacaaaacacacagacccactccctagtccacttacccactgagagagatatcaacacagcatcattgtcttctcttaacactgtaacaaaccccactcaatttttgtattttttaaaatccgtagggccagaggtggtttgttagtgtgttatatctgtatatgatactgcattgtcatggaagaacaaagagttcatcacgatgaaaacgtgactcgcaagcccaatttcccgctacagctgctggagaaaaaggatgagggaccgccgccgccgccgagcgcagtcaatgcgaaacgagcaccgacgaatgacagacacacg

SEQ ID NO: 218487 - DNA, 266 bp, Glycine max
tttttacccctattagtgtggtcccccccgcttaaatataatatattatggctccctctctaagggtacccaaaaaggctcacttggtttttactctttagtcttttctttataatttccgaactcggatgatctttttaaatattttttgaaatcaatattactaaatatatatttttatgctgaatcgccatgacaaaaagagatgcctaaagcttcacctatcatactctattgaacatccctataggagggttgataagaat

SEQ ID NO: 218488 - DNA, 179 bp, Glycine max
  unsure (1)..(179): unsure at all n locations
aaaataagggggaaataatttatntttaagtattgatttaattgtgagtatataatgtnatgtaagtaaagaagataagtaaatggaaaggatgaaaaattatgngattnattgggattttagtggatatggatagtanggattntgatattagttgaagtttgaagtttatatgtttg

SEQ ID NO: 218489 - DNA, 330 bp, Glycine max
tttttgaattaaagctgtgaaatgaaggctgttctcttgaacacactatgtatgtttaatggattgtttggtctcttgaaaaggatgtgtaccactgaaaaacattgtaagggtcagtgtactgggtctataatgtgagctatctgagaagtgccgttctttcgcttatttctgtgcagccacccttaatattataacgaaatttgtttaaatataaaccatttttgttaaagatatgtacttttttctgtaaacaaaatgcttaaataatgctagtatctcctgaaatatattcgaatcttatattattttttgatatttctttcttta

SEQ ID NO: 218490 - DNA, 306 bp, Glycine max
aacactgttcaaaatcattttgaatgaagagaggaatcttcttccaccatgtaaatgtccttatttatgaatggggtgagcaccctttttatcctagagccatcatgctctttactgtaactaaaggatgcaattacaacagcgtctattagaaaggatctcttgattggaacataatgtttagaatcatgatgaatgttgaagcgttgaaggaagatagagactatgtgtggatatgtgaatggatgatgtaatacgaatgccttatgcatgtgatatcggactaagtgtgtcatattatattgt

SEQ ID NO: 218491 - DNA, 440 bp, Glycine max
  unsure (1)..(440): unsure at all n locations
tagacattcaactntgtgcgtctcgatatataacggttctcattcacacatccgagcaaaaagctattgtcgtatgaattggcttaaagcttaaacattcaactttgagcgcctcgatatattacgggactcaatcagacatccgatgaaaaagctattgccgtttgaattggctcagaggttcaacattcaatttcgagcgtctcgatatattaccggactcaatcatacatccgaataaaaagttattgtcgtttgaattggctcacagcggcaacattcacatttgaacgtctcaatatattatgggactcactaagacatccgagtaaaaagtatcgtcgattaacttgcacataagttaacattcaagttaaccgcgttagttacacgggactcaatagacatccgaataaaagtattgtacctgtatggtcaga

SEQ ID NO: 218492 - DNA, 79 bp, Glycine max
  unsure (1)..(79): unsure at all n locations
ccccacagcccccccccagctctccccccccccgagtcgaactgacaccccganccccggacccaagcaccgcagcagc

SEQ ID NO: 218493 - DNA, 316 bp, Glycine max
aatccattgaagattgtgaccatgacttctggccggatagcggcaacgggacatttcgcttcctgacgtaatcaacggagcagaactatcaaaattctaatgatacgaactcatgctcctggattctcaaacagaaactaatgattaagcctaaattttcagataaggcgttcaggaaatctgataataatataaacgctaattatcacgataaacgtgccaatattggataacccaactgaccaacctacttccacattgcaattaagcccacttggcttgatctcaattctcatgatcaagcctatacccttac

SEQ ID NO: 218494 - DNA, 387 bp, Glycine max
cacaacccaagaaatctatatcatggactacccaacgaacactcttatgctcacttggtcattattaaaagatatcgcatattatcacgcttggcgggtgtgcctcgcgaaccatcaaggtgatccgtttcaatttctttatccggagaagctaaaaagatggcttcatttttttaaaggaaacactctgaagtctgggatgaaaccgtataaaagtctttagagaagtactttcttgaatcgaagactacagaaggccaagctgccatatctcttttccaccagttaccagatgaattgttgagtgatgcacttgaaagaattacaaggttattgtaaaagactcccactcaagttttctagaaccactcccgctcaacatattta

SEQ ID NO: 218495 - DNA, 459 bp, Glycine max
tgcccagagaaggagtccacggaggatatgcttaccacctcataagattggaaagcggtttctaatgactcctctgcggcttccacataaggcatagaggatgggcagctcaccaagatatcttcctcgcctgatacgattaccagatgcccttccactacgaatttcaacttttggtggagtgttgagggaacaactcctactgagtggatccacgggcgccccaacagacagctgtagggagggttaatatccattatttggaaagtaacttgacaggtgtgagggcctatctgtactgggagatcgatctctcccctaacctctcggcaggtgccgtcgaaggcacgaaccaccattgaactcagttttaagtgggaggaattgaatggtaatttctccaaagtgctcttaggcatcacgtttaaactggaaccattatcgatgagcactttggct

SEQ ID NO: 218496 - DNA, 234 bp, Glycine max
agccaccatccctggaccccatcactgctcgagaagcccaagcatagcccacgaacagatgcgaactctgggaagaacagaaactaagaaaactgaataaaaaacgagaaacaaacataagcgcggaggttgctctatattgaacgacctgcttcactaaaggcacagcagtgctcccacgacacaagcgaaccattccacacacgttgtgcatgggagccctgtagagtaacc

SEQ ID NO: 218497 - DNA, 461 bp, Glycine max
  unsure (1)..(461): unsure at all n locations
ttggcaaggacgaagaagaaagatatgtagccaaagtgtctttgttttctcataagttggtcaagaaattctaagaagttgttctaaaaagttatgaaaaagttattgaaatgcaagtcaaggtcttgctnttatatactcttcatgtcagtcaagaaaaccattggaagagttataaccttgagaaaaacctgaaaaccattggaagagttacatatcttgactttttattcaaaacttgtaactggtaatcgattaccaaaaccatgtaatcgattacacaaagcattttatgaaaagatatgactcttcacaatttaatttgaatgtcaacgttcagatacactgataatcgattgcaatatattgtaatcaattacaccatttaataatcaattggaacattgcanattcagctaatagcttttgaaatcaaactttgtcactggtaatcgattaca

SEQ ID NO: 218498 - DNA, 163 bp, Glycine max
tgcatacaggcactcaattcgctttattccttcaggattgaacaagcattgtctgctatgcgaaaacttataaaaaccacaaacagtatgagactattttctttaagcgtcaacccgggaactttctttccatcaagaagatttgcagaagctaatcatttaa

SEQ ID NO: 218499 - DNA, 306 bp, Glycine max
agcccaaaaggggaggaatgtttacaaaccgaccacaccggggacacctgggcaaaaaaaaacggcaaaaagacaccaatacacccgtatctgataataaacaaaaaaaaacggaagacaaaaaagaggcggccgaaacaagaaagaaacaaatcctaaaagagcaagatcggggggaacaatgaaaagaacagtatcatggagaggcccccaaaactaacttctgacctaaaaacaagatgagcacccactaaacagccagaaaccccggatatctggcgaaatccgagggagaagaaagcaaga

SEQ ID NO: 218500 - DNA, 320 bp, Glycine max
ggggggttgcatgggaattgaaagaggttacggagagaagttgaactttgaagtatgactcacaagtttctggttcatcaaagttatgacaagtgttacacatgtttctatttatagcttagcacatgaaaagcttccttaggaagctagaggaagaaaacttccttgagaagctagaggggggtcactcacacccctccaatagctaagctcaccctatgccaaaatacatgaaaatacaatgatgagctttcttgggaagcaaggaataaaatatccttgagaagctagaggggggcttctcacaccccttcaatagc

SEQ ID NO: 218501 - DNA, 402 bp, Glycine max
  unsure (1)..(402): unsure at all n locations
aaaacttgaagaaaaaataaataattcttcaaaaattgtcactcagttatgtgatgacattaagagtctaaagttaaacacaacatagcttcaccttgaaaatgacgataattgtaagaaagatctagnttattggaagaccttcaaaggttgaaaaatcaactggaaggcttacaaaatgagtataccacactcaataaacttcatgaatttctaaatgagaaaaggtgtaatctactgaaagaatgttcaccagtccataagaattatgaaaacttggtggcacgtgaacataacttatgatttgaatgtgaaagatataagagaagcctgaaattctctaatgataaacttgaacagtatgatggtcttcataaacaaccttaagatgttgtacactta

SEQ ID NO: 218502 - DNA, 56 bp, Glycine max
gccaactgtgaacttgattgatatatggggatatgcgcctttgttaatcgattacc

SEQ ID NO: 218503 - DNA, 433 bp, Glycine max
  unsure (1)..(433): unsure at all n locations
gtatgctgcnnacattcataaagacctccttaactaagctacataatcagctccaacagaacaattatgacctcttcagcaacaggtacaataccgggtgtatgaatcatcccaaccttagatggtcgagtccttcacaacaacaaccttattttcagaatgctactggcctaagcagaccatacattcctccatcagtccagtagcaacaacaacaacaacaacaacaacaacagccccagaaacagcaaacagttgaggcccctccgcaaccttcccttgaagaacttgtgaggcaaatgactatgcaaaacctacagtttcaacaagagaccagagcctccattcagagcttaagtaatcagatgggacaaatggctacataggtaaaataacaacagtcccaacattctgactgattaccttctcaatc

SEQ ID NO: 218504 - DNA, 455 bp, Glycine max
cttcatacaatctattaattatatccgggagatctttctttgggtaagttctcatcagacacatgttcgatccgactcaaatgatcagcaactaaattttatgctctgctcctatcacggatctccaagtcaaattcttggagccaaagcattcatcagatcaacctatgctttgaatcagccttctgcaacaagtactttaaagctgcatgatcagtataaacaataatgcgagtaccaagcaaataagaatgaaatttttcaagagcaaaaactatggctagtagctctttctcagtagtagtataattcgcttgggcagcatctaaagtcctagaagcataatatatcaccctatgaaatttatcaattgtctgagcaaggacacgccccaatgcgtaatttgatgcatcacacataagctctaaaggggttgtccagtcgggtgcctggat

SEQ ID NO: 218505 - DNA, 322 bp, Glycine max
  unsure (1)..(322): unsure at all n locations
ggatgccccacattatcccatgacacaaatgccaaaatgatgatttggaaattttatgcaaaactggtcatgcatgcacctatgtggacgctcaagtgtcaaatttttatggtcatgtgatgctagggctcaagattcattttttctattntaaatcaacccaatgtttccaaaatatgttcttttatcaatttgtgcattcatccgagtccattttgggcgtctgggaaaatcttcacagcattcacccttcaggtgtatacacattttttcaaaaactagttatgatcagtgaatttttccaaagaatagttggaagtca

SEQ ID NO: 218506 - DNA, 351 bp, Glycine max
cttataccaatgtcacgaggagtgtggtggtcatattcataaagaaggaactgacttgtcgataccgactccctaggaagatcattactgacaatggcaccaatctgaacaacaaaatgatgcacgaaatatgcgaggatttcaagatctagcatcataactccaccccttatcggccaaagatgaacggggctatagaggctgcaaataaaaaattaagaagattattcacaagaagacggcgtcatacaaagattggcatgagatgctacctttcgccctgcacggatatagaacctcgcgacgaacttctactggggcaaccgccgcattccttggcttatgggatgg

SEQ ID NO: 218507 - DNA, 344 bp, Glycine max
tattagatgaccgccccttccagagggatcaattctgaggccttctacgttttcgccgaattgaagttttataatatacttttgttatatatatacctgaaatatgcgaccgaattgaacatacgagggtatattaggcgtcaccaatacttcatgacgggaccaaacagcttattcttctttctttcttcccagacggtctgagatcagtctagtaaggattaataattctaaattccaccatcctcttgataataactgaatatctttggtatactaatattacgatattgaaaaaggttattttatattactagcgttttattacgaaataacaattatca

SEQ ID NO: 218508 - DNA, 354 bp, Glycine max
ggttgctgatatgagaaaatatattattctctatctcagctgagctcagtgcaatatgggattctgatactgtgggagaaattaaacgtaaatgtgtcatggaaattgaaaggactgaatggctaactccacttctctaaagctttcccgaaagcgccacatacatgcttattggacacagcagaatggtccaacatgccatgtgacttgtcagccacaccttacacgaccccacttacctttgacataatctacctcatctctatttcttctttcttttatcgttccctccccgattttaataacttcatatattccactcaaataaaattaacttccgctatacaatatgag

SEQ ID NO: 218509 - DNA, 328 bp, Glycine max
gggaccttaagcacctgggctgcacttaacacagagagcgatgttttcttttagccacaaaaaaagagcttttgtcctccgacgctcataactctaaaaataatcttcttatttttacggatgatgcatgatggacatatggatatattaagactaatatgcgacaatcaataaaaatgccactcaaggagttggacatgtaaaaagacaaaattctttcaagcttcaaagcttaatcgtcatgttgttccccctatctcttaccaagttacgatctaaatcggattgcgcacacaagattatagttgaaacttcattttttagaaca

SEQ ID NO: 218510 - DNA, 434 bp, Glycine max
cctcacattattatacaattttatgtgcataaacaacacataagtcacaagacatcacaacacaaatcatttgtctaagtcactcgcatctagaaactctaattctcttctaatggtgcataaagagtctccggttagcggttttgtgaagatgtctagccagtcgggttctacaatctacaaatttttaaaaatacaggcacttttttcctaagactaagtgctaattgactaccaacacttatcaagatgagtttttattaacatagaaggttctatcatatcaaaataattttatttgaaatacaatataataattttgaaaagtataaaaaatatcttgaacaatctatcaagtaattcaaacatatcacacatgaattatacatggattgaaagatatacatcacaggcattatcaaacattcatattt

SEQ ID NO: 218511 - DNA, 211 bp, Glycine max
  unsure (1)..(211): unsure at all n locations
aagacccgcttatgaatgaaaagaccaccaagcatttactctactcgctctctctatctctcgctctcgnctatttcttaaggagggtacctcgggcctccaaagccaacctataacatgtagtccctcctttgacacatttccttaacatagatatgctcatttattaaatgcacccacacgggccaaattctattggtcacaaaaaact

SEQ ID NO: 218512 - DNA, 447 bp, Glycine max
  unsure (1)..(447): unsure at all n locations
tatgataaacttgagaaagtttgaacctcanattcttttcttaactctcttcacaattgtgngaaatggaaccattacaaacacaagctagaatatgcaatgaacaatgtgacaaaaaggaattattcccttggggagtagattttgcttgctttgcatttgtaacctgaccaatatagtaagaaaatgtttgactttgtaaaagaatggaattgattttttgtcaattgtagactagacaagatttatttgccttttattatattatacctccgggatgatcttcatattgtattgtagaaagcaatattatttttggcctcgtgtctgatcaatatctgggaaatattcctagtagcatgattactttaattttatcattaccaaatgatagacttataagccaagattatcattgcaaatatagaataaacaatactcctttat

SEQ ID NO: 218513 - DNA, 291 bp, Glycine max
  unsure (1)..(291): unsure at all n locations
ggacctaagcaccgagctgcagctgaagaggttttttttggtgttatttcacnnnaanccgtgaccacaaagtggtaccgcacacatgtcgcgagggtcangagaccttggggacgtcaggtggggtgctattgcccaaaaccaagcttgaccaattccgacccaacccgggcatagtcagcagtgaaacctggatgacctaaaaggccagctcctggccagcaaccgattaaagaacacagaccacaaagcagggaggcttgcgtggtggctggccagcaatgagtcttg

SEQ ID NO: 218514 - DNA, 351 bp, Glycine max
  unsure (1)..(351): unsure at all n locations
tttttcttttatttttaggctataacataacgctcttttatcagctaaaagaatatattaaaaatgaaaatacaagtaatcttaacataaagttcaaataatcttaaacataatgtaagatatcatgtcagtggaaaaatcaatgcactatgagcaataaacaccctataggaacattataattataagaaaaaaaaatccaaaaacaaagtattctatgaaagataccaacttttttgtttttttttctcaatctcaaccatggaaaagcaaaagacactgatggngttgattctgttgttgtcggtgtatgcttccgatgtgagtgttacgactggtgaaatccatgga

SEQ ID NO: 218515 - DNA, 349 bp, Glycine max
  unsure (1)..(349): unsure at all n locations
agcttcttaagcaagcatccatcaagtggtatctgtttacaagagcttcatgtaggagctctttaaacctccgttaatttcagctataccttctnctccattggtgattctgcattttttttctccatctatttcctcacatgtcttgtgttgaatgttgttaacatgattctttagaattttcaccgattaaacttgctataaaagctagatttgattttctatggttcaaatntcttgttcttgttctggaaccatgaattgtgttgagtttgggttcctttgagttctgtcttgctctttttgtggctaaaacctacaccataaaattcttacaaaaaaattaaag

SEQ ID NO: 218516 - DNA, 461 bp, Glycine max
  unsure (1)..(461): unsure at all n locations
tacggacctatgatactcagcttgcccncagctcgctcaagcgagcaaggttgcttcctccaaaatcaacagccttctggaggaatcttctggagggcccaagtgggcctggttgctatttgcacccccatttttactaaatacacccccttgccctttttttggtgattctttnttcgtaaagttacggaaacttacggatttcgcaacgatacttgttttctttccgtaatgttacggaacctagcggattacataatcatccccttttttgacttacggaatgttacggaacctcactaattgtgcaacgatgcttccttttgatttccggtgtgtcacggaaccttacaaattgcctaatgatgggtgccaagcacctcaaaaatgaccaaatacaagttacatgcatccaagccaaggtccccggacgaaattagggtatgacagttgcccctctt

SEQ ID NO: 218517 - DNA, 350 bp, Glycine max
ttttaatcaattaccagaagttctaaaagctgtgattctcaaaatctaaacatgaacagtcacatttgttgatgtgtaatcacttacaccttgatggtaatcgattaccattgactgatgttgaaaaataaattcccaaaagtcacaattcttaatgcgacttgtttctgaatatcttctcaaaagccacaactttttaagcgactagttttcaaaaagagtcacaatcttaaaaaggtgactaatgttaaagaaatgtccaagagacacaaaccttaacttgaggcatcaagtgatgatcaatatgcgactatggcatgaatttaataacaagtctttttacagaaatt

SEQ ID NO: 218518 - DNA, 465 bp, Glycine max
  unsure (1)..(465): unsure at all n locations
gcttagaaggtagtcatacctcacanaatatatgtatgagtgtttaagtantgaactttctttanacatgcatgcgtataacataaatacctcacaaaatatatgtatgcatgtctaggtagcaagataccttggatatgcatgtatatagcataaatacctcacagaaatatacacacgtttaagtagcaaaatacctcatgaaatatatgataacaattcaatcgccataaagaaattaactgatgatccaaagaaggagataacgaatagatactctcataatttttctaggctaaaaactaacatgcttatgaaaggagataacttccagcttttctttgatgaaatgcactgatcataaccagcttctgagaaagatgtcgatacacctacaaggtgaatgctgtgaacatttctctgaacgcccaataatacttgatgaatgcatgaatcgataagaac

SEQ ID NO: 218519 - DNA, 466 bp, Glycine max
  unsure (1)..(466): unsure at all n locations
tcttatccaaggctcatcttgggggagaagctcttctttccatgtcttattccttnaaggatggcgcctcctctcacctcttctcctttgtcttccgctgcatctccatggtgaaaaatcaccattgaaggacctcattgaagctcaaagatccagcctccatagaagctccacaagcaagcttccatcactaagggactaacgtttgtttcgttttgattgacttttgttttgtgcatacatgtcgtttgaactgttacgttagtatttacttcgttgttgtcaatagtgtctgttgaaattccggaatcgtgtagaatatttcatttttttaagaacgtcgtccacaatataaatacacaaaaaaatgaatgataaaaagaaagaagaacgatttctgtgaatgaaatgtctactattntagaatatttcggtttcatttgtgaatgaaaagctaccatataaa

SEQ ID NO: 218520 - DNA, 221 bp, Glycine max
ttattatcaaatctactgttctctcaacatacattggatcagggaacctacctatgaggatatatgcctgtccatgtagtatcctgatattatctctaataaaactatgttctaactaatgggatgcgatatatatatatatatacgtctgtgtgtagggtgcgtctaaatgttcgtgtgtttgcgcattatgtaaaatgataatcgttacagctgtcatc

SEQ ID NO: 218521 - DNA, 299 bp, Glycine max
tcaaaattggtaatccacgcaactcaacaacgtgctagataccaaagcattttacttcatttcatgaatgagttgggcatgtaatagcaaagtaatagcatgcctcttttctatatgatgttgacgccattacacactatcgaatgccatattcaaccataatacattctaagaatgaaacacttatgaaacaagcatatctagcaaacatatttatagcaacaaattgaagaattgaataacaacaacaaagggtgtggaagaatcataccgtaaggcaccccttgcagtgactgcat

SEQ ID NO: 218522 - DNA, 374 bp, Glycine max
cgacacatgatacctatcttccatatctacgcccatatctaaacaaactacaatcatcaaccatgaatgagtatctaaatgagccatttatcctatatttatgagtcttaccacttcaaatatgtttaaatactatacaaattcactctactgattaagttcctatattgagcgctaacttgattttataagtattgcaatacctgaaaacaaaattatctatgacatcaacggtcgtcaacaacaatcaattatataacgaattctctaacatgtatcaagcgaacaaaaactacaccatgttagctaaagtcaaatcatttgcgcaaacataacaacccgatatcaaacgttgactcttcctttgataaaaa

SEQ ID NO: 218523 - DNA, 104 bp, Glycine max
actcattggatccttatagattgatctatttgcatcttcgactccctataatgtcaaagtgactttttactcctatagaccatattttaatgttttttaggcct

SEQ ID NO: 218524 - DNA, 216 bp, Glycine max
ccttcttggacaaaagattgggagtgctgggggcaaataaacttctttcccatcagaccttggatgcaactgtgctcttatacccatataacctagatcttgactggtattcaagccattctttcttcttgccttgaacggtaaagagctgcccacttacactctcacaaacatttttctgcacatgcataacatcaatacaatgcctaaccgtca

SEQ ID NO: 218525 - DNA, 444 bp, Glycine max
  unsure (1)..(444): unsure at all n locations
ctcatgctgacagtgaagcaccttcattttggcntattccccagnggacggcgcctcctcttacctcttctcctatgtcttccactgcatctccatggtggaaaatcaccattaaaggacctcattgaagctcaaagatccagcctccatagaagccccacaagcaagcttgcatcatccctcttgattctgaaccctatgttccaatcaagagatccttccttataggcacttcagtcatagcatcctttggttatcaaaaggagcatgatggctcttgggcgaagaatggtgctcgacatgttggtgaagaacgacatgacggagaagattcatctcttctctcaaagactttggacaggtttgatggccttcaaacctatgctgatgaaaggtttgacaccttggaattacaagtagatatgcacttcaatgagatggagt

SEQ ID NO: 218526 - DNA, 413 bp, Glycine max
  unsure (1)..(413): unsure at all n locations
agctnanccctagaggggatggaccttttctatgttttttagaggatcaataacaatgcctataggttggacatcccagaatagtatggagttcacaccacttttaacattttttgatctaactccttttgtacgcggagctgatattgatgaggaggaactaacacatttgaggtcaaatccttttcaaggggaaagggatgatgcaatcctccctaggaagggaccaatcactagaaccatgagcaagaggctccaagaagattggcctatagctgcttgaaaaagccctatggttctcatgaaccttanggtacatctttgagcccatgggccaaggttgggtccaattatcttttgacatattagactaggacgtcattatctttggcacttgtattcacgctccatat

SEQ ID NO: 218527 - DNA, 434 bp, Glycine max
  unsure (1)..(434): unsure at all n locations
gctcctgtagttcaatttcgagcgtctcaatatattattggcctgaatcagacatccgaatcaaaagttatggctgtntgaatttgccatgtgcttccatgttcaattttgagcatctcgatatattatgcgcctgaatcgggcatctgagtgaaaagttatgccatatgagttatccgagagcttcggtgttctatttccagcgtctcgacatattattggcctgaatcggacatccgagtcaaaagttatggcagtttaaactttccatgtgcttccatgtttaatttcgagcatctcgatatattatgcacctgaatcggacatctgagtgaaaagttatgccatatgagatagctgagagctttcggtgttcattttcgagcgactcgatatattattggcctgcatcggacatccgactcaaacagtat

SEQ ID NO: 218528 - DNA, 303 bp, Glycine max
atgggaaatcaatgagaatgtcatgtccaggaaataaatgggatagctaaattggataaaaacaatgaaggtgatttatgaacgccaagtacgagcatgttcgactatatctatactcatgaatagaaaaagatatgacaagatacaaaatgattatatgaggaaatattggtataaaactgattgaaggaaagatgtcgaaaaattgattaaggtggtttggacatgtaaaagaaagatcactaaaagcatctatgacggtagattgcatgattttaagcatatgacacagggtaaataaac

SEQ ID NO: 218529 - DNA, 449 bp, Glycine max
ctcagcttgaataaacactgtgaagattttcttagtcgactttcatcaacatgaatgaaagcaacccggagcgcctcattcctgataacagagacaaaatattaatgttgtgtaatagatagcaaaaaaaagttaagaaaaatgaaacaaacaaaaaagttattaacatatcctctatttatcttttaacgtgaataatgaccgtgctgagattagaacctatgacccaatgaattctacccaaatccctccaccacaatatgaggctaaatcaccacccttgaggctgcaactaaagcagcccgcatagatgccgcaactaaggtgggctaggggtgaatgcaattaaggagggttaccaacaaatcctctatttttgacacacataactatgaaattaagtagagtaagctctaattctagtccttgagattatacgcattggtcaa

SEQ ID NO: 218530 - DNA, 419 bp, Glycine max
  unsure (1)..(419): unsure at all n locations
agctagnattattcatctttttcattcccttttctctctgccaaaaagaattcgccaaggactaccgcctgaattctttttgtgtctctcttctcccttttccaaaagaacgaaggactaaccgcctgaattcttttgtgtctcccttcttccttgtcaaagaattcaaaacgatacagtctgagaattcttttgattattcccattcccttatacaaaagtgttcaaaggactaaccacctgagaattcttttgtatccccattcacgaagtatcaaaggtttaaccgcctgagatctttgtcttaacacattggagggtacatcctttgtggtacaagtagagaatacatctacttgggtttgactgagaacaagagaagggacatctcttgtggatcagttctagtggagggtaca

SEQ ID NO: 218531 - DNA, 369 bp, Glycine max
  unsure (1)..(369): unsure at all n locations
tctcnncctatttgctataaataggtggagaagtgaagtatataatcgaagccgaggcgcttccgtaacgtttccgtgagtaattacgcgaagattctcgaccgttcttcaagattcatcgttcgttcttcgttttcttcagtcttcaacgggtaagtacctcaaaccaagcttttcaattcattatatgtacccgtggtggtccacattgtgtttcatgtgtttttattctcgttttcatttactttntatacctccttttgacgtgcttaagccatttatttaagtcattcctcgcttaatctaaaaataaaataaatttccaccgatcgtttgaattgtatcatctggataatttggttaaaatga

SEQ ID NO: 218532 - DNA, 363 bp, Glycine max
  unsure (1)..(363): unsure at all n locations
tacaaaccttcaccgaccaataagctcaatgctcaatctccattaaaaggtggcatgccttaccaaaaaccacctcatatggagacatccccaaaggtgttcgataagcgaacatgtgggcccatacaacatcctcaagtagcttgctctaattcctacctattgggtagactattttctgcaacacttgcttgatctctctatcacaaaccttcgcttgtccgttagtgttgggatgatcagntataccacctctatgcacaactccaatacttttggagcacggatgccaatgacctattatagaagcggcattcacatgatcaatctcagtatagcactacgcttgattaatacgtacct

SEQ ID NO: 218533 - DNA, 370 bp, Glycine max
  unsure (1)..(370): unsure at all n locations
atcccatgccaagaatgcagttntaacatctaactgcttcaaatgaagattctctgcagttactatgctcaaaataactctgatggtagtcatctttacaactggagggaagatctctatgaaatcaattccttatttctgttgaaaccctttcaccacaagtcttgccttgtatcttcttctaccatcagattctttctttagcataaagacccacctattctgtaacgctttctttccttttggcaatttagttaaagaccacgtcttattcttctgaagggatgtcatctcatctttcatcgctagctctcactcaatagtgtcattcccctgtgtagcctcactgacacattttggctcaccaaca

SEQ ID NO: 218534 - DNA, 428 bp, Glycine max
  unsure (1)..(428): unsure at all n locations
acgcacatcattngngtgtatgatatgcactccacattgttttaagcanattagagctncaaccccataacgcatacgggcggacaaaagtgggcacgaaacttgaatgatcgtcattgtcaatgcggaatgtattctgcgcttcactatccattttcacacattattgcagcttgtggttacgtgagcatgaactactaccaatatatagatgttgtttatacaaacgagcacatcttacaagcttactccgcacaatggtggcctcttgggaatgaagcggctattcctccttctgatgacgcatggacacttatccctgacccaactacaattcgtgcgaaaggtcggccaaaatcaacaatgataagaaatgagatggactgggtcgaaccatctgagcaccgaacaaaatgcagtatatgtgg

SEQ ID NO: 218535 - DNA, 390 bp, Glycine max
  unsure (1)..(390): unsure at all n locations
aaccccctctgcattagtataatgagaccccttagttaatgttataaagaacccctgcacagtaaatttgccgatgagggacaaagaaaacggcatgtaaattttgacacctatattattggagctggacgaatggacgattntatttctactattgagtaggatcaatctacagtatttgtgtgggaaggagaaaaaaaaattcaatcctaagcaaaatgtccaagtgaacgcgagaaaaaaaaaacttgtttaaattaaaatgtccatgattatattaaaagacttaaatttacttttaaactctatagtatcacaaatcacaaatgtgtaattttaatccttataaaaaaaatagattactcatttggtttaaactttatcttatat

SEQ ID NO: 218536 - DNA, 437 bp, Glycine max
aactggagactctccaattagttttaataggagagtattttatccctccttatcaccattcattttttaccaataaatagttgtcaatccaagatagacacaataaattattatggttatgagaatgatgaccataaaacttattggtaactaaatttattatttaatgcataaaaatgtattatattatttatattccttaaaatacattttgataaaaaaaatattatattattatatttcaccaagcctagaactcttaagtaactatgtaatcgaataatactcagtcacccgataattgattgaccttttttgtaattgacaataccaattagcaatattggaggtgtaatccttagataaggaaatattgcaaataatgaagaattatactacattacaataggactatggacctaggctattatatgtat

SEQ ID NO: 218537 - DNA, 400 bp, Glycine max
cgaatcagaaagctgcatatgcacctattgcacgacccgcgcgctatgttcttctgcagatcaccatacaaatctttggtcttctttgcagcaatctggagtctaatgagcaacctgaagcttatgctgcaaacatttataatagaccccatcggcagccaaacaaacaacagtagaataattatgacctttcaagcaacaaatacaatccaggttggggaaatcatccaaatctgagatgggcaagtcctccacaacaacaacagcctgtccctcctttccagaatgctactagtccaagcaagccctatgtttctcctccaatgcagcaacagaagcagtagcagcaacaacaaagaccacaagaaactaaggcccctcctcaaccttccttagaaga

SEQ ID NO: 218538 - DNA, 465 bp, Glycine max
tacgaccacggcttaatccaacagcattgattccacagaactttgtgaaccccagcttacactcgacattttggaacattgtacaactacacgcctgacacatgcggctatacagagctcatctccacccgcagcacaaaataaattaagtggaacaactaagatgaactgtgtctagctacatctaaaaacatacgacaagatactgccagtttgtttcactaattaaatcaaataacatgtccttgtacctcatatatatcattaagaaactagtacggcagtacctgaaggaagtgaattgtcttttaatctagtcagaaaccagtatatatcattcaagatatgtaagtgagtgttggcttttcagacaaatgaagcattagcgaagcgaagacacatcatcatgtcgtgcatgtggaggtggcgggagctgaactgcgtattcaattctatgtgggcacg

SEQ ID NO: 218539 - DNA, 171 bp, Glycine max
acccagagcaagtccaaccaaaagatggaagaggcggataaggagatctcggagacccccaagaaagaacacgggaacacacctctggcagatgctatcaagcaaatgccaagatacgccaagcttctaaaggagccgcgcacccacaaaacgaggctcagcggcaatgaa

SEQ ID NO: 218540 - DNA, 428 bp, Glycine max
  unsure (1)..(428): unsure at all n locations
tgaaatgaagaagngnacaatggagaaacgtcctgttttttttcgttgaccacacagctggacctggagatatgtcacggaggacatgagaccttgtggacgtcacgtggggtgctatttcccaaaaccaagctcgaccaataccaacctcaacccgggcatagtcagtcagtgagaacctgtgatgtacctaaacaggcgagctcctgtcagtcaacagattaaaggaacatataccacaaagcatggatgcttgtgtggtggctggccacctgtgaactctgattgatatatgggatatggcctctggtaatcgatcaccaagggtgggtaatcgattaccaggcttaataatgaagacacgaggctaatatggtctctggtaatcgattaccaacggagtgtaatcgattaccaggcttgaaaac

SEQ ID NO: 218541 - DNA, 379 bp, Glycine max
acggccatgctcttccttgcgagccactcggactcttgctccaaggcctaggtggtaggctatatttatatctcttagtttggcattctcctttctgatcttaagagctgctgatttgaacctttctttgactgtttgggctcgctcgaattctgccctaagggcctgcaccttttcgtcttcctctggtgcctcaacttcctcccttttagtagttctcaaactcgggagccaatccaaaccttgcacgtgggctttcaaccacttaccgtagccaccgatgggcccattgttactgcccttgagttctttgtccttcttttgcaccacctcccatgccttgtggaccttctgaagtgtctccacgttggtcttattg

SEQ ID NO: 218542 - DNA, 451 bp, Glycine max
atcctaagcacctgggatgcacttgaaaagatttatctttatttgtcttataagcgactaatagaaagcataaagagtagccgagaattccataagtcaaaaaaataattttatctctaaattgttacaatattaaatatgatatacaatgtataaaagactaacatatatttaaatatttacaaggattttatgtttgaaaatatgatatatattaaataattatcatatatgaatcaaatgatttaggattttgaaaagatgggatatttaataaattattgtcatatatgaatccaataaactattaatttattttgaaagctcttatgaatgagtagtgcaacattacttacatggtattaggaacaaaactttagttcttaatttgcgtcattttttttataaatcatttgaattttaatacagacaattatgctcaattcacata

SEQ ID NO: 218543 - DNA, 462 bp, Glycine max
  unsure (1)..(462): unsure at all n locations
tggcacaatgttgacagcaagacagacttcaattgttttttgttntttataactntactttcatccaaatgatttcttttacaagagaaggttctaaataggaaaaaataaattttcatgagaaataacttttgaaaaaatatatgatgcacaactaacctgatagaatattgtccagaaattttcccaaattattgtaaagtgatatgataatatttagaaaatttcttgtgaaaatactattgtaggacaacaaaggaacaataattataaaaaatagattcttgtaatttgtttggcttgagaaaaaacataacatactattaaggttaaggaaactccctattaaattntagggtaaatagtcattttggtccctganagtgtaactcgctgtcaatatggtccctgaatcgagataaattgcaaaatagtccctgaaagtgcaatttgttagtcacg

SEQ ID NO: 218544 - DNA, 354 bp, Glycine max
  unsure (1)..(354): unsure at all n locations
agcttatactagagctgaatcttatgacatgttatatttttaaatagctgtgaaaccttccattggagttcttaactgaatatttcatggattgagttatatttgttattaagctatgngactgtattaaacttgtttctgtgtggcttataaagtacacaatgttgctgacttacttggcatgatgcgtgaggatcacaaacgtatacagccaaatgcgaagacccatgcgtaagacacatattatttctcttttacaaacctgactaacatgttggatgtaaaatcgttngaattcgctagtgtataatttagtttttttatcttaaaaaatactagccagtataataaaca

SEQ ID NO: 218545 - DNA, 464 bp, Glycine max
actaagctaaaaaacgcaccaccattgaagaacaaaattgcggtactctaagcatttcaaagagacttaattaactaactaaatacttgacaagaatctgaaagaggtgtccccatttagtgcctacaatacttcgaaaatattatcaccgaaggagaagacacatggaaaaaaaaaaaaaaaaaaacgtgacaagaagcattttcctttgctttaatttatgggcgtccttttaggccttatttcgattccttgaacaagaaggccacccttccaatcaccactcttgatctcataaacacccatttccaattccttgtcctcttgtccatcgttgaagaactctcccaattccacctccaaccattcatctgctctctcctttgggtgctggagatcgagactatcgttatcttctacagggggtgcctcaacaggggcaaggaaacgtgcacgtgtgaata

SEQ ID NO: 218546 - DNA, 225 bp, Glycine max
  unsure (1)..(225): unsure at all n locations
aaccaaaggaaacagcactcgtacacaancccccggcaagggcctccaaaaagaaattttctttaaactcaacacatcgatcgagaataccatgagagagaaagacagaacgaggctggaacaagatatgaagaccccactattatactggtctctctctatctccagagaagcgacttccctactaaaggacctacaccgtatcctaactacatgaactttgca

SEQ ID NO: 218547 - DNA, 457 bp, Glycine max
  unsure (1)..(457): unsure at all n locations
gtgagaagnacctcgatgctgttctctcatagccatttttttttttgatattataacggacgctcaacatgataatcatgttgttgtgggtgaagcctgaaacactagaataccctttacaatagctccacacttgcagtacatgtcaataatgctgagagaacaatgacattcaactcataatgacccatctttacataatcatgaacccattccccatgttgaagtgctcctaagtgagcacaagcacttaacagactcaccattgtaaattcacttggttgaaccctttgtctctgcatcttgtggaaaagctcaaatgcctccatgagcctcttattcttaacatatccactaatcatagaattccaagtaactttagttcttggtggcatgttatgacacaaccttctatatttatcaacctccccacacttagcaagccgcatgatcatat

SEQ ID NO: 218548 - DNA, 365 bp, Glycine max
  unsure (1)..(365): unsure at all n locations
ttctacnggaagtcaccctgcgcactaaatactgacggctatgtccccatcaagtttacttgccactagttgccacttatgaataagcttggttgcgttttgttccaatgttcttgcaactctgaacactgtcacagccggtggaactggaactagttttaccttccatgccacgatgaccccaaagcttgctccttcaccccctctaatagcccaaaacaaatcctcactcatggtttctctatcaagaagcctacctttcacatcaactatgtaagcatcgactatattatcggctgcgaggccatgtttacgcagcaagaattcatactcgcccgcaccaaattgtccttcaacttctacag

SEQ ID NO: 218549 - DNA, 318 bp, Glycine max
  unsure (1)..(318): unsure at all n locations
tgaagtatttatattagttgtatttttatttaaatgaatgaaagnaanngggagtgggtaattnntgataanagagaaaaaatattaatgttgtgtaatagatagnaaaaaaaagttaagaaaaatgaaanaaaaaaaaaagttattaanatatnttttatttattttttaaggtgaataatganggtgttgaaataaaaanttatgancaaaggaattttannaaaattntttaanaaaaatatgaggttaaattanaanctttgaggtgtgaattaaagaagccggaatagatgcggaaattaaggtgggttaggg

SEQ ID NO: 218550 - DNA, 472 bp, Glycine max
  unsure (1)..(472): unsure at all n locations
cagcatggcatcatcggtggctatcataagtaggtgaaggctatgacgcaagagataacttggctcccaaagctgaaaagtccaagtggggaagaagctgaagttcctaaggaaagtgaagaagtgcaagccttgaaggcagagcttgaaagagtgtgagtggtcaaagaaaagctaaagacggcagtcactatgatcaggaaggagtgtgatgagctaaggcatgccaacatgaccacagctgaagcgttagagcaagaaacaaagagggcccaaaaagaaaaatagggtagaaacaagttccgatgggctctatggggcagcaacaatgagctcaagctttgaagggctgaaagggacgagtcaagggtggaaggcatgatattagaggacaagttgaaggcttgtcanaggtcgaagagaagtttgactgaacagctgagtangacggaagagaatatgttgacaatca

SEQ ID NO: 218551 - DNA, 345 bp, Glycine max
ttctccttcttttgcttctattcttttgtactcacaaaggtgatttttaaaaaggcaaggctgatatcttttattctaattccttgtgttgtaccaggactcaatcatcaataatactatctctttccttagcatacccaagatcatataaatacaaaaattattcattgcttctatcatagctatttaaacatataaaattattgctatatgtcaacaccatatataaatatagaaattattcaatagttttatgtggttttgccacatatatagttatttgttaagcatctaaaatgattgttgtatgaatgtatgccaatgtcataagaggtaatttatgat

SEQ ID NO: 218552 - DNA, 445 bp, Glycine max
  unsure (1)..(445): unsure at all n locations
cctccactgagagaagggttttatggaaatgttgtgtttgttgcttgcacagcaagcagtgtctcagagcttgtgcatggaaagctcccacagactacccttttggtccgcaaggcgagacagagtgtctcggaggagtatttgagatccacagtggattttgttgaagtagataggccaaggcagcttgagtttggtggtaaactaaccataactcaatggactaggttctcaatttacaagtgtgctgattttgggtggggtaagccactctatgctggtcccatagatttaacaccaacacctcaagtttgtgtgtttctacctgaaggggaagctgattgtacttgtggttctatgattgtgtgcatatgctngcctgagtctgctgcacagaagttcacacaagccttgcaagtgctcgattcggtttcttgactcacac

SEQ ID NO: 218553 - DNA, 379 bp, Glycine max
agctccggggaagacgtgagctcagttaacgcggccaacaggggatggtgggtttatatgtgatttgtggatgtggagaaattgtttgcaccatcctctgaccgtcacctaataccacatgagatgggtaccccataatcctacaagcttgaaatgaggaagtgtggaagggtgagacttcctacttttattcgttgaccacaaagtggtacctggagatatgtcgcgggggtcaggagaccttgtggacgtcaggtggggtgctattgcccataaccaagcttgaccaatcccgacccaacccgggcatattcagtcagtgagaacctgtgatggacctaaacaagcgagctcctgacagtcaactgattaaaggaac

SEQ ID NO: 218554 - DNA, 404 bp, Glycine max
  unsure (1)..(404): unsure at all n locations
cccccccccccagtcttatgctcatgcagcacttaatcaccgcagctgcaagcnnaccacggaaaaggggattaattttctttccccaacccgtctgcatgggttcccgacgccacactacttggggagttattttaatccagcaaatattattaatgagaagtgagcattaaaactggtattttcaacaaattctaactaatcctatcacaagtgttagaaagagagcgtccaatataatatttctaacaatcttcaattttttaagaggcatcgagcaaatattaagagtgtgttcgatcaaacactttatctaactttcaaatcttctattagctgaaaagtgtgtcttactgtttactaaataaactttttaacaacctctattaatttttaaaacatta

SEQ ID NO: 218555 - DNA, 463 bp, Glycine max
  unsure (1)..(463): unsure at all n locations
tntcgattcattctatgtatgggcggcatcgccctcccctattttgctattaataggggaggaagtgaagaagaaataggttcagcccctttggcacttctctctctttcgaatttgcttgggaaaattgtttccgtgaagaaaatctaagccgaggcgcttccgaaacgttttcgtaacgttttccgtgaggaatctcgcaaaggtttcaaccgttcttcgacgttcttcattcgttcttcatcgttcttcgatcttcaacgggtaagtacctcgaaccaagctntcgattcattctatgtacccgcagtggtccacattgtgtttcgtgcatatatattctcgttttgtttacttttataccccctgttgacgtgcttaagccattttacttaagtcatttctcgcttaacgtacanataaaatcaatctccaccgaacgttagaattgtattatccatta

SEQ ID NO: 218556 - DNA, 245 bp, Glycine max
cagcagggaacatcattatatatcatgtttcacataatctcctttcaacaatgtatcaagttttagctgaatagtgattttcttttgaaaagtaattgtgaaacctatcatgttttaaggtcaactacaacacccaaagggacatactatgttattacatccttccgataacaatgtaacatgtcctcgtaagactcattacctctacacgtgtatggtttaacaccttggatatattatatatt

SEQ ID NO: 218557 - DNA, 441 bp, Glycine max
  unsure (1)..(441): unsure at all n locations
ttgggggctggaaactatataacaacaccaagggtctagttttttcctctcttctctctctctccctctcttctttntcttctttattttcgctttttgcaattccaattctgactttttgttttagcaataaaatttcgttcttcaatctataatttcgntctctatttgattaatggaaggctaagtccccagcgttgttttctcttgaggatcaagcacagttctctttgaggttctattattactgttaaattttgttcagtttttcctcttcactaattactctgaatttgttgctattaattcatgcatgcttagtgcttgattaattgtctctacgcttaatttacgttcatgcttaatgatcgtttatgagtaattggtgtatgtgttgcttaatcatataatgaatgccttatgttaaatctcgcttagtaa

SEQ ID NO: 218558 - DNA, 455 bp, Glycine max
gacctcaagtcacctgcggcatgcaagcttgtctagatgtgtctaattttttttcagctttgaacaatatacttgcccttcatttaactgttttgggctcggcggccatgctcaacaaagtactttcgacacctactgtacgttgatttgaccaatgctgatatgggaatgttgcgacaatccttcaaaaccttattgatacattctgagagggtggttgtcatgtggccataacgacatccttctttatcataagccatcgtccatttttcctttgaaaagcgatcaatccatgttgctatggctgactcagttcatgaaatttttctaaattctgatcacaaatgttcttgcaaggagtggacgctgcataaaattagttatgaacaacaactttaagtatatattaaaagttaaatagatgtgaacatcaaatataaaatcttacccaattt

SEQ ID NO: 218559 - DNA, 464 bp, Glycine max
  unsure (1)..(464): unsure at all n locations
tnctctctaagcttcttatccaagacactgtcttggtggtgaaacttcttctttcatgacttattccctaatagatgacgtctgctctcgcttcttctcctttatcttccgctgcatcttcatggtggaaaatcaccattgaaagactttagtaaagctcaaagatgcaaccttcatataagcttctcaaacaagcttccattagtatcaatatacatgtttctaatagtgtgcattgcaccatatgaacatgatattttagagtttttagttagatattgtcttgtatgtagtgcgagttgaagtatcaaaatagacatacatgtttctaacatagaaatgtaattagtcgcctgatatgaaacagaaagtttccttcaaacacatgaaatttaatatatntattctttatttaacaactacctcaaataaatctattcttggatcaactggttatggactta

SEQ ID NO: 218560 - DNA, 332 bp, Glycine max
aagcttaaacaagcggggggagcaattcttatggtgttgtaaccgataaaaacagagagtttttgcctttgaacaattcttctaacttagacaattgtctcataataaaccatgatgatgcatgatgaaatacagatatcaaatgtactaagatgcaccaaccaagataacaaccaatacatatgccactcaagagagttgggcatgtaaaagccaaccaaaacttcttcagaacttcttcgagcttttccttgagcttcaagctatagcctttgggtagtccaccatgtcgctcattggtcatggtcggcaagtgtacctgatcgcacaag

SEQ ID NO: 218561 - DNA, 466 bp, Glycine max
  unsure (1)..(466): unsure at all n locations
tgtgactctttggcaattctttaggactagttacttatttttttgtgactnttanaaaaatcttcagaaacaagtcatttgaataattgcgacttttggaaatgtatttttcgaaatcagtcactggtaatcgattaccattaaggtgtaatcaattacacatcaacaaatgtgactctttattttgaattttgaaaattaaaacgtttagaagctctagtaatcgattacaagtattgtgtaatcgattacacaagtttaaaatactttaaaactttttaaacataagttataactcttngaaattgaaatcttaacattntaaaacactggtaattgattactaccttctggtaatcaattaccagagagtaaaactctttcgtaatgaatttgtgaaaactncttgtgctactcaatatnnttgaaaatctnttagtacttatcttgattgagtcttctcttg

SEQ ID NO: 218562 - DNA, 233 bp, Glycine max
  unsure (1)..(233): unsure at all n locations
ggagaagccaatccttaccctcggaagcnaaaaccaagagaacgaaaattgtccatcaaaggaaaaaggagaaggaaaatttccaatccaagaggaagctaacaaaaggagagaatggaaaatttcaatccaagaaaataagagaggaaaggaaattcccaatccaagaatgggaaagagcatcaagaaaagaaagaacattcccactccaagaatggtggacagaaaacaag

SEQ ID NO: 218563 - DNA, 433 bp, Glycine max
cctaggattcaaattggacaaaatattgtttcagctatatgttttgtacaaatctatttaatacctccttaatgtgagtggccatcactcttgtaatagactcacttggaattggcaaaggatctcttcaggtgcttgagtgtatttgttctaacctatgattgccattaactgggaagtggatgtagatcataatactggtgattaaactatattgcatgatatctggtattacttctatcataatcatataaatgcataatcagagattggacgacaatatctatatcatccaatctagtccttatgctgcaatctacctttctgtccaactgagcattcaatgacgcctaacaatgtatcgttcattctatatagttagttgatagatggttcaattaacaagttatgtgtgtaaccatttcataatatt

SEQ ID NO: 218564 - DNA, 339 bp, Glycine max
  unsure (1)..(339): unsure at all n locations
aagctatggatcattgatgtgcttcatcattctcaaaaggttaaaggcaaacttttggtcattccacacatctctaagntaccattctttatgtcaaccacatatttagtggtgagcataaatggtcgttcaaagatcaaggttacctcaacatttntctttatgtccattatgacgaaataaaccgaaaatatgaattcctggacctttacaagaacatcttcaataatgacatgtggtcttttgatggactagtctgcaagttgaagagtcatgtaggttggcttgagctctaaatcgccaattctcttgagcatagaaagattcattaggctgacg

SEQ ID NO: 218565 - DNA, 440 bp, Glycine max
  unsure (1)..(440): unsure at all n locations
ctttggagtagaaacatgggaccaactcattttatntcatttttgtcgnatctagtcaaggtctgagagaccatacaagttttctagcgatttctaattatgtgggccattaagtctatcatatgctgacaatagccgagaagcccatgaatttcttcgggggcggagtaggtgtccgccattgccttggccttggctaacaatcggngaagttcttgactcccgttcaaggtaagagcaaaccgatccatccacatggttgcctcttggtgtaaagagtcgatcacccttcctctagcctctttttctgcgtatacttgggcatactcgtccgcgaccctatgctcgtgggccgcggctagacctaactcttcttggtacttggcgatgatagctagcatgttggtctccgtctcgcataaacgctgagacaagctcct

SEQ ID NO: 218566 - DNA, 327 bp, Glycine max
accggactctaagcacctgcagatgcagcaaaaatttcctcatttctggaacctcggaatcaatgtctcaccttccacggatgtccgattcaggcgcataatatgtcgagaggctcgaaattgaacaacgcaagctcttgagaaattagactggtataacttttcacacggaagctctcgtgaaattcatatggtcataacttttaacactgaggaccgatttaagcttataatatatcgatacactcgaaattaaacatcggatactctctataaattcaaatggtcataatgtcttcacacagatgtccgaatcgggcgcataaa

SEQ ID NO: 218567 - DNA, 277 bp, Glycine max
agattcggacctccgtgagaggagatatgtgcatatggttatgtccagagcaaccgctggagagtttccaacgtctagacataagatgcacccgatacggacatccgggtgaggagatacgagcgataggatatgaccagaggaatcgatgtagaacttccagcgtatagatataagctaaccctgaatcggacctccgtatgagaagttatgagcattaggatatgaccagagcattcgctgaagaatttccaatgtcactgtatgagatgcgcct

SEQ ID NO: 218568 - DNA, 310 bp, Glycine max
tatacaatctccaaagttcaaaccggtgaatcagaaaaggtcgtaggcgtcagtgaagaagctcatgcccgctattacaatggcggtcacgtggtaccattgcgtgcgcgctgaatccagcgcttcaagcacttccaatgccatagtgaataggaaacggtttagttagttgtggttatttctgtagtgcatatatgcgtccttatatatattgggggagtgttttcatcaatgcagcaatgcggcgttactactacgcttacggggatgtgaaccacaaaaaatggggttttttttaatgaggatattc

SEQ ID NO: 218569 - DNA, 387 bp, Glycine max
tctatcctcaatgaatcacatgaaccacagtcacccgcacaagatgagaatttagaagaatcttcataaacttttgtcctaacattaacatgtggaaaatatatcttaagacattcattcctttggctagaaagttcatcatctctatgaggaggaaccctatttggaacctcattaagccaattatcactatagtacctataaaaaaaaatatatgtatacattttagtcatactatggttgagaatgagctaagctaagccatacacattattgaaaaattgatataaaaatattaccctggatttagagaatgagctatgcaaagaagtggacacaactcttactccaccaagaattaagatttcatgaatacttccaaaaact

SEQ ID NO: 218570 - DNA, 94 bp, Glycine max
atgaattcccccccgcacgatcaagatacctcaatctgtgagagattcccacactgacaagggagggccccacctagatcattaccacttagat

SEQ ID NO: 218571 - DNA, 275 bp, Glycine max
gaaaacttgaaatgaactaaacttacgttctgcatgaatgacggacatattgctttccatttatactctgggaacttgtgaacttttacttgcataattgcaaacagatatccaggcatgctcatattagctttcttaagatgtaagctttatttggctaaatgggggaccagcctaataagaataaaaatactaatatactgccgagctggagaacaaccgttctaacctccattataaatgcacatttcttacaaacacatatgcattgctta

SEQ ID NO: 218572 - DNA, 374 bp, Glycine max
  unsure (1)..(374): unsure at all n locations
gtgcaagcttggagttacaagagccaattcgttttttttttatttagnccccncagccgcatacatcagagagcttcttctgccgccagcatcttgtgatgttcccagcctttgatgacagctntccacgttctgctatccagtgatttgaggaaggccaccatccttgctttccagtattcataattggttccatccagaataggtggtatgttcactggtcctccttctttctccatgttcatcagaatttatctccctagatctcactcagtgatttccagtgcccgctctgataccaaatgaaattctgatactgcggacagatgtcgtacacgatgtcacgacatcacccttcagaacatgcagattgt

SEQ ID NO: 218573 - DNA, 408 bp, Glycine max
taactcaagggttaagggaacctccacctttcattttcaccgaccttattcactatgattcccattccttttactccttttctcttctattgaacttgcgtcatttatatatatatatattgaaggagttgcaattcactctgcatttaattggcacaacctgcacaattagtatcaattcccctgccttatttcacattgtcacaattttaattcaatacaaattacgtatcaaagaaattattcaattgggctcaacttatgacactaaggggaaattctctaaacaaatttgggttcacaagaatgtctatctatgcctcaacattaagaaatattcaagcatcattcaatgatatgcatgtcataacagaatacaacagggatgttactgaatggattaatcac

SEQ ID NO: 218574 - DNA, 453 bp, Glycine max
  unsure (1)..(453): unsure at all n locations
tctaaagtagtataatgaagtcgaccacgatgaggagtttatatctgacctccaatactaaatgttgattcaaaagctaccgtggagatcaaaatagctaacacatcccttgcaattgtttgtagtgttggatactttagctcattcaattttcatcacattaagatatcaaaatatgaacttcttggtaaaacttcctcctctaagtagtgatccaactttgttttcatagttgaagttcttgcctttttctttctttcaatgtatctatcataatcacacaatttactctttccatcactaaccacatctagcgattataaagaactagtaaaatcttcatgctttttggtttgatattctgaaaccaaatcataacancaagttcggatcctattaacttgtggaaaaaaatccattgggtaatttgattcacagtaaaactcaagtact

SEQ ID NO: 218575 - DNA, 325 bp, Glycine max
ttcttattgatataagacaataatgtgtatatggcaggcccattttgctcgtctctctaaaaagggctcacaggaaatgcttaattataatattggtcaatgggtatcaataatatctaataaatactgataaaaaaagtatctaataaatttttaaatatatttaaagataaacaacagattctatattttaataaacacattctattaatgtatgtgttctggtaactaacactctacagaaaatggccataatactctcttgaaaaaaatatattcatgcttattggaattaacatatatcaacctcatgtttttttttatt

SEQ ID NO: 218576 - DNA, 430 bp, Glycine max
  unsure (1)..(430): unsure at all n locations
taagcccaaggatctgggaccgtatgaaagangattatttgtttgcctatanccnatcaaaccgcttnacctccgagcttatcaaattagcaccctgtgttacatgtctctcaactgagatgatactacccggatccatcacatgtactcgcactggacgaagtacaagtgaaggataacctcacctataaagcacaacctcagaagattttcgtgtaacgcttccgagacgtttccgtgagcgtttttgtgaagatattccaccgctcttcatcgttcttcgacgttcttcagtcttcaaccggtaagttcccgaaatcgaaccttacaattcattctatgtgcgcttagtggtccccacttgtttcgcgtgttgatatttttatattgcttgctattcgtaccaccttttgacatgctttaaccatta

SEQ ID NO: 218577 - DNA, 457 bp, Glycine max
  unsure (1)..(457): unsure at all n locations
ggatccttaagcacctgcggctgcaagcttggtggttacctggagttatctgtctctcttctaacagcgcaagagactaactatagcagntagctagtggctaatccctccataatattcatggatgagccaatatctgggttagatgccagagctgctgcaatagttatgaggacagtcagaaacatagtggacacaggaagaacaattgtttgtaccatccatcaaccaagcatagacatatttgaagcttttgatgaggtaagtgctgctcttgatcatatgatactgcgttctctcacttttcttctttgacttgccatactacttgagcttaataaaccaaaaattggtttcagcttttcctactaaagcgaggaggacgagaaatatatgttgggccattgggtcgccattctaaccacctcgttgagtattttgaggtaagacgtgtctg

SEQ ID NO: 218578 - DNA, 460 bp, Glycine max
tggtttgtgtgcaatatttgtattggcacttggattgatctctataaagaataacagttggactagttagaaataaacatgattaagatcacattgtatataatttccatgccgcttatccatatttgatctatgtcatcgagtatgagtaatagtggtgatcgttgtggcttagtcacactgaattgtgatgaaaactgcagtggtttcctgttgctatatgagatagaccaaattgtataaaaggagtctaaaagtaaataacatacggttgcgcgcctaaagaattttgtaatataaatgtctaaggttaatatgaagcctaagtaggagattggtagaaattttataattcctaattaattaatatggactacatattatattataacatttattaggtatttatatttagatgagttcaatataaagtgatctaattcaatgagctcattagact

SEQ ID NO: 218579 - DNA, 206 bp, Glycine max
tctgcaatactgttgaacaaccggctttatgaccgaagggaaaattgtcaattttgaaactaggcaaatcccggcaaagtaagtcagacattatgctattatgagttatttatcagatctcaactgcaacttccatatgagctgacaatgacttttattctttttcctttccagcaaaacacgtacgctagctttgtctggctgac

SEQ ID NO: 218580 - DNA, 396 bp, Glycine max
gacctataatactacgcttgtttgccacttcttctcgcatacacaatgagttttatgtttcccagtcgaagaaacatgtcactactgttgattcaagtcctacacttcctaacttttctgctggcaggtccattcttacagaactagagaccattttggatcatatgatggttacgagaagaggacaagttgtgaccaaggttttagttaagtggaaacatcacttgcctgaggactccacatggaagttctactatgatctcaagaagcggtttccttcttttcatccttgaggacaaggatagtattgagggggtgggattgatatggagcaaagctgatggatacacgtgtcatgcagttgctgaaggacacatgtctgtcattgagggagcc

SEQ ID NO: 218581 - DNA, 432 bp, Glycine max
  unsure (1)..(432): unsure at all n locations
gacccgggatccttaaagcacctgcagcatgcagctaggagtggaatttttttttattttattannnnancatgacattaaattactaaattttatcttaaaacccacaacataattactttagcaattaccatcaacaacttactacatttggcttcctttacttaacccatttatctaatttaatcgtttttatatttacacacattacaatatagaaacaacgaaacctacggtcttcacacatttctatcaatctaattttgtgtcttccgttgctttcatcaccaagaacctcctttctctttgtttcttccttgggggagatagacttcatatatcacccttcaccatattgcctctctttccccttctcctgcctcccttccattcactatcgncatcattgggagagagataaatataaaccaa

SEQ ID NO: 218582 - DNA, 415 bp, Glycine max
  unsure (1)..(415): unsure at all n locations
ntctcgctgcagaattcacttcttggttggtgtttntggtttgcgttaaaggcggcgttcgtcattggaagtgcggtatacagactttgtggtagatttatggatggcctttgtggataactgggtggtgggtaaggagaaagtttgttattggctgagtaaagatattgttgggttggtgggaaatttggccgtacaggaatggcagtcacagcatgggtttctccctcatcctcaccctctttatttgccccagttttctcagtcgtcctagtaggatgatcaaatttgcctctttttggacccacattgatcctttcactggcgaagaccanatctgcaaagctttgagggtgcgcagcccaccatcttttcatagtagagtaccgataatgtgtctaccatcacgattatc

SEQ ID NO: 218583 - DNA, 369 bp, Glycine max
  unsure (1)..(369): unsure at all n locations
ctacagcntagaaccacacgcacgattgattagagaaacatctttatatgcattatctggcctgttagaaagacccaacacttctacctactgctgccaattttacttacttgcatttttactattttagcctagacttatttaatcctgttctaaatatcaatatcaatgttttttcaaacaatgccttatttttgaatttaaccctgtctaagactagctccctgagttcgatcctcgtattcatccatcttaattttagatacttgacgatctggtgcgctctctggcaaaccggatttccttgaactatttgcttaacaaaaagtggaccataagtaactgcatggaaaatcaccaccttttttg

SEQ ID NO: 218584 - DNA, 298 bp, Glycine max
  unsure (1)..(298): unsure at all n locations
atctactcaattaaaatcctagcctcaaccagggtcatatcaacaatagctccaccactggcagtgtcaatcatactcctctccatgatactcaggccctcatagaaatattgaagaagaacttgctcagaaatctggtggtgagggcagctngcacgcaacttcttgaatctgtcccagtattcatacaaaactttctccactataatgcctgatgcctgagatttctttttgatggcagtggtcctggaagaaagaaaatgttttcttttctgagaatactctcttgaagtcatcc

SEQ ID NO: 218585 - DNA, 406 bp, Glycine max
  unsure (1)..(406): unsure at all n locations
gaccttaaagcacctgcggcatgcaagctagagganatggttgctttgtcatatgtggtactaagaggcgatcgggcgatggcgcanatcccctcccacttcccaaatcaaacatgaacccaccatccccaattgcccaccttcagctgagcttacgtactcctacgtagcccttatcctcgttcctctcaacaccgggtccccatcaacccctccaagctttcacaatatccaagaaattcaatttncaaacatcatgaactaccctaaaccaagaaaacggggcagaggcagaaaactttgcccaaaacacattcacatattacaactttccttactcaaataccccagtagcattctctttcttccgattccttaaccgttggatcgacttgaacattttact

SEQ ID NO: 218586 - DNA, 458 bp, Glycine max
  unsure (1)..(458): unsure at all n locations
tgtcctgaacttgtacaaaatggggttcgctcgttgtcttaacctacccttcggcgggagggcgacgcgagactcacgggtgcgtcttccaagaaaggaaaatgcatggagtcgccaccaacgtttatttggggaaaacatccgaaaaaccgaaaaagacgtggtctacaaactttaagtgtgaggttcgagagttgtatttacgcacggngaaggtattagcacctgttagacaagtggcctcagatatcttaagaagggggggttgaattaagatattccaaactgtttcccctaattaaaaatctattttattttttactcaagttataaattcccttaatgacaatcttcttaaatattaattcaaatgaagcaacttgaatatgaatataaagcaataataaataaaggagattaagggaagagaaaatgcaaactcagttntatactggttc

SEQ ID NO: 218587 - DNA, 235 bp, Glycine max
tcaactccaaacttttgatgatgatgcatttgttgtccaaataaaagactcgtttggctaaaagaacaggtttcgcttggttatgaccactgtgattgtttgatggttgcacggtgcgaccaccatgttgaccatgttttgaccatcactacggtttgctccggtgaaacccctaagtcgctgaacaggtgctatagagggtgcctggaggtcgctgcacattaaaaggtatctg

SEQ ID NO: 218588 - DNA, 220 bp, Glycine max
ccttcaatgtctctgatatatctctttttgatgcagatggagaatcccgctttgatgacaaatccttcttcccacgaagagaatgatgaggacatgacccatagccagtggcaaggatccacttgaaggacttggatgacctatgaccagggctagagcaggaaagtcatgaagctctctaacaagtgctgtccatactatttgaatacaatccccagtt

SEQ ID NO: 218589 - DNA, 427 bp, Glycine max
  unsure (1)..(427): unsure at all n locations
ctcccttcccccccccaaccagccttgtctgctgcggcnctaancaccgagngcagcaggaagagagaaagaagaattttttttaattcgaacacgcagaaagcttttatccgacccccacgaaaaccgttgcaaacaataaatttaactattatagaattgacataaagatgaatatgcttactagaactaacaaaagctttatcagaagccaaagaaagaacaaatactcacaaatcgtgcaacataatgaatggaataaaataaaggaattgttacagaagcataaaaaaaatgacttaatacataaaggacttaagtttctacactaccatcttgaactgaagccatcgtgacttggtcgatgctcaccacttgaatatacaagatacgacactttcaaggctttgtgcccaaggcaaaaatc

SEQ ID NO: 218590 - DNA, 320 bp, Glycine max
  unsure (1)..(320): unsure at all n locations
cgggcacacatgccctcttacgtaggacgactgcctctcntccatgacatccgacagccgtcgatataaattactatttggcaataaaaggacaaaagcttcggttggagtccccaccctcaagcaaatctacatactattcccaaggctcttttcgattaacacgctgactctgaaactttggtttcaaacacttttggatgctgggcaataacaacttactttcctttgctaaagaagaacccgccgctgctgtgaaaactgtattgagcttaactacccgtccgtctaattacatgctcacctgctgagcagtcttc

SEQ ID NO: 218591 - DNA, 445 bp, Glycine max
gcttgtcaaacctgaagatatcttcctatatgtgtaacccgttaacactgacaacccaaataatgcacaacttactccttgtctggtgatcaacttccagggcttaacacgcttggcatatctttggctcgcatagattttgcaccaaagggtataaaccctccccacactcaccctcgagcctcggaaatccttatagtccttgagggtactctctatgttggatttgtcacttccaatcaagacggaaatcgtctctttaccaaagtgttgaacaagggtgatgtgtttgtgttcccaattggtctcattcattttcaactcaatgtgggctatggcaatgcagttgccattgctgctcttggcagtcaaaatgcaggaactatcactattgcaaatgctttgtttaaagccaatccacctatttctcctgaagttctcacca

SEQ ID NO: 218592 - DNA, 465 bp, Glycine max
  unsure (1)..(465): unsure at all n locations
tgtacactgatatagatcatagataaaagtgagatattgttatttctttggtggaaatcccttttgtgaggagaaatctatctctatgttgtctaaacacaaaatccctcttgttgtaaaagtctgaaaaaggttgtaattagtggtgttgcttatctagcagtggctaggtgtgaagtctagtggggttgatgcaagttgttgaaatccagtggtttgctggtccagcaattactaattgtgttagtgaaatctcatattgaagggtgagactgaatgtagccaaaaggtgaggtgaaccagaataaaaatcaccgtgcatcatcttcttcctctctttgcactgattntatgttttgatctgttaacctgattttgaaaatcactaaggcagaaaaccttttttatgannataattaaaactaaacttttacatcaaagtctttataactaaaccactccttt

SEQ ID NO: 218593 - DNA, 406 bp, Glycine max
  unsure (1)..(406): unsure at all n locations
aacagaattactaagtatttattatctattttaactaaaataacttataacactacaaaataaccataaatgggaggagtttgatacaatttacataagttttatacacaaaagttaatcatattcaccgactaacaactccctaaagtttacagttttgcttgtcctcaagcaaataaagaacagagcattggttcccaagtgacaaaaatatgcagtgattatgtacaaaggtgtatgcaacanaagtcactaattgcatgatacaagaatgaagcaaaatgctctcatcagttgtctttcacaaaatatgcagttattcacagagaagaataaaatgtaacctgtacaattagatgaagttggcataagaacaatattagggaagtagcttaaaccacaatct

SEQ ID NO: 218594 - DNA, 462 bp, Glycine max
  unsure (1)..(462): unsure at all n locations
tgctttacaatctcccctttttatgatgacaaccctgaaatctagaaacacatacactntttttgtcctagtcgatcactcacttaattctccatattctccccctttgttnttgaatntatgctttattttaagtcttgaaaaatataacatcttgatttcataaaatacccatttttctctccccctttggcaacatcaaaaaggccaaagtgcgtaaaacatacataatttaaattatacacaaagcattctttgtaaaataaacataaaagattccaaaccaatcatgaaacaaaacatgaataaaccaaattaaaatgcaaaccacatagtcatatatcattaaagtaattaagtttaaaacacataaccataaacaaccaagagcaagtcaatataatcatcatgttcagtcatactaagcaagtattaaaagaaatactaagtattaaaatgtca

SEQ ID NO: 218595 - DNA, 349 bp, Glycine max
  unsure (1)..(349): unsure at all n locations
gacactatgatactcaactnggaagatgcttcatggaggatatatttaggagaataaagagggggggaggggggagcacgaaattgaaagatataacagacggagagaagtggaactttgaaatatgtctcacaagactctcattcatcaaagttacaacaagtgttacacatgcttttatttatagactatgtagcttccttgagaagctttcttgagaaaactttcttgagaagtctctttgagaaaacttccttgagaagtatctttgagaaaacttccttgataaactatagcttaactacacacacccgtctcataaataaactcacattcatgagaagcttac

SEQ ID NO: 218596 - DNA, 73 bp, Glycine max
ccccccccaccggcccgccccgcccccccccccccccccggctgtgtctgacccgaccaacccgagagagcgg

SEQ ID NO: 218597 - DNA, 387 bp, Glycine max
  unsure (1)..(387): unsure at all n locations
gcaccccacctggcgtcctcctaacccccgcgacatatccccaggtaccacctgtagtcaactaataaaagttggaagactgactcttccactctttctcacaccgagcttattgngttatggggcacccgtcatatgtggtactaggtggcgattgggcgattgcgcaaaacaaatatcccatttccacaagtccaggcataagcacaccatcccaagttgcccacctttaaattgagctcacgcacacatacgtagcccttctccttgttcctctcatcactgggtccccatcaacctctctaagctttcacaatatccaaacaattcaattccatttgtcatgaaactacctctaaaacagagtggaggcagaaatctttacac

SEQ ID NO: 218598 - DNA, 429 bp, Glycine max
  unsure (1)..(429): unsure at all n locations
ngacgccggaaacttcaccttcaccgctgcactcaaccttgctacccccacgaacaagagacaatgccgcagganaaagtggaaaatgagaagaaagctctttgaaaatggagtaagaagcttttccggaaaagaaatgccatttttaaggaagaaagttgataggggcaattttggcatttcaaatttttgttgggtgcacctagcaacactcttttatttattgtaattttggtccaaactgtttagaagacccatgttttttttttatctttttgttcagatacactatatgtattggtttttgttttcaataaaaaaacttttggcattttcataaaatttggtgagagcttctctttgggttccttgttgaaccaatctcagacttatcaaggtaatctttgtggcgtctaccctgatttatct

SEQ ID NO: 218599 - DNA, 456 bp, Glycine max
tccattgttcaatttcgagcgtcacgatatattatttctctgaatcggacctccgagtgaaaagttatgaccatttgaattgctcaagagcttccattgttcaatttcgagcgtctcgatatattatgcgcctgaaactgacctccaagtgaaaggttatgaccatttgaattgctcaagagcttccattgttcaatttcgagcgtctcgatatattatgcgcctgaaactgacctccaagtgaaaagttatgaccatttgaattgctcaagagcttccattgttcaatttcgagcgtctcgatatattatgcgcctaaaaccgacatccatgtgaaaagttatgatccattgaattgctcaagagcttccattgttcaatttcgagcgtctcgatatattatgcgcctgataccgacctccatgtgaaaagttatgaccatctgaattgctcaag

SEQ ID NO: 218600 - DNA, 410 bp, Glycine max
  unsure (1)..(410): unsure at all n locations
agctnctcgatcctatgttctgtttttntttgntnttttttgtnggggngcatagaacanaaactattattgnganctatatctatatatttattgcaatgtgttatctaatatatctaatgtaaaagagtagtgtgtggaaatgtccaaaatggacatcttttatcttaaatctagatttcattttttaaattcagacatgagttttgatttagattatgttgtaacagttaattaattcaaaatatgctctcttatgataattcttatttgattttcattcattttttagaatttgtttttttttctttaaagcttacgtatggcttcgaaacacatcttgaaagagctcacggatccgcagaaagatccttctacatcatggagatgaagcttcttatccctttctc

SEQ ID NO: 218601 - DNA, 452 bp, Glycine max
  unsure (1)..(452): unsure at all n locations
tgtcaaaatccagggcaaacacgtgcgcagtccaaggctctttaaacccaaggttcacccttggtgagcctttcttttgctaagttcgatctccataggaactcaagttacgcaaggtccacccttgacaatctttcttattcctaactcttattcgtgcaagaacgcaagaacatcaaaaacccaaggtccacccatggtacgcactcctatgaaacccaaggtccacccttggtaagtactcgttcaaacccaaggtaccctccttggttcgctcactccttaagaaccatgttgaccataacaaaaggtctagtttccttaaggctaagcacactaccaccagactggatggcaagaccttcaaccaggtggaagttatcctaactccttataaccatcatgggaaaagctctgtaggtcanaacaacctaccaccaaacaggttgaca

SEQ ID NO: 218602 - DNA, 457 bp, Glycine max
  unsure (1)..(457): unsure at all n locations
cccatctccttctcccgtatnctcttcccccctcccccccccccccagcccttgatcttgatgacacctagcaganccnnaccncaagcaccgcagcatgcagtggacaaatttttttgttttgagggtccaggaccgatgaggcccgtnacgccacgcctttcgatcctggcanctngtgcacgggggggtttacacccatgccgcaaagagcctcttgatggcgtggcacatgcagcacgtgctcacgctgaaaattaccaccgcgctcttcgacgccagcctttttatgcgctccaaaggagttcccactaccgccgccgccgggttcctaagggcccgcacgtagctcccccaccacgcccgcgccggttgttggaatgcattctcaaaaaacttatgtgataaagaatgacccgcaaatgtttgaaatgagacgaaatgtctgggttgcttg

SEQ ID NO: 218603 - DNA, 394 bp, Glycine max
  unsure (1)..(394): unsure at all n locations
acacttagaatactcacgcctccattttctgttactagcgnggatggatattgctatcttctgtatnacgcancaatagatctcgcaggaaattcctcttcaaacaagtttataggccaattgcttggaaaaaatgattcccaaattgtaaaaagccgtttgcgtataccaatgaacggacggattcaactggtattgatatacacatttcactgttataagttttaaccctcgtatctaagtgccttcagatgaatctgttagagccttcattctaaatgtgcaggagaagtatggtatccttagcattaagggacaaatgtactggtcataacgaacatactgtgtgtcaataaagagtgggtgggtggaggtggggtgttcttataatttc

SEQ ID NO: 218604 - DNA, 272 bp, Glycine max
  unsure (1)..(272): unsure at all n locations
ataaatccatcaccatagtaatattaaaaatctagcccacaactaaataaagcaattcatattaagtgggaatatcctcccttgcactactttaagatgagnttacctaaatcacatataaaaatctcattctatcccaccattagttcatgtgatttcaacttaagactatttggtaaattctctttataaatcaactattatgtttgaggaggcttctcctatcttcatttctgccacaaatgaaacttgaagttgctgtacctctgcgc

SEQ ID NO: 218605 - DNA, 457 bp, Glycine max
  unsure (1)..(457): unsure at all n locations
attcccaataatggcttcgtggagacgaggatatgcatgtttattgaagagncctctttgagaaatttttttttatgagaatttatgagattttttgtgacactgtagcttctgtctctctctctagaccttggcttctactaagaactcctacccctctcataaatgaaaaagctcatccctctaaggccaaacacaccaaaactcattatacacatagaacacatgctcaacatgtacattactaactcatcaattaattaattcatgtaaacacttaatttaaatttaatttttcttataatttaattaaatcactgcaacaatcaattaataaaaacataacgttacaatatggctttttatttttctattattttagaatatacattcaaattcatctctagatatatatacatgggccacaaatacaaatgggtcatctaatcctatgagc

SEQ ID NO: 218606 - DNA, 277 bp, Glycine max
ttccttttttcccccaccgcataaaatcgcaagggccatcttgaaaaatacctacgtcatgaacttacacggaatgctaatatgaaactctcactttttactctacaaacatgttccttgttcactccatctcccaaaagaaaatatcaagacgaatgcttcccatcgtatgatgcgagacctcactcgattgaaggtagaatataaagttgaaatctacacagagtaattggtggtaaccactaccaaaggtaagcaccaacgaaggcccacatgc

SEQ ID NO: 218607 - DNA, 410 bp, Glycine max
  unsure (1)..(410): unsure at all n locations
gacatctgaggcatccaagcttgatatcattggtattaaaataattaatattatatattntagtatatcttattatattctacttgtattatntattattcgtcacatgatatatatgacaaaagattattcaatgttatatnttgttctataatatttttcttctctatgtctaatatcataattttaacatgtatcggaattattatgttttttttcttaattnttttttgctacattccttaatattnttttcaggttgtctgataattaattatttaatttagtaactttgtcgtcaccatgagcatggcctggcccacttctgattttcctaatacatgtagtatttcctagttgacattaatcacattgcgtgattggacattgaaacaaaatttgtgatcatt

SEQ ID NO: 218608 - DNA, 369 bp, Glycine max
  unsure (1)..(369): unsure at all n locations
ttattgatccaaaactaaactacaacatgaaacacttttatttcgctctcttcttctctctaagacaactcattattagagagtgtgagaccttgaaatcttaacacaaatgaccttgttgctgagttttgtcttttgaatttggactgataggtaaaaagaccttcatctttcccggttcatcctcatttttgntttcctttatggacacttttcaaagcttcataaaagaattctcttccacggttttgatgtttctatgttggcttctggggttcggatggtgtggatgatgtacaactattgtatgagtgaaggacagcttgatcctgaccccaagcttctcatttcttactttctcatctatag

SEQ ID NO: 218609 - DNA, 224 bp, Glycine max
accgagctgcaacttcttcgggggcaccacgttttggatttttttccatcaaggccctgagtactgaacatttaacgacacactaacatcatacctaactcaacactcaattattttatcgtccatttaataaaatttctgctatccatgccacaataatagcatggcttattttggctcataataatggtcaactaccacccccacacgaagacgaaccttca

SEQ ID NO: 218610 - DNA, 189 bp, Glycine max
ctttcgacgggctcttcggctactgcgctttcgtcggaatccacttcatcgtctttctacccggcaacaagatcatcaccgcgcaactaatccaaccggtttcaaaccggtctctagtcttaagcattcaacacccgatttgacggctgcatgaagctgattcctgaaatcaccgccgaattacccatc

SEQ ID NO: 218611 - DNA, 347 bp, Glycine max
  unsure (1)..(347): unsure at all n locations
cctgangcatgcaagctgatttcttgagtatgaccgcactcttccctctttctttgnatgangtgaacattngtcttacatagtcaacaaagcccggcttctcaatccaatgaatgaacaccttgaatggcttatgtcctcaatcaacatttatatggttcaactagaatgggaaatgatcagaaataaatctattccagacatattgtgttgcattgcgccaaaggttaagccatttaattaataccaaagcccttttcaatctactcattggatttacccgtgtcttaatctcataagactttcttctcatctgatgtaattcccccaactccatattttctatg

SEQ ID NO: 218612 - DNA, 151 bp, Glycine max
ttagtaatgatatatactagtttaaaataaatttaatttaatattggcgactattaaaatgctattatatacataaatgctaaataataaagtgtaacacccgaaaaaattacacaaaaaaatttggttggcatctggcttataattaatt

SEQ ID NO: 218613 - DNA, 316 bp, Glycine max
agcttatgatgatggatcaaggtggtggaagcagtcatgatgttttgttgcatgacgacaaagagctcacaagaatgatttcacgattgagtcgccctgcccaggatcaagatggaggtcaagagaagaatcaggaccattctagaatcaagagaagtttgatttctagattaccgagaagaaatcatgaagacctcacatgggaagtgttgctcagatttttgacagaacaaacatagctcagttttgtttttcagaacagttgttctcaaaattttctaagttaccagagatctactctctggaaaccgacttc

SEQ ID NO: 218614 - DNA, 445 bp, Glycine max
  unsure (1)..(445): unsure at all n locations
agcttttcgttaaacccattttgaggcctttgagctccttatatgagaactgaattggtgcaccagaagcatactccacgagatcatactgaccatatagtcctccaaatcttggaatgtttctgcaacaccacaagtccacaaccataaaccaccctgaaaggcaattgaagttaaaaaggtacgaaaaacaagcaccagtatcattatccaagcatgcttgctccaatccttttccttccaaggaattggtgatgggtttggagccagtggaagacacaccttgacatatgtagtgctagttagtgctggactctgatatccaccaaatatatcttttgtctttacgtaacagaaacttgatccatctgacaatgtaagagaagcaaaacaagaaccagctgaaagacanatttctctacaagctgacataggtgtatacaac

SEQ ID NO: 218615 - DNA, 413 bp, Glycine max
  unsure (1)..(413): unsure at all n locations
agcttctatggaggctggatctttgagcttttatgatgtccttcaatggtgattttccaccatgctgcggctgccattcttacatggccaaatnttgaagacatgttttgcacactcgattaaaggctgccgtcacttgtgacgggcgcgtggggtgctaataccttccctatgtgtaaaaaaatcccgaaccctcattttcaaaatccgcagaccttcatatttttggtttttttagcatttttctcaaataaatgttggtggcaactccgctcgttttctccctcgaaaacaaatgctttggcctatctgttntggcctttcgcactcccgccgaaaggtaggttgtgacacaaggaaataataatttcaccaaaactcatggttctagaacgaccaaagagatccatgtg

SEQ ID NO: 218616 - DNA, 300 bp, Glycine max
gataacatagttagcatatcttttagcaccacctaaaaaaaagatgccgatataaatactacctagtgtttagaaccacataatactttctgctcttctcaggttccagagaactaatacagttaacacagtttaaatacattgtgaaaattaagaatgagcagttggcataaattgcagtactttttataagtcaaatgattccattgatactgtctactacttggtgctctacaatgttgtagcaaaatgtttattattgtcactgcttaaacactgatttgaatacaatggtctgag

SEQ ID NO: 218617 - DNA, 334 bp, Glycine max
  unsure (1)..(334): unsure at all n locations
agctntaaacaacaaatgcttgacttgttttctttggccatatcaaaagnaagttgctcaatcccaactcaagctatatgatattcaagttcatgcatgattagtattttcttgtgaacgtagttggtacttagtcttgcaaaacacattatatgctggaaaaagatactggggactcacgatgtgttaataagggctagagagacaaaaaggatgagcgataattgataatttactagaaatcacaaataccttctactagagacaattcagctttataaggtatgatgattgattattgcaacacgttctttttccagtaataacaacatca

SEQ ID NO: 218618 - DNA, 313 bp, Glycine max
  unsure (1)..(313): unsure at all n locations
atccttagagtcaccgcggctgcagctgagatangaagtgtttaaggttttctttcttttttatccactgaccacagagtggtacctggagatatgtcgcacgggtcaggagacctttgggacttcaggtggggagctattgcccataaccaatcttgaccaatcccgacccaacccaggcatagtcagtcagagagaacctgtgatgtacctaagcaggcgagctcctggcagtcaacagataaaaggaacaaagaccacatagcaaggaggctcgtgtagtggctggcacccgatgaatttgtgctatata

SEQ ID NO: 218619 - DNA, 341 bp, Glycine max
aagttgattggctagcctaagaaccgcgtgaggatatttgttttgggcaagcgcgcaaggcgctggctacttgctgtccgttaaacctaaaacatcttgtttgcatatctcaaatgggctaagcggcagcacagctaaaccagtatgcattccggtagcctgggtgctcgttaacggatttgcagaatttcctccgcaaactctctaaccctatgggcatgcaagcccaaaatatctctgaattgcattccattttgggcttaccgcacaagttggccttatggcaaaaaataatcaaattcttgactctatatggatgctctacccacagctaatgccac

SEQ ID NO: 218620 - DNA, 235 bp, Glycine max
aaaataagatgcctatgcaatgagcagcaagaatgcacttcaagggaaggaatgaaactacttgtggaaaaggctcataaacaatctatcattcatcaagaatttgttccaagaacctaagggaaaagcttctcttttccctattccagaaacagaaccctggaatcaactcaccttaacaccgcaattcttgaactagattacaatgtcctattagaatagatttatacaaaaa

SEQ ID NO: 218621 - DNA, 439 bp, Glycine max
  unsure (1)..(439): unsure at all n locations
agcttgccatgatactgcaaatttaaaatattagantagttgcacttctnttattaataaaaaaaaaatacctgaatttatatatcttactatgtcaaggctctttgaaaacagtttaatgagagcttcgtgtgagtttttagtaatgtattgtttattattagctaatattttttcgcaaagtctattaaattaagaacgaaagccactgtttaaaaatgaaacacgcatttaacgagagtctcttgtaagtttcaagtgatattaaaaaaaatatttgaaaagaacagctgataaaaatatattattaacatctttttactatccacgatgaggttagtgtgacttaaaaataagtaaaaacattgaacaatgacatttattggaatattaatttaaagaaaaaatatttatacaatgtggataaatttacactctc

SEQ ID NO: 218622 - DNA, 397 bp, Glycine max
  unsure (1)..(397): unsure at all n locations
agcttaatgtggcgttgtatgcataaatttctccttttacactcttaccttcttgtcttgtcagaatacaccatccatcttatgactcctcttttcctttgtcaacatagagaataatttttctcatgttggcatctgctggcctaatttgtaatgttattgttgttatattaaactgcttgccaaattatctaatgatgttggccatttggagcatgattcttgttacagcttcaactattgtctgtcatcttagagtaacaaattattctacgtagtagttctatatttgaaaaacctagtattgtggttctataagtataaaagcccaaaatgtcaataatttttggaaagaatcacgttattntacaacaaaattgaacgggatgatgttcaa

SEQ ID NO: 218623 - DNA, 444 bp, Glycine max
  unsure (1)..(444): unsure at all n locations
agctcgtcactagacaagtgaatggagattntcaagccttatatactcaaatgcagaagcactatcatctaacgatttgtttgctcaatagctttgacgagtacgagctcaagcacattttcaaagaaaacaatggtagagcatatgtgttatcaaagtcagcaagtttcaagaagttagggcaacatagaacattcatacaagagacactttttacaccaagcatagataaatctgatatatttgcaagtaagattggtagtgattctggttgaacccaatatggaattatctggtgaatgatcagttacctataaatgaaatcaaggtgaagaaagtaatgttcaagtcagcccattatattgtcattgattgagagattttttgacgaggaatttcttctttgtattgaaatgttagaatgatgatgaaaaccaatatgtc

SEQ ID NO: 218624 - DNA, 377 bp, Glycine max
  unsure (1)..(377): unsure at all n locations
cttattggtaatcgattaccagtgtttgtttgtgaaaaatctatagatgtaactcttcaaaaaggttttgacttttncaaatgggttttaagtttttctaaaagttataactcttctgaatggccttcttgaccagacatgaagagtctattaaagccaggctttgttttgaattctcaaattaattcattctatcaatcaatcttttccaattcattctttacacaagcaagttttccacattnaattctgagtctctctgaacttcttcttcttcttcttcttcttcttcctttntccaaaagctttccaaagttttctgggttttctaaaccttgaaaacttgngctattcatccttttcattctcttctccct

SEQ ID NO: 218625 - DNA, 468 bp, Glycine max
  unsure (1)..(468): unsure at all n locations
ctaagtcacctgcggcatgcaagcttgtactgaacacttcattngaagggtcattntcattttcataataaagacaaatgtaatttctgtactattattggatttgttgtgatgatggaacctagtactgttgcttgccaattattttgctgtattctaaactttagtctgccttctcttggttttggaatgcacatgtgatttttttttctttttcttttttcttcattgtagattcactctttgaagtttgtaatgaagatttcttgcttctttccactataaataattgcagtatctttgttattcgttggattgatttgttgcgttgctggaatcaacgatttgttaccaattattttgactatcctcttttttgtttttggttttttatcatgcaaaaactagaanattagaaaaatgaactgagcatgagaaaccaggctgtttacagaatctataatgaat

SEQ ID NO: 218626 - DNA, 256 bp, Glycine max
tccactccatttcacagtaaccaggttttctctattcattcagctttgctggcatttactcaaggtataatcattcttgtacaagaatatcccaatggttgagctatcagttttgtattggcctttctgtcaattattgtctttctaactataatatttctagcatttctaatctttttctaaatcatcacaagcttgatagtgttattgcacctggagatactgtgcacataatcggtcaattcgacctgggggg

SEQ ID NO: 218627 - DNA, 388 bp, Glycine max
  unsure (1)..(388): unsure at all n locations
agcttctataggaggttcgttcctaatttctctacaattgcatcacctctcaangagctggtgaagaagaatgtggcatttgcttggggtgaaaaacaagagcaagaatttgctttgctcaaagaaaagcttactaaggcacctgttctagctcttcctgacttttctaaaacttttgagctaaaatgtgatgcctctgcagtgggagttggagctgtattgttacaaggtgggcaccctattgcttattttagtgaaaaaattcatagttccaccctcaactaccccacctatgataaaaagctttatgccttaataagagcccttcanacttgggaacattaccttgtttccaaggaattngtcattcatagtgatcatcaatcac

SEQ ID NO: 218628 - DNA, 312 bp, Glycine max
ctgagcatacacaccctgcgtctccatctctgactccgcaccatatgaagctagaggtgctgcacttcaatgggtcagacttcttgggttgaatctttaagatcacccaattcttcgaatatcacttcactcaggaccatgaacgcctcaccatcgcctgcttctaatggaggcacctgtgttggcttggctctcgtggatggccgcaatggccaacttacctcatggtgtggtctccttcaagcactcgagactcgttttgcacatcaacgtatgaggatcccaccataactctgttcaactgatgcaaca

SEQ ID NO: 218629 - DNA, 442 bp, Glycine max
  unsure (1)..(442): unsure at all n locations
agcttctcaacanaaagcataccgcgangttgtctgtttgnttntcntangccnctcatgcttggtgtgtagagaatcactgcttggcttccacctggtggatgtatctcttcaaaatctgttagagatgggtactcttcgatgccttgaattttttgatgcatgcttttactaagactagtagccactaagtttttctccttggaccctttggtgggtgtggctttaaattgcatttcttttaactcataatgtttatcatcttcacttcctttggggccaatctctagttcagccatgttgtggggcttgtgatcttgatcatcatagaatggtggattgagctgaaggactaagcccttgttcaaggtggttatggttggaatgagattcaattttctatggaacctgcttttcattcctttcatgtctaaaatggatg

SEQ ID NO: 218630 - DNA, 259 bp, Glycine max
  unsure (1)..(259): unsure at all n locations
acctggctttaattgacattattaaagaccatccttggttagtgcttggatgcattcatttccatcaagtttacgagaagattcatgaataccttccatttgtagacagagctcgagctcatcaattgtgcatggaagttgcgctgaacaacgcttgatgacaagacaatgagagattttcttatgagaatcanagcaatttgcgagttgcttaatattgtcagagatccagtgttgcatcatgagcatgccaacatta

SEQ ID NO: 218631 - DNA, 338 bp, Glycine max
  unsure (1)..(338): unsure at all n locations
caagctttatccgtacaaagcgggttctatcttctctgacctctgaagtcaggggacatgcggnggtaccgtatggttatccgcacctttcgtcaaccaggggcaaacgagcccgttgatgcgcagagactaacatcgtcttttgtaccttttgtcattcaaggacagcgagttaggtggcaggcggagataccttatggttatccacacctttcgtcaaccgaggcgaacggattcgacggtattaagatgatgttggtcattcgattctgattattttcaaaaattttgcaggtttactctaatcatccggagacatgcaagcccggcaacgcaca

SEQ ID NO: 218632 - DNA, 493 bp, Glycine max
  unsure (1)..(493): unsure at all n locations
actcaagcttcatgatgatgaatccagttgattcaagtagttctgatgttttcttagatgatgacaaaaagctcacaagaatgatttctagattgagtcaacaagttcaagatcaagataaatctcaagagaagaatcaagaagattcaagaatcaagagaagtttgatttccagattaaagagaagaaatcaagaagacctcacatgggaagtattgaaaagatttttcacaaaacaaacatagcacagttttgtttntcaaaagagtttttctcaaaattttctaagttaccagagttttactctctggaaatcgacttgcagtntcctgtaatcgattaccagtggaaaagtntgatttcaaaagctnttaactgaattttgcaacgtctaattgtgtttaaatggtgaatcgattacatatattggaatcgataccagtgtatctgacgtgaaatcaattcattggaagatacatcttcataaatattg

SEQ ID NO: 218633 - DNA, 449 bp, Glycine max
  unsure (1)..(449): unsure at all n locations
agctgtgccganatagtgtttgctgttgttttgatcgaagngggnctgagaagaggcaaatntgattatcctactttgatgaatatgaagcttgcggaaaatggagagaataagaaggagggaggaacccatgttgtgattgtcgctcctacatggccaaatttcccaccaactcaacaatatcaatactcagccaatatcagcctttctcattacccaccaccctatcagccaagaacaaccaaccatccataagggccacccctaaattagccacaagactcgcctgctacatatncgataccaaacaccacccttaacataaaccaaaacaccaaccatgaaaggatatttccataaaagaagcctatataattcacccccattccagtgtcatatgcttacttacctccatatctactcaataatgcaatggtgaccattatccc

SEQ ID NO: 218634 - DNA, 370 bp, Glycine max
acagaactactcttttatttttgctaggctcgcactggcctttttctttgcaactgagtcatatgctcccataagctcgcaaattgttcggcatactttctgcagccctttggctttgtcaaggctcttgcgaatgcatttcttccgtaccggccacttcttcaacgtggtacggccaactgacttctcttggcagttgctttctaactgtttgaagttggattttcgtctttcgggcttaaaatcttttgtaacactttacttgggaccattaacctctatatacttatcattctggaccaccatgtgcctacaatgccttactctgattttcttacgagtccatcctatggatcttgatagctggact

SEQ ID NO: 218635 - DNA, 447 bp, Glycine max
  unsure (1)..(447): unsure at all n locations
agctntgcctttagggcttgtacctcgtttctttcttncgaagctntaacctcatcatctctcatagtctttagatttgggagccaatccaatccttgtgtccggtctcttagccacttatgatagccgccgatgatcccattactgcttcccctaagctctctatcctttcttcacgccgcatcccatgccttgcgaactccttggagtaccctcgcattgtggtcactgaaaccccgtgcgatgaaaggagtgatgctntcgtctgatggcactcctctcatggggtagccaagctgtcttatggcgaggacaggattataatttatacaaccccttgttcccatttaagggaacatttggaaatccttcgcatgaagatagaatcctgattcttccttccttctagcgagggaaccaattaacagacgcccatctatgctagcc

SEQ ID NO: 218636 - DNA, 421 bp, Glycine max
atattgtatgactttctggatgtccatttaaagctaatttggtaatttaatcttgcattactttgcagctagagatggcttttaaaggagagtttgaagaagcctcaataacttcagaaaataaggtttgtttcttgttagtttactagctgtctggtgctcttcaaaaagttagtggcctaaacaatatatataaatagaacataactctaatcttattagctagcttttgtagttaaacttcaagtataagaactctaatgaaattttagcatgtttgtcatttaaactattgagtacataatatgctctctaaatgactgattactttctcttattctattggcgatctatttgcatgtaggtgatacaaaattgtttgtgcacttaggtcgtactgatatgattgattttcttgtaa

SEQ ID NO: 218637 - DNA, 327 bp, Glycine max
  unsure (1)..(327): unsure at all n locations
gagaagagggtcataacactcaattaacttataatcagaatgaccaatttcaatattgaagtgaaagcaatagaaagatacaatccattggataacctcaaagaactttattaaaaagagaaantattgtacataagtacaactatatcacaatctgagttctagcgggtagctaaccatagcatagccaaacaatatacaatattgcattagaaataaaagagattgaaacctttacaaattcagaactgtcgcaacgtgcccttttgcgggcgtgcgaggaccaagctcacgggtgtcttttcaaaggaggaaagatgcgcggag

SEQ ID NO: 218638 - DNA, 394 bp, Glycine max
atagacttcggatgatgctactttcatagatggaagataagtcaagatacacaccaccagaattgccttgataagtctgagattggctcaacaagacacccagagagaagctctttcccaactctataaaatgccaaatgatcttctattgaaaatgaaacccattcatatagtgtttctgcatgaaaaaaatttttatagacatgggccttctaataaggttgggccataattactaccaataaattatgaattaaaaattgaacatattttgcattggccctcaaattattattggccttcaacaacaattaatattcttagtatagctctgctttgaccattaccttttcacttagccgggtaagatgtctgtacatttgttgaggatcac

SEQ ID NO: 218639 - DNA, 374 bp, Glycine max
  unsure (1)..(374): unsure at all n locations
agcttgagatctcagttcctctctttcattttgttggagcttcctatgttcaccagctgcatttgagtcanagttcagaaactttaatgcccaataagctntatgttccaactcaacaggtaggtgacaagatttgccataaactaattggaaaggagtaagtcgtaagggctttgtatgttgttatgtatgcccacaaagcttcatctagtttttgggaccaatccttccttgattaagcaactattttttctaagattttcttaacttccatgttagaaacttcatcttgcccgttggtctaaaggtggtaaggtgaggctaccttgtgtttgacactgtattgttggaggaatatttgagttgggcattac

SEQ ID NO: 218640 - DNA, 419 bp, Glycine max
taaatactaagctgacgagtggcaaacaaaaagatggccaagtctgtgtttacgcacgtcaatttacacgtgtcacactatggtgcacatggtgcccatatatagaccacatattacatccatcacctttgatcactatcgacattgctattgtccttggggattaacatctcacctgcaactggagtggttaaacacataattttatctggcatgaagtgcccatgacgctcaaaatcataggacctcatgagctgatgtgaagtatgtgtgagtggaattaagttgtacgtcatgcagcattagatcgtggatcaaccatatatgcaaagagagaaagttcggagctctacaacttaaccttattatgaaaaatgatacttctggctatactaggattaaacttagtggtatgatgt

SEQ ID NO: 218641 - DNA, 436 bp, Glycine max
  unsure (1)..(436): unsure at all n locations
agcttaagggtatgttgagccattctatcttagtgtgaatccttgcaaaatatgtatgaatgacttctaaatggatttctattggaactttcttagtttataagaattatgaaatgcataaataggtttttaaggttatgttaagagaatatacttttactaagtatctatgagttgagagttgaatggatttaagtatgaattccttgcactttaattaatattattgaattgttattgactaaattagagattgngaagacttgcgatcctcgaacaaatgttgtgctgaaaacattgaatgacatgtgcttgtatgatgactntgaaaattattggtgtgataactaaggattataaaatccctgaggggggggggggagcaaatgaactcaattcatgagtgcgtttgtagaaactagaattcactctagta

SEQ ID NO: 218642 - DNA, 429 bp, Glycine max
  unsure (1)..(429): unsure at all n locations
agcttgctgagggtctctgtagagcttctattgtctttacaacaactttttctgagctaaggttgcatcttgagtggtgagttctataaagcttctctnttgtggtgcatatgtgcaatcacaaagaatggcgtgatcactagccgccaataaataggaggctgataaggtgaacccccttagttgaagttattacctggataagatatccaatagtggtcctgcaaaaaattatctctttgatagaatcctaatggtccttcttggtggtaccctcggaatccatgccaatttggtatgcccatgtagtttacttccctcgaaggatcttgttggactacgcattgccctagctcgtgtgttctccacatatgtggcatcccnctacctgcataactgaagaatgagaaggacttaccacttgttatt

SEQ ID NO: 218643 - DNA, 329 bp, Glycine max
acatcgttcgcgtgtatgatatccactcgacattgttttaagtatatgagaccttccatcctattacgcaacgtggcggacaaaaatgggcagctaacttgaatggccattactgtcaatgccgaaggtattctgcgcttcactatccatgttcacacattattgcagcttgtggttacgtgagcatgaactactaccaatatatagatgttgtttacaccaatgagccacatcttaaaagcatactccgcacagtggtggcctcttgggaatgaagcggcaattcctccttctgatgaggcatggacactaatccctgacccaactac

SEQ ID NO: 218644 - DNA, 388 bp, Glycine max
  unsure (1)..(388): unsure at all n locations
taagtcacctgaggcatgcaagctncaagaataatgggctcatcaatacttttattctcttaaggaaaatcaataaataggcctcctatatttaatggaaagggttaccactactggaaaacccaatgatattttatttgaggaatagacttagacatttgggaagccataaaaagtggaccttatgtccactccatggtggctggaaatacaacaattgagaaacctaaagaataatggtgtgaagaacaaagaagattattgctttacaacttaaaggctaaaaacattattacttttgttctatgaatggatgaattatttatggtttcaaattgtaagaggcctaagatatgtgggatactctacaagatacacctgaaggaac

SEQ ID NO: 218645 - DNA, 185 bp, Glycine max
agaggtaatttttaatattatttattactatttaaattatattaaaaattgtatataaaaactatgtactgactaaacaattattgtggataaacagaatttttactattaaaattatgtcatgagtaatgaaattattaattattctaaacgttttacgagatatataataaaatagtagaaaa

SEQ ID NO: 218646 - DNA, 461 bp, Glycine max
  unsure (1)..(461): unsure at all n locations
acctgaggcatgcangctttgactgtctagcagcccattagtagtgagtacatttctatcttcaaaaaacatcgagggtgagttatagggtggctgccaaaaatgtctagtctataataatgagaaccaagaacaaatttatgatttcatgcaattacttcaatctctccactattagctcaatccatatgaatttaaaaaagagttgttaaaccggggatgaatcttaacatttagagtaaattatattcgtacaggttaagacgtaatatactcgtatttccttcctatcttacccatacacaaattctccataccttttacaactctattacaaaggtattccgccgaccatcatggtattaatttcggtaacaaagatgtcttccccacaccagttggttaccgtgatagaatgtttttgaaattccaaaaatagaacatgctctctctctttttct

SEQ ID NO: 218647 - DNA, 388 bp, Glycine max
  unsure (1)..(388): unsure at all n locations
aagcacgcagctgcagctttatgatcaggcaaagtataaaatgttgccctttaagatactacctcccatttttaaccgcagnggtgattgcagcgagctcacaaacataagtggaagaagtgagtaacctggggcaaaattgcttgctaaaaaagctattgggtgtcttccttgggatagcaccgcacccatacctgaacccgagacgtctgtctccaccacgaagggtttcgtgaagtcaagtagtgctaagattggagaatgcgtcatagcctgcttcaatttgttgaaggcaacgtcatctttcagggtctagtggaactcttccttggttaatagacttgtaagtggcgctaccaatgtagcgtagctccttataaatcttcga

SEQ ID NO: 218648 - DNA, 429 bp, Glycine max
  unsure (1)..(429): unsure at all n locations
agcatgccattaggaataatcctttggatgtctatgataagcacgttccaaactagattaaacaagtaacaacttaaggcttagccttgatgtgaccctatctcaatatgaaagaccttaattttgccttttgtagtttgagcacataaagttaccccttcatacatgtgttgtataaacccgtataagacatgcacacaccttttttctcaaaagtcttntacaacacttctcttgacacaaaaatataagctttttccagttaataaaaataacatgcaagtcactgttcttttctttgtgcctttccatcaaccttcgtaaaagataatggcttatgttgaaaccttgttgacataaaccaaattgattgtcaacagcctggttcttccttaatcatgctcaacacctttccataaaccaattata

SEQ ID NO: 218649 - DNA, 333 bp, Glycine max
  unsure (1)..(333): unsure at all n locations
ctgaggcatgcaagctntactagatgattncaaactgggaagttatatattattgtttacagacgtaaccatatgctnggaaaagaggcgaccttgaacagaggttggataggctcttgattaacttgcagtggagaataatgatctcagaggctgtgatgctgccattctccccttttaactggatcaaaaacccctttggttagatagaggtggaaaggaatcatcactctcaacaagaccttttggctgcatggattactcatgatgatttcaagaggtttgtgcattccatggaactcttttttgtcttggttgatatgtaaggttgtt

SEQ ID NO: 218650 - DNA, 434 bp, Glycine max
agcttcggagagaggaaagataccagtctctggtacatggcatgatcttaaaggaagaattggctgcttgctcaagatccaagagggagttggctcaacacttggaagccacggagcatagcatgctaactatcatagggcaggacaaggaagagttaaaccagtcgttgacccatgaacaaaagctagtagaggattttgcacaagcgtacaccgaaaaggaagcaagagggagggtgattgatgcattgcatcaagaagcgaccatgtggatggataggttcgccttgaccttgaatggaagtcaagaccttccgcggctactagccaaagtaaaggccatcgccgaagtgtgttcaccccctgaggaaattcacgggcttatctattactggcaacacatgatagaattgatggcccatataattagaaac

SEQ ID NO: 218651 - DNA, 377 bp, Glycine max
  unsure (1)..(377): unsure at all n locations
tttttaaaccaaaataccacaaacacttaagtggtaatcgattaaaacagaagattttcaaaactgataacacacaaagagcagtggtgatcaattaaatcaagagataatcgattaaaacgaaaaggtttgaaaactgatcatacacataaacatgtagtaatcgattaatgcaaagcgtaagcgattaaaatagagaagaaaatgaaatcatcaaggtaagcttgtaattttcagaaaacanatacctattcaaccatatcaacatactaagacaattcaaggtgaaatcaagagacatagagaggcaattaaaatanggtacgtgcactacacaacatcattcaatgctagatccatctaagatgcctagatca

SEQ ID NO: 218652 - DNA, 391 bp, Glycine max
agcttgagtagttaatcttcatatctcttctttaatgtggttagcgggagcatgataaactaatgctaagtatgctaaattattttaattgaagtctttgtttggttgttaagtaacatgtgctctgggattttatttattttccatgagaaatgagttcattgatactttaattctttacacatctcaatgtatattagatgatgattataacattgatattatttgcaggatcttcccatacaaagccacaattcttgttgttgatattcttaatgaaccttgtgaggaaagtttactctaatctcaattatgtaggtcagacaacatgactttaagttagttgaaaaccttccttaacttcttaattaattctgaggcggtctacatt

SEQ ID NO: 218653 - DNA, 253 bp, Glycine max
caattccttttgcaagctttgcctgtagcagttccttgatcaactccaagttgcttaaagaccaaagaattatagtaagttttgggagaaatgcattagtgacataataagtgcattagtgacacactctctttaatcttggccatgtatcttcaaaagtaaatatgggtattctcgtcatcacctagtacataataagggcattagtgacacttctttaatctttctatcaaaacgctttttgagctattat

SEQ ID NO: 218654 - DNA, 451 bp, Glycine max
  unsure (1)..(451): unsure at all n locations
agcttattgaanagctagttatatactgtataatatccatttgcaacatgttggagtaaaaaagtaccaattatctcactaatgaaacttatatataaaaaacattaataaattaatcaacatgcacctttcaataagcgataataaattaatcaaagcgtataactagagacatgttgacagtaaatattaatcttcatctattattgattttatttataaagaaactgtaatgaaaaaaaatatcatgttagaagtcgggtatgcgaaacacaaattcttaactgatttttaaaaacaaaaaacgaaaccagccttatgaattccgtagtgacaaaaatgatntccagccgtgtacagtagtgatgaaaaagccattcatccacggaaataacattggcagggggtcacgaaaactatataaaaaatattaaacgtgttacctgcaata

SEQ ID NO: 218655 - DNA, 414 bp, Glycine max
  unsure (1)..(414): unsure at all n locations
ggactctnccttggattcaacaataagaggagcagtttattgtatcaccattaaaataatcactctctaatatgcattaaattagaaaaatatcacgattaagttaaggattcatacccccttaacgtctctatataaatgagcaagttcctagcctattaaacataccaacacctaatttcacaaacaagaaaaaacctaccaattacgtgaagtcagtgagtgatattcaaggagatgagtggccaaaactcccatcaatcaaacacctcataacattattccagttcccttcaaaatcacaagcatggcaaatctgtgatccctagtgatggtgatcacacatcattgcaaaaggtcatcagctctagtcataattttgggcaatcgcggaactccacatcataagttatg

SEQ ID NO: 218656 - DNA, 439 bp, Glycine max
  unsure (1)..(439): unsure at all n locations
agctagtaactaattctgatctcttactcttattattagcacatacatgcgaggggtagaaggtgtcatactaatcaacacctttacacacgcaccccctccccctccacacccagagaaaaatgcatgactnttggaactaatcatatgatcactaactaacttgtaatttcaactatccatgaatgattgtatgccctagatatatagttctcaactctcaaaagaattctctattgcaacataccttacacattaaagaatattatgcactaagggtgttgacatacatgcactatcatccagtcaaaaataagagaaacatgctagtgacaatcaaagattttgttgattgctcctatgtttggcctttcagtataatcaaagctctttgttgtctttatttaagaatacattcttaagcgggggacatattttt

SEQ ID NO: 218657 - DNA, 318 bp, Glycine max
gcacatgctttggttttataagcaagtctaacgtgtcgagtgaaggaagcctctgaattgacaactctgtcctcttctgaccattggaagggtgcataaaagacagacattacgttttgtctgcacctgctaacgtgtgtggcgcacgcacaatactcttgcatatgtgtaactcatggagcgggcatgtactggactccgggtgtgtgggtgagtgtctattgtggcgaccactagtgcttcattgatgttgcctcccattctttggcttcaccggtcccacctttgatatgttggtggatgagatgcttcctcgtc

SEQ ID NO: 218658 - DNA, 334 bp, Glycine max
  unsure (1)..(334): unsure at all n locations
agcttattcaaactcctctgtttatccattattgcctcangcctaacctgagtgcccaaatcagcatccgttttcccagccagaaactcaactttgagactcccagaaaccatcttctccatgacctcctcagtaggaacctcaccagtcgcggtatagtaccttctcttcaaatcttccttgtgatcagatagaatcttgtccctcaaggacagaaagtcattcatcatgtccctaagcttgaccctcaaaccatttgtgacagacattctggtcctgtcaatggggcttccctctttgtaggattctgacaaactacgattggctatgttgg

SEQ ID NO: 218659 - DNA, 421 bp, Glycine max
  unsure (1)..(421): unsure at all n locations
actaagcttaagccagccattaaaaaaaggctgtagaaagtctgacctacctttaataaatagccaatccggtcgaggcccttgaggccggatgacctattccacccctacnttcagcaacaattatgtatagaaaatttgcaaaattatataacaattaaatttatatgaattttaatttatataataccttaattaatttattaatctttctgaaataaattctataattacaataattaattatcatgtgattaaaataatacataanacatgttattgattaactgctatatattcgataactgctatggatacattatntatatatttaaatcacataataaggatctaaatttcttttctttatatgctattttttgtgtgaaacaacaagacctaacttcttctaagttttata

SEQ ID NO: 218660 - DNA, 420 bp, Glycine max
atcctcagagtcacctgctgcatgcaagcttcaaagattggaatcgcctggtattttactgagctgcgggtctagaagcaatgctcttcctcttcctggatgtcatctacgataaaaaaagaaccatcattttattacaccagaagtttatttaaattaaaactgatattaacaactaaaattggcaacgtgcgcttagcgagacgcagctcgcttagcgcgccttaagaaaaacaacacaccggcttatcccaacagcccgcgcttagctagtgataacaaaattttttttcagcataattggcttagcgagatacgcactcacttaccgttatgcatgccgcaactttcatctttgtgaaggctgaaacttttaatgtgtcattatcaaaggcttttctttcttctggccctcatcct

SEQ ID NO: 218661 - DNA, 277 bp, Glycine max
  unsure (1)..(277): unsure at all n locations
agctngaccaatctctacccaatccgggtatattcagncagtgagaacctgtgatgtacctaaacaggcgagctcctagcagtcaacagataaaaggaaccaagaccacaaagcaaggaggcttgtgtggtggctggccagctttgaatcttgtgatatatatgggctatggcctctggtaatcaattaccaatgatgggtaatcgattacaaggcttaaaaatgaagacaggagactaagatggtctctggtaatcgaataccaaggggtgtaatc

SEQ ID NO: 218662 - DNA, 207 bp, Glycine max
ctcctctactctccttcctccctctcccaagtacggctctaggtctacggttttcttaaacacttttttggtttgcaatctccagtttgacttttcattttagccataagaatgcgttcttcaatctataatttccttctctattgatacatggaaggcgtgattttctggtgttgtccctttgaggacaaagcccaactctctttg

SEQ ID NO: 218663 - DNA, 358 bp, Glycine max
agcttgctctaaatatacattgatgtttgtatttatgggaggaggttatatgccatttttgctttaagagtagtgtcccactggtaaaattaactttccaaatgtttgccttcgcaagaatggccccgaggaagcttgcctcaaagaggtccaggaaggacaaggcggccgaaggaactagttccgctctggagtacgacagtcaccgcttcaggagcgttgtacaccaacagcgcttctaagccatcaagggatggtcgtttctccgggagcgacgcgttcagctcaaggacgacgagtatactgatttccaagaggaaatatggcgccggcggtgggcaccactggttactcccat

SEQ ID NO: 218664 - DNA, 384 bp, Glycine max
  unsure (1)..(384): unsure at all n locations
tctctagagacacccgattattccatgctttggttaagacacattaaagtcccatccatcagaaaataaaccaatgaaaaaggcttacgtgctatgggtcacaacaatggcaatattggtcttgctatgccagggccctggctatgctgcttttggtgattacacacctgggaacatcttgactggatttaccgaacccttctggttggttgcactggggaacggattcattcgaatccacatgattggagcatatcaaggtcgatcattctttcactggaacataattaaagtactcaattntaaatttgctcttggaaaatatttttgtatttaatttgaatttactgaatatacgcctttaatccgatcatatatttctgt

SEQ ID NO: 218665 - DNA, 449 bp, Glycine max
  unsure (1)..(449): unsure at all n locations
cggccttaatctcagctctgagatcagatgttccagagtttggtgattttaattccagagtttgatgataacaagatgatgaccaaaagctcaaaagtcaagaacacttcatgataacaaagatgatgatctccagaatcaaagaatgagttcaagattgaatcaagtacacttcaaagatcaagaggaaagttgaattcaagaatcaagaatcaagattcaaggttcaagctttcaagaatcaagatcaagattcaagactcaagattcaagaatcaagagaagaattaatcaagataagtatgaatttttttttaaaaactgagttcacatggattttctcaaacatgttaccaagagttttactcttggtatcgataccagatattgtntcattccagtgcaaagggtttcaaagcttcactgattacatgtccttgattcaaagt

SEQ ID NO: 218666 - DNA, 403 bp, Glycine max
  unsure (1)..(403): unsure at all n locations
ggcagcaagcttcaaccacagcaacacataatctatgtgtccaaaacccctcaattcaatggcttttctaggtgtgaaaggtgaaatttataatgaggtaaatttgaagcaaactctcacctcacaccagtccataacatctatttagacttgttcaagctggatttacacctaanatctcacccgaatcataatttgactcttcaacacccaaattttgccctaaaaatggctcttggtcactttgatcaattggttttcttttagctaagccaaactttcttacatggcctaaatgacatttcagctagaataactcccttaccctcctttacacagaatcaaactaccctcaacttcaagcctactcttttcactcaacatacattctacttttaaccta

SEQ ID NO: 218667 - DNA, 199 bp, Glycine max
acttttggctaaatgtaagcctctgagtggagtggagctgattgtaccacggggcacctattgttatttagtgaaaaattctaggccacccttactcccccctatgataaaattatcctaatagagcctccacctggaaattactgctccacgatttgcttctttgacacatcctaagtcatataggcaacagttaaca

SEQ ID NO: 218668 - DNA, 348 bp, Glycine max
  unsure (1)..(348): unsure at all n locations
tcgtggagagagctctgccaccaaatcctttatagagaacatggaaaaacaatatgttataagccaaggggaggcacttgtgaanggagttggggtaaggatgtancacacagagagtttctattcttgggctctcattgtatgggttggagctgttgtggttagagtcggaaagcaaccccataagacataatgactgcagtgatgagtattctctctggtgccatgtaaggaataaaccaccttcaggattatttagaatggataanatgggtaataattaatgactaaataacaaaagtctccttgtgaattgcagatctctcacttatgcagcacctgacatgc

SEQ ID NO: 218669 - DNA, 258 bp, Glycine max
  unsure (1)..(258): unsure at all n locations
tcaagaaaataagatcaacgactatcgtcttggtcctctctctacatcacaggcactntctttcctacccccgccaccaccttcttaccccgtgggaccttctactagacccatttcccanattccttttaagagactcacattagaagaaatggtggttcatcacgacaaaggcctctattaccactgtgaggataaatggatttccgaccaccggtgcaagccttgacttcacattctcatcatcgacgaggacat

SEQ ID NO: 218670 - DNA, 361 bp, Glycine max
  unsure (1)..(361): unsure at all n locations
agcctgtactctntcatctgatggagtgcttaccatttaacttgccacacactatctacctcaacattatgtgcatcacaaactctatggatagccttgaagacatctattatgttgctctactcaacagaatcttctagagtaaaggagtttatcaagtcttctgttgatttttggacgatggatgatagagatatggtggacaataacattggtcatttggtctactattcttatcttctatattgatcggccaatcttctataatctagtggtgcctccagtcatgtagaagggagcatccaagcctcatggtcattaacatagattgtgttgaactggaaatgttntctattttcta

SEQ ID NO: 218671 - DNA, 350 bp, Glycine max
  unsure (1)..(350): unsure at all n locations
tctcagcttatgagagagtcnagatcaagtgagaggaatatatttagctattcttaacaagccaacaaagggagaaagaagttgtcttcgaacccggagattgggtttgggtgcacatgagaaaagaaagggtttcggaacaaaggaaatcaaagcttcaaccaacgggagatggaccatttcaagtgcttgaaagaatcaatgacaatgcttacaaagttgagctgcccggtgagtataatgttagttccaccttcaatgtctctgatttatctctctttgatgcaaatggagaatcccgattgaggacaaatccttctcaaaaggagagaatgatgaggacatgttca

SEQ ID NO: 218672 - DNA, 205 bp, Glycine max
agctatcaaagggtatggttgttcaaccttgttctttttcagaaaacaaaagggagctatttattcttttcattctattttcccttcgccaacaagaaatcgtcaaggacttaccgcctgaaatcttatgagtgtctgttatcctctgccaaagagagcgaaggactaatcgcctgaaattctgggctcctttcccttgccaaaa

SEQ ID NO: 218673 - DNA, 295 bp, Glycine max
tcaaatgtttgtgagtctaacaaattggtggaaaatggtgcacaaagaagttgagtaaaagaagatgtgtttggttcatataaaatttgttgtgcatgtcttaaaaaaaaagagttttggattgcattatatgtatgtgaataatgggataaggataatattgaagttcatgagatactgattgatggtttgtggtgggaagtgtatgtagctggatgtttgcatacaattcaatgcatgatagactcttatgttcgataacaaaacaaaaaaatcatacctctgacatctttgt

SEQ ID NO: 218674 - DNA, 416 bp, Glycine max
  unsure (1)..(416): unsure at all n locations
atccttaagtcacctgcggcatgcaagcttgaaggagcttcttggagattaatttagggagagaaagagagagggggggagcacgaaattgaaggaataaaagagggggagaagtagaactttgaagtgtgtctcataagactttcattcatcaaagttacaacaagtgttacacatgcttctatttatagactangtagcttccttgagaagctttcttgagaaaacttccttgagaagcttctttgagaaaacttccttgagaagctagagcttagctacacacacccctctcataactaagctcacctccttgagaagcttccttaagaagattcctaaagaagctagagcttagctacatacacttctctaatagctaatctcacctccttgagatgagaagctagatctta

SEQ ID NO: 218675 - DNA, 363 bp, Glycine max
  unsure (1)..(363): unsure at all n locations
tctggggggacatctngacttgctgtccaatctgacatttatcacagattctgcctttntctattttcagagtgggaatgcctctaacagcacctttgtcaatgattgtcttcatgcctcttaagtgcagatgcccaaatctttgatgccatattctgacttcatcttctttggagaatagacatgtggaggagtaactggtttcttgaggtgtccatatgtaacaggtggcctttgatctgctgcccttcattagaacttcactcttttcatttgtcaccaagcattctgactctgtgaagattacattgaattcttcatcacacacctgactgatgctgatcaagtttgcagtcagtccct

SEQ ID NO: 218676 - DNA, 409 bp, Glycine max
  unsure (1)..(409): unsure at all n locations
agctntcacaatatccaaacaattcaattttctttgtcatgaaactaccctaaaccaagaaaacagagtggaggcagaaaactctccacaaaactcattcaaattccacagtttttcctactcacataccccagtaacattctcttcgttccgattcgttacccattggatcgccttgaaacttttactggaggttcctaatacagaaatctaaattttgaccgttgggatatgctagataatatctagaacacgagatgtactacctttcccatgactagcgctgcacaaccatttntctgcataattggtanaatctgctgcacaacttgacangctttgctgcataantcagcagatntcgaaatctaagcttgcttgtatccaattntcactcaaatggatccta

SEQ ID NO: 218677 - DNA, 366 bp, Glycine max
  unsure (1)..(366): unsure at all n locations
tctggtgggacatcttgacctggcttccaatctgacatttattacagattctgccttcttctattttcagattgggaatgcctctcacagcacctttgtcaatgattttcttcatgcctcttaagtgcagatgtccgaaccttcgatgccataatttgacttcatcttctttggaggatagacatgtggaggagtagctggtttcttgaggtgtccataggtagcagttgtcctttgatctgctgcccttcattagaacttcactcttctcatttgtcaccaagcattctgactttgtgaagttacattgaatncttcatcacacagctgactgatgctgatcaagttgcagtcagtcccttcacc

SEQ ID NO: 218678 - DNA, 309 bp, Glycine max
  unsure (1)..(309): unsure at all n locations
tcagagtcacctgangcatgcaagcttagagcatgtgtgataggagttctatttaacgcaatccactttcacgcanaagattcagtatacctgcgttgtcgattttgctntgtaaagcatgtttgtctcgttgaacgtggatacaacgagtacccacacacaatcctaatcaagaaatgatggtaaagggatgcactctttttttaaaattgatgttttatagagaactaaacaacagccaaagaagctagagctataaggttacacaaacatacatgagacaaaaaatgtcattttagaaaatcaatt

SEQ ID NO: 218679 - DNA, 376 bp, Glycine max
  unsure (1)..(376): unsure at all n locations
actcagctgtgctccaggaagaaattggaaggggaacatattgttntactcttaaaacctttggttctaaatctgttcaataatctcattcttttcttcatctaaaccattaaaaaatttagatcgaaattctggggatctggcagcccacaccaacttatgagcagggaacttatccccagctacatcaaaagtaatatctgaacccttcatattatccaatagtgcaccaaagtgtgatccaatgtcagaatccgggatgttaatagagtgaagttgtggacaatcaattgctgaaaccacaactcccactgtacagttgattctaaacaatcattcttgaagaattcagaagttcaaagcaagaccgtctgaa

SEQ ID NO: 218680 - DNA, 434 bp, Glycine max
  unsure (1)..(434): unsure at all n locations
agcttgagtnngngtgtgggatctatgaatctctcttgtatcattgcagagaatagagatctcatgctttaggtgaccctgactaaagcactacgatttttttgtgccttaatgtttgtttttttttggattttaagagtcaaaatgggtgaaaagtctttattgggatatgaattattattttgctttcttgctttctgcttattctcttgttcttggttgcataatttgatgaactagatctctaatgtttaacgattaatgaaactccaatttcatgatttacattaaattaaaaaacagcttgtacatgtgaaacaatgaactcggttagctaatatttcttaatctccgtattttataatttatgaagcacgaacttcagaaaactttcatatgttncttttttttttttgcttaccctaccaaaaatg

SEQ ID NO: 218681 - DNA, 266 bp, Glycine max
aatctactaggacagtcgaaggaagggacgtttttttggtcctcgcaatttgggggtcccggcatgtaagactcaggggcgcggggggccgcgaaattttaaacctcggaaacgttttgcgcttgcggggctacttgggtgacaaaaaactatgcaaaacttcagggtcattcccgggatacaatgccactttccgggttgtggtgctcactggtcgaactacgcgagttgcacgagcaatcgccgcgtgctgcacggatctgtaa

SEQ ID NO: 218682 - DNA, 319 bp, Glycine max
aatttttttttagaagagcctacgccacacccgtctaaaactaacgccctcctgaaaacttcctggaagcagagcttgctcccacccctctaaaactagctactcctgccaaactggaaacaaaaaaagcctctcaagatacaatgccgaatacaggtaaaacttactctaaaggcaaatcagggccaagaagaaaacatttatttcaaaagagggtccaccttgccagggctaaacaaaaaaagttctactacaagacactaaaaggcctgaaatacaggctaaatctatctacgaaatggcaaatacaaggccaaag

SEQ ID NO: 218683 - DNA, 360 bp, Glycine max
  unsure (1)..(360): unsure at all n locations
tatacgtccgaagctctcgaaaaagtcaaaggttttattctttcacacggatgnccgattccgatgcataatttatcgaacaacgaaagctctcgagaaattcaaatggtcattactgtttcctccgaggtcatattcaagcgcataatatattgagacgctctatattgaacaacggaagcacttcgagaaattcaaatggtcataacttttaactcggatgtccgacttcggctcatcacatatagagacgctcgtaattgaaaaacggaagtctcctgaacactaaaatggtcataacgttttacacagatgtcagattcaggcgcctaatatttcgagatgctcgaaattgaacta

SEQ ID NO: 218684 - DNA, 422 bp, Glycine max
  unsure (1)..(422): unsure at all n locations
agcattgtcctttgagtcatgttcgctgctttgtcttatcgaaccaccagtacagcccgcgccttccgctcccgacgccggaccttgtggccaatcagccgacgagtgttgtcgccctccgtcaccgcgccgtagcaagctcatgccgccagaaacgttctctgtaccatcaacggtgcctgatgtggttcgagctcccgtttggggctttgatgacgcactgccgcctctctctgcgcgaacgttgtcgacgcgctccatcgctctctccgtatgatcattctatgtacgatctggctctaagcncgcgacccctcctggtggtcctctgttcttcgccatgttcgatactcgaggattgtgcccgcccaacggcagcaatcctttaaacaacattacgtcatctccttcggcggagttaa

SEQ ID NO: 218685 - DNA, 200 bp, Glycine max
  unsure (1)..(200): unsure at all n locations
gaatagataaaactttttttttatgcccaaaataaacgctacaattacaattaactatattttaaagggcaaaagggttaaaattgaaaaatatggccataaggtcatcttttgacaagtgaggtctctctgggtgtgtactggaacaaaaggtcatctctgggtcattctatgangggcattcctagttgtcaagaaac

SEQ ID NO: 218686 - DNA, 407 bp, Glycine max
cgcccacttaagattggggtttgattgtcaacttcatttatagataattcaaacgcagagaactcactagtgtcactatggtgtaaaacaaaatacttgatatccatccatttcatcacccataatccagaaattgttacaacacaattttacatgtggccaagtgaacataatttaattttgagccattaatgataataattaagattaatttaacaataacaattgtctaaatttcaattgaataattcattgtagactaaaggtaatgagacaaataattatgatcccatagtcaggtacacccttaacttctaaaatattccattttccttttttaaaatttgtgatgcacgtcatcttgaggataaaaatcaattgtcttggtctcaacatcaatagacact

SEQ ID NO: 218687 - DNA, 207 bp, Glycine max
aattactgagttagaaatgttttttttccatcgtcaaggcacattttggtaaactaattttcaatgtttgcctctcagaaggccccgataaacttgcctccaaggtcacgaagacaagcggcgatgacttttcactctgagttacagtcaccgcttaggagcgctgtacaccaccaacgcttagaggccatcaaaggatggtcgttc

SEQ ID NO: 218688 - DNA, 377 bp, Glycine max
  unsure (1)..(377): unsure at all n locations
acccctaagncacctgcggcatgcaagcttgaggcgantgtgtttattactaattgagncttctgttgctaaggcaaggaggggatttgttgaaagagtgcccatactatccgctgcaatgtgtagtgcccttcctggttattaggaatatgttttgcttctgcttacgtttcatattttaggagttaaagtttcaaatattaggaggtatgattctgtattttaaatataaatttatcctgttatgcctacaaataagggatgcttttgttatgctttggcctctttatatatagttgttacaaaacaatattttaatcttctctacacattatttctttggtttcataaaaaaaaaacaaatgcgctggactata

SEQ ID NO: 218689 - DNA, 390 bp, Glycine max
caaattgagattaccatatttaaatcatccttaatgctatttaagcctagagtggaaagtcagttttatcctatgtgcattaattagttcatatgagacataaagcaataaacaaatgtatattatcaaacaacaaggcctatggatatgaatttaattgcacccttaaattttctcaattcctattttaaaagaatcctaatttaaacttcaattggtgattttacctgacttctatcaacaatttttcccctacactagttataatcttttccccgaattatatctctatctgtttatgttagaatactacccaaggaaagcatgaacataaagaggatgaatactacaatgaaagacttagcaaaaacactttgatcattaaactca

SEQ ID NO: 218690 - DNA, 390 bp, Glycine max
aaaactcaactttaacccttcttcagaggggggtgggtcagatttttgttcacgacacgaaacacatgcctcacctatatacttgccaggagctatgctcgcctacaatgaggcattctaagagacactggacctgagaatgagaagagatccatatatcttccaacttcgcaccagagagcaattgagaggactttgaattatgaaaactctccaaaagattgcgtctctgaggaaatacagggtttgaccatataaaaggacttccttagataaagaaataactaggcctatgagaggaaacaaaagactctggctctcctgacttacatttcctcttcctttgatttcatctgaagccgctgaaagaaggtaatcccctgcgggctg

SEQ ID NO: 218691 - DNA, 359 bp, Glycine max
gagcttacaaagattgtaatcctctggtttattcttagccaggggtcaagaagcagagctcttcctctatctggatgtcatctacgataaaaaaagaaccttcattttacataccagaagttattttaattaaaactgacattatcaattaaaattggcaacgtgcgcttagagagacgcagctcgctaagcgcgccttaagaaaaacaacacaccggattagcccaacagcccccgcataactagtgataacaaaaatgttttttcagcataattggctcatcgagatatgctctcacttatcgttatgcatgccgaaacttcatttggtgaaggctgatatttcaatgtgcattttc

SEQ ID NO: 218692 - DNA, 237 bp, Glycine max
ctcaagaaagcctctctatgaagctgcctaggctataaatagaagcatgtgtaacacttgctgtaacttctgagaatgaaagtcttatgaaacatacttcaaagttccacttctatccctcttttattccttgacatttgcgcttccaccttctgtattgctttttcttcattaaggcattcttctcaagcttcttatccaaggcatattcttggtggtgaagctccttcttccatg

SEQ ID NO: 218693 - DNA, 319 bp, Glycine max
agcttctcgttcatctgacatatgtgggttgtgttttgcaatcctgcatgtttaactacttcaataagttatccacatatttttcttgcgagataaatatgtgtccacgtctttgcttgacttgcatgccgagaaaatatctcatgagtccaagatcgatcatttcatactcttgcatcatagccattttgaattctttcatcagctgggagttgttgtcggtgtagattaaatcatctacgtataggcacaatatcaagaaatgattaccttgcatcttcacatatagtgacgactcacttggacttttgaggaattt

SEQ ID NO: 218694 - DNA, 363 bp, Glycine max
  unsure (1)..(363): unsure at all n locations
agcttagaagatctatatatggactaaaactagcatcctgtcaatggtatataaagtctcatagtgtagtctccaaatacggatttgtgtaaaatgttgtaaaccaatgcatatgccttaaagtcagtgggggtaagtttattttcttagttctatttgtagatgacattttaattgcaagcagtgacttatgtcttttacatgactctaaatttcttctctcacaaaactttgatatgaaggatatggtgaagcttcctatgtcattggcatagaaattcatagagatagatctataaggacattgagattatctcaaaaggccctcatagaaaaagttntgaaaagatctaatatggagaa

SEQ ID NO: 218695 - DNA, 169 bp, Glycine max
tctactatctttggtatcaattctctctcctcaattggggcgcttcttgagctaccaaattccttcacctttgggcatattctttgaaagaatcatgctccctcttaaacatgttctatagctacattctattccgagccatattaaaattgtattgatatttcctaat

SEQ ID NO: 218696 - DNA, 51 bp, Glycine max
tgtaaattttactttcaccattcatgcttatcattcagtctcttcctccat

SEQ ID NO: 218697 - DNA, 372 bp, Glycine max
  unsure (1)..(372): unsure at all n locations
gaggcatcaagcttgtttaggtctaaagattaaatgtgttctaagctgttngttatcttngngaaatcggagctttgcagcaagaggcggctgcttaccttaattgcacattgttattcatgcctttcatgtatttgggtatccccattgggcaaacccgatgcgcaatgaggcctgtgatcccatatgttaggaaattgtgagagaaaattaactagatggaagctaaaacacatattctttggagggaaagtgacactcattaatgcagtcctgacttctattcctatataatttctctcttatttcacggtaccctccaaagggggctgagataataatcacccaatcaacggaagttcctatggggcg

SEQ ID NO: 218698 - DNA, 256 bp, Glycine max
tttgtggattgcccggactcccacttttgtgcatctattatcacatttttctggaccgtacaagcttgtttggggggagcttaactgtactcccagatgacgaatggaggctctcctcattagagctcatgggacgtatagggcttctctaggctcggggcaggcccataccagtaacgattaccgaggctagagaatctggtcgggggattggtccttctcagacggttctctctgttacaaaggtagacctttg

SEQ ID NO: 218699 - DNA, 320 bp, Glycine max
ccagcgggacactactcttaaaacaaaaatggcatacaacctcttctcataaatactaacatcaatgttaatttagagcaagcttatgcgcttattttcttacgaacgttcacttgcacaaaacattcttttaactaagaaaaatgcacccatatacaatcaaggcaggcttcgtcacctagattatttacctgtacttccaaagtgtattttgtacttacatcacacacatttccttggcttaaattacatacatgcttacccagagcagtttgggggaccaaaaattcacatgtgcacatcttggtgtttctaatacc

SEQ ID NO: 218700 - DNA, 137 bp, Glycine max
tgagagaccataccagttttctaactatttctaactatgtgggccattaattctatcatatgctgacaatagccgagaagtccatgaatctcttcagggggggagtaagtgtctgccattgccttggccttggataa

SEQ ID NO: 218701 - DNA, 326 bp, Glycine max
agctttgagccgaaatcctgtctcaccattatccttgacgcagggtgagaatgtttatccttaccctcggaagctaaaaagatatgacggaatatttccaatcaaagagaatgctaaaagagaagaaaggaactttccaatcgaagagtgggagaaaaaaaagagagaagaaaggaaatttccaatcaatgattgggagatagtcaataaaaataagaagaatgggaagaatgttcccgatcaaagaaaacaaatgaaatatgcataaagatctttggaccggactatatttgatcaatcttaattggccccaatgaacaataaaa

SEQ ID NO: 218702 - DNA, 435 bp, Glycine max
  unsure (1)..(435): unsure at all n locations
tcaccttctgggcctnctcatagtagagcatgatatattttgctctatttcatctcccactccaagtaggcctccggatcattctttcctttcaatggaggaatgttgagtttaataccatcaattcggttttgtctaggaacaccatcattccctcttctcctcctttcttcttcattatgatctctattctccatttgatccaacctctcatggagcgcatcatctcgttggttcatttacctctccaaatgttgcatcatagcttgcatttggaattgcgaaagccgcacttcatcattacgattagtacctgacatcttaaacaaactaaatcaacgtatcaagaccaatatagttgctgttgaatacctcacccctcaagtgtatacacaatatggcttttctctatgaaacactcttgctttaccactc

SEQ ID NO: 218703 - DNA, 307 bp, Glycine max
agcttgaaaacaaagtgaatcatgcgctcttcaatagtcttcttctctacaggatccatgtctttagcaacaatggtggcttccatctctacttgtctttgactcgcttataaagacatgaccttagctctaagctctactgcagagtggactctatccagttcatccatcgcaggtatgcttcatctgcctgcttagacttctgcttgtcttgacttcataataatagcgtcaggcacttgctcaccatcctattacatcatggtagctttttcagtagtcagcctttgaacttctttaacaatag

SEQ ID NO: 218704 - DNA, 414 bp, Glycine max
  unsure (1)..(414): unsure at all n locations
agcttggatcaactcagattactctntagtantttactccgcncaacaaattagaccagcgcttaatatagaaacttctgatatctatgaaccacaagctgacactgttacagcttctttgtcaacatgtaattggactttgcaactatcccatcaatcatagttataatgtagtaatcatatcacaaatatagatgataattacttatccattcatttaaagattaaccattgggtaaaagaaaaacttatacgatatcaattaattacatatataatatctatatctagaactataatgatctaattgtctaattgacaagattacaaacgtctcgtttaatatctctcgcgcaagattacctctacttatggtatatatatttcgcaaccacttccttgacattaatggag

SEQ ID NO: 218705 - DNA, 286 bp, Glycine max
  unsure (1)..(286): unsure at all n locations
tgtagccgtcaacgcagactaataaaaggcaccaaatgctatgtaaaagcctgaaggtagcattatatcctcccactatggaaccattccagcctaacccgaaatggctgaaagtactcaagttatgagcatggacaaaaggtatcctatttgagtttagaccacctaccaattaagggtacaattaacggcctttattttggccatctatgtttgaacggtaccatacataataagggtccaagttaacggcaccccattagngtatggattcatccttgtattt

SEQ ID NO: 218706 - DNA, 396 bp, Glycine max
  unsure (1)..(396): unsure at all n locations
gaccctaaggcacctgaggcatgcatctaagcaggactggtnattgttgtgtttnaatttgagcaaaacaagccngtattctttgagggttgttcttataatcttgatctggaggacatgttaatagccttatctgaagttcttgggaagggaagatgtggaacaacatacaaagccatcttggaggatggaacaacagtggttgtgaagaggttaagagaattggcaatggggaaaaaagagtttgaacagctaatggagattgtccagagacttgatcatactcaaaatgtgattccccttcgtgcttactactattccaaagatgaaaaactaatggtttatgactactcaccagccggcagtttttccaagctattgcatggaaattactct

SEQ ID NO: 218707 - DNA, 213 bp, Glycine max
atgaccaaaagttcttcactggactccattgctattcatgtctacagatatcttactgcttctgcactctctgttttcaggtcgacattacacataagagcagtccaagtaccccactgactttaaatgctggataaagggatagtgtgcttcacataggttcaaatatacctgatgagaattttattctgcggcttcctcttatgacaaaat

SEQ ID NO: 218708 - DNA, 408 bp, Glycine max
  unsure (1)..(408): unsure at all n locations
agctagacacatattatctatatgctctttcttgaaggngaacggcgagaatgaatattgatattatgcattcatggtaattaatataggttatcagcacattatcactaatttagaggaaatcaaatatccttcttttgtttgtaataagtgcaataagcctatttaaacttagaatcgtgttgtattcagacacacgatttctatctcaatatgcctttatgctttcttctttacacaaacaaacatcaaatcttttgatttgctggagccaggtattgcttggtacgtaataaaagaaaacttgggttgttaaagcttgcaataaccttgttgaagagcctaaatagagtaacaatatttgtacttagttaactagtgaacttgtggttgcaacacaaatatatt

SEQ ID NO: 218709 - DNA, 440 bp, Glycine max
  unsure (1)..(440): unsure at all n locations
agatgaggaagtgtagtatggttatacttcctgcttttattcgatgaccacagagtggtacctggagatatgtcgctggggtcaagagaccttggggacgtcaggtggggtgctattgcccaaaaccaagcttgaccaatcccgacccaacctgtgcatagtcagtcagtgaaaacctgtgatgtacctaaacaggcgagctcctggcagtcaacagataaaaggaacaaggaccacaaagcaaggaggcttgtggtggctggccagctatgaacttgattgatatatgagatatggcctctggtaatcgattaccaaagggtgggtaatcgattacaacgcttanaaatgaagacaggaggctaagatagtctctagtaatcgattaccaaggggttgtatcgattaccaggcttgaacacgaggtcaggaagctagga

SEQ ID NO: 218710 - DNA, 349 bp, Glycine max
gcatgctaaaaggaaccgactgcttacttttacaaagactgatttttagaacaagggttcccctttaccctttatgatcaaatgagactgagtcaaattctatttgtttctttgctgcaggaaatctcatttggtctcatttgttcttttcttgcaagaaatctctccaagtttggactcatattcgagaattggctcctttccacaagccgtttatttttttacaccgcattactgactctttaattaggggcagaatcacatcatactaagttgcttactatagcaattacagtctactggctctggctgactataaacaaactgtttttgatgatatcattttctg

SEQ ID NO: 218711 - DNA, 303 bp, Glycine max
tttttacctaccaagctactttttgagtcgcgctgtttccaaagctaactttccttcttggcggaaacctatctcaatatttattgagcttttttgtctaaatcaggtcaggttttaattgaaacaatgcccttttcattttggaagaattttgaacttttttttactggctcagaggaattttatatgcattttaagacattagatgtgagaaatcttttggattgggatagccttatattaatggccaacaacaataaatgttctttaccgatctcagggatacacaataatttccttact

SEQ ID NO: 218712 - DNA, 450 bp, Glycine max
  unsure (1)..(450): unsure at all n locations
aagcacctgagctgcagcttgacaataaggangcactatttatcacattatttanaggngngaaaatgttcaagtttttctattagggttgatgaatcgatggattctaattattgcatttgtttattggtttttgcgtattttaaatgtagggttgagtatgatactatgctactccacatcagaagggacatgtgccggtggtgctgctggtgccactgggacctcagggatatgtggctccacatatgtgtcatcctgcgtcacaagtggatgtctggtcagatcagtatgctgtgccggtgtcatgaacggatgaaaaatcctgaagaaccactacatgttatcggatgcacattgtcttggcacaacacaaaactgccccgctactgtaggatagtcagagtaatgcatccacttgtattaatatcttaaatggaacatggaact

SEQ ID NO: 218713 - DNA, 396 bp, Glycine max
  unsure (1)..(396): unsure at all n locations
tctttattattcaggaatatatactaattaaacaccctagctcagaggctagatattgttatgaacttcattatcccatatccacaagatatatgttatttggaacgcattctggtagtgtataaaaaatacatttagttggtaacttctaatatattgataaaataaaaatattagtgttacacaacaaattattcatttgccttaaagggtgcctcgaacttcaaatttcagtaattaataatgtctattccgaacctaaaacacttatcctagngacatatggcaccacataaatttcttaatttttccttgaaaggtgaaatgcaaaatccccttcgaaattgcgaccttaatgattgaattgtggtataccattgagatatgggtaaacta

SEQ ID NO: 218714 - DNA, 392 bp, Glycine max
  unsure (1)..(392): unsure at all n locations
atgccagcttcattggctaacaagccaacatacgatcagcagcctctaatagactcaacataaggatgcacagggcaaagttgagtatgagaaaagattggatgaccaagtgaaggtgccaattgcaaagaagaatgaaagctatgcccagcaagccaacaagaaaagggagggaaggggacttgaactcggtgatgatcccggacattngaagacaaatgttttccaagaagggagggaatgatgaagaatatgatactggccaaagacaagctaaatgcccaagtggagaaggaccaatgcctaagtggagaacgacaacccccccgagaggaaaggatgaaagcccaacgggaaaagatgaacgccagaggcaaaggcctatcaagaca

SEQ ID NO: 218715 - DNA, 245 bp, Glycine max
ttcgctcaataattaggttaccatcgagctctgctgtggtatttcgcgggaactcaaaccgacggtgtgttttccgtcacattggcctgtgttataaagaggcaagaaaaatatatccgaccttgcagccaaaaaaataaaatctcgtcaacatggattaaaaacaattctagccgacatccggcaagaaagattactgggcgctgtatcccgacaagaaatcaccgatgaagccgatcgaacat

SEQ ID NO: 218716 - DNA, 318 bp, Glycine max
  unsure (1)..(318): unsure at all n locations
cctgagctgcagcttgctgctagctgcgaaagagatanttttttctggcatgnncanaccaaaacaaatacaaagaaatcttccagaagcaactactcgggagctttcttttatgatatactatcaaattactttttctaattcagaagagacttccttttacattttcttttgtccaggaatagccataagtggtgatatcaactaataaccttttatggttcacgatttgatttcttatctatagacaggtttcctggggttcttggggaattaaggtgatgctattgaacattataccgcaataattgataattt

SEQ ID NO: 218717 - DNA, 398 bp, Glycine max
  unsure (1)..(398): unsure at all n locations
agctatgaacaatatacttttttcttcatttatactttctccgggcttnggcggccacgcctcaaattagtacctttcgacacctaccctgtacgttgataagacccaatgctgttatgggaatgttgcgacaatccttcaaaaccttattgatacattctgagaggttggttgtcatgtggtcatatcgacgtccttctctatcataagccatcgtccatttttcctttgaaatgcgatcaatccatgttgctatggctggactaagttcacgaaattnttctaaattttgatcaaaaatgtgcttgcaaggagtgtacgctgcataaaattagttatgaataacaattttaagtatatatngaaaagtaatanacgtgaccatcaaatatgaaatc

SEQ ID NO: 218718 - DNA, 424 bp, Glycine max
tactaagcttttcaaaatatttaaaaacactgtgaaggagtcgcgtatgttctttggccactagtaattgattacagcctctagtaatcgattaccacgagagtcaaattgcattctctatataaatcttaaaaactcttgacaaaatcctttggcaaaccctgtgcattataatttaaaactcatttaagactctagagataaaatcatcattatcttggattcttggagcttgcttggatcaaaatagaagcgttttctttgcatcatcaaacttatgattatttgttctcaacactaacatatgcatataaatattactaggaaaagactagctttgagtatatttgagtgatggattagatgtctttttctactgctatgaaagcaatgaactggattcgatcatactaaaaaagatttg

SEQ ID NO: 218719 - DNA, 444 bp, Glycine max
  unsure (1)..(444): unsure at all n locations
cgtcccggaccttaagcacctgggcagcagcttgagggcgagtttatcttttatagtaagatcgaatggtcaccatacacatcgctcccttccatcatggggaccaccgggccgcagatccctcaccttttgggcgtgtgctttgaaagatccgtcccccctatttgcaaatgttctatagttgcatcctatccggaaccataataaaattgtactgatactgcctaacagaggcaaccattaggtcctttcaagaatggactcgggaagaatccaagttagttgtccaggtcacacctacccccattagactttcttggaaggaatgtattancaaaatcctcatcttntgcgtatctccccatcttctgacaatacatttttagatggttcttgggacaagaatccctcttgacttgtctaggtccaacaccttgaacttgg

SEQ ID NO: 218720 - DNA, 278 bp, Glycine max
ggcagtttcttggcgcaaatgaagtcaccatcgatttggaccaaaaactaagaatgggcatcatgacatttcaatgtgcaagcatgttaacatgattatcaaatctcttttgatatattattttggtttgaatgtttgaacacatctttatcaaaaaccttttttttatatattatccaatttggacgttttgatagcattaatacgcctttttatttatgtatcatttttgcgatccatactttttccacaaaaacgaaacatatagctttacaaat

SEQ ID NO: 218721 - DNA, 409 bp, Glycine max
  unsure (1)..(409): unsure at all n locations
acaacaggnagctcacaacaagccaattacgtccatggaacattttctggacaaagtggcctgacctgaagcccatctttctttgggaagagccccccaggttgttccttccagtcctttaccaacaaggacagaatctgcactagctgagttgtagcctccagtattaaacccactctgcttctccggaggatgagatactattttctccaccggcaccacctttgatactcattcctgatgactcagatgctgaagctgctgctcctactgactcaccagtctactacctagaggatgattcagatttntttgagtggatggactaacgaggaagttgtggttcatctagacaagaatgtggatatttctgaagagcttttgcctctttcttcgaccttttacctat

SEQ ID NO: 218722 - DNA, 217 bp, Glycine max
atcttatctattctcctataaatattcatagggagaaacactactctagtgttaaacatgggtcaagcactatgtgcttgtatatatttagatgccgaattttattgtgggcttctcgattatttattcttatgaaagaactaaaatcatatgttaataatcaatgatgacgaaatatactgctattgagcatagcatttatattcgtgagactcat

SEQ ID NO: 218723 - DNA, 264 bp, Glycine max
ttcacagaaagtgatccacgacaacattcgttgtgatagatgatataaatttggtcttttttgacttggttaacataagcaaacgcaaacacgtctggacgtctgatacatcatcacgaagccaccagattagaccgacttctagatagatcacttatatcagctagttactgtgtttaagttagatcgatatttttatgcaaatgtattattaatatttcgaccacataaaatatatgctactagtgtcagatattgaaaacc

SEQ ID NO: 218724 - DNA, 254 bp, Glycine max
cttctatatcaaataattcagtactggatggtcgacagctctgattcaactggaatggcagggagaacgccccgctttacccacaagcataatggaaaaccttactggtttaataagctttataagtgggccctagctttaaagatattaattttgtgaaggctttgtgccctttggttttgaattaataaacaagggatcttttttatctaattctgggctctacccattttcattcattagcatgtttactt

SEQ ID NO: 218725 - DNA, 125 bp, Glycine max
tgaagcctttgtcacaaatttgacttatgcttaggaggttatgctttatgccctccacatatagaacattctgtatttgaagtttgcgtggatatccgatatatctctcccattatttttcatgt

SEQ ID NO: 218726 - DNA, 207 bp, Glycine max
cccgaagaaaccttttcttacttaaaaaagttttctctcactaaccatgatgatgaataatactatgatgccacaccacaaattaccaccaatactaatgccactcaagggagttaggcatggtaaagttaaaacatcttcaattacttcttcaagcctttcttgagagaatgttcacaatggtgctcatgtcatgttgctccccta

SEQ ID NO: 218727 - DNA, 338 bp, Glycine max
gctcggagagggtgcttcaacggaggatatttaagagtgatataatgagagaggggggagcactaaattgaagggaataaagggagacatgttcttctttgagttgtgtctcaccagactctcattcatcaaaagtacaacaatgggtacacatgctcttatatatagactaagtagcttctcaactttcttgagaaaacttacttgagaagcttgagcttaactacacacacccctctcataactaagctcacctccttgtgaagcttccttaagaagattcctaaagacgctcgaacttagctactcattcctctttaatagctaagctcacctcc

SEQ ID NO: 218728 - DNA, 393 bp, Glycine max
  unsure (1)..(393): unsure at all n locations
atagaggttattcttttatctagtgagaggatctcttaatcttggtgattcaaaacccctacttgttaaaggactttcacacactttgggtggtgccctcgctggaaagagtgattctttcctttcaatcatctccaacccttgtgctttcaaaccacacttccgaaaatcccctctgtccaaattatctcgtgaccataactcccattttacacactcagatttagtgattcttgagcctaaaatgaatttcataacgagacctttcacctctgtttggatcacctctttggaagcctgtagcttccgtaatgccatatctatatttctgtncagccacccactatactacgtgttaccatccattcattcatttatggcagagaccacctt

SEQ ID NO: 218729 - DNA, 138 bp, Glycine max
agcttcctccttatgcaacaagataaggatatataaactctatcaattcattacatgcctctactatttgttgaaacacacaagacaaacacaacataaagccagggccaaaagaagtcaccttaaaatgaaggaaat

SEQ ID NO: 218730 - DNA, 224 bp, Glycine max
tcatggtaactgtcgcaacctaccctttttcgaacgaacgaagcgaggctcaccggtgccttcttcaaaggacgaaaatgcacatagtcaccaccaacatttatttgtgaaaaacgttcgaaaaaccgaatgaaaccggtcatgaaaaatattccagattctggagttatatttatgtgtgaggaaggtattagcacctctcacgtttgtcccaaaggacaaca

SEQ ID NO: 218731 - DNA, 456 bp, Glycine max
ctgcagcttaatttatgctatgtatagagttattatgtctaataacgaaagataatagaagtcaacacgataatcatacattataatctccaattagttaaagtgtaaaagttcagcttatattattttcccatagttctttaacactttaacccaaaaaaaaaataccgtttcgaaaattaaagtcaagcagcctgaaaaaagacaccacaagaatgcaaaagcaaagcaaccctctcaagagaggtgtgacacatgtacagatttaaatgatagttatacacttctattcataaaaatttgtatacaaaattataaaattaaaaatgcctacttaaaaaccaatgctcaaggtcattaactggaatgaatatttaacagaacttgacacctgcctcaattcagtttatacctttattaccaaaaatgcacaaagactattaagttagtaaacaa

SEQ ID NO: 218732 - DNA, 273 bp, Glycine max
tcacccaacctcagttgcgggagcatatctaagctcaaattttaaaataacaacaggtgtagctaaatactgcaaatatgaaccacataaagcacgtcacttgataatgatattgaactacagaaaaggagctatgaatactgtcagcgctaagctacttatgttcctcataaacggtgatttatccttaatgttggttcgtttaagtccctcccctttatccacagatgcaaattaactgtgtattttctttttcaatactctccacacaca

SEQ ID NO: 218733 - DNA, 326 bp, Glycine max
gatttttatcacacaaaacagaaatacttagtattgattatttatctttaaccaaaataacttataacactacacaattaccattaattggaggagtttgctacaatttacataagttttatacacaaaagttaatcatagttaccgactaacaactctctaaagtttacagttttgcttgtcctccagcaataaagaacagagcattggttcccaagtgacaaaaatatgctgtgattatgtacaaaggtgtatgcaacaaaagtcactaattgcatgatacctaaaagaagccaaatgctctcatgacgtgcttctccaaaata

SEQ ID NO: 218734 - DNA, 386 bp, Glycine max
tttatgatgacagccgctgtaatctataaacacatacactcttttttcctagacgatcactcacttaattctccatattctccccctttgtttttgaatttatgctttattttaagccttgaaaaatataacatcttgatttcataaaatacccattgttctctccccctttggcaacatttaaaaggccaaagtgcgtaaaacatacataatttaaattatacacaaagcattctttgtaagataaacataaaagatttcaaaccaatcatgaaacaacacatgaataaaccaaattaatatgcggaccacatagtcatatattcattaagtgattaagtctaaaacacataaccataaacaacccagaagcaggtaatataatc

SEQ ID NO: 218735 - DNA, 430 bp, Glycine max
  unsure (1)..(430): unsure at all n locations
agctttgaagggtttatagaactanncgtttttcaaaggcangatattagacgacgagttgaatgcttgtcaaacgtcaaagagaagtttgatcgaatagttaggtatgatggaagcaaacatgtggatgatcattgaccagtacaaagagaagttaaatctagctgctggccatgagcaaagattagaggatgagcatgcaaaggtattggctctccaagcggaaagggaagcaagggagagagatattgattcattacacagagaggctatgatgtggatggataggtttgctttcactttgaatggaagttaagagctctcaagactgttagccaaaccaaggtgatggcaaaagtatactccgctcccaaggaaggttgtgggctcttcaattattgtcagtatatgatcgatttgatggcccaca

SEQ ID NO: 218736 - DNA, 283 bp, Glycine max
  unsure (1)..(283): unsure at all n locations
gacactatannaatactcagcttcaagaaaataagatcaacgattatcgtcatggtcctctctctacatcacaagcactntctttcctacccccgccaccaccttcttactccgtgggaccttctactagacccatctcccanattccttttaagagactcacattaaaagaaatggtggttcatcacgagcaaggcctctattaccactgtgaggataaatggatttccgaccaccggtgcaagccttgacttcacattctcatcatcgacgaggacatgga

SEQ ID NO: 218737 - DNA, 325 bp, Glycine max
  unsure (1)..(325): unsure at all n locations
agcttcatgagagagtcaattatcaaatttttatgttanataaatgctatgctaaacangccaacaaagggagaaagaaggttgtcttcgaacccggagattgggtttgggtgcacatgagaaaaaaaaggtttctggaacaacggaaatcaaagcttcaaccaatgggagaatggccatttcaagtgcttgaaagaatcaatgacaatgcttacaaagttgatctgcccggtgagtataacgttaagtccaccttcaatgtctctgattattcttttctgatgtagatggagaattcgatttgaggacaaattcttctcaagag

SEQ ID NO: 218738 - DNA, 385 bp, Glycine max
  unsure (1)..(385): unsure at all n locations
agactgagtggatacaaaccactgagaaggtcaagttgatccaagagaagatgaagactgctgataatatgcataaaaattatcatgacaagacgaggatagacctggagtttaaggttagtgatcatgtattcttgagactggggttggttgagcattgtaatcccaaaaactcacacctctttttggcagtcctttccaaattctcaaaagagtctggcctgtgtcataccaaattgcattactctccagtctcacttaaaatcaatttatgaccttgtgatcaatacaatatgatcacgagtgaatgaatcataataattgtgaaagattgatctatatatatccaaggatactanggtcaaattacattcatcctataaac

SEQ ID NO: 218739 - DNA, 357 bp, Glycine max
tattctcctaaacgtcaaattcttcgcctatatattcaacctttccatcactggcacgtggagggaggtctcctcccaggtgcaacactaaaggtatattggcattcattcttcacaatcagaaaccacagacttttgtatatattaggaaataaaagccctccgcaaactcataacttggcccatcacacaaccacatgcaatggcatttatataaacaaagcattttatacgaaaatatttatgatcattatccttctacgaagcgcgagacaatgaaatgaaacccttgacatataaccccactcaaacaccaaacatgcaactaaagaacgctaaaaccccatctgaaaaaac

SEQ ID NO: 218740 - DNA, 313 bp, Glycine max
caattattttgtttttaagtgaaacgggtttatgatcccaacatggttggctcgtggtgcctaacacatgaaacttagaatgtagtgtgaaagtttacgcttccccctttttttgttttgttttgttgaggaaaacccacggatgatcacacatgattacaaatggtatgcaattttgcagatcaaacagttgttgacgcatatgcatgttgatgcatgactcatgaaaatgtgaggttgaatttataacgacaatgcagatatgtcatttgatgtataagaatgctatgcatgctgatttaagcatttacga

SEQ ID NO: 218741 - DNA, 384 bp, Glycine max
  unsure (1)..(384): unsure at all n locations
agctntaacctcattgtctctctcagtctttagatgngggagccaatccaatccttgtgtccggactctcatccacttatgatagccgccgatgatcccattactgcttccctaagctctctgtcctttcttcacgccgcatcccatgccttgcgaactccttggagtaacctcgcgttgtggtcactgaaacctcgtgcgatgaaaggcgtgatgctttcgtctgatggcactcctctcatgggacatccttcgcatgaagatagaatcctgattcttccttccttctagtgagggaaccaattaacagacgtcctctcatgctagccaagagttggtcccaattgcccttcctttttcacctcgagcggaaccttgagcgga

SEQ ID NO: 218742 - DNA, 313 bp, Glycine max
actcaagctgctaattacctgaaattgagaaaatgattatttaacacatcaaatggaagtactaagtatttatcatctatacttaacagaaaatacttataaaactacattataaccattaattggaagagtttgatacaatttacacaagttttgtacacaaaagttagtcgtattcaccaactaacagtgagctagtaataccctaccctcagaatctttcgggccatggcatgtacattggcgtgtgttccaaaggaccccttgtgaacttccactagcatctgctcaagctctctggcattcacacatc

SEQ ID NO: 218743 - DNA, 352 bp, Glycine max
gagtcttcttttcatagaaaatctattaacaccactttaaatccctggacccaatgacagaccataatttatttcaagcagactagaaagacatcatgcaactaaaaaaataatagatacaaattacttctttcatattgatgcataggaagatttcttaaatacaatgtatatagccatatcttcatttacaattacaaacaatgctacagaatatggacaacatataactaagtttctgaccaagggcctatcaaatggcatataaacttataatatatattaaactgcagggcttttctattggatatgatacatatcacatctgacgatgaatgatgacccccaaata

SEQ ID NO: 218744 - DNA, 223 bp, Glycine max
  unsure (1)..(223): unsure at all n locations
acaacagcaagcccaagagactattatttgatgctttngtcatagttgagtatgtgaaaagactgtatgaccaaacgaaagtgccaactgcacagaagaatgaaaggtatactaagctagcccacaagacaaggaaggaagtggtacttgaaccccgtgatgatcctggacatttgaggacagatggtttccaagaaggagggaatgatgagatcaatgaact

SEQ ID NO: 218745 - DNA, 473 bp, Glycine max
ctaagcttccagaaccgaacatggtaggactaggcaactaccgtcattacgcattttctttttcatacggatatggctcccgatcggaaccagcttctgggtatgactaaacgatagcatgagtccattaaagaatatgcccaaagatggagagatctcgcagcccaagttctacccgccatgacggagagggagatgatcacaattatggtaaatatgttacccacgttctacatatgaataagcttgatagtgctacatgccacgctaacttctgccgatactcgtctttctccggagataggattgtatccggactactaaatagcgaggtcgaatatgtcttcgaatatggactccaacaaccaccgaagagccccgtaggagctctaggataaggatcagacgcccacccgtcccaccgcccacatggataaagcaccataatcaagttatccgccatccccaaattt

SEQ ID NO: 218746 - DNA, 437 bp, Glycine max
agcttgatgaaattgccatgtttggatgagttagacatgcttattctgttgtttaggtatgtgatgatgttcatatgctgaaattgtctatggaaactgctagagatgaagggtagagttaacctacggttatgaagtgagaatgtggtgttattaatgaaaaaagagtgagactttgatggttggaaggctaagtctgaattctgtggtcaatggagggttaaatgagttaatcctagcttggaatgtgatttataacattgtagaaaggttatgctgtgcttgagggaaaaactatgaccaagtgtactcatatcctttctatggcaaattgggtgttgaaaatcaatcttgaattggtgaaatttaaggtaaatcagcttggcaattacattgacatatgactggtggaggtgagagttgctcaattacccatt

SEQ ID NO: 218747 - DNA, 500 bp, Glycine max
  unsure (1)..(500): unsure at all n locations
aatcactgcccactgcagcacaagtgttctcaaactttttttgagaagacaaagccagggacaatgctattttccccctttactaagcaccccttctatttttggaattctttattcgtaacgttacgaaactttatgaatgtcataacgatacttattttccttccgcaagggtacgaatccttacggattatgtatttactctttttagctttcgaaaagttacggaaactcacacattgcgcataaacacctcttttcgatttctcgcacattacggaattatatggatcgcgcaagcccgcttccttttgatttctgacacgcctcgggacttcatttattgtgcaacaaaggacgccaagtatctcgaagcagctaaccaaaggttgcatgtcatcaagtaataatccccggacgacattangggatgacaactggtaatcaattacagaccattgtaatctgatataggcaattatatgtaaactgctaactat

SEQ ID NO: 218748 - DNA, 346 bp, Glycine max
  unsure (1)..(346): unsure at all n locations
ctatannaaactcagctcctnctgattggtaagcaacaacttatccttgcttaacgtttctatttgtcttcaagcgtaattccttacagccattactgaagtccatgaagctaagcgccagccatggcagctaagtgagatttattgcggcaatatgagcgcttagcgagtccttatcagctcagcacatgctcctctgtactttagatgcatcattgtagctaagccagccagagttatgctttaccgagagtggatattttcattttacaaactcgctaagcggctgatcctacgcctagcaacctgggttcaaactaaaaattgatttgaatttaacaacggt

SEQ ID NO: 218749 - DNA, 369 bp, Glycine max
tgatgcatgaagcttatactcggactcaacaagagctgtactgcgaactctttatgcttcccccactgagcaatatacccctcaatgctttgcacattattaaactccgacaaagaaattctcaggtaatccaaattcagcgcctgcaaactcgccctcacattcgaactcctcacctcaacatagtaccccacacacctatccagcctgtcattggcaatcaacctcctcagaatcgcctgcagcttgtgaacaaccgacaccggcaatggtgatggtgcaatgcacgcctgatccccgctcgcggacgccatatgcaacggcacactattcttactcaacagccaccctaatctattctctcaatta

SEQ ID NO: 218750 - DNA, 297 bp, Glycine max
actcggcggaactatcggttcaatgtcttccagatatatgaaattgcggcgggtgtgatagtccgccaaaaaagaaaaagttgagaagcgcttggtaaggcagacgcaataggccattgctctcttctcaaagtagaaaggacttatacctttgctcggattctgtacatcaaagagccaagctcgacaaggacggtccgtccgaatataaggcgagaaaaagggttgcacgaatccgactcaagtaaagtaaacaccgtgtatactcgagaaaaattgcaaataatctcatcgaaa

SEQ ID NO: 218751 - DNA, 119 bp, Glycine max
  unsure (1)..(119): unsure at all n locations
acgagaagcaaccggntctacatgatgacagcgctgggacattttgttgttttttaaccccgcatgagcactcattctggaaaacccgctacatctgaagactgtggcacccaccgccc

SEQ ID NO: 218752 - DNA, 317 bp, Glycine max
  unsure (1)..(317): unsure at all n locations
tgagctcagatggaggtgggcaacatgggattgtggtttatgcgcgcattgtggatgtggaaaacatgttgtgcaccattcgccgaccggcacctattaccacatgtgatgggaccccataatctaaaacttgagataagaaatgtgaaggtgaaactccttgctttattgttgaccacagagtggtacctggagatatgtctcggnggtcatgagaaccttgggacatcaagtggggtgctattggccaaaaccaagcttgaccaatcccgacccaacccgggcatagtcgctcagtgagaccctgtgatgtacct

SEQ ID NO: 218753 - DNA, 415 bp, Glycine max
  unsure (1)..(415): unsure at all n locations
ctcagcttccgacgtgatcatacattatggtgtaattgaagtgaattttgtttcttgatctgantggaggcacctacatgcagtaaagttatgcaatgcatgtcatctggaggttnttatagacactacctacaaaacacacaggtacagactcccactacttgactttgttggagtgacccaacgcgatgaattcttgctgggtttcatatctggagctgagcgtgtaataattgttggctttggacaatttgaggcttttttaaaaacaccgctcctattgtattgcactgataaacctacctgatgaatgcatgaaactgtgtcccaagtgtcaattgtgtgaagttctatcataaaagatatgcaaagcaatcttaacgggaaaaatgctgactattatgatactgggact

SEQ ID NO: 218754 - DNA, 224 bp, Glycine max
cttttgtgtctcaagtcgaactgatgacacctatatatgagaggaattatattcactgcaatgactctaactgattacaaactagttacctatttccttacaaacattgagatctaatacttttgcgatgatcagcaataagtcgaggtcacataactactcatcattatatgtgatacggatccttaccaagacaaaaggatgaacaaacctatagttctcta

SEQ ID NO: 218755 - DNA, 219 bp, Glycine max
  unsure (1)..(219): unsure at all n locations
ngcctgcaaagcctgacatcgatgactagaacataaatcatttttactcatggatccggaagcacaatacactattctttcccttgcctcgtaaacaatgggaaagagaaagagagaagatgattacagcattgtggaggtactttctctacaagacatgcaattccgcagggcagcctcgaaggaaagataatagaataggacattacggtaacaagt

SEQ ID NO: 218756 - DNA, 288 bp, Glycine max
  unsure (1)..(288): unsure at all n locations
cgtactaatcaaacgcattcatacagaaaacgatgatcgaagccttgatagcaaactgaggtgtcatgcccaagcggcagatttagcattcactggaacctcaataactcgatggacctcctcgtgtgacaacagaaacacgaaatagagagagaaactaaaacttgaggatcttaagatatgaattcattcccaattagattcagttacaacatatcatttatactagatctaagaagcttgcaatgcaagcttctaacagttagntgccagctntcactggacatc

SEQ ID NO: 218757 - DNA, 482 bp, Glycine max
  unsure (1)..(482): unsure at all n locations
agctnttagacgtcttanattgacaatggcatgtatcatctgttgctatcgtaatattaaaagttntcttatattagacgtgccactaaaaacaactcatttattcaatattaatgatttggttaccctcgatacaattggactgcttttaatgatacaattgatgatttatatgcttcttacaaattgatgtatgaattagactaaatcttaaaaacagtgaaggagataaattgatgtacaaattagatcaaatgttaaaaacagtgaaggagaanaattgaagccacattggcgactatattgattggccatactctcacgttcttaatttgattctggctaaactatttgctgaattccattctcatctgaattgcatgaaaattacaacaacanataagcagatgaattaaaatagaatcgccaggattctcttaaattttaagatctagttcttgttctggatccacatgctcttt

SEQ ID NO: 218758 - DNA, 193 bp, Glycine max
tctcaaagaacttctcaagaagtttctcagaaactttcaagaactcctagttataatagaacatgtgacactgtgcacttgagaagaatctatgaacacaactcaagtaactttttccttttcttcttcaattcggctcccccttctcttttttcctctttctttctcattgaacatctctcaacttttatca

SEQ ID NO: 218759 - DNA, 121 bp, Glycine max
gcgctgcaactaaaaaagcctacaattctagtcccttgtattcacacagcctctactgaaggagagggaccataccgcaaactcgatgcaatctgcctgtgcatacagtcaacatctggga

SEQ ID NO: 218760 - DNA, 452 bp, Glycine max
  unsure (1)..(452): unsure at all n locations
atgcaaacctgagccttatagctagtgtttatgaacgtccatcttattttaatgtactgacttgattgtctcgaactacatattatttaaccggactttagtacacaacccctacaatattggcattcaattaggttctagtcagtggtaacacgttacacggtgttgcgcttgtatcttgttttgtcagtgtcacttagagattagcccatatcttacaatggcggccctaccaccacactcactatgtgaatcctcaaagtgtgggtagcgacacccacaccgacaatatatggcatcggattcaataaacggtattgttttatatgacaagaaacagaaaacatatattgggagagagaaatgagactgtctctgcttgtgcctttnttagaaaagaggaaagatctatatatatatatatatatatatatatatagacattgatgcac

SEQ ID NO: 218761 - DNA, 379 bp, Glycine max
aaacatgccatagcaatgtgcaatcatgagttgttttctaacacataagagaatgagaatacaagtttaaacattttcacaatcatttccagcagagacacgagggtaaattatgggggatcaaccatttgacatattgaccattgagcaacaacattagcaagtattaattacttcacagatatcacgctcgattgtagaagccagctgtttaaccgttgtcttattattatttgattcaatccaacttaatcagccactagtccacatcaagcgctgagtcgaatcatatgtataactaaaccagtcaaacacaggccaatatcactggaagagtggcatataacactattactatgaattgatgtcgactattgac

SEQ ID NO: 218762 - DNA, 450 bp, Glycine max
agcttgagtagttaatcttcacatctcttctttaaggggtttagtggtatcatgataaactaatgctaagtatgctaaattattttaattgaagtctttgtttggttgttaggtaacatgtgctttgggattttatttattttccatgagaaatgagtccattgatactttaattctttacacatctcaatgtatattagatgatgattataacattgatattatttgcaggatcttcccagacaaagccacaattcttgatgttgatattcttaatgaacttggtgaggtaagttctactctattctcaattgtggacgtcagtcaacatgacttcaagttaagtgaaaaccttctttaacttcttaattaaatctgaggtgcgctacatttctatgatcttgattaagatctgctaccaaatgagtgtggatgagattaatagcatta

SEQ ID NO: 218763 - DNA, 394 bp, Glycine max
  unsure (1)..(394): unsure at all n locations
atcacattttcttctgtgtcttttggtgtacaattccttttgcaagctttgcctgtagcagttccttgatcaactccaagttgcttaaagacaaaagaattatagtaagttttggtagaaatgcagtagtgacataataagtgcattattgacacacttcttttaatcttggccatgtatcttcaaaagtagatatgggtattctggtcatcaactagtacataataagggcattagtgacacttcttttaatcttcctatcaaaaacgctntttgagctataataagtcatggatcctgctgagaaaatgaatgagtcttatgggggtgttggttggatagcagaaacagaacatgcaatctcttcataagaactgtttattcatatgttatg

SEQ ID NO: 218764 - DNA, 342 bp, Glycine max
  unsure (1)..(342): unsure at all n locations
agcttatnttnatggagaatagagtggaagctctagtgttattattcacgacttatcatttaatctttgacattggacatcatttatatttgttgaacactttttctatgcctcatttatctaggaaattggtgtcattggctaaacttgatggtattggataatcctttaattttgggtatggatgtttcacgttatataaacaatatcatctcattggtactgtattctttggtatggattatataaattgcatttaaatggttgtgttgttaaaacaatttcaccttccaacataacggtgacactatattgagttttatgaatgaacactttgctttt

SEQ ID NO: 218765 - DNA, 426 bp, Glycine max
tggagaggggtaccactactgcataacccgcatgcaaatctttatacacgctatagatataaatatttgggaagccatataacaaggaccttatgttccctctataatgggcagaagtgcaacaatagaataacctatagcacattggactgacgaagacatgaatattacttctatataatttataggccaaaaatattagtacatctgccctaggaatagaatactttatggcgtcaaattgtaaaagtgctaaagatatgtgggatacactacaagtaacacatgaaagcacaacagatgtctaaagatctatgataaacactctaactcctgaatatgaactgtctaggatgaatgttaatgaacatatacacgacatggtaaagagactcacacacacagttaatcatcttgcatctctaa

SEQ ID NO: 218766 - DNA, 265 bp, Glycine max
ttcacttcacaaaggattctactccattttgttattctttgaaggtaagaatatacgtgccacatataataagctaatgccgtcaccactcggctccctattaatattgctaataagagtaaataaacccgcaacatgtagcactacttccctatatctaccactctaccaatagtagtaacacaatagtttcttgacagaaagaatggtaccctaatacgccgcatggatcaacaaagatagcataacgaatacactctccttg

SEQ ID NO: 218767 - DNA, 247 bp, Glycine max
  unsure (1)..(247): unsure at all n locations
tgatgcctaggttgccaattgggcccttattacaacttgaactaaagcccttttagttgattaacccaaaacatatttntagtcagccaactttacaaggattgggccattatttagacaaactaaacactctaaaattgaaataaagtggtgtcatttagtcctccatttgggccatgatacaactcacaaccttggaactttctccttgaaacttgggcttgtattcaaataatatggacagcac

SEQ ID NO: 218768 - DNA, 320 bp, Glycine max
accaagacattgctgactctttttattatcaaagacatgtggtggttgcgtttgcacaatgaataaatttatgactgtcttaaagacgcgtatataattagcacttagttttttctctcaatatgttcaatgtattctgagagtttctctaactttataagaatatacataattgttgttacataaatacaaattaatgttttcacgtaacaattgttgctcatatctctaatacctctagaaaatataggcctcattttcaagggtccagagtcttacacacatgcagaaatggtcatgtgtctttgattgagaaatgt

SEQ ID NO: 218769 - DNA, 413 bp, Glycine max
  unsure (1)..(413): unsure at all n locations
ttgaaacaatcattgcctcagatgtgttggcttcgaatatctagataattgctctgggtaaaattntgataaaaattgcgcaaaatctcttttgtatctggagccttcccatagaaatcaagagtaaaatacgtggagagaagacgcacatgctctcttccaagtcaattataacacaaaatagaattgttacaagacaagatttcacccattcagattaacatataaagcagaaatactaccaatggatgcacacatgcaatttcgtggttgaatctctccttaaacaaacttggggtttgagttcacatgaacctatttctccttaccttagttctaaagcacacgagatgaataacaaggggtgatgataaccatgacttgaatgtgtgtaatgtgacttcccatcttgt

SEQ ID NO: 218770 - DNA, 303 bp, Glycine max
  unsure (1)..(303): unsure at all n locations
ctcctcaccaactncacgggcaccacctatgatactcattcctgatgactcagatgctgaagctgctgctctctctgactcagcagcctactacctagaggataggtcggacttttctgactggatggactattgaggaagatgtgggtcatcttgacagaatgtgatatttctgaagagttatgcttcttttggcctttgattattagaaaaatacggtgtagaacatattactttctgtaattctccatgagagtggagtgctcatccaaagatctgaacaaataacttacctttgtggat

SEQ ID NO: 218771 - DNA, 318 bp, Glycine max
catctttcaggagtgacctattatagaaggtatggctcttattcttactttttagaatctctcaagaactcaggagcgagctatttttacagggctgtgtactaagctctatctctcaaatagtttctcaagaaccttctaagatactttccaaaagtacctagctataatagaacatgcgaacacttattgaactttgataatatattcttatgaaccacttcaagttcactttctcctcttatatcctcaatatctcctccccctttctttttcttcctccatatactcctatacagcttctatttatacacttct

SEQ ID NO: 218772 - DNA, 178 bp, Glycine max
atgttttgcaccacacacctgaaactagcacaatcataaaatgtgtcgactacacctgtttagatacaaatttaactgagcttgatgatctcatacatgcacaagctggcccatgatggtttgaaataagaaagcatcccctgtcttgaacaatgagaacgacagcttgcgaacgcca

SEQ ID NO: 218773 - DNA, 344 bp, Glycine max
cgactgcagctgcaactcagtctttacctgagtggagggtgtaacatttattcacacaatgggagaactcaatatataaaatcacactaaacataagatcatgcatcatttctacaaaaagaacataatttggaggaaagatgctaattttatgtaactatactaatcaacagatagtcatatacaacgactaacaatgcccctattactttcgtcgaagaagactctggagatattaatcaatgccacaatgatccaatggttgtcacgaagacatggccaaccttctagtttgcaaagcgatactcgacaaagaaacatggtagacgccttgaatggtcaac

SEQ ID NO: 218774 - DNA, 335 bp, Glycine max
tagcttctcttacaaagatgaataagagataatggaagatttttgtattcttgtggtgaggatgtcctcttcacctctagaaacctcacaatcactcgaactctcatcctatactccgcatgataacttcctcttcaattcctactggccctcaggatcttcacaccaacagttctctctgtcacctcttcactcagatgaatgcttcctagaacagaaaaagcgccaaacatagagaacctccttctattcttgaatcacgctttataaatgtagtgtattttggtggtaacccaccacatctgggtgctcactgaattaatgacatttgctta

SEQ ID NO: 218775 - DNA, 236 bp, Glycine max
  unsure (1)..(236): unsure at all n locations
cagcatgcaagcngcatgatcacatccacacctatctcaagcaaattcttcttgatatcaccaaaatcttcatgatcccgactcggtggaggaagatgcatgaacgacaaacaattcgtggggctgctaataaaagtggacaatggaggatacgcgaacagcgccaggccaccaatacccggctctcccgacatcgtggtggaagaggaatgaatgacaatcaactcacggagctc

SEQ ID NO: 218776 - DNA, 415 bp, Glycine max
  unsure (1)..(415): unsure at all n locations
agctttacagcagatattagtaatgacccactaacctataatttaaataacttaatgccattaacctagggaattaaaacaaactaaatggctgagtgtaactgaaattgttggcaaccaaaagtcacccccaacagccaacaagtcagccaccatttggtctcccaaaaggctgatgcctatgttgccaattgggcccttattacaacttgaactaaagcccttntagttgattaacccaaaacatatttttggtcagccacacttacaaggattgggccattatttagaccaactaaacactctaaaattgaaataaagtggtgtcattagtcctccattngggccatgatacaactcacaaccttggacttntctctctgaacttgggcttgattaaatagtatgacagcac

SEQ ID NO: 218777 - DNA, 359 bp, Glycine max
cacgttcatatctacggcttttttctccagaacaagtatgttatttgattgctcaaactcttgtttcaattacgatcgcctccatatattatgggattcattcgacatccgatttaaattattgccgtttgaatttgctacgggcttctgggttctactacgagtgtctcgatatactacgggaaacaattgacatacgagtaaaatctattgtcgcttgaatttgctcagagctttcggtttcagttacgagcgtctcgatatattactaggatcattcggacatctgtctaaaaagatattgtctgttgaatttgctcatagcgtttgttctgaacttcgagcgtctcgatatacta

SEQ ID NO: 218778 - DNA, 382 bp, Glycine max
cgcttacctttaccttgttatagaagctcactacaatgccttaagtgaaaaatccatgatctcaccatatacttaaggaattatggagctttggaatctgcttgggaatacgagtgggggggatttgtctcataggatacaacgtttgatggctagcttcatgatgtatattgggccatacttgatgcacatagtatattggctaaatgtatgaatgcagaaagaaatgttgtttctcacaagctacagtaaaatactaacactaataataataacaacatattgaataaaaccgaaaagctatatagtgagtgaatataccatcatggcaaagaatgatgtactcttggcctatctatatgttaaacttatcttgttcctt

SEQ ID NO: 218779 - DNA, 247 bp, Glycine max
acctgcggcatgcagcttgaaggtagcctaaaggagcttgaatcccaccattcttgatgtggagaacaagtaggtgatgaagatactaattgcacgatcatttatcccatatcagatagcacttgtgtttcacctcgtccaagtggccctaagaaatcgagcaccaccgctgtgaagaaccaggattatgagttgatcccgaatagagtggccaataattgataagttcgaattgattataggagac

SEQ ID NO: 218780 - DNA, 254 bp, Glycine max
tgtttacacaaagaaagggttttttagcattatatcgctgaaagcaacaaaaaactggcaataagggagtaagaaaccgcttgatgctcttcaccagttctcaacacatgagtctacataacaacttcttacacgccatacagaagcatcctaaaaaccaattgtacgctccagacacacccttataacaaacccccaaaagatttcacagaagctttatcaccattccagcatgtactgcctttattatatat

SEQ ID NO: 218781 - DNA, 339 bp, Glycine max
  unsure (1)..(339): unsure at all n locations
agcttccacaacatncaggtaattacacatccaatcatcatggttttacaanaccaagccaaacagggcaaaggcagaatactctgcccaaaactcaaaccaaaaatcacagctttttctcacttaaggaccccagtaacatttccttcgttccaattctgtaaccgttagatcgactcgaaaattttactggaagtctctagtccataagtctacatttngaccgttgggatctgctactaaatgtccagaaccccatatgtactacatcttttacaaccagccatacacaagcattnttctgcacttatacaagagtctgttgcacatttcaacagc

SEQ ID NO: 218782 - DNA, 322 bp, Glycine max
cttcttatacaaggctcatcttggtggtgaagctccttctttcatggcttattccctaatggatggcgcctcctctcacctatattcctttgtcttccgctgcatctccatggtggaaaatcaccatttaaagaccccattgaagctcaaagatccagccttcatataagcttcacaagcaagcttccatcaagtgtgtatcagagcacaagagcttcaagaagtgctcctatacctccattaatttttttctttgcttctttacatgaagttcttaattttctccatgatcccctacatgtcttgtttaaatgcgttaaca

SEQ ID NO: 218783 - DNA, 258 bp, Glycine max
cccttcatatatctagacgctcgatattgaatacagaagctctatgataagtgaatgacaataactttcatttcggatgctcgactgagcaccactatatattgacatgctcgctatgataactaaagctttgagcaaattcaaacgaccataacttttgactcggatgtccgattgtgtcccgtaagatatcgagacgcacataattgaaaaccggtacctctgagaataactcaacgaccataactttttactcgg

SEQ ID NO: 218784 - DNA, 469 bp, Glycine max
  unsure (1)..(469): unsure at all n locations
agctctntcttaagctatcgctacaacctttgtctccccctttggtattatcaataagccacagatctcggaaatcattacaattataacaatggagtagcaagatataagtatcagagtattaaagacaataagccaaactcataaacaagaaataatcaaaccagaatccaaataactgataatgtcaacaaccacaaaacatccaagactgatatttagaatccacaagataaataagcaaagtacttagcataataatgtaaattctaagaaactaaaagccataatacacggcttatagaagataaataatcagaatctataagcttataagacggaggaggtggtggaagatcgaaactctgacgaatgtatccgacatccctctcaagctgtgtaagacgaatgtccatactgggtaagcgtgaatctaacgagtcaaagcgggcaccaacatactaacgaa

SEQ ID NO: 218785 - DNA, 513 bp, Glycine max
aaaacttcaacttccatacttatacaaggatgaagctctgatgccacttggtagacaagtggcctcatactatctaagaaagtgggggtgaattaatatataccaaactacttcccaattaaaatctatttcactgtcttttcaagttataaattcccttaacagtgaactccttacatattaatctcgatcaaacaatttgaatatgaatatatagccattttaaacactggagattaacggaaaagaaagtgcaaactcataattatactggtttggcacaccctagtgcctacgttcagtccacaagcaacccgcttgagaagtccactatcatgtgaattccttttacacgttctaaacacacaatgacaatcctttctctgtgttagatattctttacaacaagagacccactgtctcttaatctcttagagatgataagagaagaagaatgatctctctaatagagatagatttacagattgagcactcaatatttccttatgaatt

SEQ ID NO: 218786 - DNA, 408 bp, Glycine max
tgcagctgctacttctattaaaaaagagtgagattcgtaagcgatgtttgtgacaccagtagtacctggggacgcccaacacttataggaacttgtgggaatctggagtggtgataacctaactaaaggtatttttctggttaactagggggacttgcgagcctcactgtgaattcttgacattgagcagagctgtatccatggttagaaagagcgtcatgctcttaccagcatgtagcgtgactcccaatcattatccatatgttgcctatgaccatgaaagctttgggggcttaattgttgtgttgggtctcagatatcaacagtgcgagagcctaatctaaaatatgaggctcagaatgattgattcacagcaatcacatgtggtggttgtatgtcatgtgtggg

SEQ ID NO: 218787 - DNA, 399 bp, Glycine max
ctattaccatgtgatataatcaactactcctctctctataagtgtttcagaagtgaacaagaacacttaaatcaatcactgtgggtatctaatcgattacattgttcttaagtcgtttccaggtcttcgggatgaacactctaatccagtaataacaaaatataatcggatacttcattgaaataatcgataattttgtagattaattgattacaggcggctataattgtttctctataaaaaccaccttgtgtcacttcaaaactatacaataacgaataagctctgatgagctaatcacagctgttatattaagaagagacagaaaatcttaaaagaactaccctttaaactttatgcaagactttggaaacgagtggcatttttagtcaataacac

SEQ ID NO: 218788 - DNA, 277 bp, Glycine max
ctgcagctaatattacaatcacaagctccttattttgtatttatccttatggaaccttcaccacgacgaaacactgacataaacttattttcttctttatggacaaagtatgacaagccgggggcatgtaaactattttcccatcagactatggatgccactgtgaatcgatccccatgttaactagatcatgacgggtattcaagtcatcgctccgcatgccttgaatgttaaggagcgttccaatcacactgtcacatacatttttccccacatg

SEQ ID NO: 218789 - DNA, 362 bp, Glycine max
  unsure (1)..(362): unsure at all n locations
agctttcattgatggagttgtgcttccctcttcacgctctatattactccccacaagtaagcgcaatttcctatggttatttggctctccattgatgtgttttggtgcttcaaatgatcattttttgcaaaattcgtgaagcaatttgcatctgaatccatgcttgatttcttgagttaaggatttgaatgagaaggccttacgcctatgttgtattctgaagcaatggggcatgccacattgtccccattcttttgtaaattgngtgcaaacatgcgcccaccatgtgctcaatgaaatgccccaatgatatatgaatatgatttttgcaaaattgggatggcggggatgttttatgtatg

SEQ ID NO: 218790 - DNA, 335 bp, Glycine max
accaaatcttcaatgccataaccatgaatcattaatagtaactctcatggccatgccagtattagtagtatacttaaagcttattggaaaaaacttatatctcctttctccatcttaactttggcaatctcttgccttttgggtattttatcatagataatgcacgtatcttcttcaaggtgaagataatagcctttctccatcatttagccaatgctcaagagaatttctttatgaattggaactagtaagacattcttttatgatctcttacctttctatgtctccaccatgacagtgcctcttccttttgactctaccatggtgtcatttcc

SEQ ID NO: 218791 - DNA, 397 bp, Glycine max
  unsure (1)..(397): unsure at all n locations
ctgtcantgctcagtgtgatggaaggctatgtttgttggcggtcaccacaggagcacaaaccacaaacccttacgacaggtacagatttctgatttaaggccagctgggttaccaagctgaccaacgcatccagtttgccttcaagcttcttagtttcagatgatgcagatgggtttgtaactacctcatgcactcctctaatgactatgtgctcatttatggcgctaaactgctgggagttggaggccatcttttcaatatatttctggcttcagcaggagtaatgtctccaatggctccccccttggagcatctatcatacttctctacatattactgagtccttctaaatatattggagaagaagctcgtctgaatctgatggtgggggaactg

SEQ ID NO: 218792 - DNA, 451 bp, Glycine max
  unsure (1)..(451): unsure at all n locations
agctttttaaagcctgtcatgatcgatagtgctcattaagtctacntatcctttggcttctactctctctcctacaaagtagaggagtggtccatagtgtggctggaccatattatgcgagacttgagactctggaatgtcttccattaaagtatgtttgtggagataccttggtcaatatggaccttgaacaccatgaaattagtgatcgctatgaagaccaccatggggtcatcatggttgacactattaatgcctttgaagtcttcgtcagtgaaagttaccggagagagactccttggtgaatgcatattgatgcagttgatgttgatatccataatggtgtgaagatgacgctttcgggactgatcggatcaccctcacacggatatcacccacaaagtgttactacacctcctattgatatgccgcctctttcttgctcttacat

SEQ ID NO: 218793 - DNA, 145 bp, Glycine max
atcaaactctctttaatcgtatagttgttaagaaactctcttcatcgcttgaatagcctttctaacaaaatttcttattatttcaataaatctactcaaacgaaaatgtgttttgatctactaagattaatttctaaaacacatt

SEQ ID NO: 218794 - DNA, 314 bp, Glycine max
ttagcttcaactaacacctcattagctatcattacaccatggaggatatgtctgcctctgaagaaagcaatttgcacacaacttgttctttcatgcgacttcggatagggtatgcactaatctcatccaagaaagccacagttacttcctcctcatgttcaaatatgtgcctcctccatttcaaattccatctccaaatattctggtagaagcctcccatggttgaaataagattgctctgctgcttactaatggggaagacgtacaggtatttgtgatccagactgctagcctctcccaaccaattgtctttc

SEQ ID NO: 218795 - DNA, 370 bp, Glycine max
actagctcctttcttcctctattgcccttagttgaatacacctttgtttggttctcttattgggtcttaaccctctcatgcaacttctttacaaactctgacctagattccccttctttatgtataaaagaattgtcaagtgggaggggaatgaggtctaagggtgttaagggattgaacccatagacaaccttaaaaggggattgcttggtggttctatgaacccccctattgtaggcaaattctacatgaggaagatactcatcccaagacttatggttgccttttagaagagcccttaaaagagtggataaagacctattcactacctctgtttgcccatagtttgtggatgacaagggagagaaaa

SEQ ID NO: 218796 - DNA, 462 bp, Glycine max
  unsure (1)..(462): unsure at all n locations
tactaagcttaaagactaactcanggaaataagagtatggattagtattacatatagatggagattctcttaattagggctcaaattaaggtgtttcaaaaggccaccatggcaaggtttttgattggtcttaatagggagattcaaggcatggtagagttacaccactatgcctctttggaggatctcattcatcaacctatcaaggtggagcaacaattaaagaggaagcaaatatacaagataaaggtactacccttggtaaaaataatggaaggataaggataaggagacattcaagatagagggaggaacttcattcaaatcttatgaaaaaggtactacccttggaaaaataattctaaccctactcccacttcttcatanatgagttctattaaatgttgtaagtggttgggaacatgccatattgcctcccaatgttgatgcaaccctaccccc

SEQ ID NO: 218797 - DNA, 422 bp, Glycine max
  unsure (1)..(422): unsure at all n locations
gcttctacttatgtggcagggcgggctccttttattttcttgtnnccaacgcgagctctgaccactgttcttccttcccgtgatgcttcttttcatgtccgcctgagtgggcttatagcctaaaccatacttcccacgattccctggggtttttatcaggctagttatgccgccattgtctttgcctaaacccatcccgggttcataaccgttccccaacataactcgggccatcatcaccgccgcatcggacagacaaggttgcccaaagagggagtctacggaggaaatgctgaccacctcaaaagactgganagcggtttctaacgattcttctgcggcctccacataaggcatggaggatgggcagcttaccaagatatcttcctcgcctgacacgatgaccaagtgcccctccacta

SEQ ID NO: 218798 - DNA, 474 bp, Glycine max
cggacactataaaactaagcttctaggtaggaatttcatattactttggttctactgactggtcgcggttatggtcaatttgctctttttatcctttacgtattttcaagcactactacaaatatggccttcgatgttggttctttatggtcttacaggacagtttttaactgtcatggaatccaccatcgtagaatgtggacaacttttcacgacggttgtagaactgtcatagaatatgttgtgtttttataataaaagttgtttttacgtgtagttttatatcggtaaatgaaatttctatgagaatttccaaaaaaccattatagaaagatcaacattaatgatatgttttcttaaaatcgtcgcaaaagatgagctgtatatgacaattcccagaaaatcatgatcgacagatctacattaacacacgttttctcataaccctcatataatgtggactttctatgacag

SEQ ID NO: 218799 - DNA, 374 bp, Glycine max
  unsure (1)..(374): unsure at all n locations
tatctctaacatcaatcttttttttcgtaagttctctgagggaatcctgacttctatatctttctcccggttagttttgagcttttcttagtgtcttgtgtttttgggtatcgnaatagggtaatttttacaccttccttctgaaaaaaacacttgaaaatgagaacgttgtaanaagttataatttttaataaaattagatgttattttttgtgaaatcttcgctaaacctcgatcacattggcatggttagaatatcaaaatgacatttccttgtaatagaactcgaaacatcccttagcccattntgttttgatagaggtaattgaccccgaatgttattgttaacctctatttttttaaatctatatgaa

SEQ ID NO: 218800 - DNA, 423 bp, Glycine max
gttcattcccttaagcacttctctatctttcaaatgtgcttacgaaaatggctttcgtgaagaagatccacgccgaggcgcttccataacgtttgcgtgacgattccgtgagtgatgtcacgaatgttttcgaccgtgcttcgacgttcttcattcgttctgtagtcttcaacgggtgaataccttaaaccaaagcttttcaattcattctatgtacccgtggtggcccacatttggcttcatgtatttttattatcagtatcatttactttttatacgctctttagacgtgcttaaaccatttatttaagtcatctctcgcttaacctacatataaaatatatttccaccaatcgttcgtattgtatcatccgctatctttgcgtgtaatgaattccgaccgatcggtcgttgccgtaccac

SEQ ID NO: 218801 - DNA, 461 bp, Glycine max
  unsure (1)..(461): unsure at all n locations
gcttgnaccctgaatatgtgagaagactctgtatattttgagagatganctaatagggatcatttttntaatattattcagttattcaataatgactttaattttcacatgccttcattttttcatatanctttgtactctaataattgtttagtcattagtttacttattttaattttacatcctttgtagatagccatagatagtgactaatcacaggatagtatggtttaggtgttttggattttttttttttaaatgagagtaatataaaggtgatttaaaaaagttttagagaaaaagttatttctcttctaagttattctgtgcccgtggaaggttcttagtggctacaaactagtggttgtcactgaaaggttcatatataaaagtgtcatatataaaataacaatttcaatattaaataagacacaatatcctatatataaattcacacaagt

SEQ ID NO: 218802 - DNA, 459 bp, Glycine max
  unsure (1)..(459): unsure at all n locations
tattggattatggggcacccgtcatatgtgggactaggtggtgatcgggtgatggcgctaatcaactctcccatttacacaagtcatgcataagcataccatcctcagttgcccacctttaatttgagctcacgcactcctacgtagcccttatcctcgttcctcttatcaccgggtccccatcaacccctccaagctttcacaatatgcaaacaattcaattccatttgtcatgaaactaccttaaaccaagaaaaacagagtggaggcagaaaactctgcacaaaactcattcaaattccacagttttccctactcccataccccaatcacattctctttgtttcgattcgttaaccattggatcaccttgaaaantttactggaggttcctagtacagaaatctacattttgaccggtgggatctgctagaaaatatctagagcacgagatgtact

SEQ ID NO: 218803 - DNA, 255 bp, Glycine max
aacacttgttgaactttgatgaaagaaagtcttgtgacacacaactcatagttcaacttgtcttcctttgtcttgctgtaatgacaggctcgcccctctctatgtatgtccctctgtgcttgtcctccatggaagcaccctctccaagcttcttatccaaggctcatattggtggggaagctcttgctcatggttgattccctagggatgggcctactctcacttttgtcgttgtgttcgtgcatttcatggggg

SEQ ID NO: 218804 - DNA, 279 bp, Glycine max
cccattcttggattaggccctctgggtcttgaattgagttatgatttttcaggtgtcctttaagtctccctttgttgtgggccagcccacaacctagacatatatcataacaattttctccaagtcaaggggataaagttatttcgataatacttcttcactttcttttcacctaaataatttgttaagtatctggatattgaattaacaaataaaaattctttaattattttttacattaaaataataactctcttaaatagcttgcatgtaggcttt

SEQ ID NO: 218805 - DNA, 409 bp, Glycine max
  unsure (1)..(409): unsure at all n locations
tccacggaggccattgcctccctcgcccaatattatgaccagcctttgaggtgcttcacctttggggacttctatttaacacccacagtggaagagtttgaagagatcctgtgatgccttctggaaggaaggaaaccatatctcttctctggattctatccctccttagctagaatttctaaaatagtcaaaatctcaacacaggaattggaccacgggaagcaagtcgaaaatggggtggttggggtaccaaggaaatgtttggaagcaaaggcaagagtcttggcaagtcaaggcgaatgggccccgttcatggacatcctcgcacttttgatcttncgggtggtcctctttccaaatgtggatgggttggtggaccgagtaacgattgatgtttttctccctttta

SEQ ID NO: 218806 - DNA, 450 bp, Glycine max
  unsure (1)..(450): unsure at all n locations
gcatcatgatcagtttcagcattctgcatgatatggcggcttattgcccaaccaactatcttctctgcatctgcaatatagcaaaaatgttatatgagatatttaagcagcaaatccttaagcacatactggtagaaaatactagtatgtgctttcgatacaagtcacaagtgtttttgagatcttttatactggaaatatagagtttttttcagtagagaagctcttaaaagagcttctagccttgtatccaaacaggctctaagtgtctaatccttaatgcacaaggtctcgagtccttcacactccaccccacaacggctcanaacctataaataaaattaaatgaaaacagttaagaacatcatcacaacaattatagtctacacagctcaaattatgtaacatctttaattatgtttttctttagtacaccaagtcatgaacatg

SEQ ID NO: 218807 - DNA, 380 bp, Glycine max
  unsure (1)..(380): unsure at all n locations
agctagagagtagcccggagagtttttagatatttncaagtccatanccatcaaagtctgaagagagtatgatgaactaagggacgtcaatatggccatcgatgaagccttggaatgagaaaccaagaaggcccgaaaggaataacacgaccaaaacaagttttgaggggctttatagggcagcaatagtgagctcaagctccgaagaggtgaaaggaatcatcacgggtcaaaggcatgatctggaaggacgagctaaaggcttgccttaggtcgaaaagaaatttgtcctatcagttaaagtgagactgaagggaatatgtgggccatcatcgatgagtgcaaagagaagcttaatctagcggcgactcacgagcaaa

SEQ ID NO: 218808 - DNA, 454 bp, Glycine max
tccctttcttcagccaatgctggacttgttaggctgtgatttccttggcaatctgatgctcagaaacatcaatatctattactccatcagtatgtctgcccatatatttgttgatcacagcatgggagaatctaacacactttcctctgacaaacactctttgataatcatcactttttctgcttgatatgtcagatggaatgttgacaatgaattccctgactaacccttcatagcaatctcaccaacttgctgactgtcttcagtagtccagcagccttaatgatgtccatggtctccttgcaatccaaggcatctcttcccatttctttgtcaaccgcaagtctgcgttgatacacatatttccacttttcaacattgacaatgaaatggaaagagatgtttgtcaatggtgcatcatgaacattctcaagcacctttctgtcatatatct

SEQ ID NO: 218809 - DNA, 456 bp, Glycine max
  unsure (1)..(456): unsure at all n locations
agctttatctgccaaggcaaatatggtgctttacaaacccatccaaaaaaggtacggtcacaatactgatcacaataagaataaaaattaaaacaaaaatcatttcccatgtgcttctacttctaacccccaccttcaagaaaaagagaaactattttgtttgtgaaaatccaggacattatgcaccacaatgcaggaatcgacaaaagataaatgacaatccttataagcctgaggctaacctagctgaagcagatggcataattgttgtggtcatttctcaggaatgtgagcaaatgggtggtaaactctagggctacccggcacatctgtgctgatagaaatgtgtttacctcttacactactatggnggatggagaagaacagttttatcttggtgattccaggactatactagttcaggaaaaggaaaggttcttctcacgctcacatctt

SEQ ID NO: 218810 - DNA, 428 bp, Glycine max
tgtaggattatggagtacccatcacatgtggtactaggtggcggtcgggcgatggtgcacaacaagttttccacatccacgatgcgcgcataaacccaccatcccctgttgcccacctccaactgagctcacgtactcccacgtagcccatatcctcgtttctctcaacaccgggtccccatcaatcctcccaagcttccacaacatccaagcaaaacaacattcaaacagcacaagctatcacagccaatcaaaacagagcaaaggcagagaactctgctcaacacatcaaccaaaatcacagcttttctcacttaaagaccacagtaacaattcctttgatccaattcgttaaccgttggatcgactccaaaattgtacctggaagtctatagtgcataagcctacattgtgaccggtgggatcta

SEQ ID NO: 218811 - DNA, 433 bp, Glycine max
  unsure (1)..(433): unsure at all n locations
agctagactgtacgaagcagatgttatgattgcccgagnnatgtnggggaacgagtacgaaccctgaatgggtntaggcaataacaacggtggcataactagcctgataaatgccaaaggaaatctggggaagtatggtttatgctataagcccactcaggcagatgtaaagagaatcatcgcgggaaggaagggcggtggtcaaagctcgcggttgagacaagaaagtgaaggaagcccgccctgccacataagtagaatctttataagcgcgggtctgggagacgaaggtcaagtggtcgcaatatacgaagatgatgctccgagtacattggatttggtacgaccttgccctcctgatttccagttgtggaattggcgagtggatgagcgccccgacatttacgcagcgagcataatggtaacctttacg

SEQ ID NO: 218812 - DNA, 362 bp, Glycine max
atctgatcatcatgcgttgataaatgcaaaaatttgggcaaatgaacaaggtgtgaatgatggagaatcccatgctgtgactgccattcttatacagccaacgtttccaccatcccgacaatgtcattactcagccaataacaaaccttctccttacccacacacccaattatcctcaaaggccatccctaattcaaccacatagcctatctaccgcatttgcaatgacgaacaccacctttatcacataccaaatcaccgaccaagatatgaatcttgcagcgataaaacccgggaaattcaccccaattgcggtgttctatgctgacttgctcccatatctacttgataattcaatgttg

SEQ ID NO: 218813 - DNA, 449 bp, Glycine max
  unsure (1)..(449): unsure at all n locations
agctttctttctatattgtctgangcattatatgtcgggtctgatggcagtggtcctagatgcagggaaaaatttctccaagaacaccctcttaaagtcatcccagctaaaaatggacctgagagcaaggtagtataaccaatctgtttccactccctccagagaatgaggaaaagcctttagaaagatatgatcttcctggacatcagggggcttcatggtggaacaaacaatatggaactccttaagatgcttgagaggatcttcacctgcaagaccatgaaacttgggcagcaaatgtattagtccagtcttgagaacatatggaacactctcataaggatattgaatgcacaagctttcataagtgaaatcaggtgcagccatctcccttagagtcctctcacgaggtggagattgcacaatagataacgaacttatatattgaa

SEQ ID NO: 218814 - DNA, 396 bp, Glycine max
tgtaggattatggtgtacccatcacatgtggtactatgtggcggtcgggcgatggtgcacaacaagttttccacatccacaatgcgcgcataaacccaccatcccctgttgcccacctccatctaagctcacgtactcccatgtagcccatatcctcatttctctcaacaccgggtccccatcaatcctctcaagcttccacaacatccaagcaaaacaacattcaaactgcacaagctatcacagccaagcaaaacagagcatatgcagaaaactttgccaaaacaccaaccaaatcacagcttttctcacttaaagaccccagttacaattccttcattctggttcattaaccgttggatcgactcgaaaattttactggaagtctctaatact

SEQ ID NO: 218815 - DNA, 464 bp, Glycine max
  unsure (1)..(464): unsure at all n locations
gcttgnctcatcgttgatgcgagacggagttcttatgcntcctatcatcgccaaggaccaagaagagttaggtctagccacggcccacgagcataggattgcggacgagtatgctcaagtatacgcggaaaaagaggctagaggaagggtgatcgactctttacaccaagaggcaaccattnggatggatcggtttgctcttaccttgaacggaagtcaagaacttccccgcttgttagccaaggccaaggcgatggcggacacctactccgcccccgaagacattcatgggcttctcggctattgtcagcatatgatagacttaatggcccacataattagaaatcgttaggaaacttgtatggtctctcagaccttgactagatacgaactgtcttttgaaataaaatgagttgagcccatgtgtctactgcaaaaagctcgtgcaaatcaaatcactccta

SEQ ID NO: 218816 - DNA, 416 bp, Glycine max
tgagaattgtaagccaatgctctgcacctttcttacatgtctttatataagtcttgtttccctctaagtagtaacggcaaatcattagtagcattaagtcgataggacttataacttgtttgttaaaacataataaaaaaataatgtaaagatatttaataattaaataatatgtgaagttaaacgtataattttgattttattaattatttaattagcattataattatagtattatttatttaactattaaaataatcattatatattttaaattattataaaataataatcacataattatataattaataatttcatatattatatataataataaaattatagataaatgtataattatattattaagaattacgtacatgcataagccaggcagggagtgatatattaaa

SEQ ID NO: 218817 - DNA, 423 bp, Glycine max
  unsure (1)..(423): unsure at all n locations
gcggncgggcgatggagcacaacaagttttccacatccacaaagcgtgcataaacccaccatcccctgttgcccacctccaactgagctcacgtcctcccacgtagcccatatcctcatttttctcaacaccggggccccatcaatcctcccaagcttccacaacatccaagcaaaacaacattcaaacagcacaagctatcacagccaagcaaaacagggcaaaggcagaaaactctgctcaacacaccaaccaaaatcacagcttttctcacttaaagaccccaataacaattccttcgatccaattcgttaaccgttggatcgactccaatatcttactggaagttgatagtacataagcctacattttgacgcgtgggatctgctagcaaacatccagaactcattctatataactctt

SEQ ID NO: 218818 - DNA, 227 bp, Glycine max
acgcaagggggacatgccaaacaaactgacatcacaccaccgggctagcagtcatgaaaccggagtaccaacgggaccccgtcgcacaataaggactggaccccacaggaggtaggggggagccactggaaccaggaaatggtcaggccggaaacagctaggggaaaagaacaagcaaaaaagaagagcagaggctcggaacagacagggggacgatacaccgaaca

SEQ ID NO: 218819 - DNA, 412 bp, Glycine max
  unsure (1)..(412): unsure at all n locations
taccgcagccgcagctggggcctgcttggaggggtttcgcttatgcnngactgtgccgaattggaagagttcccggcatgagctaacacactgggtgatgttatgcgtactgatgggtaccatgagaggtctgtggtggcttgactcatgcgagcatcaaagtgacggcatgggcatctccttccttcctttatgccccattagctccgattctcctaccattggtacttgtggaggagacgtaatcgaacttccctctcttaaacctacttcgattttctccccaccaaataccaattccgtgaagctggagggcatatagcctaccaccttctcatagtaaaacaccggtaaggcggctaccatcatggtaatcatctccctctcaaccatgggaggggccacttgtgct

SEQ ID NO: 218820 - DNA, 448 bp, Glycine max
  unsure (1)..(448): unsure at all n locations
gctttgactntagtcatgaagagatgatatttatgtgtcaatggcatgagtttcaataataatcaataatctatcttttacataatcttctttcaacacccttcaatcaatctttcaatatcttctttaatctctttcaacattatcaacagatctttctgatttatttcccttcatctttctaaaagtttttgttcaatagtttctcttccaagaaaagttctttggtcaaaaacttcagctattcatctttttcattctcttctccctttgccaaaagaaggaaggactaaccgcctgaatttttttgtgtctctcttctcccttacaaaagattcaaaggactaaccgcctgatatatcttttgtttccccatacaaagatttaaaggactaactgcctgagaattctttgcccaacacattggagggacattctttgtggtaca

SEQ ID NO: 218821 - DNA, 447 bp, Glycine max
  unsure (1)..(447): unsure at all n locations
tctgcgctaagcgcctagtcttattttcagttgtatttcttatgtttttcaatcgtcaataactcctgtgtaatcctattttattgtatatttcttttcaaatggcttcccgcaaaagaaaggctccagcctcatcatctcaagcccgctatgataatcgagattcacatcccaaaagacctgngatcgctattctaacattgtgattggcaggaagattcttcctgagaggaatgtaatgatatatcatacagaatttgatgaattcaagactgggttggaaagaaggaatgggcacaaggaattcacaaactttctagatgggagcatcgacgtggcaatagtgaaggagttctatgccaacttgtatgatccggaatacatgtcaccaaatcatgtacgggttatggcccacctatataaatntgatgcatatgcccttaacac

SEQ ID NO: 218822 - DNA, 476 bp, Glycine max
  unsure (1)..(476): unsure at all n locations
catttcggaccttaaaactcagctttcattatttatgaccctagatgtcaattgtgttattgtcattttattctcgttntgtgtactttttataccccctgttgacgtgcttaagccattttacttaagtcgtttctcgcttaacttaaaaataaaataaatgtccaccgaacattggaattgcattatccgttaacttcgggtaaaatcaattccgaccgttcggtcgtgccgtaaccacgttggaaatcaaaaagaggtaaaaaataatataataatcaaaaaatatctttttagtgaaataaagcgggaaatcaatcggacgttttctctttgggatgtctcattcttaatcgaaattgattaataactaaagtgaaactaaaggctaatatcaatccacctagtcaagctcgtccacaaaaataagcttgtgaagttcgcatttcatgtctcactaagtaaatggatcattt

SEQ ID NO: 218823 - DNA, 305 bp, Glycine max
gcaacgtgtgcttatcatgaacgagccccgaggcatttcattgagcatcgtttgaccctgaagcgtaatgagcaaagtctaattgatgcgggcaggctgaaatttgataagaaacgcgtatgggtcccgatattgacaagcgacaccacacatggggcaatcttgaaagctgttggtaggtgtctctaatgactcatcagaatgtccaagtctatgccattattgtaaaccacagatacaatgctaaaatggatgaatttgacagccttgtctctatcatcctctcacaaacacatatttgctta

SEQ ID NO: 218824 - DNA, 351 bp, Glycine max
tagcgcgtgactctcaacacacaaatgactttcttatgttgtcttaatgaattaccctcgcttagccacaggaatctcaacaagaggatgagtgctcatcctcataagatgaactcgcttatcgcgatatgcgcgcttagcgagatcgtccgagaacgcatatattcgatgaatattgatgaactcgctaaggcaacacgatccttagcgaagcatcgcgcctccagaaaccacagaagacaaattcatgttctctctaaaatgagcctctaaaggcatatctaacatgctaaccaggcaaatctatcttcacgacccactcttgtataaggtactaatctttcactaatc

SEQ ID NO: 218825 - DNA, 334 bp, Glycine max
attcacaaacatttggattctcgccagccgaatagaactactaaacaccaattgtcatgcatttcgtaagagtttttgacgtctcacaagaaaatgttcaaaatacttaaaaggagggcaaaagggtcacttttggggcatttttcagctcctgagccacccagataacttcatgatgaattaaccatcttgcctgggcgagcaaggttgcttcaacattatgttataaactcacctgggcgagctaccttcatcccaaatggcttgttttgctataaatatgcgtgagataactgaagtaaagggtcatgaggttcccctatgtccagaggtc

SEQ ID NO: 218826 - DNA, 291 bp, Glycine max
ccttttggtttcttgttcaacggctatcgcattggccgcattttcctcttgtaactcagtgcactccttccggatatgtgtagcatctgacttgaacttctacttggcgagtcttgccttccctaactttaactgtagagctcgaacttcttcatcttcctacggagcttcgaaattctccgcattgataactttcacttgggagaaccaatctaaccctcgtgcatgaattcttagccatccatgataacctccaatgacgccatttcggatgcccctaagctatttgtc

SEQ ID NO: 218827 - DNA, 337 bp, Glycine max
agggcaaccagaaaacgtctgtgatcgttagagcatctaaacgtgccctgtatggcgctcccttgatcccatacatgtgcgcctttgttgtaagccacctctatgcacgtggggtagtctcagcgtacgcatcatcaatgacgcactgatgaacactgcgaaagtgcttatatatccagcacttcacaaataaagtgaacataacatataaaaacctttaaaattcattttccaacttaaacctgattatgaaacttaaaatttacctgtgagagcgtcaagtacccacccattaatcgtgtgggggactgtgaagctttatttatctgtgcataca

SEQ ID NO: 218828 - DNA, 371 bp, Glycine max
cacataatttctataactatcgtggataacatgtgaattagtggatccacaagtctatggatatataatcttcttttatccaatataactcttgaaatatcttatgaatgacttgtatgaatagggagctattttatccgataatactatatggatgagaaacatatagggaaggcttatcgacttaatgaaatatggaactaaagtggaagggagagacgtaaatcgtatattaaatatttattccatcatcatataaattgcacaatttaacaagtgtttcttcttgattgtgggttgcaataaatgactcatccacacttactggctatatgcacatatactcacttacttcttaataattattcaat

SEQ ID NO: 218829 - DNA, 367 bp, Glycine max
caggaagctaaaggccattctggtggcatttggattctctcctgcgctactgacatcacagtatctcttactgactccattcaccaagctattcctttctccatacaaaaaagaaatgttgctcgacattgctcagcgatctatgcttctcctactccatccaatcgcaatttcttatgagactatttgagtgactcgcgaaaccaaatttcagggccatggttattgctaggtgattttaacgaaattctaaaccccattgaagtctttagaggtaatttcagttctagcagggcatacttattggctaatatgatgtcggcgcgaggcgatatggatttggattcagttgcgtggtaggttactt

SEQ ID NO: 218830 - DNA, 450 bp, Glycine max
ctgttaagaatctagctttcatgcaaaattcaaacctgtaatattttatgccaaaggacccagcatattaaacctacctatatattgtatccttttacatatcaagaagccttatgataggaatttttctaacttttactattttcgagtcaatatgttgtgatgcattgatgggaaaacactcacatcagtctcaactcttagcaaaactattcacaactcctaattggaacatagttctattctatatcactcttgcaattgcatctattcacctatgatattctgttgttgacacacatttgacactattgacaggctgaacgatgaaactcatatatatatggaacccactaattcgttgcttgtttcatttgtgtgagagaacaacacatattctattgaatatatctgtaagtggtaaacaaactctattcaattaatgatttt

SEQ ID NO: 218831 - DNA, 459 bp, Glycine max
  unsure (1)..(459): unsure at all n locations
cacctgcggcatgcaagctttatttattattcacgangatactttgcctaacactattatttcttccaatagagaaactgcacaaagtgcatatataatatttaagaaattctcgcataacaaaactggcaagattatcagtaatgttggagttagcagtagctcactctctcatgttggtgcattcattaaagacaaattagcagagaaaaacaggtttgcaggatttaaggagaaagttttaacaattatgtataaagcccttgatcatctatggaagagagatatgtgcttaagatatccgaggaaatgcacccgaacctctcctagaaatctcanattgcgtctcaaagctgtcactaaccgatgttaatatacaaacgttaacatcggttatgtataaataaccgatgttatatgcaaagaactaccgcaaaataagtgtatgcatcatgaacg

SEQ ID NO: 218832 - DNA, 451 bp, Glycine max
  unsure (1)..(451): unsure at all n locations
cggttcgaggtacttacccgttgaatatcgaataacgatttataacgaatgaagaacgtcgaagaacggtcgaaaccttcgcgaaattccttacggaaacgttacggaaacgtttcagaagcgcctcggcttagattttcttcacggaaacaatttttccaagcaaattcgaaagagagagaagtgcctaatgggctgaaccctttttcacttcacttcctcccctatttatagcaaaataggggagatgcttgccgcccagctcgccaggcgagcatggttgcttcctccataagcaacagccttctggaggaatcttctataaggcccaagtgggcctggttgctatttacacccccatttttactaagtacacccactgtctttttttagtgattctttnttcgtaaagctacggaaacttataaatttcgtaacgatacttgttttc

SEQ ID NO: 218833 - DNA, 349 bp, Glycine max
aatatagatcatgtagaacttaacaccattatcaaccgatttttgaaccaccgacgttaagtattaatgttaacatcggttcttgaaaactaatgttaactaaactatacacatcagttttctaaaaaatcgatgtcaaactattagacatatctaaaaaatataaaatatgtaaaaaccaatatctttttttataaaaatcgatgtatggttgactaggaacatcagctttttctaaatatcgatgttgcgaactaactacaacataggttgtttctcctaaacatagatgttttgctcacaacaacttattgtttaaaaacaccatcggaaattcagatttcaaaac

SEQ ID NO: 218834 - DNA, 239 bp, Glycine max
caaaatgcggcatcctaattttgtgcacgcgtgccatgctttgcatcatgttactatggagcggatgtttggagtcgaatgacggctcttgcaacatgtcacttgtaagtggacgcctataacatggggcgtgattgcatacgagcactatttatgacacgtatgaaacgtggggttggaaactaccaggaatatcgtatgtcatgtctggatgtctgcattagtccaaattgtcctcg

SEQ ID NO: 218835 - DNA, 415 bp, Glycine max
  unsure (1)..(415): unsure at all n locations
cctacatacataaaacagccccaccatcacaattttacaaaatcatattcatacaccattggggcatttcaccgagcacttggagaacgcacgtttggacacaaatngcaagagaatggggacaatgtggcatgccccattgcttcagaatacaacctaggcttaaggccttttcattcaaatcctcaatttaagaaaataagcaccatagcaaaccaaaactgcctcacaaatataagcatgttctcacaatttaaggcaccaaaagacgaagaaaacacatcaatgggaagcanaaacatcaaggatggaatacttactcgctggagtgaataaaaacaccaaatatgaaagcatatggcaaccataagtggctcgagggagcaagaaccgccaaccttcgtgttctttctct

SEQ ID NO: 218836 - DNA, 390 bp, Glycine max
tgcccttgccaaacgagagatcgtcatgatcctcttgatctctatttcaagacgtataacagtttcttcaacacttttcagtgctgtcgcaacctacccttcggcgggagggcgacacgtgactcgtgggtgcatcttccaagaaaggaatacgcgcggagtcgccaccaacatttatttgaggaaaacatcggaaaaaccggaataagacatgatctacgaactttaagtgaaatgtttgggagttgtatctatgcacggtgaaggtattagcaccccactcgtctttcacaagacacgtcagcctgtgaataaatgtgcaaacatgacttcagatttatgttcccttttacgatcatattcctttgtatatctactatctttctgcgg

SEQ ID NO: 218837 - DNA, 471 bp, Glycine max
  unsure (1)..(471): unsure at all n locations
tctatgtggcacaatgganaaagactanaagaataattttttgtttgtgagtctattcgatttaacatgaattagcatataattatttgtttaaaaacatagattattgaatttttagatcacttgagtatgtaactgattaaatatagatatagttttgtcatttataataattatatttgataacatgattatctctaaacaaaaatatttgtagtcgaaaataaaaaaaaaaagtagactcattgttgcagactttgactttgagttgagaagaaaaataaaaaaaaatgtattttttattgattacccttcgtattcattgtggtgaaaagaaatgatagtatgagaaaagtaaaagaatgacaataggtggaaaagagtagaatgtgaaagagtataaaagagatgacaaatgtgaattatagtaatacgtaaatattaattanaaatagagatgaaacaaatatc

SEQ ID NO: 218838 - DNA, 456 bp, Glycine max
  unsure (1)..(456): unsure at all n locations
catgcaagcttgnnctgcatatgccaactgatgtgttttctgtttccttanctttnnaaaagattgaattcaatacgtccccgattagttaactgtaataaatcctcttctctagtttaattaaattatagtgaaggtaaatgcggataaaaatatttcaaaattttgaaaagttgaaatacatgacacattatttcttttcttttcaaattttggttgaataaattaaacaattcaatttttttttattttttgaataaaataatntggttttcatcgcatgcaaaatgttatttttgaacatatattaaaaaatcaatttatattctttttttatctaaaataaacattagccaattacttaataataaaaaaataaaaatttcttaaagccaaatgattaattatatcatcttaattctcttttcatagataactacagaatcgaatattaag

SEQ ID NO: 218839 - DNA, 458 bp, Glycine max
  unsure (1)..(458): unsure at all n locations
cttaaaactaagctcacaatataagaataccaattcaatgtggacacctcccactgtggtgattgattcctcaattcgccacattgtggatagctgacaccatccattagacctacctctgttggtccacaaatcactaattatacagtatcataccgacattctgtttcaaacagatcataaggccataaagacgatccattacatgcaatggccagaaacagcagaggcagtatcatactatcatcaattacactcgaagaaattcacagataaccaacatatgaagatccaaactttacacgactaagaaagagatcaaccttgcaaaccaaaccatgtcaagatctagccattaccaaactcatattaaatataacaaaataaatataccagtgtaacacatcttatgggtactcacanagcagtcatcatcaatggtgtatatgtacttcttc

SEQ ID NO: 218840 - DNA, 453 bp, Glycine max
  unsure (1)..(453): unsure at all n locations
agctngagctatcagaagactattattcatttagtgtttatttctctaccttcacagggtagtcaatntaagatcttttataacagccacaaggagaaatggtctcttaatgagctcatttcatatggtgtgtaagaagaggaaaggttgaagcaagataggactaaaagtgctcatgttgtgagtacctctaaagacaatggcgaaagaaaaaggactgaggaccccaagaatgaagctgctaagggtccagcacaaaagaaacaaaatcaaggtgacaattgtttcttttgcagtaagcctgggcatataaagaagaaatgtaccaaatgcttggcacgcaaagaagggtatgtntcttactttggtcagttctgaggtccaattatcttcagtacctagaaacacttggtggttagatttggtgccactactaacatcattgttcaatac

SEQ ID NO: 218841 - DNA, 461 bp, Glycine max
tatactcaacaccgcaatgacatctgtaaggactctaagctcctaatactcatgaacatcagagataacgagacgattcgccaccaaaagtagagcatttggaagctcctgtgatacaaggggaaggaatttcttggagatgacgccaccaccgatgacaaccacttgggaatccatcaccacaactcataccatcacccatatgagatccaaacaaacaggcatataatcaggctcatgctcatgcaacaacatggagggaacacaaagctgagaaagaaaaaggaactaattgtcagcaaactgcttgagagagcttttacatgaaaagtgatgtaattaaggtgcacatttatatacatgagaagtaattaaggttatgtaaacttttgatcaaaagataagcttatttaaggtgaagtaattatactgacataatggcatgcacaaattagagaaat

SEQ ID NO: 218842 - DNA, 396 bp, Glycine max
  unsure (1)..(396): unsure at all n locations
catgcaagcttgaagngagaaagagtggaagagacattctttctatcttttattngttgaccacagagtggtacctggagatatgtcgcgggggtcaggagaccttggggacgttaggtggggtgctattgcctaaaaccaagcttgaccaatcccgacccaacccgggcatagacagtcatggagaacctgcgatgtacctatacaggcgagctcctggctgtcaaccaattatagaacaaagaccacaatagtaggaggcttgtgtggtggctggccacctatggatcttgagtgatatctggaatatggcttctggtaattgattaccaagggtgtgtaatccactacaaggtctaaaaatgaagacaataacgtgagatggcctttggtaat

SEQ ID NO: 218843 - DNA, 460 bp, Glycine max
  unsure (1)..(460): unsure at all n locations
gcaagctntaagcaacataaacactttttttgatttntaggnngaaatcgctgaacctggcagcttggatatacgaacttgtgtaaattactgggaattggtcactccgtgttttgagatgaaatatttactgaattttctagacatctggaaaaaaattatgaaaaaagaaccaagcgatttggataaaaggaaaaaataagaaaaatcacacatgttggttgaaaaatcagtgtccaggaaaaaaaaaggtgaaagggaagtgcgcttgttgttttggctcaaaatttgttctataattggtgcctattgtaacaccctgatatatatatctatatattattagtaattatgtttgatgtttgattatttgttgcgttattctcatccgtaattacttttaaggaagttaatctagttaatagaggggtctggatagattaggatctagcttctcaaa

SEQ ID NO: 218844 - DNA, 380 bp, Glycine max
tatctgtcaccagatcatataacatataagaactcattctatcttcagatatatcctcccaaatgtcaaatacttcgcctatatattcaacctttgcatcactggcacgtggagtgaatcttcatccatggagcaatatgaaagagatattgacattcattgtacacaatctgaaaccataaacattgacatatataacgatataaaaaaacatacctcaaactcaaacatgtagaaacaaagacttagatgttgtagaatcaaagacattgcctttgatgtgttgatgatgccatatgatcgtgatgatttgacgtcttatggaaatgcgctgatttaattgaattcaatacaacaatctgagaatcaagaacgacatc

SEQ ID NO: 218845 - DNA, 445 bp, Glycine max
  unsure (1)..(445): unsure at all n locations
agcttcggggagcagcaataaatgttcatctttcaatggnttctatcgatgctaaacctcaacccatcatccttgcctacattgaacttaatcttgaggtatacattgaaacagattaatttattttaaggtggtagtagacttatttatacggtatttattctcacttttgtattttagactttggctgctgcaagaatgttgactgcatctggtcctgggggacaaaaccattggggtgattcagcaaccaataattcagcctcgggcacccattcagctgatgcccagttaaaggtatcattatgctttatttctccgtattttggtgggtactacagatatatccattgttgttaaactcaagattctacataggactgtgacttagatcgtataatcctacctanaatncannaatatatacacgttaaaaaagcaacat

SEQ ID NO: 218846 - DNA, 373 bp, Glycine max
tactaacgctgaacataaagaaatactgagtggaagattatttatctgcactattgaactacttgaataacaagaataatactcaaagctattaaatgtgacaccaattaagatgaaagcgttgggaagttgcctactgaaatgtctctagacggataaatgtttgtctctatttaacattattctagagttcttacaccgagataatactcagaccatgattccttacatgaatgagcttaactctcttagctgtggatattgattccttaacatactcgctcttacagagttgcactaatcatacagtgtaaaatatagtatatcactgcgctcccttactagacatacatatttctagcttgctttatca

SEQ ID NO: 218847 - DNA, 451 bp, Glycine max
  unsure (1)..(451): unsure at all n locations
agcttgtgtttgacttagggatggcctttgtggataatngggtggtaggtaaggacaagggttgttattggctgagtaatgacattgttgggttggtgggaaacttagccgtataggaatggcagtcgtagcatgggtttctccctcattctcaccctcttcatttgccccaatttttgcatttatcaaagcatgatgatcagatttgcctcttttcagacccacttcgatcatttcgccagcgaagaccaaatccgcaaagcttgaaggtgtgtaacccaccatttttcataatagaacactggtaatgtgtctactatcattgttgtcatttctttctccgtcattgagggaaccacttgggctgccaggtccctccacctttgggcgtattctttgaaagatccatgccccctcctgcatatgctctatagttgcatcctatccggag

SEQ ID NO: 218848 - DNA, 422 bp, Glycine max
  unsure (1)..(422): unsure at all n locations
cttgcgaatnntagttttgttggcgaaaggatcaatgtgggtttgaaaagaggcaaatttgattatcctaatttgatgaatgagaaaattggggcaattggagagaatgagaagaaaggaggaacccatgctatgacagccattcctacatggccaagtttaccaccagctcaacaatgtcattactcagccaatatcatcccttctcattatccatatcccaatcatccacaaaggccatccctcaatcagccacaaagccttcctgccacacatccaatgccaaacaccacccttagcataaaccaaaacaccaaccacaaagggaattttccaatgaaaaagcctatagaattcaccccaattccggtgtcctatgatgacctgctcccatatctactcgataattcaatggtagccat

SEQ ID NO: 218849 - DNA, 446 bp, Glycine max
  unsure (1)..(446): unsure at all n locations
agcttgtccttggtttagacattattgactcttgantngggacttggaggattcaatttgggcaaaattggatgagggaaagtgtgatttcaaaaatctgcactttatgcagaattttgctgtcaaataggtgcaacagaattttggctatgtgcagaaagtgttgtgtatttgctggttgtggaaagagtattacagattgggttttggacgttttatagcagatcccaacggccataatgtagttttatgtgctagagacttccagtaaaattttagagtcgatccaacggttaacgaattggaacgaagagaatattactggagtatttgagtgtgaaaagctgtgatgtcggtttgtgttttgggcagagttttctgcctctgccctattctcttggctgtgttagttcatgaggcttggatgttgacttacctggatgttg

SEQ ID NO: 218850 - DNA, 460 bp, Glycine max
  unsure (1)..(460): unsure at all n locations
tcatgatgaatcaagatgagtccagaaggtttatgataacaaatgtgatgacaaanagctcaaaggtcaagaacacttcatgataacaaagatgatgatctcaagaatcaaagaataagttctagatgttcaagattgaatcaagaacacttcaaggttcaagaggaaatttgacttctagacaaaagaatcaagttgcaagactcaagatcaagattcaatgtagaagcaaagcttcatggagaatcaaaggtgattcaaaggtgttttgatgataacaatgatgataacaaaagatgatgacaaatgtgatgacataaagcttaaagatcaatcagagaacaactcaagtgaatcaagaagaattcatgagttcatgattagaatcaagaagaattcatgactcatgaatatagtttagagtcaagaatcaagattcaggttcaagatctcaaatatc

SEQ ID NO: 218851 - DNA, 430 bp, Glycine max
taaaacccctcaatgtagtggattgtcaagctttgagaagtgacaatgagaatggggttaatttggagcaaactctcacctcacacaagtctataaccttaatctaaacttgctcaaactgccaccgaatcaaaatttgactcctcaacacccaatttaccctagaaatggctcttgtcttcactttggtcactcattttcctcctttgcacaacccaagctttctcacagtcctaaatgacatttcaaactaggattacctcactctaacctccaattaccactaaattcagatttggcttttcaaatcctcaaagcatcacacttttccactcatatcactacattctcacttattaaccctagagtaactctacccttcatctctatcagttctccatcagccatttcagcacacaagcatcatcat

SEQ ID NO: 218852 - DNA, 357 bp, Glycine max
ttcttgagaaaacttccttgagaagctagagcttatctactcacacccctctcataactaagctcacctccttgagaagcttccttaagaagattcctaaagaagctagagcttagctacacatacctctctaatagctaagctcacctccttgagatgagaagctagaacttagcttcacaccccctataatagctaagctcacccctatgacaaataacatgaaaatacaaaaaaaaattccttactacaaagactactcataatgccccgaaatacaaggctgttaccctatactactagaatgaccaatatacaaggcccatacgaaggaaaaacctattctaatatttacaa

SEQ ID NO: 218853 - DNA, 451 bp, Glycine max
  unsure (1)..(451): unsure at all n locations
agcttctcccccaatattctataaatagggtgagaagtgaagtgaanaagggttaagccccttaggcacttctctctctttcgaatttgcttggaaaaattgtttccgtgaagaaaatccaagccgaggcgcttccgaaacgtttgcgcaacgtttccgtgaggaatttcgcgaaggtttcgaccgttcttcgatgttcttcattcgttcttcatcgttcttcgatcttgaatgggtaagtacctcgaaccaagcttttcgattcattctatgtacccgtggtggtccacattgtgtttcgtgtatttttattcttgtttcatttactttttatacccccttttgacgtgcttaagccattntatttaagtcatttctcgcttaacctanaaataaaataaatttccaccgatcgtttgaattgtattatnccgtaacttcggttaaaatg

SEQ ID NO: 218854 - DNA, 448 bp, Glycine max
  unsure (1)..(448): unsure at all n locations
tatgcgcatatttccctacgaacgttcacttgcacaagacatcctattaactaagaaaaatgcacccatatacaatcaaggtagcttcattacctagattatttacatgtacttccaaagtgtatttgttatttacatcatacacgccatcttgtcaaaatttacacacatgcatactcaaagcatttcggggtaccaaaaattgcacatgcgctcatcttggtatttctaatatctatacatatacaaacttcatgatgaatcttgactacctacgcaataaggtgctacatttcatgctcttttttttcaagtttttgctacctaaagccatatgcaaattcaagcatatcttcctttgctgactaaaattgtattcaaattagaaggtatatattnttntgtaataatgttccttcacataacatgcaacacatctatatatata

SEQ ID NO: 218855 - DNA, 145 bp, Glycine max
ctgtgctacagaacggtcggccatcacatgataggacctacttctctatgacttgcgaaacttgacctcattgtccagaaaaccctctcggtacttaaggatatactacacgacccgtaagaccaattatcttgacatatggacc

SEQ ID NO: 218856 - DNA, 419 bp, Glycine max
  unsure (1)..(419): unsure at all n locations
ctatgantgaatggggggggctcattatcagacgtatccaaggacatctccattcctccctcaaagggcaggaaactctgattaggctccatactttccatgttcggtggagacatgaatgagataggcagaagtccttgttccccttccacattacttatagactgcagaagtgttttaaattcagaactagtctctgacatcaattgacttggaggtttagtcgggttttcatgagaagagataaaatcatgtccaggtccaggaacagcacattcaacaggtggagttggagggtctgggttggaactttgttccatttctccctcagaagaaacaatgtgactgttggaactgttcatagacaccacattagttacaaactgcagaagtgtttatcatcagactatgctcatcat

SEQ ID NO: 218857 - DNA, 443 bp, Glycine max
tagagattcagacatcctttcttctcttgtaagagactttgctcattcatgttgaatcaagattgcttccatcttgatgctccataacccgaagtcattttctcctgaaaacttctcaacatcgtactttgttgttcttatctttcttgatcttgatctccccacggtgggcaccacttgttggttcttctacctatctaagctatagaacctacacaagatcaaagaaaaggaataacacatctatgcaacatgcaagaatctacaccatgagtttacgtggttcggcaatgtgcctacatccacgggaaatgcagctcatcatcatcacattgatcatgaaacattacaagatcaatacaagcagcaactagctgtgatctctcttggtttctttctaacaaaaactttctcaatctactagctctctttctctcatgaac

SEQ ID NO: 218858 - DNA, 456 bp, Glycine max
  unsure (1)..(456): unsure at all n locations
agccgcagcttggtgttaagacacagttgtcttttgtttatngnnnttgnntaaatatctctaattttgtcatgtcctagatctaaataatcacttctactttctgcagagttcaaaaaggtttgtatatttcatctattcttagtgattactccatacttatgcagaaggaagatgtgggagctatggaatttacgcacaaaattttcaaacaaatcatgtggcgttcttctaaagaacatgttgctgatgaattggaacttccctcccaagaggagtgcctctcttggcttacactctcaccagtcgaggagcacttttaccagaggcaacatgaaacttgtgttagagatgcccatgaagttattgaaagtttgagaagtgatattcttaatagaaaaggcccaggtttttgcccagtcttatgtatatttaattaagtcacttgaaagtaat

SEQ ID NO: 218859 - DNA, 469 bp, Glycine max
tgcttcagaaaataataacactaaaaaatcaggtcattctctttatattatgaccaataatattaaagtacattcaagcattcattcatttattcggaaacaattgggagattgaaatttttgctcaggaaaaaaggatacaataaaaaaataactatatacaaatccatgctacctgttcattttcaccatccttcttcgaaagaaataaatgccaaaagcagacagaacatgatacctcatacatggcttcgagccttttgagcaccatatcgaggaatagccaacacagctatgagtccactgataatggctgaaacagctgccacagcaaaggctggggagtttcctccaccaaatatctgatcccatggtccacttcccagtgacactattatctgtttaaaacatgataaacatgtaacttattagctccaaaacatcattggcttataactgcatacagtat

SEQ ID NO: 218860 - DNA, 450 bp, Glycine max
  unsure (1)..(450): unsure at all n locations
ctgcaagcttccggctctgactgagcctantttattctctactnccttganaagttaagcgaataatataaagagtgcactataagaaagaaatataacttctaacctctcatcatgctggagaaaccaaaatctataatatgaaagcctatncctaaattaatcataatgcactaagtccaatattattagccataagaagatatattgaaaaaattcaaaagataaataaatagaatatacaaataaaagaatattctcttctctcataaatttaatttaaaattgagttcgattgaaagtgacctttaatataaaatgtataagtgagtgaatgagattcattttacaaattaacttttaagatttaattaaacttaaaatataaattaacaataaataattagtattagataagcgaaagtaaagatgctcaaacatcacaacatt

SEQ ID NO: 218861 - DNA, 438 bp, Glycine max
  unsure (1)..(438): unsure at all n locations
ctcaaacttgccgacaatggtcttacaagtaccatgaaggcatgaccttgtatgattntgttccaaacgcagatgaagaacgtgtataccataagtttagtgggatgaaatactcattctgggtgttatatatcgatgatatactgcttgctagcaacgatataagcttcttacaagatacataaaaattcctgactaaatgttttgagatgaaagatcttgcggaagcctcttttgtattaggactcaagatactatgagatcgctttcaaggtatcctaaggttgtcacatgagagttatatcgataaggtcctacatagatccagcatgaaagatacgataccaggagatacctcgatagctaaaggacactaatttattctcaaacaatgccgcaataatgaccttggaagaatagagatgcattagattcctt

SEQ ID NO: 218862 - DNA, 416 bp, Glycine max
  unsure (1)..(416): unsure at all n locations
agcttgngggagtgatgacttccggttcttgatggtgatgtctgnatacccaccctttttctttatgtgtagatggttngtttgaggtcttgggtctcattcttccattgaccactttctagtgtgctctgcttgagcacttgcatgtggccccttctcaactccacccaaatagttaggcaatgacaatggcctttgaaattctatgttatttcttcaacattcggcctagtgtgccagtcttcttatttttctttcaaatgaagttaactgaaaagattggatgagtctccttgaacaacatgtccaagaagccgtttgagtttgactcaaacatctttttccattttaaggatcgttngtttatggtcatggctactggtgtcatggctgatggtatgccactgatgttcaat

SEQ ID NO: 218863 - DNA, 474 bp, Glycine max
  unsure (1)..(474): unsure at all n locations
cggacacttagatactaagcttagtcctttacaatgctatattgagtatgccaaccttgaatactctgagagatgtaatctcaacaattcatttggcgatgaagttccttgacaatgagatgcaagccataaaattgaaaggggaccaaaagatggcccacgactgttacatggagtcactaaaacgaaaaggcacatacaagatagaggaaatagattatgaacccagggccaatacttattccgaggtagtgctcactgaattggattaaagaaaggaaatcaagaaaatggcatggacacctatgccagaattgggagggaaatgtcaaaacctccagatcaaaaaggaagatgagtcaatgacgtccattggattaaatttggatggcacgactaaggaagactttttcttattcctanaataaatgccaacgtatntgcatggaagccggtggatatgttgagcataaa

SEQ ID NO: 218864 - DNA, 421 bp, Glycine max
  unsure (1)..(421): unsure at all n locations
ttctactgttagttcacactcttgttctttctttgttcaacatgaatattcgttcaaattcatgaaaagaaacacagatctcatcttaagcatgcattcaatttaaaacaaggcatacatccatttcacaaaataaataaactacttcactgccataccaacaaaagttaagttaaactattccagatgcttcatgatgagaaactacactactcatgcacaaaactaataaaaagtaaataatctactaacaccataattatactaatagatcaaaaagcacaaaaaataaacaagaatttaaaagtcctgtgattggtcctgggtgtcctgtgtctgaacctcctnctctccaacaaatgaagacaggagtacttcaggagaggcgtcggagactggaccgggtggttaatctcaagcg

SEQ ID NO: 218865 - DNA, 341 bp, Glycine max
cactgcccagacttcgttaatcggtgcatcttcttgaaaattggtctgcaacgtcacaagacacttgtccataatctgaccgttgggatcttggagaatatagctcgagtgtgctcgaagcttccgttcccgatagcatttcttatttaagcacttcagcctttgctttcgtgtagcttaagaaaaatgtcatttcttcttctttctttcttccaaagccatttctaaatgtccaagcactttctccatcacccacagccaccattttgcaccacataccatcattgttctccattgaatacccacaccgagaggaacccttcaaccgatgcggaatcttt

SEQ ID NO: 218866 - DNA, 459 bp, Glycine max
  unsure (1)..(459): unsure at all n locations
agcttttgtcttacagacagtttatagtttatacggataaccactcgggtatttccgcccgtcagcgtgactcaaaagtcagtatgacagatcttgtgagtgcggaagattacgtaaatctccgcgtgtcaacgggtttgtcagccgcgattgacggatggcgcagaagacgacattagtctttgcgtgttatcaggcttttcgtcttacagacaaaaaaaattttatacggataaccactcgggtatttccgcccgacagcgtgactaaaaagccagtatgacagatcttgtgagcacggaagatgacgtaaatctccatgtgtcaacgggcttgttggccgcgattgacgaagggcgcanaagacgacgttagtctctgcgtgctatcaggcttttcgtcttacagacagcaaaaaagttatacggataaccactcgggtgtttccgcccgacagcg

SEQ ID NO: 218867 - DNA, 380 bp, Glycine max
gcattacgtgaactattaaactcagctgatacacgcaagacaacgtcggctttgctgtcttttcaatcgcggccgacaagcccgctgacacgcagagatttatgtcatcttacgcgcttacaagatctgtcatactgacttttgagtcacgctgacgggcggaaatacccgagtggctatccgtataaacctgttggtgttcgctagacgaatagcctggtacacgcagagactaacgtcgtattctgcgcccttcgcatatcgcggacgacatgcccgtctacacgcggtgatttacgtcatcttcctcgctcacatgatctggcatactgacttttgagtcacgctgacgggcgaaaatacccgagcggatatccgta

SEQ ID NO: 218868 - DNA, 432 bp, Glycine max
  unsure (1)..(432): unsure at all n locations
agcttcaacattgaatggagagtgtctcttatattacctgtctcaatcagacatacaagtaaaaagttattatcgtttgaaaatcctcagagcttcggtattcaatttcgagcgtctcgatatattacgggactcaatcagacatccgngtaaaaagttattgtcgtttgaattagctctgaggttcagaattcaatttcgagcgtctcaatagattacgggactcaatcagacatccgagcaaaaagttattgtcgtttgaattagctcagagcttcagaattcaatttcgatcgtctcaatatattacaggactcaatcagacatctgagtaaaaacgttattatcgtttgaatatggtcaaagcttcaacattcaatttcgagcgtgtcgatgtattacgggacttaatcagacatccgagtaaaaagt

SEQ ID NO: 218869 - DNA, 424 bp, Glycine max
  unsure (1)..(424): unsure at all n locations
acctgaggcatgcaagcttaatagaaaaagtgttttaatcttaattaaaannattttgaaaaattagtatatatttaattacacaacaaaaataaaagaaatcaataaaaacacatctattttctccatgcaaaattagtttctaagcaaataattatttgtttatttatcatcttctcacttaaagatttacgattttgatctacttacacaaactttaattttcttttagaaattgatatctatatgtgaatatattaaaataaaattatatataaaatataacatatagggatgaatttattttatataaaagcaagtagaaattatcaattaattcacgagataaacagtttatgtgtagttacattaatatctaaattaagatggggaaaatatantttttaattataataattttaat

SEQ ID NO: 218870 - DNA, 457 bp, Glycine max
cttgatagtgtcgagaagaaatcacaagtgtgtcatcatatataagggggagaatgtaaatgtatgtatacatgattgtgatgatgtcaaaagaagaaccaaacaaggctcatttgcttcaagattaatacaagattgcttcaacaagcaaagccttgcttcaagatttacttaagatcaagccttgccttataacaaagtgcttttaagccattcaaggctctggtaatcgattaccaggtagtataatcgattaccataagacagggttgagaaatagctgttgaaaaggattttgaatttgaattttcaacatgtaatcgattaccatatgtctgtaatcgattaccaacaacgaaacttttgaaattcatattcaaaagtcatgacccttcaaattataactgtgtaatcgattacacaaacattgttatcgattaccagtgaagagttttca

SEQ ID NO: 218871 - DNA, 453 bp, Glycine max
  unsure (1)..(453): unsure at all n locations
agctattacatcattgatgattaaatctctttatagaactcacaagtaaatgtcttcgtcaaggaattatcagcacggacatgtactgtttcgtaattaataaaacgtgaagtttcctcgtccgtacgctttatttttaatttttattttaatctattggccatgttattgttgctatttgttagtaatggcatgtttgagtagtttataaaagattttaggttacatttaaaaagaacattattgttgttattgttttatttactaaatcaaatcttttgtccataaaaatcaaccatgcgtttgcttcaactttcatgtgttcaacgttntaagcgtaaaagatggcgaatgattagaatttaatggcacgttcctagcatacaaagaggacaaacaccataacgcgcttatgttagaattgaataacagctcacatatattaaacagttc

SEQ ID NO: 218872 - DNA, 367 bp, Glycine max
  unsure (1)..(367): unsure at all n locations
tgtatcanagatgacgatactctgcgactgtgcccacattttgagtgtaactcataattatagacaatctattaatagaagcttcgatggtaaatattacattccaccttatagatattgtcgtgatatattcaatatgaaaaatcattatttggaaagacccaaaccatttgtgagttatgtcatcataatcgctgttgacataggcaatacccaataatgtgcccttgatggcaaagtaagcttttctctaaaattgaagggtgtgcattgttcatctctaagatttctctctctaatgcatggtgggtgttgatcaagagagaaaaagtgaggaactttgattgaagaaattggttagacttga

SEQ ID NO: 218873 - DNA, 456 bp, Glycine max
  unsure (1)..(456): unsure at all n locations
agcttatctcatgcttctttggccgtcgttgcgttggatatcttctcaaatgtatcttcatccaccgattgataaatgagaaagagagctttcttgtctctctttcttgactccttcaacgtctcctttacaccttggcttagcgaggcttcatcttgctcctcgaagccattctctacgatatcccacatatcttgatactccaattatcatagttgttctttgtgagcatcggcatttggaaaggaaaacctccattcgccatcttttgaggatcttgaagctctaatacccctttgttggaaataaggctttttatgtttaggaaaagtgtttaggaatattggagactttgaatagaaacttgataggaaggaaaattctctatggaggagagaactcttgtatttttgttgatacanatgtgtaggaatacatctctatttatactactct

SEQ ID NO: 218874 - DNA, 339 bp, Glycine max
tataaatatcaaacagaagaaatgggtttggtcaacgcgtatatgaactgaccttatatgcagtatattcactgttacgctggttaattatattctcaaaaagggatatgttagacttaatagatatctttatcaagtaatatttcttgcttaattaaacatgttctttgcattatgaatacaagccaaacctatttaagcatataatgaagctggcctgttttcatgattactgggtgttcatcatgtcacaaacttaatcttgtaatgaaacattttctacaatatcttctgaaactaatagaatcagaaaatatgaggtgaactctcaacctaatg

SEQ ID NO: 218875 - DNA, 443 bp, Glycine max
  unsure (1)..(443): unsure at all n locations
agctagtccttggtttatacatgatnggttcatganttgggacttgtagaattcaatttgggaaaaattggatgagggaaagagtggttttcgaaatctgcactttatgcagaattttgctgttgaaatgtgcagcagaattttgtataagtgcagaaaaatgcttgtgtatggctggttgtaaaaagggtagtacatatggggttctggactttttctagcagatcccaacggtcaaaatgtagacttatgtactagagacttccagtaaaattttcgagtcgatccaacggttaacgaattggaacaaaggaaatgttactgtggtgtttgtatgtgaaaagctgtgtatttgagttgtgttttgggcagaagtctctaccttcgccctgttttngcttggttttgtagtccatgatgattggatgtggaattaccttgat

SEQ ID NO: 218876 - DNA, 436 bp, Glycine max
taagcttctaacacaaggacttaccttgaatttattcctttgatttccaccttgagccttgtttccctttccttgttttgaagctcactacaagccttatttgaaaaaccatgatattaccatatccttaatgaattgtggagctttggaattgttttgggaataaatgtggggggtttttgtttcattggacaacttgatttgttggctatgcttcatgatgtattttgggccatacttgatgtacattgtatattggttaaatgttggacatgctgaatgaaatgctgtttctcacaggctatagaaaaaaataatcgaaaaaaaaaattcgaaaaaaaagacaaagaaaagcaataaagttgagtgaataagatcttaaatggcacaagaatgatgaaactctaggttctactcttcatgtataaattatatc

SEQ ID NO: 218877 - DNA, 441 bp, Glycine max
  unsure (1)..(441): unsure at all n locations
agcttcttcctgtatgctttacagnggagcttgtgaatattttacccttaagtatgattgtcatgtatattgaggaattatgttgaattaaatttagggtaaaattctctagcatgaattgccaggtcaaagacttattgttacagaaatgcctagaggtggagcaaacagctagagaacaagcaactgataatgctatcttagatcagatttctaaggtaacattacaatatgcatgcttatacattgtgaataatgatgtgcttctgacatggatacactagagttattattattattttctggtaggcatataatgattatcaagaaggacttcaattttctgtaataagatgataagacctatgtttccttatgaacctcatgngtgattnttaatcataaagtatcttgtaaatcatctatatcatatcaagtatg

SEQ ID NO: 218878 - DNA, 414 bp, Glycine max
tccactcttgggagatgaagctgcctatggagacatgggtggtgttgaaacagggggcatatgcatagatgtggaacttatagccaatggactcatggcagtcatgtcaagtccactagctgaatatgattttggtgatggcatatccgagccagtggaagcatatacagggcgtagctcttcatgtttgtgggcaaagaagcagacttttctagcgcatccagtctcatccttgcaaagccttgtccggtattgggcaggatgcagccaggactcataaacaccatgagcatactcacaggaatcacccttctggcaggtccctttgcggaactctgtgcaaggaacacagctgtaagggtatttccgtgggtctctcctcctaacgttctcccctgtgtgaacgaatggaca

SEQ ID NO: 218879 - DNA, 461 bp, Glycine max
  unsure (1)..(461): unsure at all n locations
gctttctataacccaacaaacaaaattgagtacttgaagcttccaaaattgtatagtaaaactatgaagacatgcttatttgcattgcaatatttttcttggtttaatttttatattcacgggataataacaagaaacatatagaaggtttgaaataattttctgaacgtaaactgagctaggcagctctacacggctgtttctctacttgctcgctcgtctaagcttctgaggagtgaaacaatattttgacatagtaatatgaatatgacatggttactttccaaagaaagtgggccacaagggacaatggttcaaagaatatcacaagatcctgctatgttaatacaaattcatttcaatcattaacacccggacagaattactagaaacaatatacattgtaactganaaaagaaaaaccactgttgcagagtcaacaaaatatagagtcntcaatt

SEQ ID NO: 218880 - DNA, 468 bp, Glycine max
actttatgtgaaaggatgtgactcttcacatttgaatttgaatttcaacgttcaaaggcactggtaatagattaccaaaacattgtaatcgattacaacttttttgaaatcaattggaacgttgtaaattcatttgaaaactttttcaaattcattttgctactagtaattgattacaacaatctggtaatcgattaccagagagtaaaaactctttggtaaacatgttttgagaaaaatccatgtgctactcagtttttgaaaaaaaccatttcatacttatgttgtttaagtcttctcttgattcttgaatcttgagtcttgaatcttaatcttggttcttgaagcttgatccatgaatcttgatgcttgaattcaactttcctcttaaatcttgaagagttcttcaacttttcctcttgagtcttgaagtgttcttcaactttcctcttgaatcttgaagtgttc

SEQ ID NO: 218881 - DNA, 398 bp, Glycine max
gaaaaccacgacagaacacatgtgaaggtgatggtgaaccactccttggtgatgagaaaaggataatctacactggtcctaatcctttgcataacagataagtggaaacttatagctctgagggatcttttttttttctttgctctgcatatttcaagccctctctgaaatccgggaatatataatttttctcttttttgaagtttttacttatttacatagtctttctgccatttcttttcttgtgagagttagtgacgtattttcatggaccagttttctctgggttttgctaataaccatatgtaccaatgtaagttttttaccacgaaaatcttaaagataataattcggctacgcgttccattccatatggtttggaaaaaatatactttatg

SEQ ID NO: 218882 - DNA, 347 bp, Glycine max
  unsure (1)..(347): unsure at all n locations
acctgtgcacgtcatggctaggatagttctnattctatcatagaccactcgaacagtccgcccaatcgagataacacattctacccgcgattgataagaaggtttcatttgtgactttgtgtgcctcgaataatacccacatggactgatttttatgcctttcacactatgggttggagggctgtaaatcatgcactaatttttctaactcgttgtgatcacctctgatggggtaattctctcttgtgcatgatgttttaatggccacactgacgttattggtgccatgggggcccctctgggtgaagcttccttaccacttattatggtggtaggtggggttccat

SEQ ID NO: 218883 - DNA, 456 bp, Glycine max
  unsure (1)..(456): unsure at all n locations
agctntcatngttggatattggtttgcatatgtggctcttaatcctaccactcacacgtcataatcctgtcagagaacaaggtatgagcaaaaaaacaaaatataaatgtcaaataaatctttgtcaacatgataagaaatagaagtgattcaaaatcctgacctgcagtgaaaatgctaacaactataatggtttcttcctattttccagccaattttgataaaagtcccattcccaaagctagtcctcctgctaacaaagtcccattcccaaagctagtcctcctgctaacaaagtccccaatcctctgttaagccctttgccaagagttgcccctacaggagtacattgtgaccaattattgcttataagttacagctgaaacattctgtgttgaccaaatggaaagcttgatattggattcaataaaagattaagtacatgaacattgattc

SEQ ID NO: 218884 - DNA, 399 bp, Glycine max
  unsure (1)..(399): unsure at all n locations
atgtgtgtaaaatgcgattgaggccatgaaacatcattatgcactgangttccaattgaagaggtgaactacatgggaggacaacatctactgtacaataacttctataaaagatgtttccaacacatacatggaaactacaatcaagctggattcaacatacaccatattcgtggaaccgcaccacatatttggaatgaaccttgatcaaactcatcatagtgctcatcaccaaccataaaatcaccaaatttgtaatcaaaagcatggagactcaaatatggctattgaccaaacaattgctaacctcttgaattggcttttttgcagccatcgatgataacaccaagggtcattgacacgctattatctgcaccatagagtgtgacatgggaggtg

SEQ ID NO: 218885 - DNA, 358 bp, Glycine max
tccaaacccttatgcaatttgttgaacaagtacattcctttcaaatttgatgatgagactctcaaagaaaacctcatctcaactcatgtcattggagccccaaattagagtcaagattttgagctaatgtgtgatgtgaatgattatgttgtgggtgttgtgttaggacaacaaaggaataaggtctttcatgctatatattatgctagcaaggggttaaatgatgcttagttgaattatgccaccacagagaaggaattgctagctattgtgaatgctttagaaaagtctaaaccttatctaattggcttcaaggtcaccattttcatatatcattgctaacaagtatctcttcact

SEQ ID NO: 218886 - DNA, 455 bp, Glycine max
  unsure (1)..(455): unsure at all n locations
tattgccgtttgaatntgatcaaagcttctgtattcaattttgagcctctctattnataaaggcactcaattatacatttgagtaaaaagttattgtcatttgaattttctagggtcttatgtttttaatttcaagcatctcgatatattacgggactcagtcggacatccaagtaaaaagatatggccatttgaatttccttggatcatacagttttaatttcaggcgtttcaatattttacgggactcaatcagacatccgagtaaaaatttattgcgcgttgaatttactgggagcttccatttttaatttcgagcgtctcaatatatgacgggattcaatcagacatccgagtaataagttattgccatttgaatttgctggtgagcttccatgtttaattccaagcgtcttgatatattacgagactcattcggacatgcgtgtaaaatg

SEQ ID NO: 218887 - DNA, 303 bp, Glycine max
actgatctggaagaaaatcggaatgcttgtttagcaagatggttactacgctttacgcgcgagaaagtctagaaaaagattcactctctttagggaattataatgcgagctattgctatatctagactcgaggtagaatattctgaaaacaggtcaccgactaataagtttatcatgtcacgctaacgggataacgactgtatattttaagtgcgaacttatgtccccgtaagggataccatcatgatgtcagccgcagttccaaccgctgctactacgcttcagcacttgtcgatcaattcc

SEQ ID NO: 218888 - DNA, 411 bp, Glycine max
aaccatatatatggagattatgaacagataaatagccttgcgttatgctaataggaaaaaacgagctagctcatatattataaacaaaaacacttgaggaaggggatctcacactttgaaggtgctggagaaaatggagttatgcccactcatacctatgtctttgtctaaacacagaacacgctaacaaaaaagaaattaattgcaatgagtctttttttatttttctagagactgattcctcactgtggcatggcatccaaataaacagtttagaagagaccttcacatcagccatgagctaacactctaaaactaaaatctcttggattactagcaagattctaccataagcaacaatagtgaacataaatatgacaagacctatatacattgtaccaacgactccaa

SEQ ID NO: 218889 - DNA, 406 bp, Glycine max
  unsure (1)..(406): unsure at all n locations
tgcaacacgcgcgctaagcccgcgatctacactcgtattctangaggagccgcgctgatcgcgcctacaaatacccatagctcacttcatcaactataaatagagggtcagtccaaaggaaagaaaacaccacgacagaaccccctctcctaggggtttcattgactccctttctttctttcacccttcctctcattgtaaagccctcaatggccatgagtggctaaacccttaattaaggtctggcaggcctataagccaatgtgatgtatgatgtactcttcactatatatcaatgcaataccagtgttttctttcctatattcttttctgttctaccttgatactcatctttaattctgtacgggttgatgctaggaaaggaactctaaaatatgattaagaa

SEQ ID NO: 218890 - DNA, 448 bp, Glycine max
  unsure (1)..(448): unsure at all n locations
agctnnttggagtagaaacatgttaccatctcattntatttcaaaaagaaagtcgtatctagtcaaggtctgagagaccatacaagtttcctaacgatttctaattatgtgggccattaactctatcatatgctgataatagccgagaagcccatgaatctctttgggggcagagtaggtgttcgccatcgccttggccttggctaacaagcggggaagttcttgactcccgttcaaggtaagagcaaaccgatccatccacatggttgcctcttgttgtaaagagtcgatcacccttcctctagcctctttttccgcgtatacttgggcatactcgtccgcgatcctatgctcgtgggccgnggctagacctaactcttcttggtacttggcgatgatagctagcatgttggtctccgtctcgcataaacgctaagacaagcttctt

SEQ ID NO: 218891 - DNA, 350 bp, Glycine max
tgtatgccttaaatcttcttcatcaatggagttctttgcttcttgaatatcaatggtagtggaatggagaaggaagatagattattggagacacgaattcaatgagaagatgagtcatgaacaagctcaccaccatatgaagccatggataataactcgaaggtaggagaagatgagtggagggaggaggagagaaagagcacgaaattttatgcctcaaatgaggtctgaactttgaagtgtaattctcatatgatcaaagttgaataaaattgcacacataagacctctatttattgtctaagtgtcacacaaaatgggagggaaatctgattttactcgaatttgaa

SEQ ID NO: 218892 - DNA, 465 bp, Glycine max
acctgaggctgcagcttatacgtgtaacgccttttttttttttgtggcctatatttatagcgcatgcttatagcatctgaattctgatcgaacttgagagtgtcagatgggcccaaaatttgcatggtttggtcaaaatcaaatgttatttctcgtttggtttttcggtaactttgaatagtttcgatcttcaatttattaccgtgtacagaattggagaattcacaacattcgtgcctcaaaaactccgtcaaagctagaatgaattggatgagagatgtgccaatgaatcgatgtttgttttgagttttcagagaatgcggcacttcaacagaacacactcgagtctggctgtgtttggtatcactgcctttgtagtggtttttggtcttgatccattagagggtgtaaaattggtttcaagaatttttgtctcaacgccaacatgcgcattgattcatcaaa

SEQ ID NO: 218893 - DNA, 439 bp, Glycine max
gtgatgatatggtcttcaccgacgaaaggatcatagtgggtctaaaaagaagcaaatctgatcatcatgctttgataaatgccaaataataaactagggcaaatgaagagggtgagaatgagggagaaacccatgctgtgactgccattcctatacagccaagttttccaccaacccaacaatgtcattactcatgcaataaccaaccttctccttacccaccgcccagttatccacaaaggccttccctaaaacaaccacaaagtctgtctaccgcacttccaatgacgaacatcacctttagcacaatccaaaaacaccaaccaagatatgaatgttgcagcgagaaagcctgtataattcaccccaattccagtgtcctatgctgacttgctcccatatctacttgataattcaatggtagccataaccccaacca

SEQ ID NO: 218894 - DNA, 454 bp, Glycine max
  unsure (1)..(454): unsure at all n locations
agcttcaccaccaagagagtgttttgtatatgattcttanagaagaagctgtaatggaggaagagaatgagagagagagagagagagagagagagagagagaaagggggggatgggatttaaaggagattagggagagaagttgaactctgaagtgtgtctcacaagtttctcattcatcaaagttatgacaagtgttacacatgtttctatttatagcctaggtagcttccttgagaagcaaggaaggtagcttccttgggaagctagaggggggctactcacaccccttcaatagttaagctcacccccatgccaaaatgcatgaaaatacaaaaaagtccttactacaaaaactactcaaaatgtcctgaaacacaaggctaaaaccctatactactagggtatccttaacttgtacccttaatttgtagggtaccctacaaacctaaaat

SEQ ID NO: 218895 - DNA, 413 bp, Glycine max
  unsure (1)..(413): unsure at all n locations
tactaagctgttatatgtcattacatcacagatcatacgctaaatattctataaatggaatcctaatctctgtaaatggaatttcatccacaaattttatatttataaaatatatctaaaaatgcttatattctcagtctcgaatacataccactgatcactattttgcatccatataaatagatacatggatcatgaacaattataaggaaggcttggagaacacctctaagaattcatcagtatctgaagcatccacaatcacaataaccagtaatatgggaaaataattgcatagacctcattaatgaattgcttgaacatatgcataagctggcttgtcatttggatntcattcaaaaacactatcaataatataaccacttgtgtgcttgaacataacaatatggtga

SEQ ID NO: 218896 - DNA, 451 bp, Glycine max
  unsure (1)..(451): unsure at all n locations
agctagcccagagaaggaatcctctgaggttatgctcaccacctcgaaaggctggaaagcggtttctaatgactcctctgcggcctccacataaggcatagaggatgggcagctcaccaagatgtcttcctcgcttgatacgaagaccagatgcccttccactacgaatttcaacttttggtggagtgtagagggaacaactcccactgagtggatccacggacggcccaacagacagatgtagggggggttaatatccattatttggaaggtaacttgacaggtgtgagggcctatctgtactgggagatcgatctctcccctaacctctcggcgggtgccgtcgaaggcacgaaccaccattgaactcggctttaggtgggaagcattgaatggtaatttctccacagtgctcttangcatcacgtttaaactggaaccattatcgatg

SEQ ID NO: 218897 - DNA, 232 bp, Glycine max
ctctagcttcttaactctatacaataatgatcctggctgtgattccacattgtggtctataggcctcagatatcttaagaacggggggtggaatctacatatcacatcattatttcccccatttaaaattctattcagacttatatgcatgttataaaattccctaataatgaaattcttatatattgattcaaataaaacattttgtatttgaatctcatacaactttaaa

SEQ ID NO: 218898 - DNA, 318 bp, Glycine max
  unsure (1)..(318): unsure at all n locations
agctntatgttttaacctattccccatanaactagcagaggcccgagatcaaggccgaaaaccctagtgccctattggacttttttgggtccactaggtgtctgggaggcatgatccctacaaattgataaatggcatttgagatcaactgggccacatgaacactgacctgngtcaagatggcataaactggctggcactttggcaagggaaggtcggaattatgatcgttggggaggatgttgctgacacacaatgtcatccatatctgtgtcagggtggtcatgctagtgcgcatgatctgcacccgtctccata

SEQ ID NO: 218899 - DNA, 313 bp, Glycine max
  unsure (1)..(313): unsure at all n locations
ataataatatatgtctgggaanaagtatattattaataatatataacaataaatatattgtgtatagtataaataaaattaaacaatatatactaggtagtatataatgatgtcgcaacctacccttttgcgggcgagcgatgcgatgctctcgggaacgttttccaaaggagaaaaatgtgcggagtcgccaccaacgtttatttgtggaatacgtcggaaaaactgaatgaaaccggtcataaagaatattccaagttcgggagtttgatttacatttgaggaaggtattatcacctttcacgtttgctca

SEQ ID NO: 218900 - DNA, 460 bp, Glycine max
  unsure (1)..(460): unsure at all n locations
agctttgaattcattctatgcacccttagggttccattcttgcnttgnatgtcttcatcttcattcttctaccgtcggtattctttttctttgttttaagcgagtttcgaccgatcgcttaagccgtaatctcacttaatcaatgatcaaatgaatttcaactgatcatttgcgttgtaatctcgtttaatcagctttaaaataaaatgcaaccgatcattcatgctgtaacctcgtcatcaaaaaggtaagtttcaactggtcatttactttgaaagttcacttttaatgagatgagaaactaccaagtgaaaccaaagctaaaatcaactcacaaatcaacctttgtccacaagaaaaatcatttgaatccattcaaaggtccaacgccttaatggtctcccttnttttacttttatcggttaaaatgaaccgtttaaaagtctaaaatcaacaccct

SEQ ID NO: 218901 - DNA, 442 bp, Glycine max
ttcgaggtacatacccgttgaagatcgaagaacgatgaagaacgaatgatgaacgtcgaagaacggttgaaacctttgcgaaattcctcacggaaaacgttacggaaacatttcggaagcgcctcggcttagattttcttcacggaaacaattttttcaagcaaattcgaaagagagagaagtgccaaaggggctgaacccttttcttcttcacttcctcccctatttatagcaaaatatgggaggtggttgccgtctagctcgcccaggcgagctcagctcgcccatgcgagccatgttgcttcctccagaagcaacagccttttggaggaatattctggagggcccaagtgggcctgtgtgctatttgcaaccccatttttactaagtacacccctctgctttttttgtgattcttctttcgtatagttacggaaactta

SEQ ID NO: 218902 - DNA, 400 bp, Glycine max
tctactatcattggaataatctctttctctgttattgggggcgctacttgagttgccaagtctctccatctttgggcgtattctatgaaagatctgtgccccccttctgcacatgttctgtagttgcatcctatccggagccatatcagaattatactgacactgcctaacgaaggcaaccattaggtccttccaagaatggactcaggaaggttcctaagttagtataccaggtgacagttgtcctaataaaactttcttaggaaaaatgtatcagcatgtttctcatctttggcgtatgcccccatcttgcgacaatacatctttagatggtacttggagcaagtagtccccttgtacttgtcaaagtccggcaccttgaacttgagaatgaacatgt

SEQ ID NO: 218903 - DNA, 340 bp, Glycine max
gcttccttatgatagtagcaggagaagtagtctccaactttttccaaggaaccttccgttccatatgactcgaatcaatccacaaggcatacctccagcaatgatgcctcagtataataaaggacatttatggcctcacccaccaactctcacagatctcccaaaattcttgcatgcttgggaggtaaactaacttgtcttattatttgattaatgagcgacataatatatgctatgggaatttactttcaaaagaaattaaaaaatatttatttgatccctacattccctagacataaaatattctctcttagttcttgtataaaaacacttttgatcc

SEQ ID NO: 218904 - DNA, 434 bp, Glycine max
  unsure (1)..(434): unsure at all n locations
agctngngttataaaaacaactaaataactttcatcattatgttaccatgaaagtngaacattttcttgttgaaaattcctttaaaataattttggagacaaatggaataataccatcagatgcttataattctaacttgtatatactgctcaacaacaacagcttataaataattgacattcagtttgcaattttaattttgtttctaaccataaccaaagccaaggtcaaatataatgactctcttctaacttgttgggacataaagttgatttggatcaataatgttaactagctagtctgataagaagtaacagtaattttgaagtaaaaggaagtaattagtgattcatggtctcttagaggaagttatggtgcctgtctctgccgacttgaaaactaacttctccatcatattggtgagctccttgac

SEQ ID NO: 218905 - DNA, 474 bp, Glycine max
tactcaagcttcatgctattctagcggagaagactcttctacatggattctacgctataataattttccttatacattttttaatgttaaacatggagctaataaaaaatactatgtgcgaacattttttattatataatctcttaccgaaaaatatgtatacattagttggaatgtatatacttgtctaaaaatatctacttgatttttacattttcctttttctgaatatagaacgatggaaaacatattgaaaggtatatacttaatgttattatttctttattagaacgatctaaaagggaataaaaaagttatttaagcttaatataagttgtctaaagtgtaaatgttactctctttgtttttttgtgcacatgttctgttacttagtgggcttaagtaactcactctgtctaaatttagactacagtttgaaaggaatgatcgctcaatatatacattcatgcaatt

SEQ ID NO: 218906 - DNA, 465 bp, Glycine max
  unsure (1)..(465): unsure at all n locations
agcttaaacaaaaattatgatacttctaacttgtaaatttataaacaaacaagtgaacaaccctactacaagttagaaatacacattntattctgacaacaacaactagttaaggttactacaaattatactccaaatagacagcggaaaaatacaaaacaaatcagaacaaaatacaaaagtgatccagttttgaataggtctttatgattcccaaatccttttaaccaatatgttaatccataaagcaaaagtgattaaaaactgctttaaattaataatgatgatttcacatattttattcctgacatggaagttaggaatatggactacgggtatgagatttccttatcaattntaatttcttctctttctntttttaanaaaaagatcaagtgattgataaatcaagttcacaaatcagaccctaaacttacttgagataatgaattcctactagatatc

SEQ ID NO: 218907 - DNA, 370 bp, Glycine max
ttgactcgagtcatcaagagattataatatgtgaccattgtttgtttttcaagatcatcaatcatatttgaatcatctatctttcaatcttctttcaacattcttcaatcaatcttttcaactctttctacagaattctcggattcatcttctcttcatctttcttcaagtttttgttcaatactttctctttcaagaaaagttttttgataaaaaacttgtgctattcatctttttcattctcttctcctccatgtcggccttcatctgcctttgcacctcctgaatacttttgtgtctctcttctcccttacaaaagattcaaaggactaaccgcctgagaattctttggattcttcctttcccctta

SEQ ID NO: 218908 - DNA, 460 bp, Glycine max
  unsure (1)..(460): unsure at all n locations
agctttcacaaattacaatcgagtgaaggtttgtttcttacgaacttcatgcatgtgtttagtattataggagcaaaatagtaaaaataaaaaggttaaattaataccaatntattatctcttcgctataactttctacattcttctaaaaaaatattctctctagggaaacacctgttttttatgggagcaaaatctttttttatcaaatacatataagaaaaaaaaaattattgtggggtaattgcccccttagtccctaacctacatccttccctgctactactactttttctaagccacataatgggagcagagttaatcgtgtctgctataagtttggcacacatgattcctgccccatctttaacaagattgttaagagctgaggatattttacttttatattttatttgtaatatgcgcgtatgtctgtaacttcattagttgagaatagtct

SEQ ID NO: 218909 - DNA, 487 bp, Glycine max
ggaacatagatactcaagcttgtaggattatggggtacccatcacatgtggtactaggtggcggttttgcgaaggggcgcaacaagatttacacattcacaaagcgcgcattaacccaccatcccctgttgcccacctgcaactaagctcacgtactcccacgtagcccatatcctcgtttctctcaacaccgggtccccatcaatcctcccaagctttcccaacatccaagtaatacaacattccaacagcacaaaccatcatatgcaagaaaacatatcgaacgcagataactctgcccataacacataccataatcacagcttgtctcacttatagaccgcagtaacaattccttcgttccaattcgttaaccggtggattgactccaaaatattactggaagtctctagtacttatacctacattgtgaccagtgtgatctactatcatacatccagaactcaatccgtactactctttcaca

SEQ ID NO: 218910 - DNA, 453 bp, Glycine max
  unsure (1)..(453): unsure at all n locations
agcttgatggttgcagcgtgaatcaaaactagggagtcattaccacatcaccagcaagaatcacactcaatcgtaccggggacttctattttgcatgcaccatccaaggccattgcaacagtggccaaaagctgagcattgccaccatcacaagcacttcttcacctccaactcaaggtccttctcctccttctggaaccactcctaccccaccttcttccggcgacgaaacaccgcctccccaatctcccccgaccgagcctggttcaactacacctcctccatcgcgaggcgaggctacctcccttgttgcaactttctctattcttctcatcacccttttaatcaactcattgttgttttaaagtttggtcctagaagagttttttgctntatttgcgtaacaaggaatgccagcgaacctctttccgacattntctttctagctaacac

SEQ ID NO: 218911 - DNA, 331 bp, Glycine max
tcaacatcataccacttccatggtactggaactacttcacatggatttgatggggcctatgcaagttgaaagccttggaggaaagaggtatgcctatgttgttgtggatgatttctccaaatttacctgtgtcaactttatcagagagaaatcagaaacctttgaagtattcaaagagttgagtctgagacttctaagagaaaaggactgtgtgatcaagagaatcacgagcgatcatggcagagaatttgaaaacagcaggttcactgaattctgcacatctgaaggcatcactcatgaattctctgtagccattacaccacaacaaaat

SEQ ID NO: 218912 - DNA, 334 bp, Glycine max
tttttatgacaaacaagccggatttatcttcactccagcaacctccaatattcttccttttaaggggaatgtgagtctataccataattcgggttgctaaaacacatcattcctctccctccttcttttcatatatctctatcccatttgaccacctctcatggacgcatatatcgttgtcattaacctctcaaatgttgatcaaagttgattgaatgcgaacccatcatataggatagacctgacttaacaacatctactacagacttatattgtgtgatcctaccatcaggttcacacagatggtttttatgacctttcttacccttattcc

SEQ ID NO: 218913 - DNA, 444 bp, Glycine max
tgaccggatgtaagatacatcttcttcaaccttttcattcttgactccatttcattgaagcgcatatccacttgcagttccaaagtatcaaacctctcaccaacaaatgtttgaagaccatcaaacctttccaatatcttagaaagaagagatgaatcttctccctcatgtccttcttcaccaacatttctagcacccttctttatccaagatccatcatgctctttaacatatccaaaggatgctatgactgaagcgcctataaggaattatctcttgattagaacataaggttcagaatcaatatggatgttgaagtgttgaacgataagggtaacaagatgaagataatgtaatggggcattcaatcgcaatgccttatgcatgcgatatctaacaagatgtgcccaatcaatgtgtatacctctatgaaatgcccacatg

SEQ ID NO: 218914 - DNA, 414 bp, Glycine max
  unsure (1)..(414): unsure at all n locations
ggatcatnngacacaccagcacgggtcactgttgttcgtcactgtcaaaagtctttgcagttctatcatcaaatgaagcttcagttagctaaatttcgcacgaaaaggataaagaggtgctgcacacggggctaccaaatgtgcaaaactgaaaggttagttttgggaacatatttgggtgtggcgatgttgatttttttcttcacctaatttacaaataatgttaatttgttcgttaattgagagaatttgattccacaaattcttctccctctctgtgtcctttatcattctctaactaataaatcaatgggggtggtatatttgtttactttgggggggcacaaaaaaatataagaatacctacggaaaagttgaaagctgttctacataatgtcctccatcaaaggataa

SEQ ID NO: 218915 - DNA, 422 bp, Glycine max
gagagaacttgtatccatcgtgagatatgacatgcttgttatatttcttcccattgagagctatatttaatgcatgggaaactcaaagcattattattttttatgtctacttttcatgatgagagaaaatgaataggtgtatgtttttgcctaaaaagtactaatactctttgaaaacttgtactgctttttctgcttatacccactttagtcttgtctctgtactaaaccttgaaatgcatctttgctgtcaatcataggttacacttatactcagaaaatattacttttcattaaatacttgaaattaatgctagagcatattcagtaaatagaggaaatataagacatgtaagagcagtttatatacctatcattcaaaagcgtagaataaagagttcatcatatgttcaccctggatg

SEQ ID NO: 218916 - DNA, 426 bp, Glycine max
  unsure (1)..(426): unsure at all n locations
agcttctacaagaagagatggccttgagatttattgatggactactcatcaaaggcaaggaaggaggaagccacaaggaggtgaattggagcaccaacctactcactaagcacaattccatctggaggaaataatttgcttagtgacaatgctgagttggttgtggataagcaagtgttacttacattctccattggaaagtatgttgatgacgtgctttgtgatatggttcccatagaagttgtacatgtgtttcttggaagaccttgacaatatgatagagatgttgtccacaatggggtcactaatcaatattctttcttacataaaggtcaaaaggtagttcactcacctttgtctccaagtgaggtgtgagaggatcaaataanaaagagattgaaagagaaaaagnaatcaaagaaggaa

SEQ ID NO: 218917 - DNA, 459 bp, Glycine max
  unsure (1)..(459): unsure at all n locations
tacaataacaggctctgaggattgtatggatcctaccttgtatcgctctgtaantggcgctctacagtatgctactatcacacatccagaaattatgttctctgtcaacaaagttggccaatttatgagtcatccaacagaacagcattgggttgctgtcaaaagaatccttatgtatctaaagggcacacttcattttgggctgatactggaaaccactttttctacaaaacactactctgttcatgccttgtgtgatgctaactgggcttcagatcctgatgatcgaatgtctacctctggtgctgctgtgttcttatgcccaaaacttgtctcttggtggtccaaaaagcaatcttgtgtggtcaagtccagtactgatgcagagtatttatccttggcgacagctgaagtactgtggattcagtccctgtctactgaactcaaagntactcatgc

SEQ ID NO: 218918 - DNA, 350 bp, Glycine max
  unsure (1)..(350): unsure at all n locations
gtctagcggtacaatatatgccagttaaataattgaggaccgcatntacaatataatcgcaaagccaaagccctctctctctctctctctctctctgactcctccatttctgcgcctcttttctgtcgttacaaccctctctcctaaacggcgtaacgaaaggagtcacgtgacgcgccgaacaaaaaggaaaaggctgatggctttagagcaggagggtcagaataggaacacaaactgcctantggatgctggagatgacggagggaaagcgccgatactgcctcggtggacaagacaagaaattctggttctgatacagggaaagagagacgctgagaacaagttca

SEQ ID NO: 218919 - DNA, 308 bp, Glycine max
cgcgtgtaaagggatatgtggcatatatccttgttcatacgcctggctcatatgtacaccttgagattgaaggaacaccgctgaagaagcttcttgagtcatacaaccaacagccagggaatgaattccaccatatatatgactaactgactgtgcacattgatcagtgtgagatggaaagggttgctgtgcctgttgactactgagaactgatggcggtggttgtagaggatgtccaccaagagctgaaaaggattgtgctgcatgttgactggttacacatgagaaatcttgctgcacgtgttgac

SEQ ID NO: 218920 - DNA, 426 bp, Glycine max
  unsure (1)..(426): unsure at all n locations
agcttcttattattttttgttntgatcttatgtatgggatggcttctcctctgatttgatctttacttggttagtcccatcatgggccacttgaagtgtatcccaacagtagtattagtcacttcctcaagatcttctcctcctatgttgttgggtatgctcaacccttagacgttgtgttctgataccaactaaagtggattggttggtcatcagttaatcactaaaagcggggttgaagtggaccaattttgataccctcatgttctaatacttgactacgaatacttttagaacaatgtttcattgtacaatgaatctcacaatcaagtctcacttgatctgccattgaatgaattatgtattctaagggcattataacactatataattaataacatantaattgacatgcatcatgtatat

SEQ ID NO: 218921 - DNA, 457 bp, Glycine max
  unsure (1)..(457): unsure at all n locations
ctttaaaagaatganaatagtattttcaagtgacaatgatctctcattaagngatattcctcttaaggaaaggcaaactcaaaaggggggaaaatgttcatttgtgttcacttcaaaattaacaagtgtgttcctttgattttgaagggttgaaaataaaattgatactaagaaattgtgttaatatccactggcttatatatgaatgattaagttgtaacagttacaatgttatatctttgtttccatttaattttgtaggttttttagatttaatagctattagatacagtttaaaacatttcgaattttaaagctgaaatcttcattgagatgtgcagtgtagtgttaagtttataaatggaggcataaatacttgtctataatatctgaagtgaaagtctgattagaatttatgggaatattgggtttacttaaagttgacaatgtttacatg

SEQ ID NO: 218922 - DNA, 472 bp, Glycine max
  unsure (1)..(472): unsure at all n locations
catgcaagctngtgagtgtgatcatccacactccttttcttcttttaaggggtaataatacacctagaactctggctaaggagattgagtatcactatctagtgttacataaaagatgagttaaaaaagactaaaaacaatgatgaattatttgcatcgntgaggatgaaagactaaaaaattaagtgtatgatattaatataagaaatatatatgactaaaatatcacatgtaacataaaagatcagttaaaaaagataactaattaaaaacaacatgacaagctactaaggaaagaaatgaccaccaaaaatgctgatttagatatccaattatatataatatgaatgtgtttggttttgttctaaaaaaantataaattaattttctttacagaaattattntctttcatttacctacnatcttttttcccagtctaaatatggaggagagggattaaactcatcacct

SEQ ID NO: 218923 - DNA, 471 bp, Glycine max
acttgcaagatgaatacagtggcttcttatatccacgcattatgtgagttatacaaaatctaattttctatttgaactatagctaacattttagacaaagatttttgaatggtatatacaaattaatcacacacatgtgttaaaaatgataattcttttttcattttccttatttttcgtattagatttaaatataattaaaaagtttgactcttttataacatttaatgtcataatctatgattaattttcagaaatgattttcaagactatgcggaactttgttttaaggaatttggagatagggtgaagtattgggttactttaaagttactaaattatgattgttggtagaaataagatcgaagtctaaattaatcttgaattgttgcttaaaattaattctattcattaatagtaagtttacagcttcctgcgcaaagtcagatcttttcatgaatctattctgca

SEQ ID NO: 218924 - DNA, 431 bp, Glycine max
  unsure (1)..(431): unsure at all n locations
agcttcttagtctcagatgatgcagctgagttttgattctacctcatgcactcctctaatgactatgacatcatttctggcgctaaactgctgggagttggaagccatcttctcaattaaatttctggcttcagcaggagtcatgtctccaagggctccaccactggcagcatctatcatacttctctccatattactgagtccttcataaaaatattggagaagaagctgctccgaaatctgatggtgagggcaactggcacataattntttaaatcgctcccagtactcatacaggctctctccactgagttgtctaatacatgagatatctttcctgatggttgtggtcccggaagcagggaaatttnttctaagaatactctcttaaggcatcccaggtcgtgatggaccttggagcaaggtaatac

SEQ ID NO: 218925 - DNA, 293 bp, Glycine max
tgagtcttatagatagctcatgaatgcttataccgataaccacttatgtgatttcggctgcccactaactagtcgtaattattgtcaacagaagttgtctgcgcggaagacgacgcttatctccgcgtgtgaacaagcttgttggccacgattgacaaatggtgcgtaatacgacgttagtctatgcatgctatcatgcggcgactgataccgatagcataagaatggtcataccgatgaccactcgggtatttctgccggcccgctaacctcacgacttagtaccgacagag

SEQ ID NO: 218926 - DNA, 318 bp, Glycine max
catgctgcccaatcataaataggacgagatgtgttgcagcactcttcttctcttaagacgtgtacggaccccgagtacgaaacgacggaagcgggtaaattggcccgtgtggccacctcatggaaagcaatgctgttccatatgattctgacaggaacgtgctagctattgatactagatgacccgtatatatccgccgcgtgacatatataggacttctatgaatcattagccatgtgcatattttagtagccgctttctagaacggtttcctattcttgtaacaatcatattctaattatacctgtgcgtacacta

SEQ ID NO: 218927 - DNA, 463 bp, Glycine max
ctgcaagcttggttaacatatctgcacactgcttctatttttgctatactcaagcgctagtttattcttgttaacttggtcacaaagaaaatgatattttacttctatatgcttattgcatccatgagctattggatgcttagcaaggtctatggctgatttgttatcaatcatgagcttcattacattactacacttgatgttaagctcttccagtaacattcctagccagagggtttggcttgcaccaaaagcagctgagatatactcaacttcacaactagataatgccaccacatcttgtttctttgaacaccatgatataggagcatttccaagcatgaacatgtacccggatgtgctctttctatcaccaacatctccactccaatctgcatctgtgtagccaacaatttctatctcagaaatttcttttgctgcaagaaacagaattccacattct

SEQ ID NO: 218928 - DNA, 466 bp, Glycine max
tgagtgttctctgaagatgcctcttctgcttccaatgttgttaggcttatgcaaggtttccccttttatgacaagctcatggtatcatatcatattgctcatttttatcttctatttcgcttttcaacgtaaattgttatctacttgcattggtattattttttttaaaatacgtgtttggatatacttttaattagttatggtttactgttcttgttggaattatctaatttccaatgctactatttgttaaacactataacataacaaactaccatgtgcagaagcttgcatgatagaaatttgtttgtgaaattagcataatttgcattctaggagattaaaaaataataataacgaataataagaacgtgcagagacatatgtatcgattataagctgctctcttcttctcaatagtgatattacattgctcatggaaaatggaagtgctgaaggaaaaatg

SEQ ID NO: 218929 - DNA, 469 bp, Glycine max
  unsure (1)..(469): unsure at all n locations
tgcaggcacgcaagcttgggtagcacattccactgtagaagtttattatatatcagctggaagtcattatgctcaaagtctctagatgaagcaacaagttgaagactttggagtacaccttgatcacattcctctaaaatgtgacaacacaagtgcccttagagaccaacttactaaaaatcctgtcatgcattctaggactaaacacataaaagaaaggcatcattttcttagagatcatttgttaaaaggtgattgttgtattgagttcatagatagtgagcatcaactagcagacatattcactaaaccacttgctagagataggttattcttcattagaaattaactaggcatattagatggatctagcatagaatgacattcttntaatgcacatcgtttgttgatattggatccatatacttgatactctatgtgcttagttattatatgatgttactatttg

SEQ ID NO: 218930 - DNA, 470 bp, Glycine max
  unsure (1)..(470): unsure at all n locations
ttacacctatattatatcccgaacattagctatcacaaacttcttacatacattngaagtacaccatacaaattgttgctgtttcactcctattcatttatacgcatattggaaagctaattacatcctgtatatatttgcattcaaaaagggcattccacactatcatacattcatttaagaaaacaattattcatactttgctaagaatttcatgctccttatatttacctatgtatacacactattgcaaggtgttttccacgctacctctatgtaaagtatcaaacatggggcagcccaaattcgagcaaaatactctcacaagcaaatcctaattttcatgtttgtctaattctaaaaccaaatgttggattcctagccataagcatgtttccttgcattgaatctacaaagtttgagttcctaagcttggaattgcatttgggcacctaatttgaatctcctat

SEQ ID NO: 218931 - DNA, 456 bp, Glycine max
agcttcaggctgttcggaccgtttataaattgtttcggctcttctgaaataaatgaaactgatttttgggctcaacagatatgttatggaaagttttattttaccaagaagatcgctggtgcaagactgccgacaggaatagaaaacccccacaagagggaaatattaaatattctgctcaaggattagattgaatcatattttattaaatttattattcaaccccatcaaaattttatgaattgagttagattggagttataattttctttacaaattcaatgggatcataaatagattggattgggttatttgggtctaaatatttataaaatatttgttattttctaaaaataaatttagaataatatattatttttttctaaaactttataaatatgtaatgattaaatatactcaaaagagatcaaattataataatatttgattaataaa

SEQ ID NO: 218932 - DNA, 382 bp, Glycine max
  unsure (1)..(382): unsure at all n locations
tgtcagcncanagtattcctatataataaaaagaatanattatataagatcgcaaataagggcacaaaaaagtgccataagtgctaaagctcataaataaaactgcgaaataggggtggaaaaagagaggtgtcattattgccaagaagaaaagtgttgctagacgaatatacgctgaaaaataaataaccctatgcaggatataagtgaaagtttttgtaacgatgcatgctctcttattatcctatgtttttgagatgctataaaaaccatgatttcttgtttatccaggcctcgttacacgccaattaaagtccttactgtatcaccaaagttaatgtagaatagctttaattgagatgaagcgcaaatgtgggaatct

SEQ ID NO: 218933 - DNA, 401 bp, Glycine max
tttggcatggccggacagttcacttaggctacaaccgattgaggacactttttgataagaagatggtaaatgggttgccttccattaagattccaaagataatatgcataaaatgtttaactggaaagcatcacaaatactttatgccttacaagagtttatggagagcatcatacatgcttcaacttgtgtatgcaaacatatgcgggcctattaatccataatcaaacagcatcaagaggcacatcctaagctttattgatgatttcactacgagaacttggatctatttcttacatgaaaaatcagaagctttttcatgtttataattctacagctcgtgttgaaaggagattggacatatattgcttctttgaggcagatagaggcgcggaattacc

SEQ ID NO: 218934 - DNA, 275 bp, Glycine max
ttggtaaactcgacgaccgtgtggacgagtgcagcttgtctttcctctcacgcatgtgagccatactggtatagtgcaatatctgatacggctatacacagagatgcctgcacatagaacagttgctgcaccatcatgtggtacctatgatgaatgcgaataacacaacgctcatctgcgaccattgactcacaggatcccccatatgtgacggtgtcatctatatgcactgcaccatatgggagcgtaaattgcggacactgattctgaagaat

SEQ ID NO: 218935 - DNA, 437 bp, Glycine max
  unsure (1)..(437): unsure at all n locations
agctaagaggagaggagacgactttgatcgattttatcaaagngagnctaaaaagaggcaaatctgatcatcatactttgataaacgccaaaaaaaactagggcaaatgaagagggtgaggatgaaggagaagcctgtgctgtgactgtcattcctatacagccaagttttccaccaacccaacaatgtcattactcagccaataacaaaccttctccttacccaccgcccagttattcacaaaggccatccctaaatcaaccacaaagcctacctaccgcacttccaatgacaaacaccacctttagcataaaccaaaacaccaaccatgaaatgaattttgcagcgagaaagcctgtagaattcaccccaattctagtgtcctatgctgactngctcctatatctacttgataattcaatggtagccataacctt

SEQ ID NO: 218936 - DNA, 457 bp, Glycine max
  unsure (1)..(457): unsure at all n locations
tcccgcatccacacttggaaggatctgattaccgtcttccttatgcagtatcagtacaattctgatatggctcccgaccggactaagctgcaaaacatggntaataaggaaagcgagtcccttaaagagtacgctcagcgttggagggacctggcatcgcaagtatcccctcccatggtcgaaagggaaatgattaccatgatggtagacaccttgccggtgttttactatgagaaattagtgggctacatgccctccatcttcacagacttggtgtgtgccggagaaaaaatcgaagtgggcttgaagagagggaagttcgattacatctcctccatatgtaccaacgctaggatgatcggagcaactggggcacagaatatggaatgagatacccatgccgtctcttcaacgcccacatggatcaagccgccacagatcttccacggtacccatc

SEQ ID NO: 218937 - DNA, 374 bp, Glycine max
  unsure (1)..(374): unsure at all n locations
agcttagatggttataagagattnatggatttccaaaacttgtctccatagaagttataaagaagcgtctagacgcatgaaagctaatgatgttaactgacgagactattagagtgttaaaactattcaataagcttgacatgagactgatgaagccaactaaacaaaaatccacaacatggatcttgccttcaagaccacctattcagaagcaactagacatttaagtgcatcccaaccttcacaccaaattgtatcatagtagttctggaatggcagccttgtaacaaactctggaaagaaaaaaggtgacatttggactcatattcttcatccaaagatgcaaaaattggagctggaaaaactaatattta

SEQ ID NO: 218938 - DNA, 389 bp, Glycine max
tgaccttataatactaagcttgtaaaagctggagatgtttgtttttgctgccctctctttgagggatttgattggctctatattgaatattgcatctcagtccatataatatcttttgcgcatcatgcatcatcatgattaactgacaacaaagattctatgggtggaatacttcttctgaaggcaaaactctctatgttaatcaattacaaccttatcgtaatcgattacacaacttgttgtaagcttatagagttatgtctcggatcactttaatcgattatacgctgatcataatcgattacatatctgtttttgagacaatgactatattattcaagagtctctgcttcaaaagtgaacaagaacactttaatctattactttga

SEQ ID NO: 218939 - DNA, 436 bp, Glycine max
agcttcaacattcaatttctagggtctcgttagattactggactcaatcagacatccgagtaaaaagttattatcgtttgaatttgttcagagcatcaagattctatttcgagcgtgtcgatatattatgggactcaatcaaacatccgagtaaaacgttattgtcgtttgaatttgctcagagcttccgtattcaatttcgagcgtctcgatatattacgggactcaatcagacatccgagtaaaaaggtattgtcgtttgaatttgctcagagcatcaagattctatttcgagcttgtcgataaattatgggactcaatcagacatccgagtaaaaagttattgtcgtttgaatttgctcagagcttcagtattcaatttcgagcgtctcgaaatattacatgactcaatcagacatccgagtaaaaagttatt

SEQ ID NO: 218940 - DNA, 424 bp, Glycine max
acgacaataactttgtactcagatgtctgattgagtcccgcaatatatcgagacgctccaaattgaatgttgaagctctgaccaaattcaaacgacgataactgtgtactcggatgtctgattgagtcccgtaatacatcgagaccctcgaaattgattgttgaagctctcatcaaattcaaacgacaataacattttactcggatgtctgattgagtcccgtaatacatcgagacgctcaaaattgaatgttgaagctctcagcatattcaaacgacaatagcttttttactcagatgtctgattgagtcccgtaatatatcgagacgctctaaattgaatgttgaagctctgaccatattcaaccgacgataaatgtttactgcgatgttttattgagccccggaatacatcgagacgctcg

SEQ ID NO: 218941 - DNA, 443 bp, Glycine max
  unsure (1)..(443): unsure at all n locations
agctgtngaatttcatatggtngcctctatatgatagcaaggccaccacttctgcctctagggttaacaaaacaaccatcaaagaggatgaggtttttttgtttcctcaatgtggtggggaactagagtttcaaaaaagaaaattatgtctaaatggtgggttctaacaaggtcatggatggactgaattgcactcgggctacttataccccaacaattccaactgaggaaactcattggccctaacagacctttttgccagggcccgctattaaaaaggtgttttgtttgagaggttgggatggttgtggggttaaggtatggatataaatgcttaagtgtatggtgtcgtagggtttggatgggtgaggtcaacatgtttatattgcgggatgtggctaacgagagagatagtggtgtggtagatgggataggggtattaa

SEQ ID NO: 218942 - DNA, 410 bp, Glycine max
  unsure (1)..(410): unsure at all n locations
cgaaatgttgtgaaatgatgaaagtcttcatgtatgaccactatcattggcaanagttgtgatgttttgggatgttgcaaactgatcatgaccctcctaatgttgaccatgactatggtcaatgtaccacaaacattatcaagtgaaaatagcatcagatctttatgaaattgtacattgttcaacttttcgacttcactgagcgattgtacttctgcaaggtaaaaactaatgtccaaacatgagttctaccaagaaaatacatgaaatggcacaaaaactcacataatatatcactcaaattatggtttatcacggaataaaataaaggtctagtgttccaataccttgatattccaacaatcccacataacacaagtgtgactatagtggcaccccttcaccactac

SEQ ID NO: 218943 - DNA, 400 bp, Glycine max
aacataattaataccaaaacttaatccgcagatccctcttgtaagattaagtttcgatcttgctgcaatcaagttctaaggcaacagtacattttccaatgctaaagtcacctaactatgcacacaaagggattatcagaccataagcatacatggaagggagcattaaacacgaaaaacataattaattagatataagtatttacatcagttgttaattataaatccccaactagtgtgtttagctagccattacaaagaaaccctaacaataaatgagattaaaagcagagaatgatatgttcttacacaaataggggaattcctcctcctcttctcaacatcttacactcactctccaactaactaatctctctcgattacaaaacctatgcttaat

SEQ ID NO: 218944 - DNA, 436 bp, Glycine max
caaacatcttctttgaccttcgtgattcttgacttcatctcattgaagcgtatgtgcacttgttactccaaagtatcaaacctttcaccaacataggtttgaagaccatcgaacctatccaaaatcttttgaagaagagatgaatcttctccaccatgtccttcttcatcaacatgttgagcaccctttttcacccaagagccatcatgctctttttgataaccaatggatgcaatgactgaagcgcctattagaaaggatctcttgattggaacataaggttcagaatcaagagggatgttaaagtgttgaaggaagatggtgactatgtggtgatatggcaatggatgcattaatctcaatgccttatgcatgcgatatctaacaagatgtgcccaatcaatgtgtttacctttatgaatagcccatataacaa

SEQ ID NO: 218945 - DNA, 466 bp, Glycine max
agcttccttaagaagattcctaaagaagctatatcttttctacacatacatctctaatagctaagctcacctccttgagatgagaaactagaacttagctacacaccccctataatagctaagctcacccccatgacaaaaaacatgaaaatacaaaaaaaaagtccttactacaaagactactcaaaatgccccgaaatacaaggctaaaaccctatactactagaatggccaaaatacaaggcccaaacgaaggaaaaacctattctaatatttacaaagataagcgggttcatatttagcccatgggctcgaaatctaccctaaggctcatgagaaccctatggccttcccttggatctctagcccaatctacttggagtcttctacccaatgcccttgcgggataggattgcatcaacacaaccttcaaatattgtgtacccaaataataagaacaatattt

SEQ ID NO: 218946 - DNA, 365 bp, Glycine max
gagtaatgtccgactggtgaaactaactttccaaatgtttgccttcgcatgaatggccccgaggaaacttgcctcaaataggtccaggaaggacaaggcggctgaatgaactatttccgctccggattacgacagtcaccgctttacgatcgctgtacaccatcagcgcttcgaagccatcaagggatggtcgtttctccgggagcgacgcgtccagcttatggaccaccattatactgattctcatgacgaattagggcgccggcggtgggcaccactggttactcctatggccaattttgatccatatatagtccatgaattttatgtcaatgcttggccaacacatgagggcgtgcgtgata

SEQ ID NO: 218947 - DNA, 456 bp, Glycine max
  unsure (1)..(456): unsure at all n locations
gctcaccatatacgatatggctgattanggtttctctaagnagtaattgggatatgatttcaactgccattctttatttcttctttgagttacatagtaggtgcgagtacctgggtaggggaggggatagccagtctgatggaggatcaaacctccaatgtcatcatcacacccaaatcttcaagatttagggctagtgtcgattgagctatgacatgcatttctaatgtcattctgatcttgggctattcttgtttttattgcaaaattttgttatctagaagccaaaagataatttgcccattatataatttgttatctaatgtcattctgatcttggacattatataatttgcccacgtttgagtataaagtgattgatatttgatagagtcgatgagattcagcagccaaaagataagactttggacaaagattcatcagagctacaggaac

SEQ ID NO: 218948 - DNA, 162 bp, Glycine max
  unsure (1)..(162): unsure at all n locations
gtgtatctcttgcacctgccctgcattctcncacccccatacatgaccaaacacagattataaatgttcttatacttatacatttatacataaattgagaaactgcggggggtgggtgtgacgacactatcaagataagattcctatcgacatttttaaatt

SEQ ID NO: 218949 - DNA, 452 bp, Glycine max
  unsure (1)..(452): unsure at all n locations
gcttgtgcccttaccactgagtagtaattctataccttgaccaagaactntngnggaaatgggataggaaacaaccatgggagaaggggaaagaaataattaatgtgaaaaattaattttgaaagacttgaggtacttactcttttaaccattgggagaaagggaaagaaatccccacatatgtgcatttattgaccaaatgtctcttttatgtcctttaaatacaactattgatacttgatctagaagtctccaaacacgagttgtacgatcctgatgggatacaagtaaaacaataataatgataagtatagtgaaaacactaattttccaaaagtaaaatgaaaagtaaagaaagaaaagccactgaagtatctagttacttttctttcttctcacttagaagtcagaagaaaaaagaaacatacatatgaggtggcagtcctttttct

SEQ ID NO: 218950 - DNA, 392 bp, Glycine max
atacaaacttgttagtattatggttgaagaatataagagagaagttgtagatattttgttggtttattcggcacgaatgttactattaagaaagaatatgacagaataaaggaaagcatgagacagattgaaaaaaagaaccagagatatgggtgaagcttaatgggaatagtgaagagggaaagtatctcaaggttgatgaccaaccaaatatcttgtcttgtagacctatagttaaataaaagcactcagacagagtgttcaagcaaagttctaactcaatagcaacttcaacttaacacaaaatttcattctcaagtacagctaggtcaaacaaataaccacattatataacacatcatcactatgttttgcaatgtgcacataattca

SEQ ID NO: 218951 - DNA, 442 bp, Glycine max
gagctgggaagtattctcacttatatagatgtttcctcccacgaaggaaaaagtgcagaaggaagtacttaaattgctagaagcaggcctcatttatcccatttcagatagtgcttgggttagtctcgtgcaggtggttcccaagaaaggaggcatgacggtaatcaggaatgataaaaatgatctatttcccacaagaaccgtcactagctagaggatgtgtattgattatagaaaattgaatgatgccaccagaaaagatcactacccacttcccttcatggatcaaatggttgaaaggctggcagaacaatcattctattgctttttagatggatactctggctacaatcagattgttgtggatcaaatgaccaagaaaagacacattcacttgtccctttggtgtgtttgcctataggcgaatgccattcggtctttg

SEQ ID NO: 218952 - DNA, 311 bp, Glycine max
atcggaattttaacaacccctagggggggaggcttttttcacattccacattccgaaatgtgggatcttgctacaatacccgaagcatgactctcagggaaaatggccccaccctggctggttcaataaggagtctacctccgcaagaaaacaatcgccatccctgtgtttgaggacaaaaaaaccttcttaactctttcggtcactggatctctccccctcttctcgggcagggaaatattatctgtccgcgtgaagcacagtgggatgctcaaacacgaaaggctttgcctggaacacaaatcttatga

SEQ ID NO: 218953 - DNA, 391 bp, Glycine max
  unsure (1)..(391): unsure at all n locations
gaggatgcagctaggaggaaaagggtgttacttttgttatggacanggggggtgttggccaactttgcatgacctcgcgggaattgcaatctgcacgttaaaaaaaaatatctcccatactttgagggcagttatgcgttatgaggggatgggaggcatgtctgtgagtggagggagggaatggttggcataaagggtgtgggaaaattgtggggcaagatgagggaatgactaatggaaaacgtggagacatatcgaaaaacttgtttctctttttaaattcaccgtggatctaccattgtaatccttcaacaatatttaaaatcgaggggattactgtcagtaaatataatattcttcctttcatgaacctaaaacgctcatcataaat

SEQ ID NO: 218954 - DNA, 465 bp, Glycine max
  unsure (1)..(465): unsure at all n locations
gtgacactattacactcagcttataacggnatnaaggatatggggcaaggaatctctcttatgctaacagctgccgacacggtagtggactactatatgcaccacactgagacgctaagtctatggatgtgataacgggcatatatgtgttcgacctcgactagggcggagataccactcgatgaacctattgactctcaacacacgtaaaatcacttcgcaacatacacatagctgcatctggatgtaacgactcatgtacccatgcctatagactacattgcaagccacttgatgctcagaacctgcattctacactcaagggacattgatatatggagagattccaggtacgaggagatgatcgatgacatgtgggacgatctcttgcattaacactgctacatgattatgttatacgcctggctatccttcaacacatcactcgggatcaatctgtctact

SEQ ID NO: 218955 - DNA, 453 bp, Glycine max
  unsure (1)..(453): unsure at all n locations
agctntaagtgtaaagtcattctttatgtttttatctnagctcaactccattgatttcttagattttgaacctcttcctctcattatttcacactatttcggtgtttcttgaagcaatcaccttttccattcatatttattttcattatgtttattcaattattcaaaatccttattgttatgtatcaaatatatcttttcagttacatttaaatattaaatattatatttttccagactttgtacttttatttttattagatttatatttcttttcattatgcttattcaattaatcaaaatccatattattattatgtatcagatatatatatcgtttcagttacatttaaatattaaatattattttttaccagactttgtattctatgtttattagaattatattcttttcattatgtntattcaattatccaaaatccatattattat

SEQ ID NO: 218956 - DNA, 443 bp, Glycine max
  unsure (1)..(443): unsure at all n locations
atctaactgctccgacacatgtgaggggacttatttgcgcttgaacgcacangagcgcctgaattgggagaatgatatccggcgaatgtgaataagacaaattggacgaagcagactattgctcaagatgaaacagacatgaaatagattttcaaaggaccaattccgaaaagctattcagaaataaccgacattcattctacagtactcgtctatttatagctggacatcagaatatgtgggaatagtaatccacttcactcactagaagtgctaacaatatatacatggcttctatcatacttctgggttcgggcttgccccaccatgagtctaacgcgtgaccaacatcaattaagaataatgttaaagataacctatactgatctgctacanagaatgccatctctctatatctctcacttgtggatggcattgatata

SEQ ID NO: 218957 - DNA, 407 bp, Glycine max
  unsure (1)..(407): unsure at all n locations
gaactgggattgttaaataattgagtcaagctcgaggatcacattttttttgcaggccaagtttgaactttgaactttaagtgttcagcttgacttgtttactctcctaatcataccctttcaaaatatttcttcttttacaaaaaagaaggcacttgtagaaaatttgttgttttgtgggttcaaaatattgtgagtttttccattttacatgataaaataatgtgcattctgcaaatatattattagctggctcaagtaaataattgctgtttttatgaccataaaaagaaaatntgttgatgttattgaaaaattagttggtcagtgtttaagttaaggcccatactaacttagttggccaattatctctaaattcaattagctctgatgggaagatggatatg

SEQ ID NO: 218958 - DNA, 428 bp, Glycine max
ttatctgtgggaatattacctgagacaaagaatctctttctttatctaaggtagttctttcccttggcatattatgggggactcttggaggagtatcacttgttttgctagttttctttattgttagaagaggaaatgacagaagcaaaacgtaaaatcctccaactagattaatatcagaaaatgctgcgtctggttacacatctaaggtgttttctgatgcaagtaattctctctctctctttctggttacacacacacacataggtgtttgcatgatcaaactagcccgtcctattgtatacatttcttcatccaaatgcagaacatttataaaattctcatcggcaagtgtaatgtgtagtcatggttgtgatattaagaatacgatgttttgtgtagccatagaaaaattaaactggtattta

SEQ ID NO: 218959 - DNA, 461 bp, Glycine max
  unsure (1)..(461): unsure at all n locations
agctngcaaatttcaaacattctttatttctctcggagaggaattatcatatacaaatatagcaaaatttaacatctaccgcattcttttccagttatggcattggattctttacttagtaatgtccattgatttttcttataataacaaatatacttgtgttacaaagtcatcactgaagtttgagctattatttgagtaatacacaccaaattaatcgattcaattacaagcattaatcaatttagtcccgaagattaagggagcgtttgacggggaaaattttttttgttcccaaaaatcatatgatgggaaatttagtttcctaatattaattttttaaaaataacatttctagctaatgatattnttcaggaaatatttttaatcagagattctcacgaaaactttgtcatgaggaaggtgaagatcttacttttctcaattaattttttattata

SEQ ID NO: 218960 - DNA, 373 bp, Glycine max
  unsure (1)..(373): unsure at all n locations
ngatgacatgggttaatcccaaaatatgttatacaacaattgccacccttggattcaaaatgaaccttaaggagtttgcatgagcgactaacatcaaatgtaccctactgtcacaattttctttgggcattttccacgagctcctggttgaatgagttttcttctcaaatgtgcaagaacgaaacctcgaggattcttttttttatatatatattttttcaaaaatcaaaagcgtgtgcgggtttcattctagaatcgcaacttataaacaaaattagtcattccttgatccatatgggctntactgggattgtaacatggtcaggggtaagatgtccatganagataggattatagacgctcaaagagtgtt

SEQ ID NO: 218961 - DNA, 295 bp, Glycine max
  unsure (1)..(295): unsure at all n locations
agcttcatgatgaatcaatattgattcanttatgtnttgatgataacaaaggtgatgacaaaaagctcaaaggtcaatcaaagaatgagttcaagatgttcaagatagaatcaagaacacttcctgattcacgaggaaatttgatttctagaatcaagaatcaagcttcccagaatcaagatcaagattcaagactcaagattcaagaatcaagaaaatacttaatcaagataagtatgaaaaggttttttcataaattgagtagcacatggatttttctcaaaacatgtttacc

SEQ ID NO: 218962 - DNA, 345 bp, Glycine max
catcaagccatgttgaagtatggaattaaccatcttgcaaaaattgtggcaaaagatggatcgggttacatcgctgcttcatctactgccaatcacatttatgactgttgatgtccttgttacttccagtttcaccttgacgaagatgtcatggactatgttgaaaatctaaattgattcaaccccatatcctgcgtaaaaatttgcaatacttcaactgtgcatcattcgcatacatccatgcttttcattggttgcattgctcattgcattctttccttgaaataaaatgaacttaatcattgttatcaaaaagaaaagaacacactgtatgacgcccttatt

SEQ ID NO: 218963 - DNA, 443 bp, Glycine max
  unsure (1)..(443): unsure at all n locations
agctttagagatatatgatttataagggatttctagttggcataaatagggtggaagttagtatccatgcggacgacacgatcttctttggggaggcaacaatggaaaatgttagagcaattaaagcaatattgagggcttttgagcttgtatcgggcctcaaaattaattttgctacaagtagttttggtgctttcggggttccggatcagtggaaaatcgttgcagccaattacctcaattgtagcttgatgtcctttcctttcacatacctcggcgttcccattggagcaaatccaagaagaagtcagacttgggaccctattattagcaagtgtgagagataaatagcgaaatggaagcaaaaacacttatctttcggngggagagtgactctcataaagtcaatgctaacatccattcctatttattttctttctttt

SEQ ID NO: 218964 - DNA, 461 bp, Glycine max
  unsure (1)..(461): unsure at all n locations
tataagaacaaaattgcctcaatcatttccaaatatgcatgtgaattangacgcatcaacaagaatcaagccaatgctattgtgcaagcaatcaatggggcataacacaccaaaatgattatgatgatggatggctcatattctcacaaaggtaaactcatcactttcaaattgagctttcaaaactatcatgacatgtagaggagaatcaaggatttcaagtcacaaaatgtcaaaaacttttattttcaaaacaattacccatttcttgaacatatcctataattcaaagaanaacatgcaaagtcgtacatgcacacaaaattgacccaaaatattaaactaacaatccgacgaaactaacaacatttacaaattaacaataccaacataactagcataaccaaataacactgcccccccatacttaaacaacacattgtcctcaatgtagcacaatt

SEQ ID NO: 218965 - DNA, 435 bp, Glycine max
  unsure (1)..(435): unsure at all n locations
agcttatcccatgcctccttatcagatgtttcattanaaatcttctcgaacgcatcatcatctaatgcttgatagatgaggaagagagcattcttgtctctctttcttgaatcctttaaagtctccttttgtgctttggatagtgaagtctcatcttgcggctccttatagcctttttcaaccatttcccaaacatcatgtgctccaagaaaggcctttattttgatgctccaattgtcataggtgatcccctttagaagtggaacgtggaaggatgccactccattgcttgccataacaatagagaaatttcatatcataacctaagttctgatacagccagaacataatcatcaaagaatagctcattcattttccataaaactcctaataggattgccaaccaacactcatggactactactttangcttat

SEQ ID NO: 218966 - DNA, 449 bp, Glycine max
  unsure (1)..(449): unsure at all n locations
tagagntntcttgtagagaaacaacatcttacttgagttctatggtctaagttacaacccaatattaaccttttcgatgcaacaaattcgtcataaaacatacgattagtggtgaatccaggaaatttttctattgaagacaaataaataatttataatattttcataaaaaaagcgttaaatgtgtttacaaatatgagaaaaaaatacttagatttctagaaattacaataattctctatatatttcaaatttttaaaaaaaattatgattttttattgtgtacattataaagataatagaatagtaaaatgataaaattattatgaattgattctctcctttatctgtataactcttatggtaattcattgtaaaaattgtcgtatggggtaaaaccaatgttttattgtggcaaaataaaatatattgaatatactcaaatataa

SEQ ID NO: 218967 - DNA, 338 bp, Glycine max
gcctttactcggacctccgggagaaaagtcatgactatttaaatctctcgtgagcatctgacgatcaatttcgagcgttttgatatattatgggcctgaatctgacatccgaggtaaaagttatgaccatttgaatctttcgagagcttctcgttgctcaattcctacctcttctatatgtgatgtgcctaaatcggctctccgagtgaaaaggtatgatcatttgaaatcttcaagagcttccgttgctcaatttccagcggctcgattaataatgctctcggatccgacctctcagtgaaaagtaatgatctctttgaattgctcaagagctctca

SEQ ID NO: 218968 - DNA, 257 bp, Glycine max
caacgcgagctctgaccaatgttcttgctttccgtgaagcttcttatcatgtccggctgatagagcttataccctataccatactctccacgatttccttgggtttttatcaggctaataatgccgccattgtctttgcctacacccgtcctgagttcataacctctacccaacatatttagggccatcatcacagtcgcctcgcacagacaaggttgtccaaagagggagtctacggaggatatgctgaccacctc

SEQ ID NO: 218969 - DNA, 321 bp, Glycine max
catactactctgggtctactgacatgtggcggttatggactatttgctctatgaacccttgacgtattttcaagcactactacaaatatggccttcgatatgggtactttagggccttacatgacagattttaactgtcatgggatccaccatcttataatgaggacaacttttcacaactggtttagaactgacatagaacattggtgggttttatattagaaatgatttgtacatgtgagtatatatcggcttatgaaatctctatgagaatgtcctgaagaccagtttagaaagatcaacattgatgatagtttttct

SEQ ID NO: 218970 - DNA, 298 bp, Glycine max
ctttttcgaattctctgagaatctgatttatatctttcagttattgacttttttaagcttggttttggatcgaataggattttaccttcttgaaaacctgaaatgaagtgtaaagtatttttataaatgatgtattttggacttcctaaacctcatcactggctggtaaattcaaaagactttcttgtataactcaacatcctaccatttgttgaagagaatgacccatgtatgtaccttatttttaacatagaatctttcatggtaaaactggttgacgcactaataaaagttacac

SEQ ID NO: 218971 - DNA, 434 bp, Glycine max
  unsure (1)..(434): unsure at all n locations
gggagaagtgaagtagaaaagggtttattcccttaggcacttctctctctttcgaatttgcttaggaaaattgttttcgtgaagaanatccaagccgaggcgcttccataacgtttccgtaacgtttccgtgagtgatttcgtgaaggttttcgaccgttcttcgacgttcttcattcgttcttcagtcttcaacgggtaaataccttaaaccaagcttttcaattcattctatgtacccgtggtggtccacatttggtttcatgtatttttattctcgttttcatttacttnttataccctcttttgacgtgcttaagccatttatttaagtcatttctcgcttaacctaaaaataaaataaatttccaccaatcgtttgaattgtatcatctcgtaacttttggtgaaatgaattccgaccgatcggtcgtg

SEQ ID NO: 218972 - DNA, 462 bp, Glycine max
  unsure (1)..(462): unsure at all n locations
tataggattatggggcacccgncatatgtggtactaggtggtgatcgggttatggcgctaatcaactctcccaatttcacaagtcaggcataagcataccatcctcagttgcccacctttaatttgagctcacgcactcctacgtagcccttatcctcgtacctcttagcaccgggtccgcatcaacccctccaagctatcacaatatccaaacaattcaattccatttgtcatgaaactaccttaaaccaagaaaaacagagtggaggcagaaaactctgcacaaaactcattcaaattccacagttttccctactaccataccccaatcacattctctgtgtttcgattcgttaaccataggatcaccttgaaaaatttactggaggttcctagtacagaaatctacattgtgaccgttgggatctgctagacaatatctagagcacgagatgtactacc

SEQ ID NO: 218973 - DNA, 450 bp, Glycine max
  unsure (1)..(450): unsure at all n locations
agaataaagctttcacttagttgagtacttcttatcccaagtgtgaatgcttccttcatgtaacaagaagccaatttttcttttaggacataaattgaattaatccagttattttcttgaacattgtagtttgcaatcaacttggtccaagcctccccaaactcaacaaccttagtgtcaaatttatacatgcatttcttgaaatctcttaaaaaaattgctttctcctttcatcaaattgtcgaggtgtttaatttcattttgcatcaagtgccatgcacataaaccatgatgtgtctcaggcattacttcaacaagtgcctcagccattgcttggtctagatcagagaaaatggtcttatgcttnttatgactatgtgcttccaagaatgtcttaaatagccatttgaaagattcacgttgttcatcatataataaagtttctccaaa

SEQ ID NO: 218974 - DNA, 462 bp, Glycine max
  unsure (1)..(462): unsure at all n locations
ctacactaaactcacgcttcatgatgatgaaccaagcaatgctgatgatgccaaaagctcaaatgattgtttcatgattgantcaagacttcaagatcaagcatcaagaatccaatccaagattcaagattcaagagaagaaatcaagaagcaacaagtcaagacttcatataggataagtattaaaagaatttttcaaaaaccaaatagcacagttttgttttacaaaagaattttctcaaattttctaagttactagagtgattactctctggtaatctattaccagttagcagtaatcgattaccagtgaccagattggttttcaaaatattttcaaatgatttgtaacgttccaaaatgattntcaaatagtggtatcgattacactatattagtaatcgattacaagtgaatctgaacgttggattcaaatccattgtgaagagtacaacttttcat

SEQ ID NO: 218975 - DNA, 349 bp, Glycine max
  unsure (1)..(349): unsure at all n locations
agtgtgttcatatccttctcattgcagtgaacctttcaactgcatataaaagagttgaacatgattagacattataaacaaagccagaagaaattaacattggtggcagaggcttccatgatcacgcaagaagatttgttgatgatgggaagacatccatacatttatatgcttggttgaaggaactgttccaaatatggacgttgtggaaaggaaaaaaactattcatcaattcatctgtagaaattaattccatctctcttcgtggagtgcggnggcactgcatgacattgtgaaattaatttcaatggccttcgggaatgaatatgcggttggttaaagagaaaaa

SEQ ID NO: 218976 - DNA, 379 bp, Glycine max
  unsure (1)..(379): unsure at all n locations
tagcagccaaagcagccagcttgtgatagctgtcaagntcatcacccttngaagtggcctcagtgaggatcttcttaccttgagaatattccatgaaggtgttgaagagcttcctgatggggtcaacaatggaagggtggaggtgaaagccaccttcagcaatggtgatggcctcatcagtgttgccatccatgcactcccaacgttggtctgagtggagtgagtggatctcttgggcaatcctgtgaatagggctgccaccaattccatggatccatgtagctcccatctcaatgcggtcaccaccaaactctgaggtgtngattctgccaccaatccttgttccacccttcacaacacacagctcaaacaaattctt

SEQ ID NO: 218977 - DNA, 234 bp, Glycine max
ctattggcattactcttaagagattctccaagcttaaaaacccacataatccgagttttaggtcatgttcttactatggctttacaaaatgatctccttgaaaagggttctgtacctaataaaggcttgagatctctaattcagggcctcaattcatcaaatgacgaaacccaagaatatgcagctctcattctacttgatttatctattgaagacaaacatctggatcttttg

SEQ ID NO: 218978 - DNA, 237 bp, Glycine max
cataattgaagtccatgaggctgacgcataaatatggcagctaagcgagaatcattgcggcaatgtgagcgctacgcgagtacatcgcagataagcacatgctcttctgacttgagatgcatcattttatctaaactgtccaaagctaggcttaacgagagttgcagctttttaaattgcagacctcgctaagtggactcacactcgcgctaagccaagtctctgtgtgaaaaaaaa

SEQ ID NO: 218979 - DNA, 231 bp, Glycine max
cgtgcccgtgcgcttaacgcattctgaaccgcttatcacgccttagtgaatttcggcttatcgcggcttttctcgcccagcggatggactgaagaggtgtgcttaacggaatgacccttcgctcaccgaatatgcacaactcatccttcttccagattctccctcgccctcagccgaaatgtgttgcccacagcggatggctcgctaagccacaacattggcttagcgaga

SEQ ID NO: 218980 - DNA, 316 bp, Glycine max
  unsure (1)..(316): unsure at all n locations
taaanaacaagaaatgaatggaaagtctcggattcgaaaatttacccgttgaagaacgaagaacggatgaagaacgatgaagaacggacgaaaaccttcacggatttgcttacggaaacatctcggaagcgttacggaagcaccttggcttggaatttcttcacggaaacaatttttttcacccaaaacagctgaaatacataaccagggggctgagggatccttagaacagcccccttcagcctatttataggaaaaagggggaggaggttgccgcccagctcgcccaggcgaccttagctcgcccaggcgagct

SEQ ID NO: 218981 - DNA, 267 bp, Glycine max
  unsure (1)..(267): unsure at all n locations
ctcatcacccaaagncaaaattgtggctgaaagaatttacaatacgaatactgcacctttgcgtttgaaaagatgtcaccatttgaggtcaacagacaaaatactgactaagaatgacactctggactgtgaattcatggttaatgttcacattccctccattggatgcacaaggaggtgaatctcttacaggaactatatatagcacacgacanatgtcacaccctcattattgtgatccccttcaattgtcctcatattccatat

SEQ ID NO: 218982 - DNA, 263 bp, Glycine max
acaaaatggactgaccactcccatgacgtcagcaaaagaagggctctaagtgtccagaaatccagcaacaaaaccacgaaaagagcctatgtgatccctaaaaaagtcatcacaacctgtcatatcagagcactcataaagcggagcatccactcacataaaagatacactgctgaatgatataagacatatacaaggagaagaaatccataaaacaaacggttgagctaactagatagatgccgagatgattctcatactac

SEQ ID NO: 218983 - DNA, 462 bp, Glycine max
  unsure (1)..(462): unsure at all n locations
tggtaggtatatattggttataaaattaaaaaaatctatttaaatattgtaanancacgntattcatatattngctataattttcatgataaatattttttcctttcaatttttttaactaatatcttaaaaacacttattatcaagaccatttagtaaaataaagaaaatttattgtacttttttgtttctacaaaataaccttaaaaataaataaaaaggaagagttagtaattaactatgttcacaccccattaattgttagaatcaaatccactgcccgccttctcccgtctncaagcctgagagagctaatgtgtataaagatattggattctagccaaataagcacatgcatgctgaatacactcgatggaagtagtgagagaaagacatacgcaattctattgacgctatcccagttaatatgtactacatagaataataantattttataaatc

SEQ ID NO: 218984 - DNA, 244 bp, Glycine max
  unsure (1)..(244): unsure at all n locations
agcaagtactctaatatcccactaatatcccatatgcagcaccacaaaaaaaaaaaaaagacattgcacctcttctggatccactggctcagagaacaccccatgtgtgtcctttttgcaagaggttgtgagcagtacagaacatcaaatagccaacttataaaaaaggaaaaagaaaaaggaagaggaaagaatcatatangactactacaagagacacacttttgagcctgtcaaggataaa

SEQ ID NO: 218985 - DNA, 414 bp, Glycine max
  unsure (1)..(414): unsure at all n locations
acagtagagtagactnntaattttcggttctctgagaacttgaatcctcaaaattcaattcataccaaccaatcatatttaaatgattntgatgttcacattttttttagtgagatctcttctcttgagttntgatgaaattnttcctctcanaacacttaaatataagacttcaggaaccactaaaaccaataacttattaataaattaaataaattntaaattaaaatcaataatcatgttatatattttgttagataaaatattaacaatgagatattaaacatcataattgttatcttttacaaatataactacaacaacaataaaattattatattttaatttaaataatttatataataataactgatattggatttattttgttccatttcatatatcttctcatta

SEQ ID NO: 218986 - DNA, 291 bp, Glycine max
  unsure (1)..(291): unsure at all n locations
agaaattatatctagttaaggtctgagagancctacaagtttcctaacgatttctaattatgcgggtcattaagtctatcatatgctgacaatagccgagaagcccatgaatctcttcgggggcggagtaggtgtctgccatcgccttggccttggctaataatcggggaagttcttgactcccgttcaaggtacgagcaaaccgatccatccacatgtgtgcctcttggtgtaaagagtcgatcaccctttctatagcctttttttccgcatatagttgggcatactcat

SEQ ID NO: 218987 - DNA, 455 bp, Glycine max
tcagccctaagcaagacactcgcatgggcgagctaatgacttcaaccctaagcaagaagctcgcttgggcgagcttcccctgcaccaaatggcctttcttataaatagccatgcaggagaaggggtagaggggttcagaactgaaggaatagaggaaaaagcgcacaaggagaaaaaggagagggaaagtaaagccgaggcactacagaattgcgaccatagattatttccttcgccatttctcttgctagccttgtgccctgcataatgatcggttagttcttcttaaaagttgtatttaatctatgtacccttatgggtcctttgatattatgtgtgtgtgtgttaatattttatactcgctgttggtaatttcatttttttctcgctatgcttgattctagtcgatcactagtgtcatgaaattggactttatgtgagtgatgtgccatcat

SEQ ID NO: 218988 - DNA, 457 bp, Glycine max
  unsure (1)..(457): unsure at all n locations
acacaccacacacagaatctaggtgtgcaaaaccctttaattcaanggtgtttctaggtttgaaaagtgaaatttagaatgaggtaaatctgaagcaaactctcacctcacacaagtccataacatcaatctaaactcgctcaaactgaatctacacctaaaattcaaccgaatcaaaatttgactcctccacacccaattttgccctagaaaaggctctttgttcactttgatcatttgttcttctctctagcacagtccaagctttctcccaagtcctaaatgactattcaagctagtattaactcactttaacctccatttaccacagaattcagacttaacctttcaactctcaaagcctcactctttgtccactcataacaccacattctcactgtccaaccctaggttaactctacatttcatctctaacagttttccattggcaatttca

SEQ ID NO: 218989 - DNA, 322 bp, Glycine max
  unsure (1)..(322): unsure at all n locations
attaagaatttagcctttgttcgtgtnactttgaaaaagncattncttctcctttctttcttccaaagtcatttcaaacgtcccaagcactntctccatcacccacagccaccattagccaccacaaaccgccattgttctccgttgagacccacaccgagaggaagccttcaaccaaagtgaaatctttcaacttggcttgcggtttcggtagagaatgaaaccctaatctgacctttcgttttcctttgaggtaaccatggttctatgcttgttacttgttagtttcagcttgtctttgcatcttttctgactttcgaac

SEQ ID NO: 218990 - DNA, 193 bp, Glycine max
ttattacattttcagatgcatcaccagctgctattgccgctcataagatactattacccagtgagcgacgactctgtgattgcatcttctcaagagcctcttctgttgctgctctccggttcaaagaagtttgtaggggagccctgattcaactgctcaattttgctgaacctgttgcaagtggaagcccttc

SEQ ID NO: 218991 - DNA, 159 bp, Glycine max
taataaacaagtgaagtacaccaagtcttagaataggcaagcaaaacgccctcgacaagccgcgtgactcatttacatcccacatatccaccaataataatgttctaatttagcatttattcccaccgaaatagactaccccacctacgctaatctttc

SEQ ID NO: 218992 - DNA, 329 bp, Glycine max
ttctcaaagaagcctttcaacgaagttctctcaagaaagcttctcaaggaacctacctattctcgtaatagaagcctgtgtaacactttgtgcaactttgatgaatgagagtcttgtgagacatacttcgaagttccacttctctacctcttttattccttcaatttcgcgctcccccctctctctttctctccctctttcttttcctccattgaagcatcctctccaagcttcttactcaaggctccatctgggtggtgaagctccttcttccatggcttattccctagtggaaggcgcctcctctcacctctccttgtttgtcttcc

SEQ ID NO: 218993 - DNA, 454 bp, Glycine max
  unsure (1)..(454): unsure at all n locations
cactacataatactcaagctntcntaagaaaacttccttgagaagctgattcgagaaagcttccttgatatactacagtttanctccacacacccatctataaactgagctcacctccttgagaagcttccttgataagctagagcttagctacacacacccatctaaaaactaagctcacctacttgagaagctttcttgagacgctagagcttagctacgcacccctataatagctaagctcacccccctgacaaaaaaacatgataatacaacaaaaatcctactacaaagactactcacaatgccctgtaatacaaggctaacaccctatactactagaatggcccaaatacaaggcccaaaataagagaacaacctactctactatttacaaagaagagtggacccaaccttggcccatgggctcaaaaatctaccctaaggctcatga

SEQ ID NO: 218994 - DNA, 415 bp, Glycine max
  unsure (1)..(415): unsure at all n locations
actctataatactcacgcttcacttgcgaattacattcaatncgacagatntattatccatctaggtattgagttatcaataaaatttcttgattgctttgaaggtaatctcattcacgacctccaattttcaaagaacaagtcaataattatgttgcagacggaattcatgtgttagtgccattcaagttcatggatttgctgcgggattttggtggcctcgtggttctctattcctcaacaagacatggatttgctgtgggaatttggtggtctcgtggtttgcaatagctgacttaaaagttgacatgagatgggagaagctacaaaaaggtagaacattgccatctntgctttttctaactcttaatttccaattctattgttgaactcataagttacattttctgaaccc

SEQ ID NO: 218995 - DNA, 378 bp, Glycine max
gtaaaggacgcgccacaaaggatgatctgaaaccccttcattcaccagctggacaatatgcaatgaataaaagcagcaatcaacattcatataccctttctcccaacataaaataataccctacaaaatagcattcgcctcaccttggagaatagaagcattctccatgtgaccatagaaaccacaaatgaaatttccctccttattctacacaacttaccaaaaactgactctattatacatcccaataacactcccatcaacattgaaaataatttcatccatattcagtctcctccatgaaatcccagcctgatccaccttcatcctctcaaccttagtagctccaaaagcctttaccactcgagcatggaaagc

SEQ ID NO: 218996 - DNA, 347 bp, Glycine max
aaatgtgactgccccgtcccttttgaatgtagtctctactcgtagtgaccatctgttatcctatgtctgaatagttagctaataaaattaaaagctgctacatggtggatgccattcttcccaacatatgatgcctttctgccttataataactaacaaaaactaatttctattgtcaatggacctacagattgagggttagtttagttgctttaatcttagatccgtcctgatgggatcaatactatgtagtctggtgaaatgagacttactatgactgacacgatatgggcctgagtgtctaaattcatagatcagaataaaaatgaagcctacctaaatcaatg

SEQ ID NO: 218997 - DNA, 373 bp, Glycine max
  unsure (1)..(373): unsure at all n locations
atgcaagcttgcctcatagaggtgtaggaaggataatgttgttctaagaactanttccgctcctgagtatgacagtcaccgctttaggagcgctgtacatcagcagcgcttcgaggccatcaaaggatggtcgtttctccgggagcgacgcgtccagctcagggacgacgagtatactgatttccaggaggaaatagggcgccggcggtggacatcactagttactcccatggccaagttcgatccggaaatagtcctagagttctatgccaatgtcttggcaataaaggagggcgtgcgtgacatgagatcctgtgtaaggggtcagtggatctcgtttgatgccgacgctatccgccagctcctgggatat

SEQ ID NO: 218998 - DNA, 445 bp, Glycine max
  unsure (1)..(445): unsure at all n locations
actaagctgctacccaggaactcctaaatctccacactgttgttgtgggccattctngaatggccttgattttctcagggtccacttggaccccatttctaccaactacaaaccctaagaaaactatattatctacacaaaaagtacacttctctatatttgcatagagggtattttccctaaggactgaaagaacttgcctgagatgtcctaagtggtcatccaggctcctactgtacactaaaatatcatcaaaataaacaactacaaatatacctatgaaatcccttaagacatgatgcataagcctcattaaggtgctcggtgcattagtgaagcccaaaggcatcactagccactcatactaaccaaacttggtcttgaagcgggtttcactcatcaacccttttattctgaatggtgaacccactttagaaccattttg

SEQ ID NO: 218999 - DNA, 301 bp, Glycine max
  unsure (1)..(301): unsure at all n locations
acaacaaataacctgacttggaatgcgggtgacaatctaatggaagggctacaacaattngcagtctaatccaataataataacagcaaaacattctggcgaaaagaaaaaattgaccttcctatctcaagcgccaatcagaaggatgcctccaacagtatgcccagaatgatcttttagttgcaacattgaatctgacctggcgaacatttactatggaaagctactttacacctaacacacctaaactgttttttctcgcaaatgaagcatacctgttcatttaacgacataatatgag

SEQ ID NO: 219000 - DNA, 443 bp, Glycine max
tcacaattatgaagtagcagttatgattgaatgttcattttttggattcactcaccccaatgctctatatacattctctctaagtgtttctagcattattccccccttcaaaatcatcattcctgttttgatgttctacaacatctcatgtaaagtctctttgaactatccatggcatatgataatgtagaattgctccattccaggcaaagtcaccaattagaactctggatgaactcagcgtcaatgaggtaattgaaagtccatattttccatctctaatggatagagaacaacataataaagtcagtggtgatcttcgtaactgccccaacaactctgaaactgacattcctcctacttctaatcctagcattgataaagtaatggcatcaagtcaagatgtacgattttgcataagagtgcgacatcgttgcctggtg

SEQ ID NO: 219001 - DNA, 353 bp, Glycine max
  unsure (1)..(353): unsure at all n locations
cgcatgcaagctgttgtgaatggtgtgagacaagaattttttttatgagnttctgagaaggcttaacaacaacaacttcaattgcctactacaaattagagaggcacgtgggtttccaggtatgttaggttctattgattgcatgcattgggaatgaaaaaaattgtccactcgcatggcaagggcaatattgtagaggtgatcattgaaaacacacaataatacttgacaccattgtcacaagacttgtggatctgacatgcttatttctaagatgcaagttcaaacaatgatatcaatgagttaaatcaatctcccgtgtgtaatggcgttatgcaagatcgagcctctct

SEQ ID NO: 219002 - DNA, 455 bp, Glycine max
  unsure (1)..(455): unsure at all n locations
nttntacaanctcttcgctgagaattgatgataggattcttataatctattacacaatccagaactaagagcacgccatgttcatgatctctctggttgattacaagatctggtaatcaattaccagttcacaaatatcttacttttgaattgattaagcttgataaagtaattttgataaaagactttgaggccaaactattgcaatataaaatgagattcttttaacaatttaactaagtccttatctgcgattatcttaatcttgtttgttgacttgaaacaatgtatgctttcatcaagtaaattcttttggcatcaccataacttgcatgactcacattctccccctttttgatgatgacagccatatgtaggtaacgagtaaaaagaatatttattttgcgtcgttcactccccctggattttgaaataattgcttatataacaatgtc

SEQ ID NO: 219003 - DNA, 324 bp, Glycine max
  unsure (1)..(324): unsure at all n locations
ttgaatctaaagagaaagcggctggntatgttggatgtaactttttcccaaacacacattaaattaatcttgactattgcaatttctatttgcaaacctgaattttctcttttcttaaaggcgatgaaaatactagacattttttttttaaaaaaaagaagaaaaacttacttggcacattatagagaagtcattagtcttaaaagccaaagctatattaggaagggagagcctctactacaaatgaggggttagtgtttcacaggtcacaaccctatggcttgtccaaactttttacaatatcaattaggatctatcagctaa

SEQ ID NO: 219004 - DNA, 455 bp, Glycine max
tattcaaaagaaatcctcatgtaacacaaagggcataagtctgtaataattatttacctcttgttttctctttgctcgctcatcattgaaattgaatccataatttgggaccgcctacaccctgcgaggtttggcatcttctactaaatccaaagtgtgagtaggatatatgtgtgcactacttaagtaaacataataatcttaataccattaaaatccacccaaatgatggcatcattttaactttttatatgtttaatgtgcaactctatgattgcatatgcagtttcactacctaatacttaattaagaaagcaaacaagtgtcagtatataagttcaatatctataatagggagaatactcattaagatcaatgtctttgatctttcttttcattttaatggatccctcatcctgcaacaatagccaataattcattcatgtatctacttc

SEQ ID NO: 219005 - DNA, 320 bp, Glycine max
  unsure (1)..(320): unsure at all n locations
caagctttcttatatagtttgagcttggtctttntatctaaaaagggtttttaaaaagcttgagcttgacctttatagtaaacaagccgagccgagccgagccgagccgagccttatataggccaagccaaaggccctcgacaagctgctcggctcatttccacccctatgaaaaaggcatcaataaaggatacatagcatttataaccagcataggaagttaaatgagaaggtccccacaaatctataaagataagctccaaaggagagtaaacagaaatagaagtgtgagaatggtaattatgagattttcccataca

SEQ ID NO: 219006 - DNA, 460 bp, Glycine max
  unsure (1)..(460): unsure at all n locations
tttgtttcctccattttgcttanagttntcttgctgcttaagtttcccattntttttcgttactgttctcatgcattttactcagagttttccttttgtttgttcctgttaatttctttaggcactcacgagttttcctttcatgtgtcacaacctacccttcggcgggagggcgacgcgagactcgcgggatgcgtgttccacgaaaggaatacgcgcggagtcgccaccaacgtttatttgaggaaaacgtcggaaaaaccggaaaaagacgcgatctacgaactttttaagtgaaaggttcgggagttgtatttacgcgcggngaaggtattagcaccccacacgtccgtcccaagggacggcagcctttaatcgaatgtgcaaacatgactttgattttttatgttcccttntatgtccttatatcccttataccctttntatatttttccttttt

SEQ ID NO: 219007 - DNA, 377 bp, Glycine max
aaataatcattttttttcaacttttaaaatacaccaattatcaatggaccatttttttcttctcaattttagcattacaatacacattgattgatacaaattatgcagtgatataacataatttactcctctatttgtcattcttatttgacattttctttatttatttttgagatcctcttgacataatcagggtgaacaaagttaaaatgaagattaaagagagataatcagatgactcaagaataaagagagataatcaaatgactcagccaatgactacttcctgaaaagacagagacactgaaatgaaattactttttaaattattgaaattctctaaagtaataaactgacaattgtgaattctttcatct

SEQ ID NO: 219008 - DNA, 467 bp, Glycine max
  unsure (1)..(467): unsure at all n locations
ctataccaagactcaagctttcgattcattctatgtacccgcggtggtccacattgtgtttcgtgcatttntattctcgncacgcctactttttataccccctgttgacgtgcttaagccattttacttaagtcatttctcgcttaacttaaaaataaaataaatttccaccgaacgtttgaattgtattatccgttaacttcggctaaaataaattccgaccgttcggtcgtgccgtaaccacgttggaaatcaaaaagaagtaaaaaataatataataatcaaaaagacatcttttagtacaatacagcggaaaatcaatcggacgttttctctttgggatttctcattcttaatcgaatcgattaataactaaagtgaaactaaaggctaaaatgaattcgcctagtcgagctcgtacataaaaataggcttttgaagattgtcatttcattttctcactaagt

SEQ ID NO: 219009 - DNA, 361 bp, Glycine max
  unsure (1)..(361): unsure at all n locations
agaatcttttccagacacccacctaatcatgagtgcactgatagtctacagatgaagcaacaaatataagcatcttgaatcaaatacctcctaatgacaccccactcaatacgagtcaatctatgaacatgacccaatccaacatggtctaagtacttcacaaattctctctttganaaccatgggtaatcgatagcactataaaaccactccaaagtgcaccatcgccgcattagatatgaagacaggcaattgataagctttccctgtgataacaaaagtaaaatacttttcctatacagataaaaatcaattgtgtcctgattacaataaacatattacctttgatataaaccatttg

SEQ ID NO: 219010 - DNA, 451 bp, Glycine max
  unsure (1)..(451): unsure at all n locations
gagcatgaaaacggagttgtttacgttcataaacatgactgtctgaaattcactattattaaacaaaaaatcaagtgactgctaaattatgacggtttgtgaagatgataattactattaaatggtgcaaaaaatcaagtgtagtactaacacttaacaagtaaccaatgataatataataaatgaccattgcttgtgtacccaacttcgtccttagatgatgatattgcaatcatagcagctcccgacaccagcgattgctctatgcgtttccttgacttctattccaaaacaattcttctcttttcatttttaatgttcatcactttgtgggtcccaacttctgcacggcgacaagtcngttattataatctctgctccttctttcctctgattggttactctgtcatgcatgaatcataatatatcacgatatgcgaaggtgtcacaa

SEQ ID NO: 219011 - DNA, 386 bp, Glycine max
  unsure (1)..(386): unsure at all n locations
ttaacgngattacaaaattagcactcaaatttgaaatcatttggtaggttaaaactatcacacgtatgttgatcgacgttatatttttcctcattcaatagcttttttattttctgaattcctcattcaatagattagtacccaaacttcttattcttttttttaaaaaaaacatttaatggattcgatcgtttattattgtttataaagaaaaatataaatagcataaaaatttagcagccatatgaattggaccgcacaggttggttgttcttcagctgcaggcaacttagagaaccctggtccatgtgtcaatggttcccaattaatgtcctagaaaatattaaacgtacaaaaaaagaagagtggatcttgctgttcatttt

SEQ ID NO: 219012 - DNA, 478 bp, Glycine max
  unsure (1)..(478): unsure at all n locations
ctcagctaacccaccatttntttaatgatttttaacctaatataaaanaaatatctcatcatcacttaagttaacaagcgcgtttatcataaatgcccaaagactaaaaagtttattcttaaaagaataaatacatattatcctcccatgtattgtatttgtggggagagagagcgagtggatgtggtgttccggagaagttggaatggcagcggttagtgttagtgttactgtgagagtgaggtggtgcactcgaaaaccacccactccaactccaaccagattcagcgttaatgctctgtttggtgattggggatttgggaatagaacaaggaactcccttcagcagcaattcacgttcactcttgctgatagtaaagtgataagcgtgtcggttgtttcttcgatctcagatgttgcatcgagcgaatgggacgcttgttgcttggatgcgactggccctgacaacttcaatcca

SEQ ID NO: 219013 - DNA, 374 bp, Glycine max
caactgctcatggaaaactgttagacatgaagggtacagccaacctatggttacaaagtgatcatgtggtgctatgagcggaaacagagtgaggctttcacagtcggaaggttaaatctgcgatctgtggtaaacggaggttgaaatgagttaatcctaccttgaaatgccatttacgacatgtgacaacagttggactgtgctacacagaaaaacaaatgacccatgcgaccacatagccacttctacgactaatttgcgggttgaggagtcaaactttgatctggcgaaatttaggtgcacaccacctcgaacaattctcaattgatgtgatagactcgtgtcacgtgagagtctgcttcaaattcacctca

SEQ ID NO: 219014 - DNA, 335 bp, Glycine max
tattcaaaaatctcgccaaatgacggtccttctctttcttggaaggtaccacaggatatggtacttccttaccttcggtcacagctttatcacttctactcttctcttcattttcatttttttcatcttttcaattttttattctccttttctttttattgagcattaaatatctttttcttgaccattatttagttctcttttccttgattgctttcatctctcacatctttctcttgcccttagtacccttcttttcaacagcttcttcttatgcacaacactctcctcaattctcagctccacaaaccctttacttcttgacatcacaactt

SEQ ID NO: 219015 - DNA, 416 bp, Glycine max
  unsure (1)..(416): unsure at all n locations
tgtaatcgattacacatatactgcaatcgattaccagatgtatatttcagaacatattctcaacagtcacatcttttcatttggttcttgaatggccatcaaaggcctatatatatgtgacttgagacacgaatttgctaagagtttttagaacaaaaaggtcttatcttcttaaaaagcaaaatcgttttatcctcttacaaagttccttagccaaaacacttgtgattcaataaggaattatttgagtgctcaaattgttcaatctatctctttcaagagagatttcttcttctcttcttctttattctgaaaatggattaagagaccgagggtctcttgttgtaaagaaatctgaacacaaaggaagggttgtccttgtgtggctcagatctttgactangcttttacaagat

SEQ ID NO: 219016 - DNA, 364 bp, Glycine max
  unsure (1)..(364): unsure at all n locations
ggtcatgtcatggtcatcaagcttcgtgagtaagcacgggtacacgaaaagagaaagagaggaacacggccaagtttggatgagaacctgttttntactggtaaaggataatcctggcttttgctgcattttttatgttctgatgtattcgcttctaaactttgtatgctgtcttatgacttggcctatgtaaatcttgtacagtcttctagctttttattaatgatatctctttgctaattgcttaaaaaaaaacccaggtatactccttttaaggaaataaaccaaggatttctcttctataaacccatatatgattgttctgattgcagttaaccttaattttttattggtatgctttaaa

SEQ ID NO: 219017 - DNA, 391 bp, Glycine max
  unsure (1)..(391): unsure at all n locations
ntaagagcaatncccttctttntcttatcattatcttcatgttgattttgtctcaatagnnccatttcgtgttcctataactttccaaatagtgtagcaagagacatgttagataaatcccgtgattcagtaatggctgttaccttaagttgccattctctgcttaaacatctcaatactttatttatgagatcttcattttgaaatttttcccaaaagatggaagatgatttactatgtgtcgtgaacctctttgcatgtcttgtatactttcatttgcattcatcctaaatagttcatattcatgagttaatgtgtttatcctanatcttttaacatctgttgtgccttcatgtgctgaactagtcttctttcctcctcactccaatct

SEQ ID NO: 219018 - DNA, 194 bp, Glycine max
gtgttgtataggtttccaccatcgaatctaacgaaatccttttgtgcaattatgaaatcaatgaattgggttgggaaccatccttgttaaaaaggaatttcaagggcatgtaatccatcaactaatggccttcgtatttccttcttaaaaaatgtaaaaacggtaaaggcacttgtgccatgaaaagtgtcatc

SEQ ID NO: 219019 - DNA, 356 bp, Glycine max
  unsure (1)..(356): unsure at all n locations
cgcctgaaccataaccggagagagtgtgatcttatactgtgagtgttcgactcgcanccagtaatagtccttgcatcaatctctgaattttagaatgaaatgtatgaatgaatgccatgattgctatacaagccaattgactcaaaaccttaccttgaattataactgtatcctttgaccctgtgtaagctaaattaaattttcaaaagtgaaccctaaacttgaataaatatctccagataccttgcttaaattctaggagagcagatggttcaaggcaatctgccccaaatttgggggaggtaacccggatgttaagtggaatgaaaagcacatcagcacacacaacaaataag

SEQ ID NO: 219020 - DNA, 371 bp, Glycine max
ctccagataatgagtttctggtggagagtagatggcacagccccaactccatggatccattcccttcctaatagcaagttaaaattagccttggactgtatcaccaggaaataaagtggtcgaactatactgcctacagcaacatctacttgaatggctcccaaagaataaccagttttaccttcataattcgaaagcacaatgttgtgggcagatagatcagtgtcatgtctcccgatcttgtagagcataaatcgaggcattaagttaacagccgctccttcatctatgagcactttgttgattccaacattctcaactcttgcctgataaaagaggttaggatgacttttcatctgaaaatctggctt

SEQ ID NO: 219021 - DNA, 350 bp, Glycine max
  unsure (1)..(350): unsure at all n locations
tcagctntgaattcatggaaaatattaaaaacaatgtcatttttttactcttgattgaaagttgaaaatactactgaaaaatttaatcgtgtattggaacatttgaccaggcttgaactcctttaacaaattttgtaattttattttcaatatatccgtctcctggaaattaatttccggaagaaaaaaaaaattagattgcaagtgggacttgttacttgttagtcattcactactacctacaacaatctggaatcacttaccattcgaggaaacaacgatgaaaacaaatctggttccatcgcgattaaagaacacttttgtagggttataaaccaccaatcactggt

SEQ ID NO: 219022 - DNA, 348 bp, Glycine max
  unsure (1)..(348): unsure at all n locations
cttacatatgngatcaacatcttctattctcacattnagnagctggtctatantttctgcaatttatgaatttaatctttctattatttctaggatactgtactggaacttgagtttgaaggtgtcaaaaagaaattcaccatgcttgaggtttctagccatttattttgttcatcacttaattgtagttgcttcattaaagtattggtactctttatcattatcctacattacaacttccttgcatgtacttttggtatttattttattcacacagttaactttggtttatttatttttcaatatagatgtattggctatatggtgaaatcaagtctaccagtgcaa

SEQ ID NO: 219023 - DNA, 455 bp, Glycine max
  unsure (1)..(455): unsure at all n locations
cttgaaaccacgtanagcacaatcaactgccacatcaaaatttttctccacattacaattcttattgatacttttatatggttagccaagtggacaatatgacccaataatttgataagaaccttcggacaatgccaccgcactgattaagaacttactaagaagagcaacaaactaaggtagagctcataccttgttaactggcagcatagaaagctttgagctntgagcacccacgactgttccaagagcagtgtagggttttcttcgacttttcttcgataggaggttntgtgggttccagcaagcagtttccgacagtattgaaatgaatgtggggcaatgtgggtgtcgaccgagccggttccgacagatttcatgtgggaggagaaagagagagagaatgcagcacggtttcgagcctcacgtttggaatttcacacgttttacttatt

SEQ ID NO: 219024 - DNA, 305 bp, Glycine max
  unsure (1)..(305): unsure at all n locations
atattttttgttattnntatggtatnnaaaataggatggattgtattnntatttaattttttttttttaaaaaaagtgaaatatttttattatgaaaaataagataattttaaangaggagaagtggtaaaatttgantanaaatattagttgtganaaantatatnataaagtttttttaagttnannaaaagaaattagtatttatttntaatanntatttatgggtataggaataaanttattnnnaagatttaaatgatgtaattgttaaaaaaataaaataattttggtaatttaataaa

SEQ ID NO: 219025 - DNA, 405 bp, Glycine max
  unsure (1)..(405): unsure at all n locations
ctcagctttcatgggaggaagctttttatagagttntcataactgttctatcttatgntagttcaagcacaagatggtttactgatctaacaaacattccttagagtctggcttcagcagcagaatttacaataccaatatttctagtgtgctgcagtgatggatccacaaaagactgtttatgaaacattggtttctgtgtgccaaagtattgtctgcaagagtagtcagtttggtaaatgttatctaaacagacacttgacaattggatgcagttcttgggattttgatcagcagagtctgatgggatggtgtcagtgagtgtttttattgcaaattcaatgcatggatccatccatgacatgtcaagtgtcttttcagaagatggtcctgcattctcattct

SEQ ID NO: 219026 - DNA, 153 bp, Glycine max
tcctcttatgacaatagcatcatttctggcactaaactgctgggagtcggcagccatcttcctaactaaatttctggctttaccttgggtcatgtctccaagggcttcaccactggcagcactcatcatacttctctccatgctcctgagtcc

SEQ ID NO: 219027 - DNA, 355 bp, Glycine max
attcactgtcgagcctctcgatatatttcgggactcaatcaaacatccgagaaaaaagttattgtcgtttgaattttctcagaggttcaacattcaatttcgagcgtctcgatatattacgggactcaatcagatatccgagtaaaacgttattgtcgtttgaattggctcagaggttcaacattcaattttgagcgtctcgctatattacggggactcaatcaaacatccgagtaaaaatttattgtcatttgaattggctcaaggcttcaacattcaatttcgagggtctcgatatattacggaaatcaatcagacttccgcgtaaaaagttattgcttttgaattgtctccg

SEQ ID NO: 219028 - DNA, 445 bp, Glycine max
  unsure (1)..(445): unsure at all n locations
ntgagccaattcanacgacaataactntttactcggatatctgtttgagttccgtaatataatgagaccctcgaaattgaatgttgaagctcttagcaaattcaaacgtcaataagtatttactcggatgtctgattgtgtcccgtcatatatcgagacactcgaaattgaatattgaagctctgagccaattcagacgacaataactttttactcggatgtctgattgagtcccgtaatatatcgagacgctcgaaattgaatgttgaatctctgaccaaattcaaacgaacaatagcttttactcggatgtctgattgagtctcctaacatatcgagacgctcganattgaatgttgaacctctgagccaattcaaacgacaataactgtttacgcggatgtctgattgcagcccgtaatatatcgagacgctcgaaattgaa

SEQ ID NO: 219029 - DNA, 342 bp, Glycine max
agcaagcttggcatgcgttaggtaagggagtagtaaagcgtgttctttccttttgattacaatgattacagttctgatttcaaggaaagaatgcaatgagcaatgcaaccaatgtgaaaataaaaaataagcatagatgtatgtgaatgatacattgttgttgtattgcaaattccacacaggacattcagtagaacatagggtcaaatcaattcagattttcattaaaacaacattgttcatcacatcttgtcagagtcaaagtgcaactggaaataaaacttggacatcaacagtccctaattttgtaaattatttagctcaatcatgtgtcggcagtag

SEQ ID NO: 219030 - DNA, 395 bp, Glycine max
caccaccaagagagtgttttggataagaagcttagagaggaagcttcattggaggaagagaatgagagagagagaaagaaagtggcgtgggaatgaaggaaagagagggagagaagtttaactttgaagtgtgtctcacaggactctaactcatcaaagttatcacaagtattacacatgcttctatttatagcctaagcagcttccttgagaagctagtgttacaccctttcaatagctaagctcaccctcatgccaaaatacatcaaggaagaaagcttgcatgagaggcttccttggggaggaagtgttacacccctccaatagcaaagctcaccccatgggaacacacacccctcccatagctaagctcacccgccccccaaatacaaaaa

SEQ ID NO: 219031 - DNA, 353 bp, Glycine max
  unsure (1)..(353): unsure at all n locations
atatntctcaggaatgttattatacaagtgactgaatttcagatatcaccgctctatcagagagggaaaagtccaatgatgtgtatgtaggtcagagttccaatataaaagactggtatgtggccgctctttctggtaaactttctgattcataaactcaggagccaccattggacaacaaggggctgtatttggtgccacttgcaatcaatccacattatacctagacaactttgtgccttgatgctcactttctgtctttatctcttttactacatagacactttcaaccaaaggtgaagttgaactaataacacccttctttaataataccaaaatatctatgttatgca

SEQ ID NO: 219032 - DNA, 455 bp, Glycine max
  unsure (1)..(455): unsure at all n locations
acacaagtcacacaacttataagcaatgtcttgtctttgtacactcagcngcatagcttacccttcaagcctccgaggaacactactactcctctaacaagtcatgaaacccttgagtttcctgaatggatgagtgagggtgatcaatagttgctcaaagccaacccacaccgtgtgcgtgcggatgcggttgtggctttggatgggagtggtcattatcgctctatcactgatgctgttaatgcggctcccagttatagtcaaaggaggtatgttatttacgtgaaaaaggggctttacaaggagaatgtggacatgaataggaagatgaccaccatcatgcttgtgggtgatggtattggccacacaattatcactagcaaccggaattcatgcaaggatggaccacttttctaattccacacttggtaagaacaccatgacatactttgttc

SEQ ID NO: 219033 - DNA, 353 bp, Glycine max
tttatcatggatctcacatttttgttagcatttttcatatgttttattcgcaagcaatcgttatttgtataagcgatgcttactacatgtggcagccacataaacatgtcactggagcactccaatgataaattgtatatataatggcactattcttttgtttaagaaaaatacccggtataagattattttcatattaaaatagatagacggataagataaaggtagtgaagtttgagatgatttacaaaaatatctttttctaattgcaaagaacatgaatgaaatgcatcttttaaaagagataatattaaaaaaaaaactgcgagaagtgagagtttactgtccaaaaa

SEQ ID NO: 219034 - DNA, 450 bp, Glycine max
  unsure (1)..(450): unsure at all n locations
tgccgcccagctcgccctggcgagcaaagttgcttcttctctaacaacagccttctggaggaatcttctggagggcccaagtgggcctggtttctatttacaccccctttttactaaatgcaccccccttttctattattttgtaattctttttccgtaacgttacgaaactttacgaatttcgtaacgatacttattttccttccgcaaggttacgaatccttatggattatgtatttactcttttttggctttcaaagaagttacggaaactcacggattgcgctaaaacatctctattcgatatctgccacattacagaatttcacggattacgcaagcctgcttccttntggatttctgagacgtctcgggacttcatttattgcatgtcattaatccccggacgaaaataaggtatgacagttgcccctctttacttacctctca

SEQ ID NO: 219035 - DNA, 435 bp, Glycine max
  unsure (1)..(435): unsure at all n locations
catgcaagcttaagggctctntctatgttcaaatcaatatatngntnngattgttgctcttttatcaagcccatgcataaacatctaaattcatttggtatttgggaaagcccttcattgttttcattctcaatgtttccaaaaattccttatttgtgttctgatccaatctaaaactaagtttcacaaaatattggttgttgattctttccaaagcatgttatatccaagaaaaaattttatgtttaagtcccaaaaagagttatatataatctataactacactaagagaacaaaatatatcaaagcaagtataaattagttaaaaacacaaactcgggtaaggttctaaacaaaatttccaaactattaataacgtaataagttctaaaattaatagaaagcgataatgaactaaagacaagtccacatttt

SEQ ID NO: 219036 - DNA, 466 bp, Glycine max
  unsure (1)..(466): unsure at all n locations
tncaatctacaccaccatcgcacgagactttatctatatatgattctgaacgatgctcanaaagacatgcaatcaatgtttcttccatccagagaaatttgatgtcatcttatgacaatcaaaaaaatataacaactgcttctacatccacattccaagccagtaatgcttattccaatataacacaattagacattcacagagggtaattttattcttaagctattatcaaatatctacatgcacacattttatttattattacattcttttcagattttgttctacagtcaacttatatatagaatgccaaattggctgtttattatccagatgaacatcagagaccaactgacactacacaacatgatcaatttgtcggctatgacagctcacaattcaatgatgatgatgtcaatatgacacaggaaaacattgatataggtatttatccatcatctatatt

SEQ ID NO: 219037 - DNA, 417 bp, Glycine max
  unsure (1)..(417): unsure at all n locations
gctgcagctgtaagagaggatagtgcaaatttatctaanatcaaccatagttgagacagagaaatacagagtagccaagaacgaagataaggttgcacagagaggaagaacgaagaagccagacctgagtcggagaagaagagagtgtgatgaaaaattaggctcccattctaatatttttaaatcgaaatttaacatcggttttcaataaaaaccaatgctaaccaattgatgttaacgttaacatcagttttctggaagaaaccgatgttaacttatcatacatttaacatcgattttctaaaacaccgatgttaatgaactgacgttaacatcggttntttgaaaaacgatgttaactaactaacgtcaattcactaacattggttttttgaaaaacttgatgtaacaaataaa

SEQ ID NO: 219038 - DNA, 399 bp, Glycine max
tcttatccaaggcactctattggtggtgaatctcctcctttttggtttattcccttgtggatgatgcctcctctcacctcttctcctttatctttcgctaccactccatgattgaaaatcactattgaaggacctcattgaagttcaatgatctagcctccatagaaaattctcaagcaagcttccatcaacactgatgcttctattaaaaatctagaagtttaggttagacaactagcaaaatggttatttgaacatggaagtggatctttctcagcaaccacacagatcaacccaaaggaactttgtaattaattacaacaaggtgggggactatggatggtttgaacgataaagatgacaaacagaacaaagaaagagtttaataagaaaacgaga

SEQ ID NO: 219039 - DNA, 388 bp, Glycine max
tgcaagcttgtaatgaagatgaacataaacttattatcacttatttctggtcagatttcactcattgctcaatccaactccttgcggcttggatttccaaccctgattactgccttgtgcaaggcccgaggagtcacctcagattctcttaccttcgagtcactcagcctagccattaatttggcctatattaagaagaattgttggaacctggatgacccttttgtcacttttccaaggacccaaaaatccagggctagaaaatctgaggacccatctctctctgctccccctacttctgctcttccttcaccaccagcagctccaattctttcaggtccctccacttggagctcagagcctttcatgtttatgctacagaacctgc

SEQ ID NO: 219040 - DNA, 458 bp, Glycine max
  unsure (1)..(458): unsure at all n locations
ntgatggtgtcgagaagaaatcacatgtttgtcatcaacttaaaggtggagaatgtgaatgtatgtatacatgattttgatgatgtcaaacaaagaatcaaataaggctcattntgcttcaagattaatacaagattgtttcaacaaacaaagccttgattcaagatttcttcaagatcaagccttgcctcaaaatgtagagatttcaagtcatccaaggcacatgtaatcgattaccaatacatgcaatcgattaccaaggcacatgaaagtgtgtaatcgattacacatcatatgtaatcgattaccagagactctgaatgttgggaattcaaattttaaatgaagagtcacaactgttcaagaaaaacaactgtgtaatcgattacactatatttgtaatcgattactagagagggatttcaggaatatcgccaacagtcacatcttatcatttg

SEQ ID NO: 219041 - DNA, 390 bp, Glycine max
  unsure (1)..(390): unsure at all n locations
agcttgcggactataccttcgaccgaacattttcgtgtttctgtctaggcccggattcaaggcgggttgcagcaccggctccgcttccctaactgtactggaggcggttgcggaggctttatcctctatggttttctggagttttaacatgacctccgagatggaagccatttgatcttttaaggccgatagatcggccttcatctgttcctgcatgccctcttcanttatccattttctggatcgagtgttataggggtgccttggtgttttcttagttatgatgaaattcctaaagaaataaacaacggtgagtatgccaccaaaacatgagtatgcaaatggatgatcggaacacttggatccaccccagattttagataacgaatg

SEQ ID NO: 219042 - DNA, 407 bp, Glycine max
  unsure (1)..(407): unsure at all n locations
acatttttcatgttgttataatactcttagncgctggtggttaagcactacaacaagaaaccattgcctttggtgttagagcatatatgtgcaatagagatattcttctgatgatgattgaggaatttcataacttagtttcatttattctttcaggagtcaacaaattctaagaaaatgtctctacaaaatagatctcaaatacaaattattaaatgaaatcttaaatgtcaactctaatgtcatatcacatcatgatttgatcttgttaccgtctgaaatctcatatgcaaacttcgcagaacatattttgatagcgtataagacataacttttaactnttgtattngtttacatataattaagagtcataatttattttaaaatataaatatcttttgactaac

SEQ ID NO: 219043 - DNA, 294 bp, Glycine max
tattgcacttaaagtgaaaaatctcaccatggctatctacacaataatgcagattagatcaagactgcactataaaccttattatcatggcggggctattgctactacctaaaatgcttaatgacggcgctgatgaatatgaatatcggacccctgctacacaatctcatgaactttagattgctgacgaatggtctcaccaaatcttatcacatggattacctatgaactttggacgaattatacgaaactaattttccggatatatgttagctacacatcggcgtaaagaca

SEQ ID NO: 219044 - DNA, 403 bp, Glycine max
  unsure (1)..(403): unsure at all n locations
cgcaacgctgtcactccacatcgagctgcaggaaaagttatggatccagctgtttctgtaccgaatgcaaatggaaccatacctgtaatacaataaataaaatcacttaaacaggaaactaaaantttaagcacattcttgttttttnttttggtgtgcaatacttgataaagataaaccatgaaatggaaaggacctataaagataaaaatgaaacaaagaaagacaaaaataagtgcaggcattaatggaagataacctctgaaaagtacctgctgaggtgcttgctgcaggtccagcagatgacccaatagaaaattcctcaatattccatgggttcctagttctaccaccaaaccaaatattatcatatgccaatgatccagaaacaagctttgcaaca

SEQ ID NO: 219045 - DNA, 385 bp, Glycine max
  unsure (1)..(385): unsure at all n locations
tttactactaattaagagcatatgatagctgataaatatgtggacaatactatagagtatgtgtataattatacaaatatcttgcaatacgtggttgccttgctgatggtatacgaattataatattggttgctggtaagaaaaatcggctacaaatataataattagactaatcatgtttataagtaatcacactctggcattntttaattgagaaaatatagttgattttttttaataaaatgaaatatcctttgagtcttcgaagtaacgttgtcccctctattgattaaatggatgggtattataacaatttaattgcacatagtgaaatctcttggcgactactacgcactcttgtgaagaagcgtctattctattgata

SEQ ID NO: 219046 - DNA, 348 bp, Glycine max
ggtttttccctctccactgagaagactgattcacttgacctcttctccggctctgtgggatacttgcttcctcggagtttagtcaataactattccttctccattttcactccacagaccatgttggacttgaaggccattaccactggctgctgcagctcatagtgctcgtctcactagtagcagctttggccgcaacaattctccctactaattccaacgcggctcttgtgctgtctatttcagtcatcttccaaggatgtcggtttataaacatgggttttatgctatggatcccacctcttgtccctgaacggtgtgtaatgaatttggccacagcaagtggcc

SEQ ID NO: 219047 - DNA, 424 bp, Glycine max
ggacataggcatgacctacatgataattattaagtttgtttctaacttatttacctatgacagaccattttttaagccttagacaaacctgtttaaaagtgtgacctaatctggcctgaaagcctgtttgcatggcctattctatataagtgacaggccagtcggcctaactgggccaatgagcctaaacaggtcaatgagcttaaataggccaataggtcaatgagcttaaataggccgaatggtcttattcatttcctatgttatttgatgttttccaaagactaataatattaaagaaaaaaaaaagaaaaattcaactatcaataagtcacaatggtaaaaatgaacatgtggtcctctccaaaattaaataattcaaatctaactttttttaatgaatgtgataatattaatattcaaa

SEQ ID NO: 219048 - DNA, 458 bp, Glycine max
  unsure (1)..(458): unsure at all n locations
actactgcatggagncactgatttaactgttcgcctgatactgtatcaagaactaaaaggaaaaaagacacaatggagaacacacataagtctaaaaatatcaactccagtactaactcataagtcatgatcttataactagtacactaactaaagaaaaaaactatattgattgaagaattttgcaatgacatgaattgaagtgaaaagagaaaaataatttattcatgacagatagtctatctgtaattcttttattaacaaaaaatgtagtggtaatctccttatgtgttattaagtaatgtcagatagctaaagtttaggtgatagcttacaggaaccaatgaggcatgtagtaaacatcattatagaagctcaggggctgcttcagaataactacctgatattgaaggagtaatcacaccatcctcaatggccatacaggttcctatcatgac

SEQ ID NO: 219049 - DNA, 393 bp, Glycine max
  unsure (1)..(393): unsure at all n locations
aacgacacgcctggaactgttcgcatattgaacgaactgcgcgtccttttcagtaatcaatagatattatgacgaaatgcaacttcaattcttgctgattcgagaaacttacacaaatgacctgatattgaaaggaatattccctctctatacccgcagaaactgaacaattaagtgagaagttcacaccatagcataatactgacgcgctaaaagaactgaaaaatcatagttgaggtgccaacagccaacactatgactaacgcgtgagctcntataatacataaataacatacatgcgatggacantgttgctcaatcaagcgcagaagaaacatattcttcagagccatagttgaatatatcggagctgatcactggtattatctttct

SEQ ID NO: 219050 - DNA, 346 bp, Glycine max
ggatgagcaactcttttgatttagcctgtctattgaggagggcgacgcacgttatatgccacaggaaatccttaatgagaattatgatcacctctgcaaggttgatatcttcttcttgcgagcttctatttatgaactaattcgtatgttgcctttgccagaatcaggatgtcaatcttttaatcttaaacagggcaagtttccacttctgcctggtcattcgttgcatcttcaacacttgctcaaggtactatattctctctttccaacggtcttgatatctttcaacatggtggatgttctgcacgactgatgggaagtctactgtatgacttgcgggatactt

SEQ ID NO: 219051 - DNA, 311 bp, Glycine max
ctatacccacggggctaatacgatgaaacattatggtgatgaaacgaataggcgtgcctctcactgcttgaagcattcatatcttattcttatttttaaggcagaacatattatcatatctcggaagcatcatctgcgactcggctaaaggccatcgtcgtctttgagccaaaagggccccccaaatgcttgccgatgaactcaccgattaacatgacctcttcaagatcaactatcgttttcaccccaagtccaattaacatgcacacaacatcttcagtagctacatctcctgaatctcctcggcatat

SEQ ID NO: 219052 - DNA, 395 bp, Glycine max
agctagtttcttcagatataatctccacaactattaaacatgagaaggcaaagcaatcagaggagtccttcagaactgtcatgtacttaagctgctggggccccaactagatatcataagtccaataagaaaatattctttctcttttaatttctagaaattatcaagcttagtcccaaaggaagatgagggttgagatttctagggtcacattgtatagtatctgaagtttgttttgctcatgtgacaatcacgttgtaacatttgattaatgatagggtttagcatcgccaacattcatgtctccttaccttttttttctccctgccaatgccaaatttatgatgcgaaatatcagtagtttttagtggaaaattgtaaacaatatatgaaaa

SEQ ID NO: 219053 - DNA, 422 bp, Glycine max
  unsure (1)..(422): unsure at all n locations
tatgtaagagacaacactatgaactatacttgtcttccttttttcaaagaaacatttaaaagcgaaatacacgtgaattgatgttacctaataaaagtaggacataaaacaatctaatccaaaggtgtctttatagttcacataaagttgcacgttgcactaactgtgagaatgcttaagagggntgaaatgttcaattcattgtggatctctgtggtttcgttgaaatgttcaatttggcaagttaaatcacattaatctattgggcagaatgttaactaattcaaaacaccagctcaaggggaaaaatgaaaagttatatactgcgactaattaaccatacaaatggcttgttactatatgactatgagcaaatgtatcatctatgccaggaacacaatctgatgaaaatttttacattt

SEQ ID NO: 219054 - DNA, 352 bp, Glycine max
ttcaaaaaggaagtcatatctagtcaaggtctgagagaccatacaagtttcctaacgatttctaattatgtgggccattaagtctatcatatgctgacaatagccgagaagcccatgaatctcttcgggggcggagtaggtgtctgccatcgccttggccttggctaacaatcggagaagttcttgactcccgttcaaggtaagggcaaaccgatccatccacatggttgcctcttggtgtaaagagtcgatcacccttcctctagcctctttttccgcgtatacttgggcatactcatccgcgattctatgctcgtgggccatggctagacctaacccttcttggtacttg

SEQ ID NO: 219055 - DNA, 405 bp, Glycine max
  unsure (1)..(405): unsure at all n locations
gagagagcnatcntatccgagaggataaaattactatatctcacactcctatctacattacagcttaacagataataaaaaaatgttaaccaactaactcctacctatcactaaacaaggtctgaattgactccaagcttcaacaagtatcctatgtatgcctctaaatggttttggagcaagttcttggtaggctcaatggggtggagtttctgttgcaaatgaaaggcaaaactatgatgtttgagggtgactcactatggcgcaaccaatggcagtcactgatttgcatgatatatgatgtagctcctcaaacacaaacacaattggtcagaggggaaccattctcaaccttcagattcttgtgtagtgtgaacacattaattccttctgagcaatcataat

SEQ ID NO: 219056 - DNA, 374 bp, Glycine max
  unsure (1)..(374): unsure at all n locations
taagctccttcaactgcacatagctcagagaattgaagtatttccttgnggaaccctcacccgactaagacactgacaaaaacttatcttctccctcatggacacagtatggcacactgggggcacagtaattatcttcccatcataccctggatgccactgtgatcttatacctatatcccccagcactcgaagggtaatcaaaccatacctcggcttgccttgaacgctaaagagtgacccaaacacactggcacaaacattattctccacatgcataacatccaaactatgtataacgncaagatcacacaagcgctgaagaaccaagacaacggacctctttatccatatgcacattgactatatcctac

SEQ ID NO: 219057 - DNA, 368 bp, Glycine max
aacctttttataaatgactaaacacactaaactctgcctaatagtgatagcttgtatagcaatgtccaagcttcatatctttgttgtcacaattatacacaaaaataaaaataagaatgaccttgtttcgctaccaacactaatataaaatacattgctcagaagaatagatgaagcaaaatggtgaacaatatatctcactttcaatccatccactgcgtataatgacggccaataaatgtgccaaacgctcaaaatcatacacaatgcacaaaccccaccactgcccttacgttaactataaacgaaactgcgtttacataacggtatatctcttctatgtaaattcaaactgaaacaagctcaat

SEQ ID NO: 219058 - DNA, 422 bp, Glycine max
  unsure (1)..(422): unsure at all n locations
tctanactntatanaagaatgaagctntgataccacttgttatactagtggcttcagttatcttaagaaggagggttgaattaagatacacaagctatcctccaattaaaatctaacttcttttttattaacaatgcagcccttattatgaattattctaagaacaatgcaaaaacaaacttctttaaagcaaaatataaacaataataaataacagaagtttaagggaagagagaatgcaaactcaatttttatactagttcggccatgccctgtgcctacgtccagtcgccaagcaacctgcttgagatttccactatcttgtaaaatgtcttttacaaagtctgaaccacacagggacaaccctttccttgcgnttagaaatccttacaacttaagagaccctntgtcccttaatcaat

SEQ ID NO: 219059 - DNA, 304 bp, Glycine max
ttggagtttattgttcctttatcaacaacacactatgaaaggattaatttctaagacacaaggcaactaaattgctgagcaagattatattatccgcattctgtttgctacacctctgcttgaaccttaagaccattaatccaagaaatggaataaagtgttcaattctccaatgaagtaaattctggttattctgagaagcccattgttcacatataggttgaccacacccagccatatttctgataagcctatgcataccctacagtatggtacccagatggactgcgtggactacatttgt

SEQ ID NO: 219060 - DNA, 388 bp, Glycine max
ccaaggagatgcagcggttggcacccgacaagaggagaggcgaggcaccatccactatggaataagccaaggaagaaagagcttccccaccaagaatggccttgtataagaatcttgaagaggatgctttaatggaggaaaataaagagagaaggggagagcacgtatttgaaggaataaaagagggagagaagtggaactttgaagtgtatctcataagactttcatccatcaaagtcacaacaattgttacacatgtttctatttatagactagcgagcttccttgaaaatcttcctggagaaaacgttcttgagaagcttctgtgagaacacttccttgagaagctagagtctagctacacacactcctctaataactaagctca

SEQ ID NO: 219061 - DNA, 466 bp, Glycine max
  unsure (1)..(466): unsure at all n locations
aaacattatatgcaccaaatgatcctcgtttatcagatgtatatcatatgaatatctactcgntatgagacaacggatacatgatgatgagacctacataaactggaaacttttgaagactgaacatgttgtttgtgagccaactttgacttactcttcttattcaacaagactttttgtattttcttgtatgattagagaagtctcttaaaacaccttgaacatcctgagagaataggactaagtgcttacattgcttatgctaagatgattctgtgttattctctgagcaatcaactacaaatcttgtctgatttgtttacagtcaggaatggctcgatataacaaagaatactatgcgtcgatcanactctgggtatacgtcgatttgtaagacctagagtagttgcgacaaatacttggcactattgaaaagctagcggaacttggtgattatcaataattg

SEQ ID NO: 219062 - DNA, 325 bp, Glycine max
  unsure (1)..(325): unsure at all n locations
actatgggaagggggnaattttgttcntgttctaacgcgagcnccgaccacagggcgtccttcccgcgaagcttctttccatctccgcctgagtgggtttatagcctaaaccatacttcccacgattcccttgggtttttatcaggctaattatgccgncattgtctttgcctaaacccatcccgggttcataaccgttccccaacataactcgagccatcattaccgccgcatcggacagacaatgttgcccaaagagggattcccacgaggaaatgctgaccacctcaaaagactggaaagcggtttctaacgattcttctgc

SEQ ID NO: 219063 - DNA, 454 bp, Glycine max
  unsure (1)..(454): unsure at all n locations
acggaagaaaagaaaatcgaaagtgaacgatgtgatgatgattttcttacnaaacancaaatgaaatgaaattctcgaacttgaacacttaccggttaaagaccgacgaacgaacgaagaacggtgaacaacggtagaaaaacttcacggatcggctcacgataatgtctcggaagcggtacaaaagcacctcagcttggatattcttcacgaaaatacgtctttttttacttaaaacagctgataagcatagcataggggtgaaggatcctttggaacagcccttctcgacctatttatagaataaagggggtggagcatgccgcctagctcggctatgcgagaagatgtgctcctcgcgaagatacctgatgcactccccaaattgataagataaccccctctttcatactttacggaaacattacagaagcctatcagacatgattttctt

SEQ ID NO: 219064 - DNA, 417 bp, Glycine max
  unsure (1)..(417): unsure at all n locations
ataaccctcacatagaaaataacaagtgttcaccttagtctatacatgacggnnncggaataaaagcgtctttttttttacccatggaataataatgttaagatagaaatttacaacaaaaaaattgagaaggggttggcattgtttaaaccacacattccctcatggacagttttagatctgaaactcattaagtaactggaactgatcttcactgaactggaattaaataagagaaaaataacccaaaaaggaatgatgtctccactacaaactgcccattcaaatgtcatttaaaaacttgtttattctttccactgcttttggcatttgctagacatgataagacacggcagacaccacaagtacattatgtctattgtaagaaaatttaaaaatagaacccccaaactcatt

SEQ ID NO: 219065 - DNA, 384 bp, Glycine max
  unsure (1)..(384): unsure at all n locations
atgtaagagacaacactcactgactcatgtaaagatgatgttactgtagaatctgttattccaccagctctcatattggcacgaactggtgctccaaaaccaataaaagaatcttgtcgtctgagttatttgatatatcgtataagatagtacagcagaaaccaagtcatatgtaaaccaactgtgatttatgagctaatttttntgcaagacaaaggccaacattacctctccgaaatggttgtttcaagatcaataaatgctccaccacatataaaacagatatattttgtgtccatttgataagatcaaaaaataatggagatattgacaactacaagtgttctaaatatacgtaactgatctaccctttggactgtactg

SEQ ID NO: 219066 - DNA, 361 bp, Glycine max
tcctgctataatgaaattctaatgtaacaatacatttcccaatgctatagtcacctaactatgcatacaaatggatgatcagaccaaaagcatacaaacattaagcattgaaggaatcattgaacacaaaaaacataatcaaatagatattaagtatttacatcagctgttcattagaaatcctcaaccagggtgtttagccaggcattacaaagaaaccctaacaataaatgagattaaaagcagagaattatagttcgttacacaagaaggattcctcctcctcttctcagcatctcacactcactctccaacgaactaatctctatcaaattacaaaacccagacttcaatgcacaag

SEQ ID NO: 219067 - DNA, 436 bp, Glycine max
  unsure (1)..(436): unsure at all n locations
tgactaacagtaaacctcaagatattagtgaagacgatagtatttagtaagggagtataagggatgagtttgaggcacaagcttatgatttgatggatgtagacctaagcatagaagtagtaaagtttgataaatatcaagtgaggttaaagccatgagaaacgaatgaatgatgaagtgttcgggtataagagtataacctaattgtagagttcttagaagactcactgagacattatgtctcacccctttaagttcccttcttttcagcaaacaagtgatgatgcatgttgtggaacatggagtcttgttatggagaacatagtttagttacgctctatgattatatgtaatttcttttatatgatgtgtgagacccttgatacanaggaggatttgatntattcatatataattaagtataatttgatattat

SEQ ID NO: 219068 - DNA, 404 bp, Glycine max
  unsure (1)..(404): unsure at all n locations
cccctcaannaaaggactgcaagggttgagaagcgaaatcgacaatggggtataattggagcaaactctcacttcacacaagtctataacatcaatgtaaacttgctcaaactggatttacacctaaaattccaccgaatcaaaatttgactcctcaacacccaattttaccctagaaatggctctttgttcactttggtcatttgtctttcactctagcacagcccaaactttctcataagtcctaaatgacatttcaagctaggattaactcactttaaccgccaaataccactaaatccagatgtggccttccaactctcagaaactcactcgtttccactcagaacaccatattctcactntctaaccctaggttaactctaccctttatccctagcaat

SEQ ID NO: 219069 - DNA, 444 bp, Glycine max
  unsure (1)..(444): unsure at all n locations
tccatcacatctggaaactgtaatagctctatgtgtctatttaattgattattccgaaaccatggaagcttgagaagctctttgtgaaacgagataatcaagtaccacaatttgtaattgattaccatgtttttggaaatgcggaacaaagaggaaatttatcaaattaatcaattaccacatttgataattgatgaaatcagttttgtttgttaaaattataaataccatttcttgttctttcttattagagacttttgattcgatcttatcttttaaaaagtgctntctgagagtcatctatgtagacaaaggatcaagctgaatgttttgatgatgccaaatggaaagcttgccatagggttacatcgtttctanagctttattcaagacaaagatattcaagatggatgatcaagatagtttctacagtcttataaagag

SEQ ID NO: 219070 - DNA, 336 bp, Glycine max
  unsure (1)..(336): unsure at all n locations
catgcaagctagaaagagcccttgtattctaanagaatgttaagnncctatcnctcaaagtctgaagagagtatgatgaactaatggacgttaatatggccaccgatgaagccttggaatgagaaaccataaaggccctaaaggaataacacgaccaaaacaagttttgatgggctttatagggcagcaatagtgagctcaaactctgaagaggtgaaaggaatcatcatggttcaaaggcatgatttggaaagacgagctaaaggctcgccttatgtcgaaaagaaatctgtcccaatagttaaagtgagactgaagggaatatgtgggtcatca

SEQ ID NO: 219071 - DNA, 255 bp, Glycine max
ctgatatagcaaaaacaaggaatacccgtgggaggcctctgtcaatgacaaaaaaacattgtgaaagttggcggtcggcggtcggctcttccctaagtgggaatatcctatacaagaggaaccatgacatggggctttttcgatgtatggacgttcaataggctacgcacatgcttgtccatgtgcctgaacgatcattggaacacatgccttgcccgcaaaattctgagagcgaggtatcattgcctcactata

SEQ ID NO: 219072 - DNA, 384 bp, Glycine max
  unsure (1)..(384): unsure at all n locations
tctccttccatggcttatattctaatggatggcgcctcttttcttctcttctcttttatcttccgctgcaactccatggctgaaaatcaccattgaaggactttattgaagctcaaagacctccatagaagcttctcaagcaagcttccatcatgcggcctccacttgctagacaaacttcgtaagattttatcaatgggttcataattatcataatgtctacctagagagcataactcgttcagaatggtttagaaggtgtntcttacgtgtgagttgagaaaaaatctggagttattatcatctatccatttggccttgtggatctcgctcttctaagcatctagaggaatgtgattgcctctttctacaacatctcacata

SEQ ID NO: 219073 - DNA, 404 bp, Glycine max
  unsure (1)..(404): unsure at all n locations
gcatgcaagcttgtgtttgctagattagttntcagtcttattatctaagactgacaaatcgaaagtgggtaaatcaatctctttcattctctctacttttctgaaattctgcttgtaaaactttcttgcagcccctgatacgttggaaaataagactaaaaacattgacacataatatgcacattttttagtgcctaatttcttgtaatagatgctaaataatatgcatatacatacctggatttttaattatccatatccacacatatatgattattaatccaaaagtagtcacaccaacagtgattgctactgtctttatcttgaggtttctatggtcagctgtaatatgatcaaaatgatgcagagcaagaatactcaccactcttactttaacagtttta

SEQ ID NO: 219074 - DNA, 384 bp, Glycine max
tagataccaccagcatcaaggaattatggcggttgatggttcccctccaaatgcaagccttccgcaagatttacggaaagatcttagagttgaccatagcagaaatatccatagaagccattgcatcactcacccaatactacgaccagcctttgagatgcttcacgttcggagacttccaattggtaccaaccattgaagaatttgaggaaattctaggatgtcctcttgggggaagaaaaccatacctttcctccgggtgtctcccctctttgagcagaattgcaactgtggtcaaggattcagcaagaggtttggaccgcataaaacagactcgaaacggcatagcgggcctaccacggaagtacctagaagacaaggcga

SEQ ID NO: 219075 - DNA, 439 bp, Glycine max
agcttgcttgcttcactagcactcgccccttattgttgttcactcggtaaaaaaaaaattgtttgatacaaatcggttactctcccatataatattgaagaaagaatctctggtgcatgagatattgagattgcttaccaaaatgcgaactacatatcaccttattcatgaaaagcttagtagcaaaaacagaacaaaatagagaaagccaacctatgcatctcatctcatgtgaaaagaaacttctcatgatattagagggaagaataaaaagtatttcttagggttatggatatgatgtttagactttagatgcccatttgtcatttcctcttgacctctttgttaggaaagtcaatattttatgattcttattatttattataagagttaattgtatcccatgattcttgtctaaatatggaataatcaatatata

SEQ ID NO: 219076 - DNA, 431 bp, Glycine max
  unsure (1)..(431): unsure at all n locations
tccgtanatgcaaaatgctaataataaaagatacacactattaatccttntaaaattcattctcccttgtattttgtcaaatgcacacattgtttgtctgctgtttcttaaaaaaaaaaaaggtattgctttgtgcaattcgtccaaccagtcttgtttataatatcattgttcttcgtaatttaatgctcgataaattaacattntttctgaaatatttttttattccagttttacaagttggcaaaatcagtgcattcaataaatctttttttttaaatcctatataaaattatattctcactaatatcataaattaatcatattgtaagataataataatatttgctttttctcaaagtttacacagtttcatctcaaactttctctttgtaactaaaatctttggtgtcatattctcaaactgtaac

SEQ ID NO: 219077 - DNA, 373 bp, Glycine max
ataggaagggaattcctaactgaagtagcaaaaggttggtttggccaagtaatttaagttaaaaagtgtttttcaagagatttactctctggtaatcgattaccagaagatgtaatcgattaccagtgaccaaaaatgatttacaacagctattaaaatttgaattcaaaatttgcactgtgtaatcgattacacatatatggtaatcgattaccagcagttattgaacgttttaattcaatttttaaagctagtaatcgattacacacatgctgtaatcgattaccagaggagattttcagaaaatattctcaactgtcacatcttttcatttggttcttgaatggctatcaaaggcctatatatatgtgac

SEQ ID NO: 219078 - DNA, 429 bp, Glycine max
  unsure (1)..(429): unsure at all n locations
ggctcttacaagttccattaggcctcacccaagtaaaaggtcttatccatgcaaggaacatcctccacctccatatcagcaagccattcattaaagtcttgaatgatttgagagtctgaagtagtattgttagctccctatctttctagaggatgcctaatacagttaaagtccccaaccaagcaccaacaagagtcttggaattgtaattttctagagctaagattctgccaaaggtgtctcttcccagcatgatcacagggagcataaatgttgatgactacaactctntgcatttgaggtagccatataccacccagcataatgaaatctttgtctgaaatccttacatcaacactggaattgttgttgtcccaaacacataacaaaccccctgcagcatttaacgcaggctgccattcccaatct

SEQ ID NO: 219079 - DNA, 394 bp, Glycine max
  unsure (1)..(394): unsure at all n locations
actatcacaatactcagcttgggctctgnggngagcgactcggacaagagatgagtgagttatggctgtttaaccatctgcgggcgagggctctcgagagaaacgacagttgcagatctcatactttgaaatttgaatatataggtgcagggacgcgttgtaatcgattacacaaatatgggaatcgattactagtgagcaccatagccagacataattgcttgccattgattacattattatggtaatcgattaccttaccacaggttattttagctacaaaacacatgctatcagaatctttagaaaagaaggaatcttgaatgattatcacaatacaactatattacccagtactttatgaatgattcttaatcatgtatattacatatca

SEQ ID NO: 219080 - DNA, 388 bp, Glycine max
cactgttctctctttcgaatttgttgaggaaaattagttccgtgaagaaaattcaagtcgaggcgctttcgtaacgtttccgtgagtaattacgcgaagattctcgaccgtttttcaaagattcatcgttcgttcttcgttttcttcagtcttcaacgggtaagtacctcaaaccaagcttttcaattcactctatgtacccgtggtggtccacattctgcttcatgtatttttattctcggtttcatttactttttatacccgcctttgacgtgcttaatccatttatgtaagtcatgtctcgcttaatctaacaataaaataacatttccaccgatcgtctggattgtatcatccgttaatgttggtaaaatgaattctgaccgtt

SEQ ID NO: 219081 - DNA, 251 bp, Glycine max
  unsure (1)..(251): unsure at all n locations
ggctgctgttctcgcanntcccgtgagcttgagggtttttgaagttaggcggtttattnttcggngaagaacacgattcctcctccaccccattatattttcgtacaggggttgctcgcccatgcgagctcatctcacccagtcgagcttacctgtacttttttttattttagaaactttatccttgccttcccttcctacgggttatcgatagtctcctcgacactacttaaattataattttgcgtcta

SEQ ID NO: 219082 - DNA, 457 bp, Glycine max
agcttatcgatatgttatgcgccaaaatcggacatccgagtgattagttatcaccatttgaatttcttatgagcttccattgttcaatttcgagtgtctcgatatgttatgcgcctcagtcggacatccaagtgaaaagttatgaccatttcaatttctcgtgagctttcaatgtttaattttgagcgtctcgatatattatatcccagaatcggacatccgtgtgaaaatttatgaccattgaaatttcttgagagctattgtcgttcacttttgagcgtctcgatatgttatgcgtctgaatcggacatccgtgttaaaagttatgaccatttcaatttctatagagcttctgttgtcaatttcaagcgtctcgatatattatgtgcctgaatcgcacatctgagagaaaagttatgaccattggaatttcaagagaagcttccgtgttaatttc

SEQ ID NO: 219083 - DNA, 451 bp, Glycine max
tcatcaagtattcccattgaaaaacctttgttcacaccttctaaaattagcgataaagctaaacgtaaaattagggaacttagaaaaaacaagtccttaatcgaaggagtaggtgacaataatagtgaattattaaataaactcgatagtttacttaaagtcataccagaaactcctcaaacttttgaaaatacatcaaaaatggtaacaagaagtacctccaaattaattaatgtcattaatgaagacagtgaccaaaactcagaatacacaactgaggtaggttccgtatcagaaaaagatataaatccaattaattccagacactggaaaacaccctgcaagttatattaccaacgtgccactacccttgaccttctattagaagacagaggtgataacaattttaaaagatttagtgcaaacaacatctatgattgaaacatagatg

SEQ ID NO: 219084 - DNA, 284 bp, Glycine max
cccagaagaaccgagcgctgcaaagggctcccaccttcgaacgtggatttctcaaaatggttgcagtcaaagacacttgtcccattgaccgtgggactctgagaagcgggagggcgcaactccattccgaacattttcatgagcgtcagctttgtttggtactaagaaaacatattttttcttttttttcaagcattctaagccagcctttttataccaaccaccattaccccaatgcgtgcttgtggacccaatgaagacccttacgaacgaatctcattgct

SEQ ID NO: 219085 - DNA, 280 bp, Glycine max
  unsure (1)..(280): unsure at all n locations
agaccgggcaacccccattnctctaatgataggtttaacttcaacacaacagatgtgggcctgagaattatccacacttcatgcccaaacatctcttgcatgagagggaacgttaattgtaatatccgaaccattcacatgttttcactaaacagcgaaatccttctgggattgcattacatgacaacaataactcgaagcaacccttttatttttacctacagaagtcactttattataaaccaaatgaagatgctgaccacagcctagcagcgaatat

SEQ ID NO: 219086 - DNA, 464 bp, Glycine max
  unsure (1)..(464): unsure at all n locations
gcaagcttcaccaaaaaacttgtgtattggagagtgttctcaagtttgtaaaaaaaaaaaaagcttgtaatctaattcgataatgaataaacattgaaaaatttcataagcatgcagaacatgtccacagctgcaacacaaactttttactcgatgaaattggtttgtttacattggttgtagaatccatatagatcccacaccaatgtaaaatgagaagactttcttcatcatttaaaatataaccaattgtagaaataaataatatacaaggcaaaagttctagaaccagcatgtctagaaaccttaatcaaattctacaaaaacaaatatacccattctcaaactcactccttgaatccccttgcgtagttttccatggcctcgaattggatatccttagaagcctttagcattgacttcctcccatcttttgtnttcaattacaagggtgaaatcacaca

SEQ ID NO: 219087 - DNA, 415 bp, Glycine max
  unsure (1)..(415): unsure at all n locations
ntgcggatntggtcttcgctggcgaaatgatcgaagtgggtctaaaaagaggcaaatctgatcatcatgctttgataaatgcaaaaaactgnggcaaatgaagagggtgagaatgaggaagaaacccatgctgtgactgccattcctatacaaccaagtttcccaccaacccaacaatgtcattactcagccaataacaaaccttctccttacccaccacccagttatctgcaaaggccatccctaaatcaaccacaaagcctgtctactgcacttccaatgacgaacaccacctctagcacaaacccaaagcaccaaccaagaaatgaattntgcagcaaaaaaacctgtagaattcaccctaattccgatgtcttatgatgacttgcttccatatccactcgataattcaatg

SEQ ID NO: 219088 - DNA, 439 bp, Glycine max
  unsure (1)..(439): unsure at all n locations
cagatttattaatgatccattttctctanaattaaaataacttaatgccattaacctagggaattaaaacaaacttaatggctgagtgtaactgaaattgttggcaaccaaaagtcaccctcaacagccaacaagtcagccaccatttggtctcccaaaaggctgatgcctaggttgccaattgggcccttattccaacttgaactaaagcccttttagttgattaacccaaaacatatttttggtcagccaactttacaaggattgcgccattatttatacaaactaaacactctaaaattgaaataaagtggtgtcatttagtcctccatttgggccatgatacaactcacaacctgggacttttctcttgaaactcggcttgtattcaatagtatggacagacttgttgaagacttccttggctttcttgctctac

SEQ ID NO: 219089 - DNA, 401 bp, Glycine max
  unsure (1)..(401): unsure at all n locations
ntaactcggatgtccgagtcaggcgcatgatatatcgagtctcttgatatngaataacagacgctctcgagagattctaatggtcttaacttatcacacggatgtccgattctggcgcatcatatgtcgagacgctcgaaattgtacaacggaagctctcgagagattccaatggtcataactttttactcggacgaccgactcaggcgcctaatatatctgagacgctcgatattgaacaacggaagctcccgagaaattcaaatggtcataactcttatctcagaggtccgatacaggcgcatattatatcgagatgctcgaaatggaacatcgaaagctctctagaaattcagatggtaatatactttcacttggaggccaaatcatgcgcattatat

SEQ ID NO: 219090 - DNA, 386 bp, Glycine max
catgcaagctttaggtttattatatgcatagatgttattatactcccacattataataagcatctattctaaaataataatatatataagatttaaaatgattataaatggactagaaagtagcacgcttcatcactaattacatgcagctgtctatttttgaaatcccgtgaccagagatatacaccatatcccaagcaagcagacttattagagaagatgagtagaattactccttgttctgttataactacagttagctatgtcagttaacctcaactaaccttaggttggttgacaattactactgtcagttacaatagttgtctaactctagtataaatcatagagctggaacagacttcagttgagttgtagttaatatc

SEQ ID NO: 219091 - DNA, 410 bp, Glycine max
  unsure (1)..(410): unsure at all n locations
tggacgaagaaagagatgaatgaatggagagagagagaatttcntgattatttgtgctctaaaagagctctgaaatctgaagttaatattcaaatgatcaaagctgaaaaaaaatgcacacacatgacctttatttatagcctaagtgtcacacaaaattggatggaaacttgaatttcaattcaaatttcactttaattcgaaattgaatttgtggagccaaactttggagccaaaattttactaattatgattagtgaattttatgtatggttcagcctactaatccaagatcaattccaagattctccacttagtgtgcttatgtgtaatgaggcatgtatagcatgaatgacatgcacatagtgtgactatatgatgtggcaatggaatgtagaaagcaaatgctc

SEQ ID NO: 219092 - DNA, 424 bp, Glycine max
  unsure (1)..(424): unsure at all n locations
agctgttccatccaactcttctaagnctaaactatataatagatagacagagtggttaattagaggagttagataagccacaggactctcgaacatccaagagagtgtaatctattgatgagaaattatgccaaacacccaattagggatgcgaaatattttcctaattgtcgaaagattagtgacatcaaattggttctggaatgaaaatgttcagtcatcaaataatgtttaattttatcctagaaaaaaaatctcctgattactttgatctaaaaaataaccacccaacaaacaaattatgcaataacaatcttttaagacaattcatgttctaaacatgaagtccaaactaggggggtttagtcattctaaaatttctaaactagccaatgtttacattctgtcaagaacaattaacata

SEQ ID NO: 219093 - DNA, 450 bp, Glycine max
  unsure (1)..(450): unsure at all n locations
ntcttgctctctntgttctccatctaccttgaagctgtatgttctccatctgaccatcattntgtctaaggtcgagcatcgtgttcgtcacactcgagcatcgtcagaagtctgtgcttcttctccttcgccacctcacgtaggtatgtttggtctaatcctgtatgaatatttgattacattcatgtatcgcacacttagtgaactaaacatggctagggtatctcatatttaactcgagcatcgtgacaactttgtgcttcttctccttagtgaagtttcccttacccttattgtgttcttgtaacagtttaagagttaacgcctattattggagtttaacagtttcccttaaccttattgtgttcttgtaacagtttaagagtttaagagttaacccctattattggagttaacagtttcccttacccttattgtgttcttgaacag

SEQ ID NO: 219094 - DNA, 357 bp, Glycine max
  unsure (1)..(357): unsure at all n locations
agcttaataaatcaatatatggctngaagttttcctnccgccaaaggtatctaaagtttcatgatgttatcacttcattcgactttgaagagaacatcatggatcaatgtatataccaaaaggtcagtgggagtaagaattgctctcttgtgtcatacgtggatgacattttgcttgcaactaatgataagggtttgctatatgaggtgaaacaatttctctcaaaaaactttgatatgaaggatatgggagagacatcttatgtcattggcattaagatccatagggaaagatctcgaggcattttgagttcgtctcaagagacttatattaacaacagtttagagagattaacat

SEQ ID NO: 219095 - DNA, 359 bp, Glycine max
  unsure (1)..(359): unsure at all n locations
tctagtagcgatcgacgacgatcacaagaaccatcanctatgttgtggaactctaaggccatgttcaacctcttttgcttctctcattgattctcctctctttcctatgcctctttcaaagttttcaacgatctgaaaaatccatttaggaggatactttctcaggcaaaatcaccattctgggttacttttagaaattatttaccagaatgggtctctttgctttttatttactaaggggtgctgttttgcagggaaagtgcttacctgaggggcgctcaccggaggaaggcgacacgtggccgctgctgcaggcagtgctacatgtggtgcatacggtgctggaaacgccctgcaca

SEQ ID NO: 219096 - DNA, 309 bp, Glycine max
aaaatacagttattctcttatttacgagaggacctcctaactcttgatgatcaagacacctggctgatcaaagacttcacaaccttggtgttgcctcgtggaaaaggatctttccttcttcatataccttgtctttaaacacattccgaaaccccttgcccaaatattcgggcctaactcctttaccctcacattaggatttgacctaatgattaaaacaaactcacctgttggaaccctcttgagcctggtcagtttgcttcttatctgcaccccctacctctttcctccttatcttatgccacccct

SEQ ID NO: 219097 - DNA, 418 bp, Glycine max
  unsure (1)..(418): unsure at all n locations
attgaacaaccgaagttgncgatatattcaaatggtcataacttatcacacnactgatcgattcaggcgcataatatatcgagacgctcgaaattgaacaacggaagctctcgacaaattcaaatggtcataacttttcaaacagaagtctgattctggtgcataatgtatcgagaagctcgaaattgaacaaccgacgctctcgagaaattcccatggacataactttccacatcgaagtccgattaacgcgcctactatattgagaacgtcgacattgaacaatacaacctctcgaggaatctaaatggtcataactcgttacacggaatgtcgacttatgctcactaattatcgagacgctcgaaattgatctacggaacttcttatgaattcacaggccataccttgtacaccg

SEQ ID NO: 219098 - DNA, 84 bp, Glycine max
catgcaagcttgagatgaggaagtgttgaagggcgaatcttcctgcttttattgctgaccacttagtggtccctcggagatatg

SEQ ID NO: 219099 - DNA, 355 bp, Glycine max
  unsure (1)..(355): unsure at all n locations
tctcaaggaagttacctagtctataaatagaagcatgtgtaacacttgttgtaactttgatgaatgagagtcttgcgagacatacttcaaagntccacttctatacctcctttattccttcaatttcgagctcccacctctctctttctctccctctttcttttcctccatngaagcatcctctccaagcttcttatcccagggtcattttggaggtgaaactccttattccatggatcattcttaatggatggcgtcccctctacctataatcttagtaatccctgcatccatggcgaaatcaccattcatgacccacttgagttaatactcctcatcatacaaacccccacgc

SEQ ID NO: 219100 - DNA, 403 bp, Glycine max
  unsure (1)..(403): unsure at all n locations
agcttgtggaactaagaatgtaataanggttgccgatgtgagttttatttcttttaataaagtctttatctcatagacgataaaaaaaatatatccaatatttgtcactatgcttaaagcatataattattaaccacctatatatggtaacatttattgataatttgagctgttttctatctcactccatatatataaaaaagtttggttcgcgtatgtggtcaaaattgctcttccattataaccattgaaattatttatacatatgtaatgtaaatactataaatcattaccttanatatatatttacgtgttttaaaataagagacgtttgattttgattttagtccctttaaacaatatttatttttatcatttacacttgaactactattttagtttt

SEQ ID NO: 219101 - DNA, 328 bp, Glycine max
gattctccgcatctgggatgctactttcaccaaagaaattcactctggacaaaagaacctagttcaacatcacataatgcataaagagaagatctatcacacaaaattaatatgccttattcattcaagagctacccaggaaaggtgaacaaacggagtctaatttcaccatcaatccaattaaaatttatggtcggcatagttcttaaggcagttggtaaaagtcaccatactcaacatacatggtaatctctgattgtaaaaaactcgatgaactatatactcaaaagataaaacactgcatcatacttggtacctgagttgcacc

SEQ ID NO: 219102 - DNA, 206 bp, Glycine max
gcatcaacaggtaccttaccacatttgactcttctgctgaccctatcatgctgtccctgtgttgtccctctaatatatataactttcatgacttctacaaatacatgtcaccacctaatatctgtattttgatcgggtagcacgatgacaacacacaagccatatccttttcttccccatagccttccttagaactcttgatatac

SEQ ID NO: 219103 - DNA, 387 bp, Glycine max
  unsure (1)..(387): unsure at all n locations
gagtttganaagaggcaaatctgatcatcatgctttgatgaatgagaaaactgcggccaatgaagaggatgagaatgagggaaaaacccttgctgtgactaccattcctacaaggccaaatntcccatcagcccaacaatgccattactcagctagtatcaacccttctcattacccaccacccaatcattcacaaaggtcatccccaaatcagccgcaaggcctacctactgcacgaccaatgccaaacaccacctttagcacaaaccgaaacaccaaccaagaaatgaattttgcagcgaaaaagcctatagaattcaccccaatcccggtgtgctatgcagacttgctcccatatctactcgataattcaatggttggcataac

SEQ ID NO: 219104 - DNA, 439 bp, Glycine max
  unsure (1)..(439): unsure at all n locations
ctaagcttatagaccgaccacaatgacaaacagtttgctgtcgccgtttctcgacgacatgaacgttaggctagggcgcgagagtgaggccaccacatttgaagctaatgtgaggctgaattgaaagaatacactatacgcttgagtgatggatttgtggtaatagcaaacagtggacaatagttcggtgagggaggatttcaatctaaaattgagcgcgacacaagacaatatgagaattatattatatatttaaacttaatgatggtgtataaataaaactgtctttgtatggcatgttttctaagacaattnttaccaaagaaccatcttaaataacttccacttaatttataaaatgtcactgcgtagcctactaagatggtcttataggcaccgtcgctgaaacttcatttacagatggttttagaaaccgtct

SEQ ID NO: 219105 - DNA, 346 bp, Glycine max
cccatttgaggagggttttcatgtcatacaatcataatgacttccaattccatttggcattttcaactttacaggtctaaatatacgttctgcgagactgagagccacaccgtataattatgtggttcttctaagtaaatgactattggtctcttagaagttgccaccgaaaatcacacctctttctctctcactcaagtctgtgtgatgttgataagcacacacgagtgagatgattatgaggttcaatggttacgaactgtataagcaatgataaagtattaattattattatcattataagaaaccatggagggagggtagagtttttcctaaccgattgact

SEQ ID NO: 219106 - DNA, 356 bp, Glycine max
  unsure (1)..(356): unsure at all n locations
agcattatggagaatcataggtgattcaatggtgttctgatgataacaatgatgataacaaaagatgatgataaaggtgatgacaaacaactcaaagatcaatcaaagaacaactcaagtgaatcaagaacaattcaagagttcaatataagaatcaagaagaaagtttagagtcaagaatcaagattcaaggttcaagatctcaagaatcaatatcaagattcaagactcaagattcaagaatcaagagaaggcttaatcaagataagtatgagaaggttcttctcanaaattgaatagcacatgtgttttctcacaacatgtgtaccaaagagtttctactctctggtaattga

SEQ ID NO: 219107 - DNA, 394 bp, Glycine max
  unsure (1)..(394): unsure at all n locations
tgcaatgctcgntccatagaaccctcaaccctctattttcttctttgctcctgcgcttgtaaaacatttacaagtcttgccaaggtaagttttaacagatctttagtattctccaacgatgtaatagtagcctcaaatctttcagggacaatcattggtattttctcaactattctcgagttggaaaattagaaccaagcaatcttagtttgttagcaatgctaagaagctcgttagcatactctataattgttatggactccttcattttccgcatctcaaattctctaaccagatttacgggttgcattcctttgatcctttcatcctctttgtattcattttggacgagacttcaatattcatatgctagtttgatggtcatgattctagt

SEQ ID NO: 219108 - DNA, 403 bp, Glycine max
  unsure (1)..(403): unsure at all n locations
agctagccagagctcagtcgttatgcnttttttctctcctcctaaataaagccataattcattntaaagaagacaacaaagttgttaacagagagagagagagggagagagttaaccttcgtcggagttgggtgcgacggcgggggcagcgtctggtggttgcgtgatcattgcttcggtcgccgtggaggttgtttaggttaccggcgatgcatctctcttgtagtgattattgatgaatatagcgagaagaggaatgagtgaaaagtgaaaagcaaaggaaataaaatattaaaaaaaatgaggtagggaatcggaatggatagtgaagtcaaataaaggaattgccgggaaattgtggtggcaaagatagtctccgagtcaaaagtccgaaacagacact

SEQ ID NO: 219109 - DNA, 363 bp, Glycine max
  unsure (1)..(363): unsure at all n locations
tatcataagcttaaggagccatggcacacaagtacgagatattatggtcaaaatggccaaaaatgcaattaagatcaccaacctgaaacaacagaattattaccagaaagaataactgactgaaacaagcatacaaccaagtaggatgaagaaagttaatatcatcatcagcacaacaagtaaagctgactgcctaataaaattcaactagaaagtgagtatatatgctattattttaatttagattttcagggatagaatataacatnttttatgacattcatcaggtccttatctcatggtctcttcaaggaagtcttccacgatccatcccaagaatgcaaaaggaacaaagcttaattc

SEQ ID NO: 219110 - DNA, 455 bp, Glycine max
aagcacctgccgcatgcaagctttacagcagatagtagtaatgacccattatttctataattaaaataacttaatgccattaacctagggaattaaaaaaaacttaatggctgagtgtaactgatattgtggcaaccaaaagtcaccctcaacagccaacaagtcagccaccatttggtctcccaaaaggctgatgcctatgttgccaattgggcccttattacaacttgaactaaacctaactaaagcccttttagttgattaacccaaaacatatttgtggtcagccaactttacaaggattgggccattatttaaacaaactaaacactctaaaattgaaacaaagtggggtcatttagtcctcctccatttgggccatgatacaactcacaaccttggacttttctccttgaaacttgggctcgtattcaaacagtatggacagcacttgt

SEQ ID NO: 219111 - DNA, 419 bp, Glycine max
  unsure (1)..(419): unsure at all n locations
agcttgtatagntccacaatatatggtcattctgtagtatatncggcaaacaaatctcgtcttatggataatgtctgctctaaaacatttccattggatttaatgatgaaatctgtgcattttcatgtaaaaaagaggctaagttttgaattgcaaaatgcaacagttgggctaagctcggcagttgggctaagcgcatatccaccgctaagcgcagcttcagagcgcttagcgcaaaggagaatctagcagagcatcaacatcaaagccgcgcactaagcgcgagatcagtgcgctaatcccaacaggtgccttccgccacgctaaacttgagactggcgctaagcccaatttcacttactcacgctaagcatgagggtggcgctaagcgcaacgccacgattttagagcctatttaa

SEQ ID NO: 219112 - DNA, 382 bp, Glycine max
ggatcatcaacttctatccattcagaaacatcagcaccctctctcgtaatcccagagcgattattgcagcctggaccaagaatagtttcttcaactcagccttcacaagcacctcataaggatgttgaagcggttcaagtatcttcgacatcatcatctgaaccatctgtgccacctcttgctgaaactcaaccaccaatattgccattgccagtaacttcacgacccaaatacagggtatccttcttctcttgatctatcagcttcttgcatgcagacacacccttggtataactttgcttgagactctatgaatttacacaacacagccacacgggagagagatcaaactctcataaaattactggagccacctcattat

SEQ ID NO: 219113 - DNA, 406 bp, Glycine max
  unsure (1)..(406): unsure at all n locations
agctntggggctgattagagatggcctttgtttttattgcgnggcgggtaaagaacagggctaacgtcngctgactaatgacattgttgagcacgtagaacatttggccatgtacgaatggcaataaaacatgggatccttccgccttctcattctctctatttaccccaagctttttacttgtcaatgtgagacaatcaaatatttcttttctcaaacccacttcgatccttcggcggcaaacactaaatccgcacagcatgaaggcatgtaacccaccatcttatcatactaggacaccggcaatgtgactactatcattgctatcaacatcctcttcatcattgggggcgctacctgagctgccatatcctttcaccctatgtgcgtaccctcttgtaagatt

SEQ ID NO: 219114 - DNA, 420 bp, Glycine max
  unsure (1)..(420): unsure at all n locations
agcttgntgtaggttatgtagtagcatttttgatagactggtgaattgagtagcaatagtaaattgaatggaatgcttatattgctcactcttcaatatttgttgttcaacataagcttgtagttccttccttgtttcctctctttgttgagccatgacatgagttaccaacatttgagtttcttcattccgccttgtcagggcttgatcaagcattgcttggatgtgatctttagttaaggaactagaagcagataagttaattagtgcaacatcaaagttgctagagaagacaacaatagcatcacgaacctccttttccactaaagaggcttcatttgaggtgttagcctacttggatgcaggttcgggttgatgtgttcgaacaacctcattagctnttgttgcattagactttat

SEQ ID NO: 219115 - DNA, 414 bp, Glycine max
  unsure (1)..(414): unsure at all n locations
cccggaccttaagtcacctgagctgcagctccanagaaagcacatgaagctgcttctgttttaacgctacccagactttgctaaccgctggatcttctcaaaatatggtcttacacttcacaagacaattttccatgatcttaccgttggatcttttcaaaatttggtcttcaacctcacaggacaattttccctgatcttaccggtgggatctttgataagatatctggagtgcgccagaagtctcttaatgaagcttctagaggaagcctcttattgaagcttctacagagaactacatgaagctgcctcggaaaaaacgctgttcaaccttcgttaaccgatggatcttttcgaaatttgggttctcacttcgcaagatactattccatgatctgaccgttgggatctttg

SEQ ID NO: 219116 - DNA, 429 bp, Glycine max
agcttggaaggatgcttcaatggatgaatttattgagggagagaaagagagaggggggagcacgaaattgaaggaataaaagagggagagaagtggaactttgaagtatgtctcacaagactctcattcatcaaagttacaacaagtgttacacatgcttctatttatagactaggtagcttccttgagaagctttcttgagaaaacttccttgagaagcttctttgagaaaacttgcttgagaagctagagcttagctacacacacccctctcataactaagctcacctccttgagaagcttccttaagaagattcctaaagaagcttgagcttagctacacatacctctctaatagctaagctcacctccttgagatgagaagctagagcttatctacacaccccctataatagataagctcacccc

SEQ ID NO: 219117 - DNA, 234 bp, Glycine max
aggcaggaccaacgtatttctcacggctgggcaaaaatgcattatagactctagacgtgcagaaaattcggacaatgctgcaaagtgtattcagcgcccactgctgacatttattgcaccccgggatttcatcacaatcacagctgctgctctatctcttaatacaaactgcagggcgctgctttattgacatttaatcaaaatataacacaactcccctctaattactattta

SEQ ID NO: 219118 - DNA, 419 bp, Glycine max
agcttctccgctattgtcctataattaggtgtgaggagtgaagaagaaagatgttcaaccctcctggtatctgagattcacttaaaattcgggagaaaaattgtttctgtgaagaatatccaagccgatgcgcttccgtaacgtttccgtgggtgatttcacgaagattttcaaccgttcttcgacgttcttcgttcgttcttcatcgttcttcggtcttcaaccggtaagttcctgaaattgaacttttcaattcattctatgtacccttagtggtcctcatttgttttcacgtgcttttattttcatttcatttactttccgtacccccttttgacgtgctttagtcatttacttaagtcattttcttgcctaatcaaaaataaaataaatttccactgatcatttgaattgtaata

SEQ ID NO: 219119 - DNA, 439 bp, Glycine max
agctgcccatccatgatgtctccatggaaatgatcaacctccaaactagctactctcacaaatacaaagtttaagatcatcactgtcacaacctcatgtgccacacacaagggtaagcttaccaaaaacaaacatacttaaaacaatttaagaacatcaacaattaacattatataagcttatcatctttaaatcatggtatttgataataaataaaactaatagcatttaactcacataagcagaccatctcatactcaaccgtcatgaaacaattcaataatcaccatcaagcaataactatcaaacatccccatcacgagtccattaataatcttcaccatgtacaccaatgatagtatctactccgtggagatttacactacatgagcaattaactcaagtatgtcccttaacatagtcacatgcaccttgacca

SEQ ID NO: 219120 - DNA, 399 bp, Glycine max
  unsure (1)..(399): unsure at all n locations
aatatagaacctatattctaagccacattctatttggcgttgtgntcctgtgtcctctagcatgagattcttcatagtcatccacctattcatatgctcccatgaacaaaaagatccagatcatcacaggatccaaacacatacaacacacaggaagtgagttattacattcctaactacgggagagaaataagataacatgtacgtataaatagccatataagcaaatacaacttattaagcatcactcactttatttcaccactttgtcgcacaatattacatcgcaacaccacacattttattcattttcacaacactcacgtactcaatgatcaaaacaccatatcatcaagtcaatcaatatctgtcaatacacaagcgttatgcaatatatac

SEQ ID NO: 219121 - DNA, 436 bp, Glycine max
  unsure (1)..(436): unsure at all n locations
agctntagaaactcgagcagaggcagattgaagtttattatatccttcaattaatncttntcttgattcaaatattacctcttcacaattagagttgacaatgtcatcagactgagagtcctcatcatctgaacttgcatccaatgctggttttgctttactggtggaagcatcatcaatcaaacatagattggcttcttcttcactgtctttgttagaaaagtaatcatttaggtcctcccaagtgctcatgaggctcttctttttggacttgaagaatttcttcttcttttcctaatggctttcaagatcaggacattctaacttgaagtgtcctggatttttgcactcatagcagatgattggactnttctctttcttgtggaatgatctcttagacaatccattgaatctagacgagttcttattttctcat

SEQ ID NO: 219122 - DNA, 383 bp, Glycine max
tcaagaaaagggcccaactcccttccaaaatctgagttattgcttaataaggtggctttgttcatgctcatgcgcctagcgcaattctgaactgcttaacgccaattagtgaattttggcttatcgcacgcttttctcgctcagtgaatggactaaagccgagcgcttagcgggatggccctttgctcagcacacctgcacagcttatgcttattccaaaatcttcctcgcgctcaacctaatgagatgtcgcctactgagagggtgaaaatcaccactatacaaactcgcctaattaaccctgaagtgagagaaaatgattatcatgtagaagcaagcgttatgatgatgaatccagtatgtttgatgatgaaaaaataaac

SEQ ID NO: 219123 - DNA, 428 bp, Glycine max
  unsure (1)..(428): unsure at all n locations
agcttatgctgcanacatctacaatagacctcctcaacctcagcaacnaaatcagccaccacagaacaattatgacctctccagcaacaggtacaatcccgggtgaaggaaccatcccaaccttagatggtcgaatccttcacaacagcagcaacaacaacaacagccttattttcataatgctgctggcccaagcagaccatacgtttctccaccaatccagcagcaacaacaacaacaacaacaaccccaaaaacagcaaacagttgaggctcctccgcaaccttcccttgaagaacttgtgaggaaaatgactatgcaaaacatgcagtttcaacaagagaccaaagccttcattcagagcttaactaatcagatgggacaattngctacacaattaaatcaacaacagtcccaaaattctgaca

SEQ ID NO: 219124 - DNA, 377 bp, Glycine max
aaaatctcctctacgataattatttggaagaagctctgcaaacgcgctaccttccggaaaaatataaagaagatcattgagtgcgctcacccaccatattacgcggtcgtgagcatatctccaccggaaggctatgaatattttcacctatataatgcgcacgggagatagctggttccaaaatccaaatattgggttgaccaactggtgagttagaaatagaccacaagagaacaggaaaacggacttccgatgaattgccatgcactgatctcgctctctagcctctctcactctcactccggaatcggtgttcttccactcgttcgttctcacacccacctatgtcttcatttcgaccctaaatcccctttctt

SEQ ID NO: 219125 - DNA, 349 bp, Glycine max
  unsure (1)..(349): unsure at all n locations
taaaaatagatatataccacacagcgtccctgaactaaattcgccctaatcacacaacgaacctcagtgactccaaccaaacataaacctacaaactccaacaataagacttggatgaaattctgagggacataacctgcacttagatactaccatcatcggtaaaataagagaccaaatatcccctacatagaggataaacaacaatcccttagtgacagccctatnntccgattgaaaacaacctttgccaccacaaaaatattactcctccataaaccaaaataatcaatggcacacccagagagatactcggaccctacaagagtgccaaaactaactcctcatc

SEQ ID NO: 219126 - DNA, 434 bp, Glycine max
  unsure (1)..(434): unsure at all n locations
agctntctggactatgtatttatttataagaatgaatgcttttatttatttggacttctatgctcttggtccatgtagactataatacacacaagcgtataatagtctacatataaccctatacatgaaaatactgtaagcatttagttcaaaagtagttggggagactagtgatcttaccttccagcaatcctatctccgatttagcacgaaaatcctttcttgaatagtagaattgtacgattttacgaattaaataatgattatgacaacattggggtaatgaaagatgtgtcttcgtatagcatttaaaaagttcattgcctaagtgtgaatntgtttntttggtaataacttccgaggcacctaaacaaaacatagaagcaaaaactttttgcaatggatcaaacattcgttntagtcttaaagtaaaa

SEQ ID NO: 219127 - DNA, 401 bp, Glycine max
tggcccttgtatcaccagtgttcataataatagaccaggaatccaagtctttcactctattttcatacatacccttgatctcttttctttcttagaatttttacctcaatctcacagaattagataattaacatgaagtgaaacctcttacctctacacatcacccacacacatcattgttaagcccacacgacagataactcccaacagcgcctctatcataagttgttatggcaagcaacttactattacaaataaaataaaactaaatgaatcactttgtacagccttaatctgatttggaacacttcgataacaaatctccaccttgtctctattttccaaacctcctttcaacttttgtagggtttatttatttatccctattctataattcactc

SEQ ID NO: 219128 - DNA, 424 bp, Glycine max
agcttcccgtatccgtacatggaaggatctgattactgccttcctaaggcaatatcagtacaattccgatatggcccccgaccgcactcaactgcagaatatgttcaagaaagagggtgaaacctttaaagaatatgcgcagcggtggagagatttggcggcacaagtagctcctcccatggtcgagagagagatgatcaccatgatggtagacactctgccagtgttctactatgagaagctagtaggttacatgccgtccagctttgcggatctagtattcgccggggaaagaatcgaggtaggattgaaaagaggaaagtttgattacgtttcctccacgagtacgaatgccaaaagaatcggggcaacaggggcaaaaaggaaagaaggagatgcccatgccgtctgtcatacactaatt

SEQ ID NO: 219129 - DNA, 422 bp, Glycine max
agcttatatcgttgctagcaagtagtatttattttttataacaccaagaatgagtatttactcccactaaacttgtggtatacacaatcatcaactgcatttgcctcaaaaccgtatgatgtaatgacttgatggaacttgcaataccattgacagaaagcttgtttcaaaccataaatggagttatttagtttgtaaaccatagactttgagtcacccgatacaaagttttctagttgcatcatataaattatttcttcaatgtcaccatttagaaacgcagtcttaacattcatctgatgtagctctaaatcataatgagctaccaatgccattattgttctaaaagaatcatttgaagatactggagaaagagtttctttatagacaatatcttccttttaggaaatccttagcgacta

SEQ ID NO: 219130 - DNA, 428 bp, Glycine max
  unsure (1)..(428): unsure at all n locations
agctctgggtctaatagtgattgcttttattcttgtggaaagacgggcgtggtgtcactaatttggaggaatgaataacatttatttgttgaacaatntaagctgtttttttattatgtaatttgaaagaatgaaacatttttaagttgctgaacagaatcatatgctaaatagaatgaaacatgttgaaggacaatcaacatagtatattagtatctcattttttgctaaatagaatcatatgctacttattggtgggacaacatatatttacatgataatctattttgggggaaaataaatatgcatgtccttaatttctcatgcaatacccaaattttatgagtttaattgaattgattgattttttttagtaattctttaaaatatgatatttatcccatattctgaatttggtattggctttt

SEQ ID NO: 219131 - DNA, 432 bp, Glycine max
  unsure (1)..(432): unsure at all n locations
agctntgagccaaaatcctgactcaccatatatcttgacccagggtgagaatgccaatccttaccctcggaagcaaaaaaaaaaaggagaagagaaagaaaatttccaatcaaagaggaagcataaaaaggagagaaggaaaatcttcaatctaagagaaagaaaagaagaggaaagaatactcccaatcaaagaatgggagaagaaaaaaaaaacatactagaagtataaaagaagaaagctcctggtcaaagaaactataagaaatgtgcaaaaaggtcttttgaccggacgatatctgaacaatacagaattgtcaccaaatgaacaaaaaaagaaggataggaaatcacgacctaaaatggtcttctccctttaattaccaaccanaatctcgtgcgctagcgacccttntttcttgccccgcactaa

SEQ ID NO: 219132 - DNA, 429 bp, Glycine max
  unsure (1)..(429): unsure at all n locations
gtcaccgcggctgcagcttgaggacttaccatcatcttcttatgtgaccttcccaacttctggttggcttcttgatacatagctactatgctactacttngtgtatctttgcttcattcgttatattttcatttttattgttgcctgatttattcgagttcatttatttgttttggacaaactgagccacagttacttaaatgttttgtagtactgttctccaaccacaactggaatctcatcatggtaatccacttaataaaatgtaagtcataaagatgaaatctcaattctgagttatacaagaagactagttctaaagcacctaagaaactactctgttatgctctacttgctctttattgatgcattgttaatgttacactctgctttgatcagttgaatgttgaactcagatcctgtctttga

SEQ ID NO: 219133 - DNA, 435 bp, Glycine max
  unsure (1)..(435): unsure at all n locations
agcttgtgatgtctctgtgtctataaagttttctcacaaaactcaataaacagtgacctggaaatcattgcaaattggaatctagcttttagcttgatgtacttggctactgattcgtaattgattgtatccagtttccttgctagttctatatgcacttactattcaacaaccaattgtttggcatcttagcttttgtctgtggtgccaagctgctgaccctaaaatctgttctgagataatggatagtgggatggctgctatacaattttaaatacaaattaaaatactttgtactacccatataaatggttaaaactaaaaacaatccaacaattaagatatattcatatttaatattaaattaaaaaatgataatctaaagctaaacaacaagttaataataacaaanatcaggaatcacacaatatcttt

SEQ ID NO: 219134 - DNA, 409 bp, Glycine max
aagcttttgaacaagtggacaaacttgacaattgtcaggaaatgatttttatcaagatcattctgagggggtcatattgaggttcttattctgagaaacattctttattagcattttgaagtaacattagaatggtgaatctaatattagttgataaaggatccatacttgaattaaatccttttgataaaggatccatacttggaaagattcaacttagctttataatgctctttgaataacctcttatactccaaagaagattgttggagtggagcccacacaactacaagcttttggaacaagtggacaaacttgacaatttgtaggagatgatagctagcaagaacattttgaggtggtcatattgatgttcttattctgagaaacaattttattgcattttgag

SEQ ID NO: 219135 - DNA, 451 bp, Glycine max
  unsure (1)..(451): unsure at all n locations
ttatagcacctgcggcatgcaagcttatnnggtatcatagaggagacatttgtctatttattcattgaaaactgatagtgagagctttattaacataatacttttgcacaaaaaaaatgttcaattatataactgataaaagtttatcaaagtcatcatgctgtcttcattattctaggttccaatcaagtcaccaggaattgagtcctaaaattccgtactctgaattcacattgcatacaacttaccagcactactccaatgaatcaatagcatctgctgacatatattaagagagaacaaatagagagacactacctatactactttgtatttacaacccagcacaagtataattttattagctccagtgactcccaataaattcttttcctcttaaacagtgaaactcagaccacccgtacaaatgtacaaacaaattaatgtaaca

SEQ ID NO: 219136 - DNA, 426 bp, Glycine max
cagccccacgttgatcaaatgcttcagattgttgttcattatggcaaaggtccatgtggcggccggcataggagcataaaccacagagtctggcgacaggggcagttcttgattcatgttcagttgagttaccacgttaaccaaggcatctagtttacccttcagcttcttactctcgactgatgaagatgaattcgtggatacttcatgcactcctctaatgacaatagcatcacttctggcactaaattgctgggaatttgaagccatcttcttaattaaatttctggcttcagtaggggtcatgtcaccaagggctccaccactggcaacatctatcatacttctctccatgttactgactccttcataaaaatattggaggagaagcttctcagaaatctggtggtgaggaccactggcact

SEQ ID NO: 219137 - DNA, 412 bp, Glycine max
agcttgtagacaacattgtggatagcacatttatgctgaccttttccacctccgtcacaccttgcagcccaaattccttaatctctcaatacaaaacacgttccatttccaaattccctgtaaaataacttcttgtctcctcattattatttactaaaacttgtttttcgcccgtcatttattcattatatgactccattgaagttaatggcacttatttaacttgcacataacaaatattaaatgcaacctactttattcatttgattagtccactgcacaatcatagaaaatatttcaaacaaagtttttatgcaataacaaagtacataaaagtctatcttcaatagcaaagtacaatagtaacaaagcacacaaagtttgtcacaatagcagattatatttaaaaaag

SEQ ID NO: 219138 - DNA, 254 bp, Glycine max
cccttcaggacgaaaaatcctttgcggccccaagaggagagatgagccccgaagcaaccacacccccccgaaaaaaatcgccctggatggcagaagctaaacccccacaaatccgaaaccgggagccacactctcctcacaacttgaaacacaagcccccccaaagggcggcacggacgccaacacacaaaaaagctcacacctctttggaagctcctgcagacaaaaaccatcctggtgccacctcatccaag

SEQ ID NO: 219139 - DNA, 363 bp, Glycine max
agtctacacccgctgcacgagtctgtggactatgatctactgcagaacaccataatagatctctgtccttctttgcacaatctggagataatgagcaacctgaagctattactgcaaacatatataatagaccctctcagcaacaaaaccaacaacagcagaataataatgaactttcaagcaatagatacaatccagggtggaggaatcacccaaatctgatatggacaagctcctcacaacaacaacagctagtccctccgttctagaatgctgctggtccaagcaagccatatgctactacctcaatacaatagcagcagacacaaccaagacatcaagcaactaaggctcctcctcacc

SEQ ID NO: 219140 - DNA, 87 bp, Glycine max
cgacaccaaacaacaccagcaccagacaccccaaccagggaaaacagcgaaaacagaaccacggagaacaagcaacaggaacaacaa

SEQ ID NO: 219141 - DNA, 417 bp, Glycine max
  unsure (1)..(417): unsure at all n locations
agcttgcttctacaaagtagaattgtttgtccctctacaaggtcatcgcatgtgtgccgaaaagtgaaaaaaaattaggaggaactcttggcaagtatggtaggagtgcccgttagttggttccctcaatggaaagaagaagggccgaagtgttgtgctcatgtgaaggattcccgaatgaccccttgatgggaacaaggggttgtattaattataatcccatactagccataagacaactaggttaccctatgagaggggcaccgttggaagagatcatcgcgcctttcgttgcatggggtttcaatgaaggcaacgcanatatacttcagagaatcctgcaggcgtggaatgcagtggaaagaagagataatgagcttagggggagcagcaacagtgtcgntggtggctatcata

SEQ ID NO: 219142 - DNA, 324 bp, Glycine max
ctggatgcaatggttaacttggtaacccttctggtcttgaaccagaaatctatacctgttgcaagggtctatggtatgtgcttctttgctgaccaccatacagacctttgccctttcatgcagcaacctggagcaattgagcaacccgaagcttatgctgcaaacatttacaatagacctccttaacctctacagcaaaatcaaccaccacaaaacaattacgacctttccagaacagaaacaaaccttggaggaggaatcaccctaatcttagatggtgtatgcctcaacaacaacaacaaccacccgcttttttctttcaaa

SEQ ID NO: 219143 - DNA, 293 bp, Glycine max
gcttaggactttaaactaactgcatgggcacaagggggtttttagtggagaaaattccaatggggggaaaatattatctatttggcatagggggctcccccccttatatgttgtacacctttaaaaaaaaaggggtaattcctctgtgtttatcgtctgcgtaatgacaaataaggggcaattttcgcggggggcctctgttaaacggggtacacgaagttacattcattgtggtgaattatggccctatatttactcatcataggaccaacttcaagcatttaaatttaatt

SEQ ID NO: 219144 - DNA, 404 bp, Glycine max
  unsure (1)..(404): unsure at all n locations
agctntggcgtgtacgatcgcgacatgtttctcttatttactggctattggngctgatgcttacctttgcacttttcctattttttatttatcactttctttttttatttatttttttgggatgaggctttaagcttttaatctttttttttccttctcgaatctcatccacaaacttcatcatgggtgaagttttatgtccgtaaaagcgtcgccagcttgtgacggtgggggcccgcatgtgacgtggcgaggtctaccggctgtacccggtcacccagttgcgcaacgagtgggccatttgggcttagtggtgggatattcccccaacggggccactcactttccggtcaccgacacgtggcaattctttgggggtttattggtgggtctttcattcttgc

SEQ ID NO: 219145 - DNA, 423 bp, Glycine max
  unsure (1)..(423): unsure at all n locations
agctcccttaagaagcgaggatagtatctttcttgggacgcaccgaagaatactttctngagatactagaggaagggagggctactcacacccttcaatagctaagctcaccctcgtgtctaaatacatgaaaattcaaaaaaagttcttactacaaagactactcaaaatgcccttgaatactatgctaacaacctatactactaagggacccttaacttgtaccattaatttgtagggtaccctacaaacctaaaatggacaagatagaacgcccaaaataatgaaaacatattctaatattttacaaagaaaggtgggctcatacttagcccatgggttcaaaatctaccctaaggctcatgagaacccctaggccttctgctgcatgtctatgctaatcttcttgtagacttctatctg

SEQ ID NO: 219146 - DNA, 414 bp, Glycine max
agcttgtactagtcatatatatgtgtcataacaatgaaaacacaacatgaatcgtctattgctaatacagaaatacttaaacaaacctgccaattatgagttttgcggccttttgcaaattccgcccatgtttctagatcaaggccatacttgactataagatcagatatttgctgactttcattgtcagcaaagacaaattttgaagtctatgaaaacttaaattgcctccatcttgctgcaactgttgacatcaccttttttttttgcattttcaccttcagggatataaaatttgcgctgaacaacaaaatgagttatgtaacagtatgtaaatgaatcctttaaagtaacttaacaactaaatcatgaatactatgttttataattcatacaaaatatcttccatattaa

SEQ ID NO: 219147 - DNA, 306 bp, Glycine max
agctttgaatgcactattcaatggaggtgacaagaacatcttcagactgatcaacacttgcacagtggccaaagatgcatgggagatcctgaaaatcactcatgaaggaacctccaaagtgaagatgtccagattgcaactcttggctacaaaattcgaaaatctgaagatgaaggaggaagagtgtattcatgacttccacatgaacattcttgaaattggcaatgcttgcactgccttgggagagaggataacaaatgaaaagctggtgaaaaagaacctcagaaccctgcctaaaaaatttga

SEQ ID NO: 219148 - DNA, 265 bp, Glycine max
ccataaaactcaagctctaagaagcctagaactttgaggagcctttatgtactttatagaagctcaagcagctggctcggtaaaacccttcccagccttcattaaccgccggaacttctcaaactcggtttgaaccttacaagacacttttgccatgagctgaccgctgggaatcttgagaccaagtccatcgtgtgtgagaaacctctaaatgaaacttccaaggaagccccttaatgaacttcaaaaaaactacatggggctg

SEQ ID NO: 219149 - DNA, 407 bp, Glycine max
tgcccgcctgcaagcttagtcacggcaaaccggtgggacttttatttttagaattatgctcataacctactatttatcttattaacttaaactcaacccgctgcatcttatattagctcgattcattaataaaaccattttaatatataaacaaaaatatgaatataaaaatacttattcctcacatccgcacgaatataaatgcttatagaataattaattcatacaaagaattgagtaaataatatatccaataacaatataatgaaatttatattgcgggttaatcaaaattattatataataaaatcattaatttttataactaatacttaacaattatatttattaaaatctcgaattgaagaagcactatcatactaaaaaagtaaactctctttatcgca

SEQ ID NO: 219150 - DNA, 419 bp, Glycine max
  unsure (1)..(419): unsure at all n locations
cgcttaaatagaccggaccatgctactacctattattactgcttntctttataaaaaaaatacttttcaattacattaatgatatagcacttatctatctatctatatatatgagtataaaattaattactttactataaaatcaataatttactatcatgttataaaattagtatactcttttattactataatatagttaccgatgtttcttttttttttttaaacagcaaaatatattattaatgaagaaaccatgtgattacccacaaggagtgacaaccaacatgcctagagtcccccgattttgaaatcaatataattataacctgatatagggtatacttacacattttatctattagtttctaacacgaagatttttctattattaaattactctaataaacaaactgtca

SEQ ID NO: 219151 - DNA, 429 bp, Glycine max
  unsure (1)..(429): unsure at all n locations
agctntacccctaaacctttatttcatctttttttattccaaagttgaatatagaaggtcaaaattagtcatggttgatgctagagtcagaattggaaaccctagaacaacatgagaacataatgcttttgttaatattgaatgacaacaaaggtgttgataaattaaaaaagtttatactttgttattttgaataaattaggaatataaaatctacgattaaggataggatttgtcaaatcttaagtcatgggatttaccttcctttgattataattccctatgattaaggaagttgtctccctatattntcctattctacagagattatttccatttcacaaatactaacttgaatgttgtctttcccctcacatcatcatgtttatgtatcgaacttaaccatcttactaattaactaattactat

SEQ ID NO: 219152 - DNA, 182 bp, Glycine max
tctaaaaaaaaaacgatccttttctattgatgagacgattaaagatttttgggctacatccaaaccgagctgataccctttgtatatgtgaaattcctgtatgtaaggaaaacttgtctgcacacacaactatacattagatcattttgttatgaccttatttacagacgagcttgtataat

SEQ ID NO: 219153 - DNA, 166 bp, Glycine max
tagaccaaaagttagagtaccacttattgacgaaagatgctagacattccccttaaatgggttgggcatttgagaataaagaggaatcaaaaccccactatgaagatgatctaagaatgacctgctactcatatgctgcgaacccactaaacaaagtgagaaattt

SEQ ID NO: 219154 - DNA, 443 bp, Glycine max
ggatcttaagcaccgcggctgcagctctacattcatttcgagcttttctatatattacgggactcaatcggacatccgagtaaaaagttattggtagttgaatttgctcacggcttccgtattccatttcgagcgtctcgatatattacgggactcaatccgacatccgagtaaaaagttattgttgttgaatttgctcagagcttcggtattccatttcgagcatctcgatatattacgggactcaatcagacatccgagtaaaaagttattgtagtttgaatttgctcagggcttctgtattccatttcgagcgtctcgatgaattacgggactcaatcagacatccgagtaaaaaggtattgtcgtggaatttgctcagagcttctacattcaatttcgagcttttcgatatattaccggactcaatcacacatccgagt

SEQ ID NO: 219155 - DNA, 386 bp, Glycine max
tgagcgaattaaacgacataacgtgttactcggatgttctgattatcccgccatatatcgagacgctcgaaatggaaataccgaactctgagcaaattcaacgacaataaacttttactccgatgtcagaatgaggcccctcatatatcgagacgctccaaaatggaattcaaaagctctgggccaaattcaaacgataattactttttacttcggatgtttgattggatccccgtatatatcgaacgcctcaaatttatggtggagccttggcaaattcaacgacaatactttttcttggatgtctgatggtcccgtgaatatctgaccctccaaaggatacccgactctttccaatttaacaacataacctttttctggggggg

SEQ ID NO: 219156 - DNA, 407 bp, Glycine max
  unsure (1)..(407): unsure at all n locations
agcnttgagcaaatataaacgacaatttctttttattttgatgtccgaatctgtcccgtattatatcgagatgctccgaattgaaaatagaagctctgagccaattcaaacgacaataacttttgactcggatgtccgattgtgtcccgtagtatatcgagacgctcgaaattgaaaactgaagctctgagaaaaatcaaacgacaataaatttttactcggatgtccgattaagtcccgtaatacatggagacgctcataattgaaaacagaagctctgagcgaattcaaacgacaataacttttgacttggatgtccgattgagtcccgaaatattatcatgacgctcgtaattgaaaacagaatctctgagaaaattcatacgacaataactttttactcggat

SEQ ID NO: 219157 - DNA, 410 bp, Glycine max
  unsure (1)..(410): unsure at all n locations
cgacatgtttttataacctgngactttccgctataacttcttaaagagtggtccattcggcgcactctctttatacattaccctctacagaactatgcccttctctcacagaaaatgaataaatacaaatgcggcaccgtcaaaatcgcgttcgatgtgactatgatcattttcggtgagtactgctttgatctaaaagctgcgtttctgtgatgattgaccaccctcagagtattgatgacaccaccgctcataacagatcggcattactatgcataagtactgtctcatattctcgccaaaacaccttttaatgccgttgcgaaatcatccaaacttatattgtcaattctttgcccaacgacgaccgactcctagaccatcggcaattgcgggccatcgctgtttgt

SEQ ID NO: 219158 - DNA, 424 bp, Glycine max
agcttttaaactgtgaggaatcatgaattttttcagactcaaaatatttttccagttttgctttttcttggatattttcctggcaatacagtacaacaaaacataaagcaacaagcaatttccatccttgtagagacatgtctttgttaagtggtggaatcaatttgacacaacaaaagcagaactagacaaggttaaaatctagtttaaagctcatccagagttccttaaagcaactgatctaaagacttcattgtttcttaatcagaaatccaagctagcggctttcctagaaagatccaagtcaaaggaacatttgaccaagaacttaaaagaagttcttcaactacttcaactacacatagaagatacaaatacctgaacacatcctatgtgtaggtattcgtaatttctgctatgatca

SEQ ID NO: 219159 - DNA, 396 bp, Glycine max
agcttggagaggatgcttcaatggaggaatattattatggagagaaagagagaggggggagcactaaatcgaatgtagaaaaacggagagaagttgaactttgtgttgtgtctcacaagactcttcttcatctaagttacaacaagtgtttcacatgctactattatagactaggtagctttcttaagaagctttcttgagaaaacttccttgagaaagcttctttgagaaaacctccttgagaagctatagctttactacacacacccctctattactaaactcacctccttgataaactttcttaagaagattctaaagaagctagagcttatctacacatacctttctaatagtctagcttcaccttctgagatgagagctagagcttatctt

SEQ ID NO: 219160 - DNA, 293 bp, Glycine max
agaggtctgcggtggcttgacccatgagggcgccgaagagaccacatgggaatactccttccttcctttttgccccagttgctacgatcctcctagattagtacttcgtggtggagatgttatcgaacttccctctcttcaaacctacttcgattctcttccccgcaaaaaccaagtccgcgaagttggagggcatatatcctaccaactctttatagaaaaacactggcaaggtgtctaccactatggtaatcactctcctttctaccatgggaggggccacttgtgctgcc

SEQ ID NO: 219161 - DNA, 403 bp, Glycine max
  unsure (1)..(403): unsure at all n locations
cgagcagcagcgancaaccatcatggaggagacttccttttcctcgggaccaaaaaactacgagggcatcacttcatgtgctttagaagagaacatcccggatcaaagtacaatgcaaaaggccaacgacaagcacagttgaactcttgcgttataccgggatgatattattctccccccaaagacaatactctgcatgtcagagaaatcttctcttaacaactttgatattaaggatatgggaaaccaacctatgtatcggcacaagaaaataaggaaaggcctacggcatttacgtttgcacaaaaacctctataacaaagattagagagattaacatcaaagactgccaccaatgccctcccttgcacagagacaaactcatttgagcactgccgaaaaa

SEQ ID NO: 219162 - DNA, 404 bp, Glycine max
  unsure (1)..(404): unsure at all n locations
cagctntgcgagattcctcacggaaaacgttttttattcttntccgaagcgcctcggcttagattttcttcaccgaaacaatttatccaagcaatttccaaagagagagaagtgcctaaggggctgggatcctcttcttcttgcattcctcccctatttatagcaaaataggggaggtggttgccgcccagctcgcccaggcgagctcagctcgcccaggcgagcagggttgcttcctccaaaagcaaccgccttctggaggaatcttctggagggcccaagtgggcctgggtgctatttgcaccccccattttactaagtacacccccctctgctgtttttggtgatcttttttgtaaagtaccgaaactacgaatttcgaacgaacttgtttctttcctaat

SEQ ID NO: 219163 - DNA, 433 bp, Glycine max
agctttgagccagaagcctgactcaccattaaccttgacccagggtgagaatgtcaatccttaccctcggaagcaaaaaggaagagaacgaaaattttcaatcctaggaaaaaagagaggaaaggaaatctccaatccacgagtgggagaaagcaaaaagataagaaagaaaattcccaatcacagaatgggagaaagaaaaaaaaaagagaaggagaaaaaggaaagatagctcctggccaaagatcgaaagaaaacagaagaaatatgcagagaggtctttggaccatacaatatctgaacaatacggaagtcgtcccaaatgaacaaaagaaagaaaaggaaaccataacctaacagtggtcttctccctttgattaccaaccaacatcatgtgccatcgggacttcgtcgcctcgcgctacaacaaaac

SEQ ID NO: 219164 - DNA, 422 bp, Glycine max
agcttttgattgtgacttgatagaacctttttttaagcagaggggtttgatttgatcccatgtttatggttgaaagatctgtttgaatcaatagttcgatatcctatcatggagggaaataagatgaatgcatgaaggaatgcttatgctatgcatgacacaaatgcattttatggacaggagagccaggatgatcatcttttcttacttgcaacatttggcagtgcggtgccccatttatgcatttaagaaggtcatacgaaccttctgactttccgtgatgagaccaaatgcaacacatgcatgacgatgcaatacataaataaatgcataaaagcacatggttgatagcaacaagaggaatgtataaccgtggcaatatcatcaaacaaacatacagcaaagacgcccagagcatgaca

SEQ ID NO: 219165 - DNA, 287 bp, Glycine max
agccggcgagaagcaaacgccactacttgttcccgctgcataagcactccacccaaacccatcttagatgcatcacagtacaccacacagggttcactcgggttaagtaacactaaaactggagcagcggacaacctttccttaaggggacggaaactattctcacattgcgcatcccacacaaaaacttgacccttaccagtaagcttagtcaaagggaacgctagcttaaaaaagccctctatgaatctacggtaggttcctgctaagccacggacactccttat

SEQ ID NO: 219166 - DNA, 407 bp, Glycine max
  unsure (1)..(407): unsure at all n locations
agctngcnattcaatgcaagcagaactnnagtgntctctcaaccaccccctcgngaggtaataattagtaatttgccacttttcaatatttttatccaacggatggatactctttctaatcacaaatagaaggaaagctgactacatatttttattccttactggtgaatatacgttgggtgtgatttttctgatagaaaatgcatagtttaaaaatagttcagccttatttatagtttaaaaaccaaacacgtattgcaagtgccaagctaatatgagagaggctggcttgtttgtttgaagtctaaacgtctatactacaacttaagtaaaatctattagaaaaaaatatagttcagtctgttactttctgacaatcatggtaaacgatctgtgcttcataatat

SEQ ID NO: 219167 - DNA, 421 bp, Glycine max
  unsure (1)..(421): unsure at all n locations
agcctgggataatacttaggttaatttctcgngacatcacaacagctcctccttccgtgtctttttaatttccattcgacattacaacagaatgtacttggctttgaaacttagctagccatcgtgattttccaataaattttcccctgcattttactaagcttatccgagagtatttgaaaatcttcttgaacactcttacccaattgccagaaaaattacaaaaatagcagaaataaaaaaggcttaattttcttaaaatgttgctccaaaattcccttccactgtaccagaatgctaatctgaacctgtagggtgccaagttggaaactttttccctgaaaaatgatggggttatcagaattagagcagctactgctttttcagtggcacncagaatccgaaaacagcaacatgtttt

SEQ ID NO: 219168 - DNA, 283 bp, Glycine max
ctctagaatattcaagatcatgttaagaatgtcttaggttatgtttttggccactggtaattgattacatcctctggtaatcgaatacaagagagtaaatcccctgtaaaaatattttaacctaaattcattggccaaacctaatgctgattaacctatagaattttttgatgatggatcttgaatatctttgattcctggcttggattaaacctggagatacacaatgatcacatggcatatttcaaacaatcaagtctttggtttcacaaatctccccttt

SEQ ID NO: 219169 - DNA, 413 bp, Glycine max
  unsure (1)..(413): unsure at all n locations
agcttcaacatctcagcccaaactctctttattatatctgattgcacgcttaaataggtggccttggtcgtgttcgtgcgcttagcgcaattctgaaccgcttagngcacattatcgaatttcagcttatcgcatgcttttcttgctcaacggatggactgaagcggtgcactcagctaacttgtacaactcatcttctttcagattctttcttgcgcttagcggacactcgctaagccagcagattggcttattgagaaggtgaaaaacaacacttttcagagtcgcctaatttacctgaaaatgagagaaaatgattattaaccacacacaatggaacgactaagttttattacctatacttaacataaagttcttattacactacaaaataaccataaactggggaagtt

SEQ ID NO: 219170 - DNA, 421 bp, Glycine max
  unsure (1)..(421): unsure at all n locations
agcttgccgcccagctcgcgaggcgagtttgttgttttctccagaagcaacaaccttctggagggaggatcaggaaggcccaagtgggtcaaattgctatttacacccccctttttactaaatgcacctcccttctattgttttggtaattctttttcccgaacgttacgaaactttacgaatttcgtaacgatacttattttacttccgcaaggttacgaatccttacggattatgtatttactcttttttagctttcgaagaaattactgaaactcacggattgcgcaaaaacatctcttttcgacttccgccacattatggaatttcacggatcgcgcaagcctgctttctttngatttccgagacatctcgggacttcatttattgtgcaacaaaggacgccaaataccttcaagcg

SEQ ID NO: 219171 - DNA, 411 bp, Glycine max
agctactacttatgtggcagggcgggctttctttactttcttgtctcaaccgtgagctttgactaccaactcttttcccgcaatgcttctctttatatctgcctgagtgggcttatagtctaaaccatacttcccacgatttcctctggcatttatcaagctagttatgccgccgttgtctttgcctaaacccattccagggtcgtaaccagtccccaacataactcgggccatcattactgctgcatacgacaggcaaggctgcccagaaaaggagtccaccgaggaaatgcttaccaccacaaaagactggaaagcggtttctaatgacttctctgcggcttccacataaagcatagaggatgggcagctcaccaagatgtctctctcgtctgatacgaagaccagatg

SEQ ID NO: 219172 - DNA, 79 bp, Glycine max
aaaaaccagccacattaggggagaaaaagagagaggttttaagtagaaagacacaaggataagcaaaagagtcccaatt

SEQ ID NO: 219173 - DNA, 351 bp, Glycine max
aaaatcatggacacaaacggaacactaaagagcgcctcacaagactcttatcatcaaagaacaaaaagcgtgcacatgcttatatttatagcctaagcagcctccttgagaaacctccatgagaaactctcttaacaaacctactagagaagcatccatgacaaaactaccctgagaagctacagcttaaccacacacacttctccattaactaagcccaccttcccgagaagcctccttgagaagaacctagagaaactagagcgtagctacacccacctctcatatagctaaactcacccccctgaaaagagaagctagaagctaactacaccacccctaaaatagcta

SEQ ID NO: 219174 - DNA, 402 bp, Glycine max
agtcacctgcggcatgcagcttatatgttttggaatgagcttgttgttttgtttaatggaaatcactgaatagatgtaaagtgattcctgtcatatggtttcagttgaaaattgaaattacaagctgtttattgaaatatgatcacaaggaactgttgggattctaagtctgaagctgatgttgcaaaataatgagaacagcaactcaatgagggtttctatgttgatcctgagactagtaaattaccgacattgactcaatcaatgtttgctaattagggggtggcgggtatcgagtttgtctgtggtggatgatgtgaacaattttgtaagagctggcatgtctatcacggtctacattttgaagccgtgaacaattttgtaagagccacaatgactatc

SEQ ID NO: 219175 - DNA, 191 bp, Glycine max
ttctcttgccccggaaccaaaaccaagtgcagatacacttcttatagagcaagtttttgaatttcaagccctgaagacggtatcaggggtaaattaccctcatatccttataccgaaattaaattccttccataaacccattattgtgcaaggcgaaaagaatacccaaacactccccatggcaaaaaaaa

SEQ ID NO: 219176 - DNA, 190 bp, Glycine max
  unsure (1)..(190): unsure at all n locations
cccggancttagaccaccgcagcagcaactcgcaagaaggacggaatttttttctttcacaaaccagaaacaccccggcagggagttcaatcacgcccatgtcaccctctaacatcgcaaataaaaaatatcgactacgctagcgaacggccttaaaatcctcttcctaaaagaaatcaccctagaatca

SEQ ID NO: 219177 - DNA, 308 bp, Glycine max
ctgcacgctcacattgaaacaggaggcggtatttttataagatccaacccacaattaaaagaaaaatgcgtttaacttttatcataacctgcactgggaactggcaaaaaaaaaacacagcatctatacaggccattagcaatccttaacgttaaaacatatcgggcctatatgagcgcgattttggttacataaaacgctggaatgggtcttacacaaaaaacacacaacacggtatcctctagattacaaaccatcccacaaccagcgattacctgccaaaaacaaacaccactggggtggactcc

SEQ ID NO: 219178 - DNA, 180 bp, Glycine max
acataaaataaactgacacggaaggggaaaagggtcccctaatcctttttttggcacatatacggaggcctctgctcacatgtgaacacatttacacaatcaaaaatggggcgatataaaaaaaaatccccaaataaataagggtcacgtggtgcggcaaaaacaactcgtaaaagaaaa

SEQ ID NO: 219179 - DNA, 369 bp, Glycine max
ttggcatgcacgcttccaagtaacaaaacgttgatcgagttggtcttgaacaccaaatatttcatatttaacgtaagtatcagcagcatgtttaccaagaatatcttgaaattacctcccaatgaagattccatactctggcaacatgttttgtagtgataatattatttgtccacttagctgcttattagaggcataccatgtagattgaatgctacatatctcctcaaattgcatgttgaacaaattgaggttttctttcatagactgtgcattgggaggttctttacctttcaaaaagtctagcaccatattccaagagcttcttgaaaaaggtggagggtttgtcgaactattgcgctcggtgat

SEQ ID NO: 219180 - DNA, 422 bp, Glycine max
  unsure (1)..(422): unsure at all n locations
agcttgaaagacatgcacaaagtgtgacttatgattgtggaatagggngnagcaagcaaatgctcacctccccctctaaaatttaattggattgagcttctcccaattcaattaaatttattttccaacacacacatcaaatattaacttaatgcatatgaaattacaaaactacccctaatctaaaaactagtctaggtgccccaaaatacaagggctgaaaaatcatacatttgtagggtaccctacctacgttatggagccctaaataaaaggcccaaaaataatgaaaccttaatctaatatgtactaaaataagtgggctcacacttagcccatgggcctaaaatctatcctaaggttcatgagaaccctacggtcttctcttgcatctctagcccaatctacttggagtcttttat

SEQ ID NO: 219181 - DNA, 337 bp, Glycine max
caaaaatgggaaaaaatggtcatctaagcctccaagtcccaatatatccaaaccaaaatctagcccccaagggcaaaacaacgtgggcttccaaaaagggatcaactacccaaagcgtttccccttttggatcttaaaacaaaggaaaatgcttatggccctaccccattttgatgccccatgggtaaactggtttgccccctatggccctagcgagggaggaaaccacaaagaccaaatcctcggaaaatggtgagtttcccatatggggggcttttatagcgtaacgtcctttcctaggggggggaaaggggcctataaaaatatcacaaaaaaa

SEQ ID NO: 219182 - DNA, 352 bp, Glycine max
accaaggcaggacgcaagttagcagggacctcatcaacaacgagcacaaacacatagtcgatgtcctacacaagaacgttgacctgttcgcttggcagccaattgacatgctgggaatccaccttagcactatctggcataagctcattatttgtcccttggccaaaccggtatcacaaaagaagaggaagatgggagaagaatgacgcacagcgattaatgaagaagaggacaagctcctcaaagccatcttcatcagagaagataggtattccacctggcttgccgaagtcggcatggaaaataaagtcaacggaaaatggagaatgtgcatcgctacattgatatgaac

SEQ ID NO: 219183 - DNA, 190 bp, Glycine max
ccatccactaaagaataagtcatggaagaaagagcttcgccaccaagagacggccccgaataaaaaacctagagagggcgctccaatggaggaaaagaaaaaaagaaggggggagcacgaactcgaacgaataaaaaaagaagagaagcggaactctgaagcgtgtcccataagacttctatccatcaaa

SEQ ID NO: 219184 - DNA, 242 bp, Glycine max
cacgccaccaagcgaaaacccaaaagaaaggggcgaaacagcccccacaaaaacccaggggcagggccacccaagggcaacaaaaaagcccacacaacaagcacgggaacggaaagggggagcaccaaccaaaaaagagactgccgagaagcacaaacaaacaaaccgcgcccccacaacccacacccgcgaagcagaaaaaaacacacgccaagaggagaagaagaccagggtggaaaaca

SEQ ID NO: 219185 - DNA, 423 bp, Glycine max
  unsure (1)..(423): unsure at all n locations
agctngnnaacccaaggaagcgcctaatatctcttatactttntagggcgggccattcttggatggtcttgaatttctcacggtccactcggaccccatttcttccaactacaaaacctaagaaaactatattatctacacaaaaggcgcacttctctatataagcatagaggtcgtttttcctaaggactgaaagaacttgcctgagatgtcctaagagatcatctaggctcctactgtacactaaaatatcatcaaaataaacaactaaaaaaatacctatgaaatccctcaagacattatgcataagcctcataaacgtgctcggtgcattaatgagcccaaaaggcatcactatccaatcatacaaaccacactaggtcttagaaagcggcaatccactcatcaccctttttcatcctg

SEQ ID NO: 219186 - DNA, 326 bp, Glycine max
atgacacactgcctcaacctgtgtgtattatatgaacaacagaagtcaaactattttaatcatgaatggttcttaaaaagattctactcacgagtcaaactatcattattattattattattattattattaatactattattattattattattattactattatcattattattattattacagttacaaacttacaatctcttgcacttttttatatcaaaggatgagaaaattaaacgaacaggagagaaacagaataattttcttatattaagaagatcttataatcttcttctgattcaatgattttcttcacacctctt

SEQ ID NO: 219187 - DNA, 171 bp, Glycine max
aaaaaaacacgaagctttaaaggggcccgcgaaaccaaaaatatattcaaaagaaagaaccccttacgcggttaatctaagcaccacaaaaacaccgttcgggagggcggaaaaaaacggggggaaagaaaaagacgacactaaactcaaacccctcttgggaaaaggggg

SEQ ID NO: 219188 - DNA, 347 bp, Glycine max
ttgatgataacaaagatgatgacaaaaatcccaagagaatgagttcaagattgaatcaagaacacttcaagaatcaagagagaatgagttcaagattgaatcaagaacacttcaagaatcaagaggaaatttgatttcaagattcaagaatcaagtttcaagattcaagtttcaagaatcaagaataatcaagttgaagattcaagaatcaagaaaagactcaatcaagataagtactaaaaagtttttcaaaacattgagtagcacatgaatttttcacaaaaccttttaccaaagagtttttactctctggtaatcgattaccactttattgtaatcgattacca

SEQ ID NO: 219189 - DNA, 127 bp, Glycine max
tcatttgctattggatcccaagtagctatttctttgtctatatttgcgaaggattcacaacaacgttttcctcttatagtactcataatctaaataaactttcatgaaataattaaaattaatttat

SEQ ID NO: 219190 - DNA, 396 bp, Glycine max
  unsure (1)..(396): unsure at all n locations
tattttgtaccaaatatacacaggctgacttgttngccaactcaaaaatctatttggttcaacatgcgccaagcggccacacccagcttatcaaacctaaaaataaactcttctaatatttcactatatcaaatacctcgctctgcttcaaaataaatgtcattctacgctggtttaccattcattccaataaagtaaaggagagtactatgcacaactaacatttacatcaatcacatagaaaaaccaaagggatatttattatgggtattagcggaaaaaacccaatttatcttacattggaaagcctacatgacacttatattttttcaaatgggacacttaatctgagacggacggagtatcacacatccatacacaaaaggggaatggagt

SEQ ID NO: 219191 - DNA, 425 bp, Glycine max
  unsure (1)..(425): unsure at all n locations
agctncatggttagctgatgagaatatgaacttttttccttacgcgnatcgaagcaagcagaaacattgtcttcagttatgctcttttactgctcccacatctacagagtgggtaaccaatgtgccgataagctagctaattatgagatagaccatccattggatgttacttggtgagagcccatccctcaatttatttgtaatcgcctttctcgcaatcgatgtggattgctgtcattttttgttaattgtctatcaaggatctctggaatagcctccccatgctctctcgggggctacctttattcttttctttaataatatcatgcctcgtttgctcatgataattaggcagggggcgccaatatagtagtgacgtccctatcctaattcgaagcctgccatactgcaacctttacattaaa

SEQ ID NO: 219192 - DNA, 398 bp, Glycine max
  unsure (1)..(398): unsure at all n locations
caccttaagagactgcagctgcaaccgcttgagagcggtagggaagctggatcttttaacttcaatgagggccttcaatggtgattctcaccacggagatacacgcaaagacaaacgataaaaggtagaggcggcgccatccactaggggaataaccatggaagaaggacgctccccaccaagatgagccttggataagaagcttggagaggactcttcaacggaggaaaataaagatggagacaaagagagaggggggagcaccaaatcgaaggaagaaaaagaaagaaaacttgaacttcgagtcgtgtctcacaagactcttatcatcaaagatacaacaagtgttacacgtgcttctatttatagacctangtagccttccttgagacgctctc

SEQ ID NO: 219193 - DNA, 240 bp, Glycine max
  unsure (1)..(240): unsure at all n locations
aacanaagagacgcggcagcagccgaggaacagaagaatttgtttccacaacggaccacaccagggaaggcaaaaggggacatgacaaaaacccaacgncgccaaaacacacaacaaaacgagggaaagcggacaccgcagcaaagaaaaaacaacggatcccacccaaacaccccaagaacagcaggggcaacaaacaacagacacccggcgccaaccaaaagaggaaacaaacaaaga

SEQ ID NO: 219194 - DNA, 287 bp, Glycine max
gacacttataaactcagctttttgctgaaattccatccctggttggtgtctcggtttatgttaacggcggggtctggtattggatgtgtgataggcgagctctgtggctgatttggggtggtctttgttgataattgactggtcttggttgatatggtggacgttggcattgagaaaggctgatattaccgagaaatgatattgatgggctggtggaaagcttggcattgtcgaaagaacaaaatagcttgggtcctccctccttctcatttttcatttggcctatc

SEQ ID NO: 219195 - DNA, 419 bp, Glycine max
gctgctcgtggagcttctatggatgctgtatctttgagcttcaatggggtcctttaatggagattttccaccatggagatgcatcggaagacaaaggaaaataggtgagaggaggcgccatccattaaggaataagccatggaagaaagagcttcaccaccaagatgagccttggataagaagcttggagaggatgcttcaatggatgaaaagaaagagggagagaaagagagaggggggagcacgaaattgaacgaataaaagaggtatagaagtggaactttgaagtatgtctcacaagactctcattcatcaaagttacaacaagtggtacacatgcttctatatatagactaggtagcttccttgagaagctctctgggaaaatcttcttgagaagcttcttttagaaaacttcc

SEQ ID NO: 219196 - DNA, 439 bp, Glycine max
aagtcacctgcggcatgcagcttagcctcattgagagattttcattatgtctataatcacagatttcttgtggatactgtactgaatggctaactcggttgaacctgaagcaccctgcttcaacagtgattcatcattcattatttgggtgggaaagtgtcccagtgcaatgacacacaaagcaattagggtgcgaaatacagctatctcatttgcaacaccaagaggagcctcagcatctaaagactggagtatgctgaggtcatacttctgcatagtttccacattagttgaaagaattaccctcaatgcagccaacaagcggccctctactgtttcttgaccacctaagctcacctggttcaagacaacaaatagatgaagtaatgaacttgtcctgtggattggataactaataccatatggctcttgtgttatg

SEQ ID NO: 219197 - DNA, 395 bp, Glycine max
ggaccttaagcgaccgagcagcagcctaggagggagacaagatctttatggagatcctccaccatggagatgcagcggaaggcaaaagagaacaggagaggggaggcaccatccacaatggaataagccatggaagaatgagcttcaccaccaagaatgtgccttggataagaaacttgaaaaagatgctttaatggaggaaaagaaagagagaaggggggagcatgaaattgaaggacaaaaagacggagaaaagtggaaaattgaagtgtgtctcataagatttcattcatcaaagctacaacatgtgttacacatgcttctattaatagactagggaccttccttgagaagttttcttgagaaaacttccttgagaagattcttgagaaaac

SEQ ID NO: 219198 - DNA, 371 bp, Glycine max
  unsure (1)..(371): unsure at all n locations
agctctaaacgtgccgtgggggagacttttttatctacnccacccacgttaccgaagaggtctgggtaccaatcccactgccgatgaaaactccctccagacgctcgggatactggtcaataccaaattctacatattttaaatgattcccagaacacccagtcccacggatactgaaaataatccgtgggaaggaatgccttcccaaaaaggagatggaagacatttgatattccagtcattcatgaaccacccatatattatgccaccaatggcgtgtttataaaccaacaaatttccatctaatccaaacaactttttaatttctcatatcagggcggacttcccaatgggagagagatccctgataa

SEQ ID NO: 219199 - DNA, 426 bp, Glycine max
  unsure (1)..(426): unsure at all n locations
gatgaatccagtcacatcactgcttcgtctactgccacacataattaggattatagatgtccttgctacttacaagttcaccttgacaaagatggcatggaccatgttgaaaatctaaattgaatcaaccccatatcctgcgtaaaaattcgcaatacttcgactgtacatcattcgcatgcatccatgcttttcattggtgcattgctcattgcattctttccttgagagataaaataaaataaaatgaacttatcaaaaagatnaggagacgctgtactgcgcccttaccgaactcgtgctagagctagagtaatgggtgaacatacaaggtgcagagaagatgacggccaaaatggaggcataaagagccattggcacatgataaggcatgatatcatgaaaagatatggagccatgcggtat

SEQ ID NO: 219200 - DNA, 402 bp, Glycine max
  unsure (1)..(402): unsure at all n locations
atttattacctatacttaacaacaaatacttataacactacacaataaccataaattggaagagtttgctacttacacaagttctatacacaaaaggtagtcgtattcaccaactaacacttatgcttaattatcttgaataacacaattaaagagagcttaatacttattttgattcacaaatccagccataactcagcaccacaactcaacttcatcataggcatcatctaggaaacgtataaaacanaaaaaagttcaacaacaagattacttctaggaatcgatttagaacatgttatgaactaaataacatgtatgaaatagactcacaattcacaagataggctaagaatgacaagaatacatgaacaaatgtatctggaatccatcaacaaataa

SEQ ID NO: 219201 - DNA, 262 bp, Glycine max
  unsure (1)..(262): unsure at all n locations
tttgatagccaccatttcaggagcgcccagcaccagcagtgcttcgaggccatcanaggatggtcgctccacagagagagatgcctccagctcaaggacgatgagtacacagactttctggaggagatagctcgccgacattggacgtcgctggtcactcccatggctaagtttgaccctaatatagtcctggagttctatgctaatgcttgtgccacagaagagggagtgcgagacatgcggtcatgggtgaggggtcagt

SEQ ID NO: 219202 - DNA, 236 bp, Glycine max
gacacctactttgcctaaagatgacattgaagatgagtctgttcgcgaataactgtgccctgatgatatcaatgaagaggtattacgacaaaatacgaaagattcaataatgaggcgctttgtcacgacattaaatggaagttgggattggagtatagttctctgaaagagtttaaagaagccttattggaatacaatgtgttcaatgggagagagatcacgtttgatttccatga

SEQ ID NO: 219203 - DNA, 353 bp, Glycine max
  unsure (1)..(353): unsure at all n locations
ctcagctaatactgtggtgtgngacaaagcgccttcatatgtatatttggttatattctatgtcctgcggcgtccgattagagttgttgctttatatgcagaaattttacacactatgttcaattctaggcttagactagcctcatcatctacatactggaaacatgccaatcccgttacttttgggttgaaatcttaaaaatatctaagggtatagtaaatacccaagcgttattcttagttgttttttagtttgaaatctgattacacgtttctgtacaggctcttcacaattgtcagaggcaaggtgtgagcgtcattctagtaacattcactcttattnttgctgctag

SEQ ID NO: 219204 - DNA, 376 bp, Glycine max
  unsure (1)..(376): unsure at all n locations
atctattatagaagggtcgtttcttatttctctacatttgtatcaccnctcaacgagctggtgaagaagaatgtggcatttacctggggtgaaaaacaagagcaagcctttgctttgctcatagaaaagcttacttaggcacctgttctagctcttcctgacttttctaaaacttttgagctagaatgtgatgcctcttgagtgagagttggagctgtatcgttacaaggggggcaccctattgctnattntagagaaaaatttatagtgccaccctcactaccccactatgataaaagcttttgccttaaaagagccctccaacttggaacataccttgttccaggatttgcatccataggacatatccctaatc

SEQ ID NO: 219205 - DNA, 456 bp, Glycine max
  unsure (1)..(456): unsure at all n locations
acaatttctaagctctctgaaagacacatctttcanaccattttgaagagacacatattgtctatatatatgtgtgtctgacttcaaacagtatgagagagatattctaagagaatntcattgtcaaatgctctctcaacaactcttgggaaaacacttgcaaatctattgagagttcatccaagaacatcaaattgtattatccactctaaaggatagaaatctttctattcatctcagaaagtaagttgcaatcaagagattggttgtctcttgaattgtgagtttccctaacacaatggaaaggaattccttgcgtgttcagaagttgtaataaggtttctttacacagttagtgaacatctcaagtgggttgcttgacgactgcaggtatgtacgggaagtggccgaccagtataatcaagatagatttcttcttcattatctcatatttat

SEQ ID NO: 219206 - DNA, 402 bp, Glycine max
  unsure (1)..(402): unsure at all n locations
agctntgattgcagaagccgtatctgactaagacgttgttgttatccatgctgctatgggaggtggaactgtcatgaatctcttccatcgccgtttcccaacaagatgctttgatgtggggatagcagaacagcatgctgttacatttgctgcaggtctggcttgtgaaggtcttaaacctttctgtgcaatttactcatcattcatgcagagggcttatgaccaggtaggataactactcctctccttacataggaaaaatttctgctctatgatctgctaaatgataagacaatgaattttagtggtcaagacatgatcaatataccaccataacattaacttanaaatcaattctgaaagcatgtgttccatctccattctacaggtggtgcatgatgt

SEQ ID NO: 219207 - DNA, 467 bp, Glycine max
  unsure (1)..(467): unsure at all n locations
acctgcggcatgcaagcttcttgaagttggaatgatatatgaccattccgatttttctatgggtatttctgtgcacagcagccctaataagggtggaataacactgataaagaatgaccagaatgagctgattcccacaatgaccatgaccggcaggagaatgtgtacaattatcccttctaacaaggcacaaagaaacaccattttcctctccccttcatagatcaaatacttgagagggtagccgggcaagccttctatatctttcttgatagaactcaagggataataaattcttgtaatccgaagacaagagaaacaccttcattgccattggagtcttantatcggaaatgcctttgaattgaatgacttccacatccaaggctgatgcatcttctagatggtgaaatgatgatgtttatggagattcttgatccgaattgttactctgcctcacaactgaa

SEQ ID NO: 219208 - DNA, 191 bp, Glycine max
acagatcttgtgagcgcgggagatgacggaaatctccccgtgtgaaccggcttgtcggacgcgattgacgaatggcgcacaagatactgtagtctctgcgtgctatcacgctcttcgtcttactgacagcacagaagaccgcttatgccgatcatcactcgggcattaacgcccgttgcgagactcaatgt

SEQ ID NO: 219209 - DNA, 475 bp, Glycine max
  unsure (1)..(475): unsure at all n locations
acccttagaactagcctttgcactcctgngcaaaatgaaacanagaacaatatccaaggatatctaatggtatacttacaaaaacattcacataattctcaatgaacatcaaggaatgaaaggaatgggtaacatctaacataacgagatccaanaagtcaagacattcatgaaaatcatccaagcaacccaatcatggcaaaatagttaatcagctcaagaatgaaaagtgataaagcctcacaagatatacactctatctctcaagtgtctaggctactatttaccctcaaagcacccatgaaagcaaacaccacataaacttggctagattctaaaattgacaatcaacccataaacacaagcacatgaggatcaaaaggtcttttaatgtcgtaatggcgccaacgacatcgtatggagaaatatggaataagtggctaaatccacaagaatagaggagcagacgggaata

SEQ ID NO: 219210 - DNA, 440 bp, Glycine max
  unsure (1)..(440): unsure at all n locations
gctatgtgctctctactggtccctttcttcccttcgcaacttgagttcactattgctaccccatagagctccgcgaaatttgttccggccatactcttccttgcgagccctcttggtctcttgttcaagggctcttgcggtaattgtattctcttcccgtaacccggcacactccttccgaacgtgtgtagcagccaacttgaacttctccttggcgagttttgcctttcctaactcgcttttgagagntnggacttcttcgtcctcttccggtgcttcanaattctcttcgctgacgactnttaacttggcgagccaatctaaacctcgtatgcgaactttcagccattcgtggacccaccaatgatgccattacgaatgcctctaagctcttgatctttccttaacggggttttnccatgcctatggattctttgtat

SEQ ID NO: 219211 - DNA, 410 bp, Glycine max
  unsure (1)..(410): unsure at all n locations
gcatgcatcttatgntgatcccatatggctggagncattatacttattctattganctttattatcaccttangaattcacttagggagagtgacctgacatgcccattgcgtggcaatgctttttatgtactcctaggcactctgatgtggtttttcactgacatggtaccatattgtatataggcttgagtcttaatataagtgtcgcatagcgcctgcgaatagtttactatgaaactggcgagtgttgttacgtcttgagccgagtgcgcgattcacgtgtatagccttggtgattgaaaactgatctttaaatgataacgtacgaactgacatggatcgtatacgaagagctatgtgatgaatattccataatgtctctagttattgcttggttacccgaattat

SEQ ID NO: 219212 - DNA, 294 bp, Glycine max
acactatgctagatggacaccatgtatctgacatctcactactatcaagaaggtcacttctcccaagaaaatctaatattaatgggaataaagtgagcagacttggtcagtctgtcaacaataacccacatagaatctaaacctctaagggttttaggtagtcctaccacacaatccatggaaatactggtccacttccactggggtatctctaacggttgaacataccctgagctctctaatggtctatcttaaccttctgacagactatgcatgcatagacaaactcactaa

SEQ ID NO: 219213 - DNA, 427 bp, Glycine max
  unsure (1)..(427): unsure at all n locations
tcctagagcaattcccttatgttatctaacatannaagggaaaaaaggtaatattgtagccgatgctctgtctcggcgtcatgcattactttctatgcttgaaacaaaattgattggtcttgaatgtttgaaaaacatgtatgaaaatgatgaaacttttggagaaatttttaaaaattgtgagaaattttcagaanatggtttctttatacatgaaggctttcttttcaaagaaaacacattgtgtgtgcctaaatgttctactnagaaattgcttgtttatgaagcacatgaaggaggtttaatggngcactttggggtccaaaatactctagaaacattacaagaaacattttattggcctcatatgataaacgatgtgcagaaatcttgtgaacattgcattgtatgtaaaaaggcaaagtct

SEQ ID NO: 219214 - DNA, 497 bp, Glycine max
  unsure (1)..(497): unsure at all n locations
agcttncaccatataatgctgagcatngtcatgtgacttatanattgttcttaattngatgaattattagctntgaagaaattacttagctgaaatgataaataagagagagaaaaacctttttccctcgtgttagagaaagccggatgtgtgaattgtcaaacatgccattcctaattagagttctgaaaattgcttccttaatctgtaatgttttgaacaacattcattatgatgataacctaaacaagactgaagacagtagcatttagtactttgctctttacagaagaacagtaccatatgactaacatgctagatgaactgaatgcatcttagactcacctcatctcaagtaggaacattntcaaaagctaaagcttatgctgaatcaaacaacctaataagaagaaagaaatgttagatgacattacgtcaacaacattgatgatgagaagatgttgtagaataaaacatattatgagtataaaatatat

SEQ ID NO: 219215 - DNA, 364 bp, Glycine max
  unsure (1)..(364): unsure at all n locations
gcttcgagatgcttaactcttagcttacgtatatgccgaactgagctatcttctcagcagatttcttctnctgctgtctaagtatcgccccaatctgctctttctcgagatatttngaaacataatcaaactctgaaaatgaanacatgtatgactgtagtgctactaacacaaatattatgatttccacaaatgctgatctagatgtaattcgaaatccataatcatacttgtggaatccaaccaattctttcatggattctattgaaccactgttgatatcactgaagtctcaacaaaaggagaatgatatgcaagagacatgacaataaggacaaaattgtacatccttaagaatctaaat

SEQ ID NO: 219216 - DNA, 258 bp, Glycine max
acacaaaccaaaccgaaaaccaaaagacagggcaaaaaattaaataagataaaccaagccaccccaagaaaaaaacaaccgaaccaaaaaccaaaacgccccacccaaaacaccagaccgaagttaaaccacagataaaaagcaagactaacaaagacgaaactccaaaacaaagccaaaaccgggtataaaacacgacacaactaaacaagagacgcgggggggagacaacccgcgaagccccactctctcagcgga

SEQ ID NO: 219217 - DNA, 441 bp, Glycine max
  unsure (1)..(441): unsure at all n locations
tcattccaatatgcatgtgaattttgtctcatcaacaagaatcaagccaaggctattgtgcaagcaatcaatggggcaaaacacaccaaatgattataatgatggatggctcacattctcccaaaggtaaaatcatcactttcaaattgagctttcaaaactatcatgacatgtagagaagaatcaacgatttcaagtcacaaaatgtcaagaactnttattttcaaaacaattacccatttcttgaacatatcctataattcaaagaanaacatgcaaagtcgtacgtgcacacaaaactgacccacaatattaaactgaagatccgacgaaactaacaacattaacaaattaacacaactaacaaattaacanaaccaacanaactagctaaaccaaagaacacttccgcccncccccatactaanacaacacattgtc

SEQ ID NO: 219218 - DNA, 482 bp, Glycine max
  unsure (1)..(482): unsure at all n locations
agctataagccaanaaaacatattgtgtcttgtnganatacgtctgccccacgngaagaacagagatggcttgttaactataatacggtacttataatccaccatcttcattctatatgtgagtctataatatcttgtctgcctgctaacatcttacgtggaaaagttgaatcactcgagaatctatctttatttctattaataacccctaattctacgtcgacaatgaccctgatagtcatttgcactccaatctatgcaaaccaatgcacatctataatggatctaacctaattagaggtttggtactaaaatattgtaagtgcctagacttccagtcaatgcgagtacctacttgataagggaaatgtgaatatccttatagccatggagtaaagtgtaccagaattattcatatagccttagcgctcttgatcttcggcaactgatgtgtcctatatacaatggctatattattgtac

SEQ ID NO: 219219 - DNA, 415 bp, Glycine max
  unsure (1)..(415): unsure at all n locations
tatataataataatatctactactttatcatatacactaataatatcttagacaatcttaatatatattatcttatgcgatataatattctaaatacttttagttattttgtgaaatatatactttaatgtaccttattttttacaaaaataaaattaagcttagtcaaatattatttaatttattattaatgagaaaactattatttaaaatagtatccaaattatataattaggattaataaatttacataattatggacgaacttaattaaaattatacttcacanataggttaactctgaattcatatgtatctactttacataaaatncaatcctacaactcattcatgtatatataacggctttatattaactcttgttagtatgattcactactactttaatacatgt

SEQ ID NO: 219220 - DNA, 374 bp, Glycine max
agatcccactgatgttgtctttagctctggcgcttaacatgaagttgctactgtgcaaacagagagagtggggaccaaaaacactttgtgcagcaaatcttcagagaagtacaatctgctagtgtcgtctactgctcagagctgactcttagtgtacacatcataagagaagttctcaacataagacaaaaggatttaagaatgtcgagacaagacaattcaaatcttctttcttgtgcgctatggcacgagtttcttactgaacatatggacattacttcctaatgaatgggtttagcacttgaggatcatgtaattgttccattggctttgaattgagagccaagtgctaaagcacttgtcttcttaacact

SEQ ID NO: 219221 - DNA, 443 bp, Glycine max
  unsure (1)..(443): unsure at all n locations
agctcagctacacacacccctcttataactaagctcacctccttgagaagctctcttgaaaagattcctaaagaagttagagcttagctgcacacacctatctaatagctaagctcacctccttgagatgagaagctagaacttagctacaccccccctataatagctaagctcacccccatgacatattacatganaatacaaaaatagtccctactacaaagactactcaaaatgcctcagaatacaaggctaaaaccctatactactagaatggccaatatacatgacctatacgaaggaataaacctatcctaatatgtacaaagataagcgggctcatacttagcgcatggggctcaaatctaccctanggctcatgagaaccctagtgccttaccttggatctctggccaatcttactggagtttctatccatgccc

SEQ ID NO: 219222 - DNA, 379 bp, Glycine max
ggaccttaagcaccgcggctgcagctttatatagctgaccatttatcaataacactgttgtttttattcagaaaattagagttcttagtgagagtgattctcctaaattcttgagtgattcaagaacaccctggctgtatcaaaggactttcacaacctttgtgtgttgccctcgctggaaagagtgattctttcccttctatcatctccacccttggtctttcaaaccacaattccagaaaatccacctctgccaaaattatctcgtgaccataactcccatttcacacactcaaataagtggatcttgagcctaattgaatttcaaacgagaccttacctcgtttggatcactcatttgaccctgagcttcgtattg

SEQ ID NO: 219223 - DNA, 432 bp, Glycine max
  unsure (1)..(432): unsure at all n locations
gctcaatgttcctcccttcanaggtagaagtgatccagatgcctacctggactgggaaatgaagactgagcacgtatttgcctgcaatgactacactgatgcgcagaaagtcaagctagcagcagctgaattctccgactatgcccttgtttggtggcataaataccaaagagaaatgttgagagaggaacggcgagaggtagatacatggactgagatgaanagggtgatgagaanaaggtatgtgcccactagctataacanaaccatgcgacagaaactccaannggctgtccaaggggaattaaccgtggaagaatattataaagagatggaaatggcgttagtgagggccaacatcgaagaggactccgaagacacaatgtgctcgttcctgaatggctanaccctgaaatcagagatgtgtgaata

SEQ ID NO: 219224 - DNA, 321 bp, Glycine max
acatttgttgattgtgtcaactattggcattgtgccccctctaccgtagaagaatatttcttagttccaccatctgacttgtcatataagcaataattgtcttctcatccttagtcaatcgaccagcgtatggatgtccaactaatgacttgcccattatgattgtgactccacacataacttatatcatcttgcctcaccatggttcctgaactaaaggcaccccatttctactacagtattctttacaaatttttctcctaaccctactgccactctttacaccaatacataagaagccttctctatccatgttatgct

SEQ ID NO: 219225 - DNA, 499 bp, Glycine max
  unsure (1)..(499): unsure at all n locations
cccatactgttcccgaccattggacattgttatttacgcatgatacttcccttcctcatgaggccccacccacacaanttttttattgcctttatttctgttgattgatnttattcaaactcgaatgttgagctaattcataacacgattagttactgcacaattaatgaaaaatgattaaatgtggaaggcactgtgccgcaagtgcattcaaaattcctgacttcttactaatattcctaccgcctaatctctgtggtgtaatattcctaccgtcctaccttatccttcaacaccgtgtacttaagtgaagaaataaaataaatacttgtggagatttcgtcanggcgatctactttattttaaagagacaataatntctttaatgttcttaacacaactttacaattaaacagttatattctttttactacaacagatatttcttagaacagcctaataaacatgctacacatatcgatggttctatcttcattga

SEQ ID NO: 219226 - DNA, 392 bp, Glycine max
  unsure (1)..(392): unsure at all n locations
aattttctggaaggcgcaagtgggcctgattgctatctgcacccccgcctttactaaatacacccccttgctatttttttggtgattactttccgtacgctacaaaactttacgaatgtcgtaacgatgtttgttctctttctgtaatgttacaaaaccttacgaattacgtaatcatgcattttttgccttccggaacgttacgaaactttacggattgcgcactaacacttnctttaattttcggcatgtcacggaacttcacgggttgtgctacaatgctatctcttgaccttcggcatgctacggaacttcatgaatagcctatcgatgggtgccaagtacctcgaagtggtcaaacgaaggtcgcatcccaccaacggatggtcctc

SEQ ID NO: 219227 - DNA, 465 bp, Glycine max
  unsure (1)..(465): unsure at all n locations
tgcaagcttgagggtgcgtagcccaccatctntctctttatagtatcgattatgtgnctaccatcacgatcatcgtctccctttccatcattgggggtaccacttgggccgccagatccctccaccttgtgggcgtgttctttgaaagatccgtccccctttttgcaaatgttctgtagttgcatcctatccagaaccatatcaaaattgtactaatactgcctaacaaaggcaaccattaggtccttccaagaatgtactcgggaaggttccaagttagtgtaccacgtaacagctaccccagtaagactttcttggaaggaatgtatcagcaattcctcatcttttgcgtattcccccatcttctgacaatacatctttagatgggtcttgggacaagtagtccccttgtatttgtcanagtcccagcgccttgactttgggaggggtgatgatattgggtct

SEQ ID NO: 219228 - DNA, 460 bp, Glycine max
  unsure (1)..(460): unsure at all n locations
ctaagcttccatataaagtctcccaatagcatatgtagtcaccgagcctcctagtttatgttcctcaaaggactacnnnngcaccnctagccaccgcctaacaacagataatacctgcataaatatgaattaaaaccgatgatatatatatatatatatatatatatatatatatatatatatatatatatgagtcactacaaagccaacactgcgtatgaatattaagtgtgagagatttagattgtgaagaggtaaacaatgatcatattttaattaccaacacagtatatttgttgggagggtgtctggcacattcatgcaaatggtttgtgaaacaggatatttgtttctgactaacaattcttgtctaaacccgaatatttcttcctttgagtgccaccttagaaaatatatgaatactatcttcgtttataaaattttattcgcaaacattctt

SEQ ID NO: 219229 - DNA, 419 bp, Glycine max
agcactgcagctgcacttattctgacttactgaaccctttcttttgtgtagcaacaatctaacacctcagctgtatactatcaagaaaataacactcttggttctaatttattcattcgtaaaatttttcccaatatctaaggaggtgtttcgttccacgtcttctaattacactccttggattcttatttttggtggcattactattgacaacaacgccattctctggtattataagcaacaaaaacctttgattagtgtaccgtccatatatgtcttgactaaacatgatgtggccccctatgaagctccatctgtgttcagagcttcaacgactatgtaccatgccactcttatataactcaatcatacctgatgtgcccacctatcatgctacattgcctctgttgagtgaacag

SEQ ID NO: 219230 - DNA, 465 bp, Glycine max
  unsure (1)..(465): unsure at all n locations
agcttaaagctcaaggaatagcttgaagaagctntgtctatttntttggctntnacacgccccacttccttgagtggcatttatattggctggtaccttgcgtattgtgtcttaataaatttaatatctgtattgcatcatgcatcatcatcggtagtgagaagaaacatttctaagttagaaaagtttcttcagaggcaaatactttgttttaatcgactacagtgttgtcttattcgattacaacaagctatcagaagcttgtagagttcagtctcatatcggtttaatcgattacagtagtctcataatcgatacactgttgttgggatgatacttgattatcaggagctttgcttaatcaatacttctcttcccttagtgtcaaggtgaacaaacacttaatcgatacctaagccttaataataaattgtcttgagtattcaggtgtgggatacacttaat

SEQ ID NO: 219231 - DNA, 453 bp, Glycine max
  unsure (1)..(453): unsure at all n locations
tctatacattccactcctctcaattcatacgaantcttattctagtcattcataaacactcattcataagaattaacaccactgaataacattatcaatcagttcactgttcaaacaagctttntgtacaagcaatcaacactcaaataactagaatttaaatgacaaatatttaaatgaatgaaacataaggcaactaaataactaataactaaattgttcatgatttgcagaaattaaaacaaaacagaanttaaacatcctactcattcgatggctgatcttcatttaaatccagcgctggagtagctggtgcatcctgaagaatgggtnggaggggatggctctggcatgggatattgtgaagatacctcttcttgaccatagatgtatctgcagcaattaaagagggctanagaggagtgagctcatcctctgctataactggcttct

SEQ ID NO: 219232 - DNA, 418 bp, Glycine max
  unsure (1)..(418): unsure at all n locations
cacgttaacatcgggtttttaaaaaatcaatggtaatggtttaaaaactcaatggtggtagaggcagttaacattggttttntaaaaaagcgatgttgttagtgtacgttaacatcgattnttggaaaaaaaaactgacgtttttaggaattttttttcaatgtgctgtttggtttttcaataaccccaaaattaacctacaaattntaaaagcagaccacactgcatataattntcattgtgttntgaaatagtttttaccagaaaatccatgancaaattattaattactatngaataaaaaaaaacatttaatgttaaggagacatgaatngtanaaaatgtcaagtgaactacaantacaaaantgcctaanatcccgggttcattttaaacttaaataaactttgccactgat

SEQ ID NO: 219233 - DNA, 312 bp, Glycine max
  unsure (1)..(312): unsure at all n locations
cctataggttggacctcttagaagagtatggagtcagcaccacttttaacatttctaatttaattccttttgcaggcggagctgatattgaggaggaggaactaacagatttgtggtcaaatcctcttcaaggggaaggggatgatgcaatcctccctaggaagggactagtcactagagccatgagcaagaggctccaagaggattgngctacagttgttgaagaacgccctanggttctcatgaacctcaaggtagattctgagaccatgggccaaggttgggtccaattatctttgtacatattagact

SEQ ID NO: 219234 - DNA, 236 bp, Glycine max
ctgatgatgacctgaaacatcaaatagagccatgctgcttctaattaatacaacattgttcaacagcacagtcccactaagattcttaatagcaagccgtgcctcacaatgcagagagtccaaggcattcaaagcacatgtaatcgattaacaatacatgccatcgagcaccaacgcacatgagacagtggaagccattacacatcatatgccttctactaccacagactctgaat

SEQ ID NO: 219235 - DNA, 372 bp, Glycine max
aagcttatgagaaccataaaactattgtgtccttttttaaacaatgaggaacttcgcgagtgtccattgaaaacctttattaaactttcaagttagtgaaaggctaacgaaaattaggaacttaaaaaactaatccttattgaggcgtggtgaaatcatgcaatactaacaaatagtagttgcttaagcattcagatactcccaagcttcgaaaacttcaaaaggaacagaagacctcaaattattatgtattatgaaatgtgccaaactaataccactgagatagacgtgcaaaagaattaatcttaactcaacctgaaaccctcaattatataagccacgcctactttttaaaaagaggaacatttaagt

SEQ ID NO: 219236 - DNA, 487 bp, Glycine max
  unsure (1)..(487): unsure at all n locations
tatatgcaatgtggtaccatgtcagtgaagaacctcggcgggcgtctatttgtcatgacnaagacagccacacaatagtaagtcaagtcactctcactangtaatatcatanggagaccagtcagggtcacagtgttttgcgagaaatttccaaccatatgagatcaacataggcttaaaggagcactcaaaccgtgtgacccccaaggcctacactccgaagagtccgtcagggcctctccctcctgattcaggtccaaccaagaaaatattttagcacacagactctatctatgaactgtacaaaacacatgacttctcaattgttctcaaaataaatntaactcgtcgtcctttaaggggtctatcattaactcgtcgccttaaagggactaacattaactcgtcgccctaaaaggacttaacataactcgtcgccctataggggacttagcattaactcgtcgccttgaagggacttatgatc

SEQ ID NO: 219237 - DNA, 287 bp, Glycine max
aactagctgaaattgtcgaaacagagagacgaagatagagctcttccaacttgtggagaaactcagaacacttgttaagcttgaaaataagaaaaaatggttctctcctcttgtaactctttgaaatgaggaagaaaggccccaaaacttgcttttaaagaattatgaagataagatcaatgacttttgcctgaaagaaatttgatacaagcttattgaccagcttaattatcaccaagattgaatacttggaagccaagtttaatgtgccaagacatgcctcttat

SEQ ID NO: 219238 - DNA, 532 bp, Glycine max
  unsure (1)..(532): unsure at all n locations
cttgaactcgctgcaaattggtcggaacagagagaggaagataagagcttcttgcctaagctntgatggaagaaacctcaagaacacttgtatcaagcttgaanaaataatgaagaagaatggcttcctctccctcttgttaactcttgaaaatgaggaagaaaggccccaaaatttgcttttaaagaattatgaagataagatcaatgacttttgcctgaaagaaatttgataaagccttattgacaagcttaattatcaccaagattgaatacttggaagccaagtttaatgtgccaagacatgcctcttataggtgttattgcttttgaaatnttagccaaaaatggaagtagacataagaaaaaatggtaaaaactacttttgctaanactggaaatcttatcttanatgtaagaataatgtgctaacttcctagattattttgctagtctccctaggaaaacatgtactcagagtaaacttcacacataatctactcatacaaagacaaattacattgtgactcagt

SEQ ID NO: 219239 - DNA, 500 bp, Glycine max
  unsure (1)..(500): unsure at all n locations
agcttgcatgacttcttgtgtcagctgggagaaaanaggaacttctgnttgtagtgcacgccctncttacttgtaggcgtgatgatatcctatgggctagcttgatgatactgatattnttattgctcctatatcagaatcaattgtctgatgtatttgttaatatgtggctttcttatttgtattactagggggagttttcaagttggaattattntgccagaagaatatccaatggcggctccaaaggtacttaatttaagtgatgcttttttttctatatacatcgtggtattcttttggtgttaagtgtttaagtttctgttaagttttggtccacctaacagaaaagacaacgttatatatctttatcttcaaattgttttaacactattttttgtgttgggtatctaatgtatagaattatgtatacctgcctatattaacatgatggggtacgatatccagaanacttgtaatcaattgaacagctgcttggc

SEQ ID NO: 219240 - DNA, 398 bp, Glycine max
  unsure (1)..(398): unsure at all n locations
acgagcatagaatcgcggatgagtatgctcaagtatatgcggaaaaagaggctagaggaagggtgatcgactctttacaccaagaggcaaccatgtggatggaccggtttgctcttaccttgaacgggagtcaagaactatcccgcttgttagccaaggccaaggcaatggcagacacctactncacccccgaagagattcatgggcttctcggctattgtcagcatatgatagacttaatggcccacataattagaaatcgttaggaaacttgtatggtctctcagaccttgactagatacgacttcctttttttttgaaaaaaatgagtnggtccatgttctactccaaaagcttggcaaatanatcactctacatttatctctacatgcattgat

SEQ ID NO: 219241 - DNA, 180 bp, Glycine max
  unsure (1)..(180): unsure at all n locations
atcagctcttaagagccatggaactcaaaactactaaattggacattgtattgggaggtaaaattgtagattgtcattgaaaggcaaaaaagagtctccaagtgtcgattatattcaacacatgttgtgcgtggtaatcttgttgtaaatntcaattactgtgtaacaagttgtgattag

SEQ ID NO: 219242 - DNA, 212 bp, Glycine max
cccaggccgaatggcgggagaactggactagggggttgcaaacactgactccacccccgcttctcgaaactagactacagacttgctcactaaaacaaacccacagagtgggggtgcctattatataagttgttgacaaccagggtaatcagtaacaaagacaaggttgacatacaggttatccctaatgatagtaggctgatatccagcgc

SEQ ID NO: 219243 - DNA, 448 bp, Glycine max
  unsure (1)..(448): unsure at all n locations
tcgattactagaagttntaaacgttttattacaacctttagaaatctgaatcttaaatttaaagcctgtaattgattacaacttgtgtgtaattgattaccaacatgagaattcaaatttcaagtctgaagagtcacaactcttcagaaattaactgtgtaatcgattacaacagttatgtaatcgattaccaataaggaattttcgaaaataactcccaagagtcacaactgttcaaattttttttgaatggtcatcaatggcctataaatcaattaccagacatgaaaattcaaatttcacgtctgaagagtcacaactctttagaaactaattgtgtaatcgattacaacaattatgtaatcgattaccagctanggagatttcgaaataactcccaagagtcacaactattcaagaagtnttgaatggcatcaatggctataat

SEQ ID NO: 219244 - DNA, 407 bp, Glycine max
  unsure (1)..(407): unsure at all n locations
ctaacttcngaaccatanggcataaacctgaatatctattcgtatttccactataccagagggaaaaacataanatgtgtcggctaaaagctaatccaaaataaaggaaattacatactgtaagagaatatagatatcatgaattatgcataatactttttgtaatcgcccaatccagtaatatggtagcgttgcataatcaagttctctctgtgacccccttcccttcttcattccagaaaaattaccttcttcataagcttctttacatgacactttagcttcctcgttgttttcactgtcatcataataccnacaacaaatatttatttattaaacgtagagaactgcttgtntatctatcagctataaatgcatatctaagcattcaaaacaccactactttg

SEQ ID NO: 219245 - DNA, 419 bp, Glycine max
  unsure (1)..(419): unsure at all n locations
ctcagctaataagacttgcattcatnaactttggagcacttatatattattccttatcnaacatgactctaggtctagtttttaattttatcaagttatgatatcatgttactttcatattattgggctgtttaaaaactattagcttactcatactgatttgattatggttcacttattatcttaataataactaccctatctttctttctattttatctttctcacaaacattcttctatttataaaacttgtacacaactctccgtttataaatgtacacttaaattagaatcttattttgatacaatgacaaagttccaacataaaaaatctattcatatacatttctttcgtgaatcttcataaattgtacaccaatatgtcccgtgacaaataaatgcaaaattctcaatgtg

SEQ ID NO: 219246 - DNA, 495 bp, Glycine max
  unsure (1)..(495): unsure at all n locations
nnagctttatttggctcgactcgaccttaataatagtcttcttcacaataaatatnnaatatcngatggggtaggaactaaagttagaacaaaaaaaggaaagtcaatcaaaataatattgaatataaaagggcacatgactcacacctaaattgtaattaaagtccttgattataggaataaaagttatggagatgtgtaatcaaagtctgatagtttaaaaaaacattaattatatccaacatataatattatatattggtacccaaaaaataatatatatatatatatatatatatcctatctgtccgtatgatcctactccgctgacctctggtatcagagcctgatggggaagtangaataatgtncgtaagggcatatgttaactgaacttatggatctgaaccatgtacagtaaatttaatttatacagtatgtgtttgaacagtattttctcgacacacagtagtctgatattttagctgaatgata

SEQ ID NO: 219247 - DNA, 321 bp, Glycine max
acgaaaagtggagaaatttaatatttagctaaattattcttttggtgaatagttaaattaatatcataataaattatatataattttaaatattgatttaaagacagttttaattagtttaactattaaattgtctaagaagttgttaaaatatgaataggatcagcttttataaagatggccaatttttcacaacaaaatttagatttaattaacttgtaaacttttcatttatgtcagtttcagttcacgttatatacggtccgatgttgtatacaattaacaataaaaagtgaacaacaaatgaaaatgaaaatatat

SEQ ID NO: 219248 - DNA, 525 bp, Glycine max
  unsure (1)..(525): unsure at all n locations
tcttaagtcacctgcggcatgcaagcttgttaccattcaacacagatttctatggtttttgtgtactcnatcataataagattgcgtggattaaatgggatacaatgtgtcttccaaaagacaaggagggcatacgcatcaagacttttaacatagcattgcttggtaaatggagatgggatctttttcggcatcatggggaattatgggcaaggattctggagtctaaatatggtgactggagatgcctggctgaaggaacaagaggcagcaaggattctatttggtggcaggacctaatggcaactcttaatcaatcacaacagggcactgcttttcaaaatgtaacaggttggagtgtatgatgtggtgataaggccacattctgggaggatngctggactgctgatgaagtatctntaatgataaaatatcctatgctgtaccgcatttcctgtcagcaaaagcatctcatttcagcagctggcagtcatacagatgcntgctgggaatggagtctcacat

SEQ ID NO: 219249 - DNA, 468 bp, Glycine max
  unsure (1)..(468): unsure at all n locations
cccatcacatgtggtactatgtggcggtcgggctattgtgcacaacaagttntccacatccacaaagcgcgcataaacccaccatcctctgttgcccacctncaactgagctcacgtactcccacgtagcccatatcctcgtttctctcaacaccgggtccccatcaatcctcccaagctttcacaacatccaagcaaaacaacattcaaacagcataagctatcacggccaagcaaaacagagcaaaggcagaaaactctgccaaaaaaaaacccaaccaaatcacagcttttctcacttaaagatcccagtaacaattccctcgttccgggtcattaaccgttggatcgactcgaaattntactggaagctttagacataagcctacttgtgaccgtgggattactagcaacatcagaactattcggactactcttccacagccaacacaccaagcgttttctgac

SEQ ID NO: 219250 - DNA, 435 bp, Glycine max
  unsure (1)..(435): unsure at all n locations
gctttgtcagcgcgggntggatgtgcgacgtgtaggtcaccatgatacatgttttattttctcaggagcaatcaaattgggtgtgatcgtgccctccgaagttcgaattgcggaactagcgaattgtcaaacaacccagaattttcgtggcaaacacaatgtaattcgttagtcctaaccttatcgctaggcctaggctttaggatatttcctccctgtttgggcttgtcttttggtaccataaatatatgaatatacaatccttcttcatttgttcttgccctttcatccattctcattctgctgcatgtttatatntgttgcgattaaatggtacaaatttgacaatgagtcctatgaaggtaatgataccgaggacccagacatcaattttgagcaactggtaaaccaagctgaggatgaggaagatgacga

SEQ ID NO: 219251 - DNA, 523 bp, Glycine max
  unsure (1)..(523): unsure at all n locations
cggaagttngacanacttggtgaacttggatctttacatgaatggcattgttactganacagngaatctatagntgtagacagaattttgaaaccttgatctgttgactntnttcattntaatttaattcattntactaagcctggtattattaaaatttaaaactaaaactcttacaagttaattataaactttctctagtttactttgaagtggtaatgctctatcatacaacccctttactttcatntttgtccttttgtgtcatcaatttgcttagcgaaattcttgcttagttgatattagtcactggattaagaatgcatgccttcaaagatcatatttattactcccgtggctagaagaagcanacttgtgtgacatggaattgttgaaatataaactngatttgngcctaaattaattattttggttccttgggacttagttatttgggcttaagtaactatgggtcatgtntctagagaaatcttgtagtgcttggagtgtctagatatttctt

SEQ ID NO: 219252 - DNA, 201 bp, Glycine max
ccaagagaaaggaaatgctggtggtcaattatatagacacgggcctcatataacagagtctaaactttgaactctgactttaaactctgagcactactcccccttatatactatttgaaatctagaatctagactaactactacctactttatacaactactttgaagaagcaactactacttcccttaaacaacccccgg

SEQ ID NO: 219253 - DNA, 256 bp, Glycine max
gcacagccccgatccacggaatggaaggagacccccgataccacagaaaggaacttcggtaaagtcaagtggccagttaagaaacttcgtaagtcggcctcgctgaacaaaaaagactaccaacgtccagcttaccaaccacatgagaactccctcgacgggacagacagccaagacaaccagacgcacactcacaaagacaacaaaaagaaagagcgctcccaaaaaaaggcccaagaaaaggaccaaaaaacac

SEQ ID NO: 219254 - DNA, 108 bp, Glycine max
acagcacaatagaacataacaacaaataagctacatgttcatatctacagacacaagcaaattaacatggtatacaccatacacttgaataagccaacacaaatgttg

SEQ ID NO: 219255 - DNA, 419 bp, Glycine max
  unsure (1)..(419): unsure at all n locations
ttatctcagcanatgcttcatcccgaggaacaaagatatttagacattntcgctcagatagtgggtctgtataaagacaccaataagaaaacatattgaattacgtactcagataattcgattatctcccaccataaataatgtgaaaataaacaacaaaaaatattatgatagtaagcaaaaaaaaaggcataatattattgaattatgtactcagataattccattatcttccaccataaataatgtggaaataaacaacaaaaaatattatgaaagtatgcanaaaanaaggcataaatattataattgggcagtactttgagagtaaatctcattgcataattaanagcgatataattcatcaataagtcatcgatctaagtagaactaanatagataatttaataaaagtctca

SEQ ID NO: 219256 - DNA, 418 bp, Glycine max
agattggttggatgattatccaacctaatttgggatctcaaacaatttaaggattgattctattaaactatctctaatgcatttgactaaacttttacactctgaatatcattcatagtaactatgataattttatttgcattagtttggtgaattggattgatgatattaaacttgattcgtattttgttcttttctgatctatttcttcatctttgggtttggcgtttttcattcctttacattcgcctacaaactattcaatgaaattcctcttgctatctacaagtgaattgaagaagaaccaaaatgaattgatctctgagttacctacgctaatctgattatagatctctatgttatttgtgggagcattcgatatcgtatcaatatcacaacttcctttccttgaacacat

SEQ ID NO: 219257 - DNA, 321 bp, Glycine max
  unsure (1)..(321): unsure at all n locations
atagaaacatctttatatacatcagcttgtttgctagaaagacccaatatttttacctactgctggcaatcttatttacttgcattcttactgctttaagctntgacttaatttaattntgttccaaaccatcaattatcaatgtttctttcaacaatgccttatttatgaatttaaccttgtctaatactatgttcctgagtttgatactcgaattcatccattttaatntaaatacttgacgatccggtgcacttttctgcgaatcgtatctcccttgaacatatttgtataaagaacaatggaccaaagcgtaactgc

SEQ ID NO: 219258 - DNA, 76 bp, Glycine max
cagaagacaggcagccgcggcagacgaatgaatgaaaaagacatcagcattttttaggagggtactcactacggca

SEQ ID NO: 219259 - DNA, 465 bp, Glycine max
  unsure (1)..(465): unsure at all n locations
tgatcctctcagtcacctgcngcatgcagctttaaaatgctcagcggggcncttttctttctntntnttccgaangcanctactggcacgaacaaagagagtcttatttatttattaaactatgttaagtcttgaaaagaggatagaaatgcgtgtcataagattgggttgggcatgagacgacactctggtaggttccataatctatgggttcanagccaaagcatacataaatttagaaaagaatggaatgcatgtcatgagctataagaaggacatatgaaaggaatatttctatcacccgtgttctgatatgatatgaacctgtgctatatgttcattgattatctatttatgggttaatagtgcgttaagctctgaaaaaattctagatctctggttttgttattgactttcaaaatcaagtagctatgtccataccttgtgaataaccataatttattc

SEQ ID NO: 219260 - DNA, 414 bp, Glycine max
  unsure (1)..(414): unsure at all n locations
gctctcccttccttgaagaactcgtgcacaacaatggagaataaaggttctaagtttgttttttcctggagaagcgaggagatataacgctttaggcttgcttcanatgaaacttggttacgcttaatgttgacaacatcaaattgataacatgaataatcatttgatagccataatgctgccatatatgcatattttgccttttgattctttaactagaaatgactaaagtagacttaagcaaaaatggtaataacatcttttgctaaactgataaccttatcctaatctttagattagtggctacatccttggatatgtgactcatagtgaccttgccaagtatcacacaaacaattcattcactcaggccatcatctatcagaggaattactaacattctatcttgcagct

SEQ ID NO: 219261 - DNA, 287 bp, Glycine max
  unsure (1)..(287): unsure at all n locations
atggacgtctcttcatccattataggctgaccatgtaatgtgcagataacctctaaaatctcctacactctctatactcttccactctttcggattcccacaccaaccttggggtcgtcacttagagatcttccttacacaagttcttatagactagggaagggaatactntctcttacgtattacttatcttataggacaccttacttgatctctatcatcatctccttatttaggggaattctccctcaaattcaagcctacgatacctacatcagaagatacta

SEQ ID NO: 219262 - DNA, 352 bp, Glycine max
  unsure (1)..(352): unsure at all n locations
ggaacttctggaagcccaagggcccggngctattgcaccccctattactaatacatccttgccttttttggctgattctttgtctgtaacgttacggaaccttacgatattcgaaacgatacttggtttctttcttgaatgtcacggaaccttacggattacataatcatcccttttttggcttccgaatgttacaaacctcagaattggcaaaatgctcctttagactccggatgtacggacctcagggttggcaaaatgttccttttactttcacgtgtacgaacttacggattggcaaaatggtgccagtacgcgaacagcaagcaaggttgatgcataaacatggccc

SEQ ID NO: 219263 - DNA, 338 bp, Glycine max
  unsure (1)..(338): unsure at all n locations
tatatgcaanaaccttgctntcatatgaaattatgaatatatctttacaagtattttctattggtatttatattaatatgcaaagatattatagcttgatgctattgaagaaccaccatcagttttagacgggacgaaggttttgattttgatgggtcatttgaccaggatgtttgacttggacatgctgagatcaatcttctaaaacacacatcaagtgagttggtagatatatgggtcatgcttgaacgatagcttggccaatcttcttattcatagctgcagtaagaactttcttgataacaatatggagtgaacaatgaagatatttgagaaat

SEQ ID NO: 219264 - DNA, 399 bp, Glycine max
  unsure (1)..(399): unsure at all n locations
agcttataaaacaagattgccttaatcacttccatatttgcatgttaattangacgcatcaacaagaatcaagccaaggctattgtgcaagcaatcaatggggcaaaacacaccatatgattataatgatggatggctcacattctcaacaaggtaaaatcatcactttcaaaatgagctttcacaactatcatgacatgtaaagaagaatcaatgatttccagtcacacaatggcaagaacttttattatcaaaacacatacccatttcttgaacatatcctataattcacaaaagaacatgcaaagtcgtacgtgcacacaaaattgacccgaaatattaaactgganattcgaccaaacttaccacatttacaaatttaccccacttactaattaa

SEQ ID NO: 219265 - DNA, 415 bp, Glycine max
  unsure (1)..(415): unsure at all n locations
ttgcctcccatagacacttgtgaactcaacattagatagttattttctatatttattcattgntcacaacgacaatggtgtttattttcaaacttccactccagtacccatttgagtacctaatgcttgtgattntcaaacgttaaaaaccagaacacataatacccttcagctaactgacaaacaatatttggatgaaatatactgccggtagtcattcacagatacaagtaaccatcttcgctctcaatgtatgcaactgacaaatgatgatgatgtaacacacttgtatgtgaatcatgaatgtcatgtgttggtcgattgagtatatgcccattggagaaacaagaggatataaacttattgaagcctatgaccctactatgagcctgcttatacaatggagggacatgcc

SEQ ID NO: 219266 - DNA, 457 bp, Glycine max
  unsure (1)..(457): unsure at all n locations
tgtatccattagaagagaatggagcattgattgaaatatgactgtacatgttatgtcagtcgtcagattgattatgaaggaatgcattgaccatatcccgatgagagtgtgatccttanattttgagagaaactaccataatttagtactaatctttgcgtgaatctttgaagtatggactgaatgcatgaaattgaggatgatgaaggccatgtttgattgtgatagccacttagccaaaaagctgaccacatgcttgaatgatttatcctttgcacccagtttgagctgaatgaattattgattgattgaaccctgagcctatacagtggtatcttctgctactttggcttanngtgtangagagcatcatccatatgaagcgtggttcaaagcaaattgtccaaatttggggagtaatatcacggtaatttgttcaatttgggggagcactggt

SEQ ID NO: 219267 - DNA, 357 bp, Glycine max
  unsure (1)..(357): unsure at all n locations
agcttcggtatgcaaannctagcatcnctacttattactgtgacncaancagacatccgagataatagttattgttgnttgaatttgctcacagcttcggcactcaatttcgagcctctcgatatgatacaggactccctcagacacccgagtaaaaagctattgcgtttgaatttgctaagcttcacattcaattcgagcgctccatatttacaggatcaatcggatgccgacaaaaagtattgtcgttgaattgctaagctcagtagtaattcgagcgtccgtattttcggactgaatcgacatcgagtagaagttttgcgttgatttgcacaaacttcgtttcatttagcactc

SEQ ID NO: 219268 - DNA, 375 bp, Glycine max
  unsure (1)..(375): unsure at all n locations
ntgagcaacttcaaacgacaataactgtntactcggatgnctgattgagttccttaatatatcgagacgctcgaaattgaataccgaagctcttagaaaattcaaacgacaataactttttattcggatgtctgattgagtcccgtaatatatcgaaacgctcgaaattgaatgttgaagctctgagcaaattcaaacgacaataacgttntactcggatgtctgattgagtctcgtaatatatcgagacgctcgaaatggaataccgatgctctgagcaaattcaaacgacaataactntntactcggatgtctgattgagtccngtattatatcgagacgctcgaaattgatgtcgaagctctgagcaaattc

SEQ ID NO: 219269 - DNA, 348 bp, Glycine max
  unsure (1)..(348): unsure at all n locations
tatgtggtggagcacatgaatctcggtgctgcattcccacacaagatacagtacatgaagcgaactatatggggaaccagccaagaccaaactctaatgcaggtgggtattactggatctcaacatgggcagcaatataatcaataacagggacagtggagaacccaccctgggaattagttcaatacagaccaaggtgggccatctaataggccacagcaacaagggcctagtctctatgatagaacgacaaagctgaaagaaactcttgctcaattcatgcaagtatccatgtccaatccaaagagcacagatncaggcatcaagaatctagaagtccaggtggga

SEQ ID NO: 219270 - DNA, 434 bp, Glycine max
  unsure (1)..(434): unsure at all n locations
gctctatcacaagtctaaatcatctcgaatcattgtaattcgcttattaacgacgcaccaaacggatgaaaggaacatctttaattctatcagctctgatcgccgaggtgcttcatacaaaagactattcatnaaaatggtgtactgaacatatattcataactcagcatactctaacaacaggttttagccatatttgacaatcatctacaacctttcatcaatacgaagagaggcttgagaagctcatagctgaagaattgctgttatcacccctgcctggcgtttcacattcactaaagtcaagtgttcgtcgctctatctgcaaacaatatactccagtcgaccataaagacaccacggaatatattaagccattaatccgaggaaatgttcctatttcatttttgaatgcaaaaatgcatgttttatat

SEQ ID NO: 219271 - DNA, 400 bp, Glycine max
  unsure (1)..(400): unsure at all n locations
tggagatatgtcgcggnggtcaagagacctttgggacgtcacgtggggtgctattgcccaaaaccaagcttggccaatcccgacctaacccgggcatagtcagtcagtgagaacctgcgatgtacctaagcaggcgagctcctggcagtcaaccaataaaagaacaaagtccacgaagcaaggaggcttgtgtggcggctggccaactatgtatctatgtggtatatgaaaattagctacatgtaatcgcttactattcgtgggtattagcttacttgtaatcgctaagtagcttctggtatccgataccaattgtgtgtaatcgatacatagtattataggtcactggtaatcgataccagttgtgtgaatcgatacatagtgctactgctctgtaatc

SEQ ID NO: 219272 - DNA, 392 bp, Glycine max
  unsure (1)..(392): unsure at all n locations
atcattgaggggaccacctgggccgccagatccctccaccttatgggcgtgttctttgaaagatccgtccncccttttgcacatgttctgtagttgcatcctatccggaaccatatcaaaattgtactgatactgcctaacaaaggcaaccattaggtccttccaagagtggactcgagaacgttccaggttagtgtaccaggtaacagctaccctagtaagaatttcttggaaggaatgtatcagcagttccttatctcttgcgcatggccccatcttctgataatacatctttagatggttcttggcgcaagtagttcccttgtatttgtcaaagttcagcaccttgaacttgggacgggtgatgatattgtgtattgggaacaactctt

SEQ ID NO: 219273 - DNA, 481 bp, Glycine max
  unsure (1)..(481): unsure at all n locations
agtcacctgcngctgcagcttgtgaatttaggggatcctattattaattctanttctcccaggagcacattatgttagattatcaaaaagagttttatgaatacatggatcaataatgatcgatcaaacaaatgcggcgaaatctgaattcgtaggtgatatttgatctatgctctcttcttaagatctattacggaatattgtataaacgacaaataactgactaatagtgtaatcagtggcttcatggttctttctcaaccgaaacctctttattccacaataagaccttcataacttttcagatgaagataagagaaactatgtgtgacggcttactatattgcggaccactagctttttaaagcgtgttaacctaatagggtcctcattatcctccaatgggtcaacattgacatctactcatttaagcctatatcatctgattaatngtctaatgaacccacttaatctgatcaca

SEQ ID NO: 219274 - DNA, 389 bp, Glycine max
  unsure (1)..(389): unsure at all n locations
aaaaactaagctttacggtcctacctattactttcttctttgttanggtcctattttgtggtggataagctacnatgcttacagagaatattcctatggggaggagttgcagatcacaacacgatagcctgtgtcaaatgggacacagtgtgtcttccaaaggacaaaggggggctggggataaaggatgtaaacactttcaatcttgcattacttgcaaaatggaagtggcaattattccaacatcaaaggcagttgtgggctacggtattggaatccaaatacggtggatggacgtgtctaaatgaggcacctagaactagcacagaatccatattgtggacggatctaatgatggtgacccatcattcggagcatggtgaaacact

SEQ ID NO: 219275 - DNA, 327 bp, Glycine max
  unsure (1)..(327): unsure at all n locations
taacgatttctaattatgtgggccattaagtctatcatatgctgacaatagccgagaagcccatgaatctcttccggggcggagtaggtgctaccatcgccttggccttggctaacaatcggngaaggtcttgactcccgttcaagggaagaacaaaccgatccatccacatggntgcctcttggtgaaagagtcgatcacccttcctctatgcctctctttcgcgtatacttgggcatattcgtccgcaatcctatgcttcgtgggccgcgctagacctaactcttcttggtacttgcaatgatagctagcattgttggcttcatc

SEQ ID NO: 219276 - DNA, 456 bp, Glycine max
agcttgctggactgaagaggtgttcttcttgaacttttattagtgacacaactcacttatcaccaaagatcttcacaataaaaaagaattgaacgtgtaagttacttcttctaagaacttttcttctcttctttcttcaactaataacaacacttgatcttagctcattcagaggcttgttgtgttatttttgagattggtatgaagagaacataagctggctatttatagagagaacatttataactgcctgtaattgattaaatctacaagataatcgattaattcaacaaagtaatcgattagactatcttcttaatggattaaagtgtccttctaaacaccttgaaacaactcaagaacaatgtaatcaattagatactcacagtaatcgattaaagtattctttgtcacttctgaactattatagaaagagaagtatcaattatatcatat

SEQ ID NO: 219277 - DNA, 432 bp, Glycine max
  unsure (1)..(432): unsure at all n locations
aggaaatttccaatcaaagagaaagcataaaaggaaggaaaggaaattcccaatcaaagagtgggagaaagagaaaaaaagaaacgaaaggaaattcccaatcaaagagtgggagaaagaaaaaagaaaagaaagaaaattcccaaccaaagaatgggagaaagtaaaaaagaaggaaaccatgacctacaagtggtcttctccctttgattaccaaccaaaatcctgtgcgctagcgacttttcgtcccgcactaaacaaaaacagaaaaggaaaaaagccaaccaaaaatcataagccaaaaacacacaaaagccaaaaaaaaccatcanaagaacccattcccaacggaagtcttattgatccatgatcacgcatgtaatttttgatttggtaggaaataatttgcanagtcaattcatgacatatcta

SEQ ID NO: 219278 - DNA, 163 bp, Glycine max
tgaattcattttatttttctcatagaacacctcatgagagctcatcaaaaaccttttatcttcgaacttttgatctttgtcatgatcaattttgggcgaagctgctatgatgagcctgttgttgggtggagaaaagctcatcccttatattcagagctcattc

SEQ ID NO: 219279 - DNA, 480 bp, Glycine max
  unsure (1)..(480): unsure at all n locations
tgaactactctngngctattctaagcaaatcaacagagaatnntttaaattaatatctaagggttacgatgagaaatcgtggcttggtggatcaatcgaatacttaagttactttgtgaaagaaaccatcatctctcaccatttgattagtggctgtaggtgcctccttgaggttctccttccccttgttctatacgaccaaaagaacaaagagaatggatactgaaactgttaagaacacgtgagtgagagttgaggtgtgtgtgagccttgcgtagaagggaaaaaagtgagaaactgtatttgtgtgcgcctctgtggaaacctacagagaatgaagagttgttttttagtttataacttnttagagagatttacaatgagtgaaatgagcatgtctgtgagatggcggttaaaatcttggagtagtaattaataagaattnttttagcatacttcagcattagacaagaaagccct

SEQ ID NO: 219280 - DNA, 293 bp, Glycine max
  unsure (1)..(293): unsure at all n locations
agattccaagaatcaagtttcaagaatcaagaatcaagaataatccagatcaagattcaagactcaagattcaagaatctagaagagactcaatcaagataagtactaaaaaggttttcaaaacatggagtagcacatgaagttntcacaaaatcctttaccaaggagtttttactctctgataatcgattaccagtagcaaagtttggtttcanaagctntcaactgaatttacgacgttccaattaatttcanaatggtgtaatcgattacaagatattggtaatcgatta

SEQ ID NO: 219281 - DNA, 446 bp, Glycine max
  unsure (1)..(446): unsure at all n locations
aactgtgaactctagctaagatctcttgatagaggtgaagcataaagtctatcttctgaatcatgagtgactcataaggactccattgatgtgcaagctcttgtggagcttcagcttcttcatccaatttgtccaactttcctgctactggttctccaaccattatccactcatggtagaanaacctcattccaagcttcttgagatgcctttcagtaatttcattagattctctgataaatccattntctcattagatacatcgacattgaaatacgtaatgaatcttgaggcatgcacgacataaggaaattcgtagtccaataaccagcgactctttaacataatgtcttctatcanaaagtaaccaattatcttgatacccaatttcagaccataaacattctgcacgatatcacttagtacctaagcatgaatacttgacc

SEQ ID NO: 219282 - DNA, 412 bp, Glycine max
  unsure (1)..(412): unsure at all n locations
cacaagagctgtttgtttttctcctttaacctgccttaatgttctgctttaccttctcttccattgatgcttcatcattcnttatctccatgaatctcctcacatgtattgtgctaaatgttttaacatcattctttagagtttccaccgattaaacttgctatataagctagatgagattntctatggatcanatttctatgtcttgttcttgaaccatgaattgtgttgagttcatgatcctttgacattagtcttgatatttgttgtggctgaaacctaaatcataaaactcttacaaaaatattatacgagaacataacctcgaaaatccaaagtgacttgttcacctattgtagtgttgtcatagacatcatgtctagacatgatactcgtacataagactcttatg

SEQ ID NO: 219283 - DNA, 244 bp, Glycine max
acatcactagacgatgaaaaactgggcaaataaagagggtgaggatgagggagaaacccatgcttgaactgccattcctgtgcgggccatgttcccaccaactcaacaatatctttactcagccaataacaaactttcttcttacccaccacccagttattcacaaaggccattcctaaatctaccacaaagtctgtctaccgcacttccaatgatgaacaccacctttagcacaaaccaaaaa

SEQ ID NO: 219284 - DNA, 352 bp, Glycine max
gaaacgggtttatgatcccaacatggctggctcgtggtgcctaacacatgaaactaagaatgtagtgtgaaagttcacgcttcccccttttttgtttttggtttgtagaggaaaacgcaaggatgagcaaacatgacaacaaatggtatgcaattttgcagatcatacagtttgttgaacgcatatgcatgatgatgccatgactcatgcaaaatgtgaggctggaatatgataactgacaaatgcaggatatgtccattatgaatgtatgaagagaatgctatgtggtgcatgatatgaatgcattttacggacacgagagcccggaaaattatctcttcttacttgcgca

SEQ ID NO: 219285 - DNA, 345 bp, Glycine max
  unsure (1)..(345): unsure at all n locations
gagagaaagcgacgtatatatagtcanggatgatctgtaatcggtgatagcctcttggaatcgaatacagacctatcgtggaagtgactaaacctactggtaatcgattacaacctattggtcttatgggaattgactacattgagtggtaataattaccagaccctaagtcaaggcttttctacaaatctaactattagttactcctaaacacctgatactcattggtagttttatctaccacaatcatagatcaataatagacnattgaaacaagcattataaaccaaataactacaatcatcaagcacaatcacatgtattaatacactcatctaaacaaga

SEQ ID NO: 219286 - DNA, 424 bp, Glycine max
gagcaagcgttttgtgaaggatcctatgcagagatggactgctacaatgcttctcaaccatcctttgttttatccaacatgttacatgcgtacgtcatcttttttctcatatgatattgttagtcatgtgccctttaaggtataagatataccggctgatcgaatgttttgcttctgtattcagggtgtttgcctttttaagcaacttttttagtaaagcaatgtagaagatagctatattgttatatatgcagactgttatgtagtatatggagaattgagattatttccagtatatcatcctcattcttattggagaacaagtactgggccgagcatgatatgatagacaactaagattacatggcctatagctttgtgataacagggtgttgtgagttatgtcgctataacatggtggaca

SEQ ID NO: 219287 - DNA, 224 bp, Glycine max
taaaacggcacaagggaataaagaatgaccaagcttgatacacacactccctaatgtttgttggtgtgctaaaataaatcatgtcttaacaaaggagatctaatttaagatcattctaatacaaaagtgtcatctcttactttttatctctagtaagaattatataataacatcataattacgcttaattatttgacattcgaaataataaaccttaaatacaa

SEQ ID NO: 219288 - DNA, 341 bp, Glycine max
  unsure (1)..(341): unsure at all n locations
aaanaccagctgaggggggatgtatttttagtcatctaaagctgttttttttttanagcattactccgtcacatgaatgaggtagacctatgattacagggaaggtttgaaagtgaaatgacgttaaaccggaaactaaacatgtaaatgcatgttggtagtttgaggtacaaaattgttaaaagtgtagataattgatttataagtctatttacatcttacacagattattctccaccattctcctgaaacattgtccgatcaccgagtgcttcttttgacaatcaacccaatcttttttagagattgtgtttcttctttcgacaattatctccctatca

SEQ ID NO: 219289 - DNA, 497 bp, Glycine max
  unsure (1)..(497): unsure at all n locations
taagcaccgcggcatgcactaaattganttaataaatcaatttatattatcttactcatcggnnnntattaagaactgatgttatntattaagattttcttaatatactgtctgtttttttaataatcccatattaacttgcaaacttaatagcagaaccacaacatataattttcattctgttttcaaacagtttttactagaagttccatcaaaaatttattatttactatgaattaaaagaatatttaatgttaaggagacgtgaattgtaaaaaatgtaaagtaactaaactagaatttcaaaatcgcttacacactaattatttcatttntaattctcaaataataggttgcccactagatgcgaagcgccttcaatctctctagttccaatggtctagcatcattgatatatngcatgatatactaaaataagtcaatactatataatacctattataacacactgaactatgtctgaattaacaattact

SEQ ID NO: 219290 - DNA, 380 bp, Glycine max
  unsure (1)..(380): unsure at all n locations
agctttatgcacctacataataaggagcacttttcttatctgtttcaanattcaagctttgtgtaacgtgaactatataaggagaattcacgcgaacttgagttttcttcacgaatttaatttcttgcaccacatattatgaccgtntggccgtgttgttaccaaaaaatagttatgaccgctgccatctttattattgtgaatgtcacatttttcagagttcagtttctgaatttatgcagtaaaaacanatatgttctgaatttatatgttctaattaatgataaaggtcaaatgtatggtttaattaaaagaaaatgcttacacnatattttttgttggtataatgataactacagacttcatgtaacataaacatg

SEQ ID NO: 219291 - DNA, 306 bp, Glycine max
  unsure (1)..(306): unsure at all n locations
tgcaactcggcttatcanaagagtggaaaacaacactctgccaaagttgtctattttaacctgaaatgcgagaaattgattattaaacgcccaaaacaaaattataaattatttattacctatatttaacaaaaagtacttatagtattacaaaacaaccataaattgggaaagtttgatacaatatacacaggttttatacacaaaagttagtcgtattcatcgactaacaaagtgttagactacaaaaagtcgagggccccttctagttntcaagctatgacggaagttgtcgagttgatgcct

SEQ ID NO: 219292 - DNA, 395 bp, Glycine max
  unsure (1)..(395): unsure at all n locations
agcttgaaacaccttgacgtagattacgcaagtctttattttaaccacaaaagcatcgagtcgacaatcaaatatctagaagtgcaagtatgccagcttgcaaaacaactcacaaagaagtccaataaaaattttgtgcctaacatggagcctaatcctaagcggtgcttacaaggagtttgagaaaggatagccctgttcatgatgggattgtacaggatgtagtggaggttgcaagtgatagggatgatgttgtaagtgagaatgaggggggaaagaataaagagaaaattatgagtatcgaaaatgttgaacaaaatgagagacatgatgaacaagataaaaaatagtctcaaggaacgtgtngatgaggtcttatgtcacaagaccaaaag

SEQ ID NO: 219293 - DNA, 472 bp, Glycine max
  unsure (1)..(472): unsure at all n locations
actagcttaaaggttctctaattactagtctaggtgaaccnattttctatgttacgttactcagncttaccggtttatatactacttgtgcgaatcggtacacttgccgaccgtccaacagacacttataggattaatcttcggtccaagaattagactatgcttgacaaaactagctgaaaagctagttggaaactaaaatactagttgataactaanaactaacttgaaaagaggatgagagaattggataagaagagattgagattgaagaataaagatattattcgacccaagtaatgatggattacaggttggaatatgtaacaattagagttgagtaattggtaactaactagagtagttagtgacaactgtacacaactgcttaacaactgctacaaattgcaacaataactattactcatatagtagtagactagactaacactaggaagaaaaactacttcag

SEQ ID NO: 219294 - DNA, 402 bp, Glycine max
  unsure (1)..(402): unsure at all n locations
tggacattgtatcacaacaagaagcgctgtactccctcgttatttggacccctgattctttatttttttttagtaaaatgtgctttagtttccatattatttggtaaaattntatcttagttccaatactctaaaaataacaattttggccttcctaatacttgcttgtttcttttataattggcgaatttcgtctcttacggcattatcttaagcttaggtatgaaatttcccaacgatcaaaaataagaacaacagaatcatcacttttaaaggacaggaacctaaattatttaactgagaattaagaaccttcacacatttacactttctttttctgccgctttattatattggctatatatgttacactctattgatgatatatgtgagcaaaaataa

SEQ ID NO: 219295 - DNA, 408 bp, Glycine max
  unsure (1)..(408): unsure at all n locations
agcttgaacatctcttaattagttcgttcaaatccgtgtatcanatattngnggcggatgaaaactcgggtcaccatcatcatttcagaatatctgctccaactgaactggtgagcatatcaaattgctttaatttgttctttcttatgttagacttattagcattctattgtgaacctcaagcatattatcaactgtgtgatataggttccgaatttccccaacttggagacatttgtgatttctcacatggacaacttgaagtcaatatggcccgaccaactcactgaanattccttctataaattgaanaagatggaaatcacatcctgtaacaatctcttgaatgtgttcccatgtcatgtgctagacaaattacaaagcctggaatcactgaattatggaact

SEQ ID NO: 219296 - DNA, 414 bp, Glycine max
  unsure (1)..(414): unsure at all n locations
ctaagcttcacaactctntttttntatatgagtataacaagattntacctaaacactatcagacacgaaagcgacaatcgttcatgacattttcagatttcaatattttaaaacaggtaacgtatgttacgcggcataacattaaacaatgcaaacaaaattcactgattccataatcatatttctaattgcataaattcaaccgaaaacttgtgtgatgaagaacatacaaatcagaanaatcaacaacaactatcatcagaatcagtgaagcagacaacaaacagcataatgcgagataaacggcaaggcgcaatcgaaacgacgaacgaagagaagagaagagagagtgtgacctgaagaaggagaagaaagagagggttctccgatcttagctacccgctctttgggttc

SEQ ID NO: 219297 - DNA, 465 bp, Glycine max
  unsure (1)..(465): unsure at all n locations
agcttattatgggttgttattccaggttcaacacctgttatgttctatcccgatattatagccctctaacaaccaaaantctaagaaacaattcatatccttggatgggtcctatatcacaaactctagcctaataacataacatttatataccttaaaccattaataattaacatcatgcatctacttaattaaattccataagagaatggcacccctgtagcaagaatcataagtagtgtttctccaaccagataatgaaggtacacttaagtcatgtctgccaaaatttgtttaagcttattaaatntgtttacacttaagaaattcacattntgtatgttcttgtatgtcatgaatgtaatatgctatacaaacaattggtattttatagtagatcattcgtaaagggtatttatttgatgacgataaagatatggttntcactaactgctctcttctctc

SEQ ID NO: 219298 - DNA, 471 bp, Glycine max
  unsure (1)..(471): unsure at all n locations
tatacaaacacatgttgttatgtcttcatggctaataacaagncgaataacacacttacacaaaatacttccctaanaatagtcataacaaaaaatattgcttcaatacttaatccaaaatagaacaaaccatacacctcacaatcacatgcaatacaaggcaaacaaaagtggctaagcctactcgggacatccttctcattatgagagtgatgttgcttcaacatttattctttttatagtacttgtagaccttatccacatgttctaatcatcataggtaacagaaaataaatntaatcatcaaagtcttgaatatataaccacaattcacataaggaactttagaattggaagtctaaaatgaanacaaactttgttcagtctatataacattacatantaattanacttanccatttagcatttggttgaggaacgtggacttgtgtatcctatccatcatttgat

SEQ ID NO: 219299 - DNA, 182 bp, Glycine max
tcaatttcgagcgtctcaatagattacgggactcaatcacacatccgagcaaaaagttattgtcgtttgaattagctcagagcttcagaattcaatttcgatcgtctcaatatattacaggactcaatcagacatctgagtaaacacgttattatccgttgaattcggtcagagcttcaaca

SEQ ID NO: 219300 - DNA, 409 bp, Glycine max
  unsure (1)..(409): unsure at all n locations
ccctatantgcaataaaaattggtccaaaaaacacttaaataaaataaaataaaaatttggttgcagacccatgttgttgtggtattagggtcgtcttcttccacatgcaccacccatggacttctcttcttccattntaagttgaccatgtaatgtgttgataacctctaaattcttcctcaatctctttactcttccactctgtagtatttccagaccaaccttgggtcgtcacttagagatnctcgttcacaagttcttaaatctagtaagggattcttctcttaggtatttttatctttacgagaccttcctgatcttatcatctctcttcttaggggactcttctcgattaagctacaacctacataaagaactangtgctcttaaatgttaacaatgatacta

SEQ ID NO: 219301 - DNA, 518 bp, Glycine max
  unsure (1)..(518): unsure at all n locations
actagctcagaatccaactccctctcatttctgagtgaggcttanatatgtgtgtctcgtggtgcttgcgtgcttagcgcaactctggctcgcttagcgcacataagtgaatntcagcttagcacacgtcttctcgcttagcggatgcatgcaagcggtgcgcttagcgggagtagccctcacttagtgtgtgtgtgtccagctcatccttcttctagattcttgctcacgctcagccgtaggagtggtgcactcagccgcaggattagcacacgtcttctcgcttagcagatgcatgcgagcggtgcgcttagcgggatgagccctcacttangcgtgtgtgtcagctcatccttcttctagattcttcctcgcactcagccgcaggagtggtgcactcagaggatggctcgctaagccgacagattgggttatcgagaaaccaaanatcatcacttcacaactttgcctatataacctganactgaaggaaatgattatatatacaaaaatggagt

SEQ ID NO: 219302 - DNA, 450 bp, Glycine max
  unsure (1)..(450): unsure at all n locations
gctngatcttgaagtcttgaatcaatcagcttggggcttttggtttcatcaatattgcttggntaatcatcatgaagcttgcttctacaattgagtcttttttttatagntttttttactctactctagagccattctaagtttctctttgagtcctagcctgcttctatgtctttntcattgctttaaatgttgaataatccttgaaaaattgtcttgggtaaaactccaattgtttagctttcatttcattcttttttgtcctctgggtattgctcgtctctcttggttccttgttggcgagacctagctcgcctctatggctctntcactgcttaattggtgaataatccttgaacattgcttggtaaactccataattcaccctcattcttttttttggccttggtattgctgcttttggtcctgttggagtctacctgctctatg

SEQ ID NO: 219303 - DNA, 442 bp, Glycine max
  unsure (1)..(442): unsure at all n locations
acacctcctctcacctcttctcctttgtcttccgcagcatcttcatggtggaaaatgaccattaaaggacctcattgaagctcaaagatccagcctncatagaagccccacaagcaagcttccatgatgtggtatcaagagcatctttatctaggggatgtgcttctgcttcctctatctttttgctcggcgaattctctttaattctttgctcttcatcttattctccatatatatcctccatttgcttggggttcggtgctgcttagagtagattccaaaaaaaaataaaccgattaaatcttagatctacacnttgttcttgcattctatggttcaaaatttgtagatctactcttgaatcactgtcttgtgtttatcnttggctctatcaattatcattcataatattcttgtgctgaaccttcagatctaaatttct

SEQ ID NO: 219304 - DNA, 504 bp, Glycine max
  unsure (1)..(504): unsure at all n locations
ggatccttaagcacctgngctgcagctttgtctatctactactanatattatcactaacagttattaaattccactaacaaactgggaaactactaacagactatgctactactaacaaactttgacattatgtaaactgaaaggcattatggttctatccacgttcacgaaggacacacataatcctcaaggtaagctagctcgcttgtggtccttttgggcttgctaactcgggctcctattgtggttgtgtgttcctgatacttgggttctgattgttatcaaaaccctacacaactctcaaaacccaatcgcataactagcaacaataaccaaagactacaggggagcgtactcttaacacgatgatntgtttaataaatattatgccatttctatttattntaatatataattcanacaattaagtattaaaatgttaacacagttaagtacttgaatgtgcnaaatctacatataatagatactagatcttaatatta

SEQ ID NO: 219305 - DNA, 510 bp, Glycine max
  unsure (1)..(510): unsure at all n locations
atgtcaaagctaattctgagtgcaagtgattcataatcctataaacactntttctgggtaagggggaattaaggaggaaaggaaggttagtaattggtgaagatttggaattaaggaaagatatttttgaagtgggtacatctcttcaactttgtggaggccactctggtagagatgcaaccttgcaaagagtcaaggaatctgtcttttggaaaggaatatcccaggatgttaagttgttcattcatcagtgcagtacttgtcacagatgcaaatatgactctgctgcatatncttgactggctacaaccttacctatacctgagcatgtatagcagcacattataatgtgattcattgacggacttcctgactcatgggcaaacaagttatttttgtggtggtggactcagtaaggctgcacacttcatggctctccatcatccttattcntgtgctgatgtaggtcaatggttcatggacaaggtctttaaactgcatgggtttctg

SEQ ID NO: 219306 - DNA, 449 bp, Glycine max
  unsure (1)..(449): unsure at all n locations
ctcagcttacacagagnagaataagttaacccttcccacgttacttataagtttattaagcacaaaccaacgacatcttcgaaaatagacggcaagatagtgaagcttggcgtcactcttctcccaacacgcctcaatataaacgtgccctctaagctcctcattcttattcattccattcttgtataaaaaaaccctcttacccttaattcttgatagacactatacaacaacacanaaaacattcacttcataattgcaacatataatagcattccattaatatcatggatcgtagactctctgtgaaaatagaaggagagggaagtgtcatatacaagttgctgaacttcacaggctaagcgagacaagcaaaaccagcacaatgtttgagcctcgtggactcacagcattgagaaagagacagtgatgcactgatactactcttt

SEQ ID NO: 219307 - DNA, 254 bp, Glycine max
gcaccggagttcgactctcaagctaaaaagtagtcatatcgaggattctacttgggagaaatagatcgtcaaattgaagttgtacgtacgaaaaatacaaaagtaggggggcttataaaggggggacatagatcagccatggcttcgttttctcaaggcgtgttggagacacctgtgatggcacggggactctcctattgttatgggagaggaaaaaagtagctttgacttatttaatgcggaatgtcggaaat

SEQ ID NO: 219308 - DNA, 482 bp, Glycine max
  unsure (1)..(482): unsure at all n locations
agcttgaatcaaggctaaactctcagtttgagaaacttacatgttcatccatttttaaacaaagccttaataataagaaataacaatagacattnttgtaattatttgtaaacaacagaaactggaaaataaactagctttcttggtgtcaatggtaaattctcattntgataaactacatctattcaccagtttctatacaagtctttaaaataggaaataaaataaanataatgccatctttgtaattatttataaaaacaaaaatattttaaaaaatcaaatatgcccatagctacttgataaaggctcaatggttntgtacagggtatacgaaattcttttaataatccgctttttctagcaaataataaggattctcactntcccttcctagcacaccataatatttcctttaccaagcaataagtagaaacaattagcatcccannattacaactatntacancctagttctttac

SEQ ID NO: 219309 - DNA, 310 bp, Glycine max
aaaataaataggctattgtatcaccagcctgccagaaaaatcaaatagtactacttgatttgatggcttcgtacactaatcaaatgattcagggtattatgaccttgtttattattaacctgcatttaatgctaaaatttattataaatttatgacattaatctcactatgtcaattttagattaaattaatttagattaatggtgagtatcacttattattgagtcatttgtattatgagaaagatgataaaaatttgatataaatgctgtcatgatgggtatgatattaaatttttttcatctctctt

SEQ ID NO: 219310 - DNA, 436 bp, Glycine max
  unsure (1)..(436): unsure at all n locations
ctgcaagctgttggctatcgatatattatagtttttgttttatcttactccacatctggcagagcacgttccccgcaatggccatgggaaaaacaaaaggatgatatgaatcacagttggtgcaaatatacttggattaactgcatgcgtttgcataataatgatactcaaaaagctaggtaaattttcttttgggtattgagtttatgtatcatatgtgcacattgtgaatgtgatagttcttctctattgtatcttctaccctatcaggggtagcaagaataatttataggaaccatctcaaacgaaaattgagaaaagaaggcattgatttgtcaacatttgatttcccaatcatagcaagagccactgaaaactttgccacgagtaacaaattgggagaaggtggatntggacctgtgtacaacgtgatatg

SEQ ID NO: 219311 - DNA, 427 bp, Glycine max
  unsure (1)..(427): unsure at all n locations
gatgtgattctacaaatatggagtaggcactgctttccttttaatacaatcgcttgaccataacaacgctggaggcggtaagcgacaatgatctttcaaataaacctggtgtacatgaacaaagattatatcatgcggtgaccgactcaaatgaaccagcgaagtcatcgcataattgttatactaactatattcaatgtacctgaacaaaatgatttccaaacacgtgattgacacatatcatgcggtgcccagaagaatcacgtggtggttgacttctacgggaaaaaatgtcatgctttcgttgtcggacaacgatacaaggattacattataccatgatgcaatcacatatcccatcttcggtatatccatccacttgnccacactaacctgaatcaaccaaacatacacatgtaagtaatct

SEQ ID NO: 219312 - DNA, 105 bp, Glycine max
agcttgtagagagatctccatgtttggtcaactccatttctagttattctataatccatctcacagtctccgttgagatcatatattgcctctacgcaacctcta

SEQ ID NO: 219313 - DNA, 460 bp, Glycine max
  unsure (1)..(460): unsure at all n locations
tgcttctacactattcagtaactaccttgccagtgaccataactcttgatttctgctacctaaangntagctggtctatcgcatcatgacccagatcagtgttcatgtggcgcagcttatcttggatgtcatccaccagtttataggtattgcacctccgagacacctcgtgaatccataaaagtccaataaggcactgtgatttatggcattgatcacgggtctttgccaattctacgagatatcggtcgcaccaacaaagctcatccgacctgccattaccaagtncttcattgagaaatattgcatgccaaggcaggcacagcagccatggcaagaccaccagcagcagccgggcgcagacacaccaccaccgcctccatatcaggcaccatctctagagtctatctcagctcacatgtagaggatggagctctagatgcatgcatacatgcagcat

SEQ ID NO: 219314 - DNA, 170 bp, Glycine max
  unsure (1)..(170): unsure at all n locations
agctttagacaacangagtagtcgattatgagaangctattattcaatagaanggagaggttttccttctgaagacactattgtaacttagaaactcttcttctcacttactcatgatgatgcatgatgcacccatgatatgagatgggctatgatgctacattccatat

SEQ ID NO: 219315 - DNA, 192 bp, Glycine max
  unsure (1)..(192): unsure at all n locations
gatccttagagacacctgcngcatgcagtcttgtactccttaagcatgtctccaacaatggttttatagactgcaatctactatcttcaacccctttgcgacgcatactgcgcatcaaatgttgatcactcgaagtgaatttcacgtcttgccatatatttgggcccttatcatatatcttggtggacctgt

SEQ ID NO: 219316 - DNA, 391 bp, Glycine max
gttatgatgttcgtgaagtttatatgctcgaaatttcttatggaaaactgttagacgtgaacggtagagcaaccctatggttagaaagtgagaatgtggtgttgagtggaaaaagagtgacgcttcgaaagttgaaaggctaaatctggattctgtggtcaatggatgttaaaatgagtcaatcctacctcgaaatttcatttacgacatgtgagaaaggttacgctgctctagatagaaaaacaaatgaccaaagtgaaccaagagccatttctagggcaaaattgggtgtggaggagtcaaatttagagcggtggaatcttatgtgtaaattcagtttgaccaagcttagatcgatgttatggacttgtgagaagtgacagtctgcttc

SEQ ID NO: 219317 - DNA, 452 bp, Glycine max
agcttagcggtgttcgacatcaacaccacttttctccatcaagacaataataagccctccatccccgtccttattctccataaactcaacatgctcgacgccactgatgcccccaatcctgggacgaggttagcaaaacactccaagacctcaaacctgtcttgttcatagttcgggacaggctagagagacaaaaggaagagaaggaattcaccttcaagcatctttgaggactgcaactgcgtgtgtgacgtgctggacgggcacagggtggtactcgacgagcgcgacgtgttgctgcacggcgtgttactgaaagaggtgaaagagctggtcgacagggaaggggtggcactgccgagggtcttcttgaaggggatatgcgtgggtgggttgagaggatattaaatgtgactcgtgtcgagagggggactgagagggaaacatgtgga

SEQ ID NO: 219318 - DNA, 444 bp, Glycine max
  unsure (1)..(444): unsure at all n locations
tgtccttggtttccacatgattggtgcatgatttgngacttgtatgattcaatttgggcaaaattggatgagggaaagagtggttttcgaaatctgcactttatgcagaattttgctgttgaaatgtgcaacagaattttgcataagtgcagaaaaatgctatgtaattgctggttgtggaaagagtagtacaaaatgagttatggatggttgctagtagatcccaacagtcaaaatgtatacttatgtactagagacttccagtaaaattttcgagtcgatccaacggttaacgaattggaacgaaggaaatgttactggggtctttaagtgagaaaaagctgtgattntggttggtgtntagggcagagttttctgcctantgccctgtttctttgctgtgatagtttgtgtttgttgatgttgattacctggatgatggga

SEQ ID NO: 219319 - DNA, 455 bp, Glycine max
agcttataaccctgtgaggagattcaatatcttgtgttcttttctgaaataatagtggtcaccaaatgaatacactatctgctgctgaagtgtatccttgctttcatgatgactaggtttcttcattgtccagagaagcaaacgttttataggagcccgacataaaagccacgaatctataaatgatacctgatagaaaatacaatatattaatataacttcattgaaaatttgtagctacgaatcaaaaaaaataaaaattgtagctgatcattcagtaagggtcagtttagataataatatttgaattacaatttgaaattctaattttaattctaattttcttgggattggatttgatcaagaatcataatttttatgtttggggacagagaagtgaaaacttaatgacttggatagaagtatggtacttgatagaacattatggcggaagt

SEQ ID NO: 219320 - DNA, 382 bp, Glycine max
aacaagacctacagacaagactggcttccttggacttgttggtaaaaaggtggataccataaagtattgcaataagaagattaatgaactcgaggccagattggaatctgagcaaaaggtcactctcatagagaagcagcaagatgctgctgtagtatttttcttaagtagggtggttgcagcatctgcatctcagagtttgcatgctcaaatggttgacacttggtcagtctttgatgctccggaacccaatcaactaatatggcctaatttgaaaatcaagtactttcatagagagctgatgccatacttggcgtatttcattgtggcactgactataatcttctacatgatttcaattacatttatattcgcctttact

SEQ ID NO: 219321 - DNA, 307 bp, Glycine max
  unsure (1)..(307): unsure at all n locations
agcttgtctcancgtctatgcgagacagagaccatcatgttagctatcatcgccaagtacgaagaagagttaggtctagccacggcccacgagcatagaatcgcggatgagtatgctcaagtatatgcggaaaaagaggctagaggaagggtgatcgactctttacaccaagaggcaaccatgtggatggagcggtttgctcttaccttgaacgggagtcaagaacttccccgattgttagccaaggccaaggcgatggcagacacctactccacccccgaagagattcacgggcttctcggctatt

SEQ ID NO: 219322 - DNA, 402 bp, Glycine max
tcatataagataaatgcattcaggcaatctgtctatatatcctcccaaacgtcaaattctccgcctatatattcaacctttccatcactggcacgtggagtgaatcttcctccatggtgcaatactaaagttatattgtcattcattctacacaattagaaaccgcaaacatggtcagatattaggaaataaaaaaacctacctcaaaaagcgcgaagacattgacattgtcaaaaaccgcgaagacacaatcaaaaaccaaaaacattgtcatctataaaaacagagcatcataaacgaaaataataaacgatcataaacctccctacgaagcgcgaagacaatgccgcagatgaaacccctcgaacatgtaaaaccccaaattaaaccaccaaaacaatg

SEQ ID NO: 219323 - DNA, 416 bp, Glycine max
  unsure (1)..(416): unsure at all n locations
gcctagaaaagttgtacacatgctatttcaagttgtaaatatatgcttgtattcatgactttatacatcccccggtccattagcatatgcccactaacttaagggaatttgctatatttgtctattggaaaataatataagttgcggccttgtaggtgtgtttgtaaatataaatatgccatgctaaaacactatttaaaagcaatatataaccatagagtatgatagtagtattgagtctattgacaatgcaattcttacaaaaaaaatataaaaaggattgcttacatgcatcatattttttctcagcaaatgatcaaaatataataaaaatctataaaataaattaataattataattattattaaaaacggaagcactcgatttattgaatcatagttntcccacagctcat

SEQ ID NO: 219324 - DNA, 343 bp, Glycine max
agagtcgagtactaaattcacactttggcagggagggatgggaatacaactttcgctgtataaatgcagagcgatgattatagaatagaacatgcaagggaaatctacagtatccctgtcccaggtttaacttcaataatatatatatatataggctcgattgtgaatgaaaaaatatatcaaatttacttaaaggaggatcttctggaatccaacaaaagttcaaggaattatcatggtaagagaggcattcttggctgtacgtgttagatgtcacaaaaagttgtcataacccaatggatattttaatagagcaaatgttgaatcctttttgcctttttat

SEQ ID NO: 219325 - DNA, 362 bp, Glycine max
ggtctctcaagtatacttttggataaactgctgcattcattgccattctttctgctgtttctcctaaggaccttatgatggctgattaactctttgacacattaaaggtgctggtggctgatatcaacattggatatgaagatgttgtgaacacccaggttagtaatggatatgttccatctttttgccttttcttgctgacagctatatcatcttaaccgttcagttgtttactggtctttattctgtatatctgtgaaggtccttgctttcaatggtcatccaatgaagaacctgaatagcgtacccactatggtagagagctgcattgatgaatatctaaatattgaactagattatga

SEQ ID NO: 219326 - DNA, 323 bp, Glycine max
  unsure (1)..(323): unsure at all n locations
gcaagctctttgatgaatatgtgaccgtcaagtcaagttcatctactgcatcaagtcctcaacaacctactgtgaagaagatctcagtgtagaagaaaatcaagagaaggatgatccacacaacgctagtccttccctccggtcacacatttaattgctctacgattcaacatatcgaatttaatcttcctcttacattgccataggaatatatcaactatgtgagccacaatgttaatgtcaatggcaagcctgaatcacatctcctattggatgagacaccgcttgaaccaaagtntcttcctaagtcggatgttctgagt

SEQ ID NO: 219327 - DNA, 388 bp, Glycine max
gagacagactaacaggttctgccgtttgttattttatcgctaagggctaccgtgtctacaacttgcgaactaagacactcatcatcagtcgagatgttgaaattgatgagtatgcttcttggaattgggatgaagaaaaagtggagaagaacggtcttatacctgctcaactacctcaagaagaatctgaggaagaagacctatgtgaaccaccttcacctccaccacataaacaagatcaagaactatcatcaccagagtctactccaagacgagatagatctttggtggacatatatgatacctgttacttggccatactcgaacctggaagctttgaagaagcgttaaagctggaatgattggtcgaggccatggaataattgat

SEQ ID NO: 219328 - DNA, 413 bp, Glycine max
gtcacctgcggcatcaagcttacttactgcttgaagagttactatatgcttccagaggaaaacacattgcctaaaagttactattaggcgaagaaaatactgtgtccgataggtatggagtattataagattcatgcttgcccgaatgattgcatactgtacaggcatgaatttcaataaatgtccaaatgccctaggtgtagggcgtcacggtacaaggtgaaggatgatgaggactgcagttctgatgaaaactcaaagaagggacctccagtgaaggtgttgtggtatcttccaatcattccaaggtttaagcgtctttttgctcatggagacgacgcacaagaccttacctggcatgcaaatgggagaaactctgatggaatggtcccgcatccggttgattactcgca

SEQ ID NO: 219329 - DNA, 415 bp, Glycine max
actcagctgaagcttagtcttatgttgtcatgttgctctccctatctctaacacaatccatcaattacacattgtttatcaatttccaacaccacaagttcccttatgttataaattcaccatttacctaatcctgataattaagagcacatctaactattattataaacctagtgaggcattcaacattatgaacccttacccttacaacatccatgattctctgtaagtgtaaatttcataactattactcacaaaccaatactataaatatttgaaattagtttggagaccacttaagccataaccatcatcgcttaagccacactgctcctagtaatcaccctacccacaactttgaccttgcttaagccataacatttcttggtaaagctaccaatcattgcttaaatgc

SEQ ID NO: 219330 - DNA, 270 bp, Glycine max
acagagccattaacctacggaaggtgaccaagctacatggttgagcgttactgatattgtggcaaccagaagacaccccaacagctcaacaattgagccatcatttggtcttccaaaaagctgatgcctatgatgccaattatgcccttatactactggaactaaacctagctaaagccctacttagtgattaacccttgacatatgtttgtgcaacctaatatacatggattgggccattatttagacaaactaaacactctaaaattg

SEQ ID NO: 219331 - DNA, 433 bp, Glycine max
agctaggaaggatgcttattgtgtgaatataaagagggagagaaagagagaggggggagctcgaaattgaaggaagaaaaagggagagaagttgaactttgagttgtgtctcacaagactctcattcatcaaagttaccacaagtgttacacatgcttctatttatagactaggtagcttccttgagaagctttcttgagaaaacttccttgagaagcttctttgagaaaacttccttgagaagctagagcttagctatacacacccttctcataactaagctcacctccttgagaagcttctttaagaagattcctaaagaagctagagcttagctacacatacctctctaatagctaagctcacctccttgagatgagaagctagagcttagctacacaccccctataatagctaagctcacccccatgac

SEQ ID NO: 219332 - DNA, 383 bp, Glycine max
cctctctttgtctctcaatggttcttcattcttcctactcttttcacttttattcttcctttttcttacacagattttgtggatcttccattgatgatgatcatggaaggctaaacaattaatcaatccaaggatccactccaaggaaggctgaatttgagttttgatttagtatttctaatttgtgtgaatgttcatctttttcttcaatccttttttcgattttcatgattattaatatgcttaagattgaaaaagaattaagttagggattcctttccaaatttcgaacttaatcacaaattgtttggatgatattccaacctaatttgtgatctcaatgaaattatggattaattcgaatgaattaactctgatgacat

SEQ ID NO: 219333 - DNA, 456 bp, Glycine max
aagcttaacatcagaccacttgcagggtgtttgttctacttcacatggacttgatggggcctatgcaagttgaaagccttggaggaaagaggtatgcctatgttgttgtggatgatttctccagatttacctgggtcaactttatcagagagaaatcagacacctttgaagtattcaaggagttgagtctaagacttcaaagagaaaaagactgtgtcatcaagagaatcaggagtgaccatggcagagagtttgaaaacagcaagtttactgaattctgcacatctgaaggcatcactcatgagttctctgcagccattacaccacaacaaaatggcatagttgaaaggaaaaacaggactttgcaagaagctgctagggtcatgcttcatgccaaagaacttccctataatctctgggctgaagccatgaacacagcatgctacatccacaaca

SEQ ID NO: 219334 - DNA, 101 bp, Glycine max
tctccctccaatcatcgcactggtagcattttgacatgtatctctgcacgtatgtatgccatactcatgtccgtacgtacctaaacagctatagcattatc

SEQ ID NO: 219335 - DNA, 405 bp, Glycine max
aagcgtactaagcttctcaccttacctcggctgaacatggaataaaacgcggcaaccttatagacctcgaagggaggaacctctacaatcttagctacctgaataatccataacactagagtgctatgtgtaaaaataaagctttataactttatgcattattaaaaaaaattcaaattgcacttcgcaaacattatgttaattaaggattctcactgaagcatctaagtctagaagctacaacgaaacctcaatgaagaaatgaggagctcttgcataaaacaagaaataatctgtatatcaataatcaaaccttgttgcatgcatatactttagaaatggcatgtatgtcaaccaacagaatgatgctgtaacaaaaagatgcgcacacaaactataacaagc

SEQ ID NO: 219336 - DNA, 386 bp, Glycine max
gaccaaactcacacagccatgatgagcgagcagctacactcactagcaggctcagataacaaccaaagactattactcttctttcccttgtcaatctatgaccttcttactagtttccattctcatctactacaatctaaagctaaaaccacatttatgtctgttgtaagacaaattcattgtattttcttctcatcctcgtacccagatgcccttgctctccgaccaatgagatatggctctggggaggcgttctcactagacatatgtcgaccctgattagatcgatttgccaaaaattccactcctgatcttgcattccctttcattagagcattctagtattctgcactgcactgctcttctgtgccttactagagcgagag

SEQ ID NO: 219337 - DNA, 327 bp, Glycine max
tatgcattgaatacttcaaacgcttatttcttatatagctaaaaattgcaacgaagtaatattttacaaatctggcgaaaaatattttaaaaatacgaaatatatttaattaaaattcataacaaacacatatattttagtatataaattctattttacattcacaacacataatctacattatgatataaatatatttttgaagagagataaaaaaaatggattaaaagggatcaacaatcaaaaataatagaatatatcaataaagataaaatgtacttggagaacattgagagtttttcttttcttctgtaattgtagggaccc

SEQ ID NO: 219338 - DNA, 459 bp, Glycine max
  unsure (1)..(459): unsure at all n locations
taagcgtcaacccctggaagtaaacatcactcacgcgtaatcgtattttctttcatgcttaagcgccaattccaggaagtagcagaagcctactcttgatcacgcttaagtgtggggtctttcatgcttaattgttaattcctcttattgcagtccttagaattgcaaaccacgcttaagcgtaactcgtttctcgcttaagtgtggcgacacgtggtagcagttaagagactttntaaaagcctatttaaagcgaaaagggccacataagacttagttntgtgtagtgttaaaagccatttgggatttcatacaaaccttgaaggctctccttcacgaaaattgcccatcttcatttcttctccattnttcatgcttggacatgctatggatagctaaattccccacagtgcttggggttggaatctaatgacactaaacctctngtattctaattga

SEQ ID NO: 219339 - DNA, 425 bp, Glycine max
  unsure (1)..(425): unsure at all n locations
cgcacggctctgatgctgatgctctgccaaattctcttttgcgctaagtgcgcgatatgcgcttagcccaactgctacattttgcaattcaaaacttagcgtctttttcacctgaagatgcacatatttcatcactaaatccaatggaaatgttctagagacgacattaaccataaaataagatttatttacaaaaatcattacaaaataaccataaattgaggaactatgcaagctttggaaaatgatttctatacaaaagttagtcgtataaagtgactaacaatagacttccttttttatgtatccgttcaaaagagaacttttagcatccatttagaaaagcttanaatccattaagaaagcataatattgaaaaagtattatggcctcaagtttngcaacacggacantaatctcttata

SEQ ID NO: 219340 - DNA, 436 bp, Glycine max
  unsure (1)..(436): unsure at all n locations
tgcggcatgcagctcatctttgtcttggagttttatttttttgagaaatgcaattatcttcccaccaatttttgctgatcaattatcttacatccaacaatggtgacagcaaataactagatacatgctgatagaaattttagtaactgtgtgtatgaaaggtacaggaagaaggaggtagtaaaagaagcatacaagcaatatacttgatgtggctgcaatcaatagagccactataccaatcattaattttccagcctcaggttttgcctgcaatgtcaaacgaaaaanagaagcaactttaatgatcacaaaaacatggcagcaattcatccaaagaaacaccggccacttacaagtgaaaggactcgatagaatcccacatctttcgcctgtatggacatgacttaaatgatgtatggacaatgatcacccg

SEQ ID NO: 219341 - DNA, 212 bp, Glycine max
  unsure (1)..(212): unsure at all n locations
tgcttcacaggaggaggtggagatgcaggtttaccgtctgctgtanaagccgagcataacactggtgcagggattgtcgaggtgcttattcaatggactgacctcccagactttgaatcaacttgggaaccagtagacaccatcatgcaccaatttcattcttttcaccttgagtacaaggtgactcttttgggggggggggggtggggaat

SEQ ID NO: 219342 - DNA, 440 bp, Glycine max
  unsure (1)..(440): unsure at all n locations
agctntaattaaataaaatcataaaaaattttgttactgcaatagtccacaccggatcagtaaggaggggaaagggagaaagacaaagaaaattacaagtttaatcgagaagaaagaaaaacttacaaagaatgtttcttagagcctatctcacttctctctaaactatttgtgtaaaaagatatctcacaatgtgttcaaggactctttttatagaattgaaaaatactttaacaacagtttaggttattttaacctagactatttctatagtttaggttacaatgaaaatttaatcctcaactaaatttataccaaaataattatctccgttctgaaaaaatcatctgaagagtacgtcgacttggcgtcttccttctttgacggaaactccttcttcttgatcttgaagtagttgaagaaccttttttaagttcttg

SEQ ID NO: 219343 - DNA, 408 bp, Glycine max
  unsure (1)..(408): unsure at all n locations
ataatgaanacatgattgtcaaaatcgtgagatctacgtaggctcatgagagttttcgtagactcgaatagtagatttgtaaaagtttacttcaaataaaaaaataataaattaactataaatatcatatcaatttaacattttattaatattttaaagcacataagtaataagttcatccaattacaaaacataagctcttctccaacaaaaggtcatacaattagaaaacacaaatagagaagatgaacctgattggcagcaattggttacgaatggaatgcaggatagagaacaagtgctgctgagtgagtatactaatactctttggaattataaagatatgataaagaactagccaaatagagaagaanaatcaagacaacaactctgattcatctttccagc

SEQ ID NO: 219344 - DNA, 359 bp, Glycine max
tctcaaacaccacgggaatctagtacaaaactacacgaatcgactaaatccatctgaaactcaacccctttagctttagacacctggggtcacggattatgacgaggcggcaatcgattaaaatagagagtctttggctgaaggaaacttttcaacttagaaacttttcttcaaacaaaccatgaggatgcatgatgcaatatagatatcaaagttactaagatgcaacaaccaagatacaaccaatacaaatgccacttagaggagttaggcatgtaaaagtaaaaacatcttctaaacttcgtcgactctttacttgagctgcaagatttaccctttaggttggtcacgatattgct

SEQ ID NO: 219345 - DNA, 443 bp, Glycine max
cacccagcccgcccaggcgagcagggttgcttcctctatatgcaacaaccttctggaggaaccttctggagggcccaagtgggcctggttgatatttgcacccctatttttactaagtacaccccttgccttttttttggtgattcttttttttgtaaaattacggaaacttacgaatttcgtaacgatacttgttttctttccgtaatgttacggaaccttgcggattacataatcatcccctttttgacttacggaatgttacggaacctcactaattgtgcaacgatgcttccatttgatttccggtgtgtcacggaacattacggattgtgcatcaatattttcttttgttttccggcatgtcccgaatttcacaaattgcctaatgatgggtgccaagcacctcacaaggaccaaacaaaagttgcatgtcatcaaac

SEQ ID NO: 219346 - DNA, 376 bp, Glycine max
gaaaacactcgcctaaaggtctatcggccaccaagaacttggctccatgggtatgggctctcataagattcatgcctgctcaaatgattgcatactgtacagacataaatttcaagaaaggcctaaatgccctaggtgtggggtatcacaatcccaagtgaaagatgatgaccacttgtctatcgatgaacactcaaagaagggctgcccaaagaaggtgctgtgggatcttcccatcattccaaggcttaagcgtctgtttgcttatggagaccatgcaaaagaccttacatggcatgccaatgggagaaactatgatggaatgctctgacatcccgcttattcctcccagaggaaaacgctgtcagttgtatct

SEQ ID NO: 219347 - DNA, 280 bp, Glycine max
aataacattatgcttcgttaattggtctgtcaaaaaaaaaaaatcattatgcttcggtgtctttcttttcccatttatgcaaaattaatagttcacctatcccaactactcctatgaccaaaaattctagcctttgcccttaatgagatattttctagacgatggcctaggtcaactatattcttaatttacatttctggcacaatatttgaacaacactggatggcaatatatactagattctaacgagcgtcctatgtggttggaagtttgtatttga

SEQ ID NO: 219348 - DNA, 345 bp, Glycine max
  unsure (1)..(345): unsure at all n locations
cataaaatactatgaaggatgtttgtttccatcccataaacacctctgagacacaatgatgaattttgaatgggactaatctccaatcgataattagtttcataatcaccttgagatcatagtcacctcgaaaggatcaaagtttatagaaatatcataagaattactgaagagcctaaggccctaattattatggtattaaaccaaaaaaacactggtatgtttttcttttgtgcacatctttcttatggatttttatgaattctgcaaaaaagattataaaattntctataattttggcaaataaatatgatactaccttacatttgttaaagaaatcatata

SEQ ID NO: 219349 - DNA, 355 bp, Glycine max
  unsure (1)..(355): unsure at all n locations
tccaacgcgagctatgaccactgttcttccttcccgcgatgcttcttttcatgtccgcctgagtgggcttataccctaaaccatacttcccaccgtttccttgagtatttatcaggctatttatgccgccgctgtctttgcctaaacccatccctggttcataaccgttccccaacataactcggcccatcattaccgctgcatcggacatacaatgctgcccaaagagggagtccacggaggaaatgcttaccacctcaaaagactggaaagcagcttctaacgattcttctgcggcttccacataaagcatggaggatgggcaccttaccaaaatgtcttnctcgcctgacac

SEQ ID NO: 219350 - DNA, 256 bp, Glycine max
acttttgccaacgttactgagatatgctctttgtcctttgactgatgtttgcaaattgatctgactaatatatctctaaacctgtaatttagaaggtacacctaatttatacattatgagtaatgattatggtgttgcattataatgatgagggagatgctgacttctggaatttgattgatgtgatatggattgtactattgaaataattaattacaaactatatgatgatcgatgtactgatggtcattgtgga

SEQ ID NO: 219351 - DNA, 403 bp, Glycine max
  unsure (1)..(403): unsure at all n locations
caaaaatgtttttcaaatttatttaaaattaatgacccaagcaagaatcaaaccttcgagttttgtgttattagcacaacactctaaccaactaaactaataaatcaattatattataaaataattaatgtcactatatgtaacactaaaatttttaatatttaatgcgcatgaaaatttagataataaattttgtaacaattaattttgatctaacaattaatttgtttacacatgttcgtagaaaaacaaccactagaccacatgtcattcacttattgaataattcaacactgcagaagttgagtgttgactagcaacatagtaacaatgaggtgaaacaagagcctaaaagaaatagagaacanaaacaacaacagtggcgagtcggagctgcgggtgg

SEQ ID NO: 219352 - DNA, 473 bp, Glycine max
  unsure (1)..(473): unsure at all n locations
aaagtagcaactcttcgaatcatattagcttttcgaccatcagctagcaccccagatccacataattgctggagaaatgtagagctaaatgataattctgcacaatattagagggtaaaagggtagaaaagaaagaataccaaagattcataacaaaggagaagaggttccaaaagctgatattttgtttcataataatccataagatcatgtttagatggaccatgtcgataagaatctccaaccgtctacgagttctcagaagctaaacacatggaacgaaagataatattaccggttattaagacaatatataaaatctgcatattcaataaaaatgtagatgtgatnntagtttaatggcaccccaggatacanatccttcacagaccatattcaaatcaaaactaggaanatatatntgtcatactatgcatatcctaacgcatatatggttctatctatataaacat

SEQ ID NO: 219353 - DNA, 202 bp, Glycine max
ccttgaaaatttaaatgtggtgggatcacaaatccgcggaatttgggctttggagaaattagtgttttattatcctgagtaatataaaactggccttaacatccatgggatgtttatataggcactgcttggtgattaaggggaaattgctaacgtttgaatcacctccagattagaccttttggaagacttttattatcgt

SEQ ID NO: 219354 - DNA, 441 bp, Glycine max
tgcaagcttgagccaaattaacgatgaaactttttactcggatggccgactgagtcccggaatatatcgacacgctcgaagatgaatgctggagctttgagccaattcaaacgacaataacttcttactcggatgtccgatccagagacgtaatatatcgggacgctcaaatttgaatgttgaacctctgagccaattcaaacgacaataactttttactcggatgtttgattgagtcccgtaatataacgagacgctcgaaattgaatttggaacctttgagccaattcacacgagaataactttttactcggatgtctgatagagtcctcgaatatatcgagacgctcaaatgtgaatggttaagctttaagccaattcatacgacaataactttttactcggatgtctgattgggtcctcgaatataacgaaacgctc

SEQ ID NO: 219355 - DNA, 388 bp, Glycine max
tgaatttcgagcgtttcgttatattacgggactctatcttacatcctgttaaaaagttattgtcgtatgaattggcttatagcttaaacattcaactttgaccgtctcgatatattacgggactcaatcagacatccgagtaaaaagtaattgccgtttgaattggctcagaggttcaaaattcaatttcgagcatctcgttatattactggactcaatcagacatccgagtaaaaatttattgtcgtttgaataggctcagagggtcaacattcatctttgagcgtctcgatatattatgggactcaatcagacatccgagtaatatgttattgtcgtttaaattggcacataggttcaacattcaatttcgaccggctcgttatat

SEQ ID NO: 219356 - DNA, 440 bp, Glycine max
agcttgtcattatatctataacaaattagtattaatcctactacaaaactgcttaaatgtgaaagttgaaaaaatgttatattgttagataacaattcttgtgagatgaatcactatttggttggtgttgcttggccaaagttttaatttccgtgctgaagttgaagaatataactgtaaactatatataaactcactcacaatatatgctttgttttattcagatggggaagagggcatctcaatttttcccttgaggggagggtcaacttgcaatattagaattatttggattagggacatttcaacttcttaaaaaaaatattgcatcctgttggaaggtttgttatttaaattacacaaaatattttccttttttaacgtaaatgatctgaaatggcttaattttcttcttggcattacaatatttcagagaatta

SEQ ID NO: 219357 - DNA, 440 bp, Glycine max
  unsure (1)..(440): unsure at all n locations
ggaacgttccaattgaattcaaaatggtgtaatctattacaagatattggtaatcgattactagtgtatctgaacgttgaaattcaaaatcaattgtgaagagtcatatcctttcataaaaagctttgtgtaatcgattacatggttttggtaaccgattaccagtgacaagatttgaataaaaatcaagacatgtaactcttccaatggttttcgggtttttctaaaggttataactcttccaatggttttcttgaccagacatgaagagtctataaaagcaagacattgatttatatttcaataacttttttacaacttttacacacaactttttgataaccttttgatatctttcttcttcttcctttgccaaaagctttctgagntttctgggttccaaactttgttctttcacaaaaaatagaagtgtgctatat

SEQ ID NO: 219358 - DNA, 440 bp, Glycine max
agcacctgaggctgcagctctactatgtggagggcgggctttcttcccttcttgtctccaacgcgaactttgaccattgttcttccttcccgcgatgctccttttcatgtccgcctgagtgggcttataccctaaaccatacttcccacgatttccttgggtatttatcaggctagttatgccgccgctgttttttcctaaacccatcccgggttcataaccgttccccaacataactcgggccatcattaccgctgcatcggacagacaaggctgcccaaagagggagtccacggaggaaatgctgaccacctcaaaagactggaaagcagtttctagcgattcttctgcggcttccacataacgcatggaggatgggcagcttaccaaaatatcttcctcgcctgacacgatgaccaagtgcccctccactactaaat

SEQ ID NO: 219359 - DNA, 393 bp, Glycine max
  unsure (1)..(393): unsure at all n locations
actcaccttctacaatggattccctgaaaactgggtcaaagnttcttctatgtttttaaaagtgacatatgcaagtattccaagggcttcactcccgtcatctattgcaaagcttgtgagggtaaatctcctgaaattatgaagcaattgtacttcaaaattaaaataacaaaaagcgcagtgcaattttcacttcaaaattcaaatccccaccaaagcaacaaattcattccaattttttttaccttaatgaaaaaggttctacaaagatcccgaataaaaacataccaagaatcaaagtttagttgtttctttccaacacccacaattatcaatatcactatcaaccacagaccaactcatagcacctcagaggagataaagttacatatg

SEQ ID NO: 219360 - DNA, 392 bp, Glycine max
gcttctccacgccaccaggaaaagagacttgctctcctaaaagcttccagactcatgcactccatgtcccaattagagaagaagctcaacaagctcgaactctattgccacaccttgaaatctggcctcgaacaatgcaccagctccactacttcttctacttctccttccctcttcaatcctcaaaccctccaacatgactccgttattcagcacttcttggtctcggtctccgaagcaagatcaagtgcaagggctttgtctcgctccttaaccatgcaactgaggcacatgggaaacaaggtgtacgagaaagtcttctttcttctccaaccctacgacgtgaaaatatctttctcaaagagcccaacaagaagcttggttgtgtacct

SEQ ID NO: 219361 - DNA, 343 bp, Glycine max
  unsure (1)..(343): unsure at all n locations
acttttattacctttttaaagaaatcgagaaaaatanagtaacttttcttatatgctaaaatcaactaataagttaaagtacataattgtgtataggagaagatctacacatattaccttggtatattcttttgttatagatatttctagaaaaaattattaaaacaaaatctaaaactaagatgctcatcacatagtccatagattaatacataaattaatcaaggtgtatcgttggaaccgcgttaatgttcattggacgtgaatattgatgttgaccaagatgtttggatttcgcgtcgtaattgaatatattcgggagacgtacgttcatgttgaaact

SEQ ID NO: 219362 - DNA, 428 bp, Glycine max
  unsure (1)..(428): unsure at all n locations
agctngaacccaattcctacagtgatgaattttgtgcaattaacattcctggggagttatacatttgtgtattgataagaccgttcactatttcttgaagctcgatctctcccccggatgaaccatatagccaagagaaaccatgaaccagaatagaagagcttgccccacccatgagtaaatatttcgtagtagcctcattagaccgtacatctttcttggtatatccagatagtagataggaacataaactgaaacattctagagctacaaagatagttattaaatcgttagcgccgcataaaaacattcctcctagagtagctgttaatatgaataacagaaactctgttatagccatttctgtacattcaatgtactctacggatagaggaatacatagagttgaacattagtaaataagaaat

SEQ ID NO: 219363 - DNA, 452 bp, Glycine max
agcttggagatgatgctgtaatgaatgtatatacagagggagagaaagagagaggggggagcaccaaattgaaggaataaaagagggagagaagctgaactttgagttgtgtcttacaagactctcattcatcaatgttacaacaagtgttacacatgcttttatttatagactaggtagcttccttgagaagccttcttgataaaacttttttgataagcttctttgagaaaacttccttgataagctagagcttagctacacacacccctctcataactaagctcacctccttaagaagctttcttgataagattcctaaagaagctagagcttagctacacatacctctctaatagctaagctcacctccttgagatgaaaagctagagcttagctacacaccctctataatagctaagctcactcccattccaaagatacatgaaaat

SEQ ID NO: 219364 - DNA, 443 bp, Glycine max
  unsure (1)..(443): unsure at all n locations
cgtgactctnggcatatctttaaactagttttttaattatnntgcgacttngaaagaatcttcaaaaacaagtcacttgaagaattgtgacttttggaaatgtatttttcgaaatcagtcactggtaatcaattaccattaaggtgtaatcgattacacatcaacagatctgactcttcattttgaatattgaaaattaaaatgtttacaagctctggtaatcgattaaaagcgttgtgtaatcgattacacaagtttaaaatactttaaaactgtntaaacataagatgtaactcttgaaatttgaaatcttaacgtataaaaacactgttaatcaattactaccttctggtaatcgattaccagagagtaaactctctggaatgattgtgtgaaaactcttgtgctactcatgtttgaaaacattttagtactatcttgat

SEQ ID NO: 219365 - DNA, 300 bp, Glycine max
  unsure (1)..(300): unsure at all n locations
agctngcaggtggatgagtcgagcgtgttattggtataaaccttgntcgcagaatcatacacaaaggttccatccaagacggtcctgttgtcccccctgctgggcgcgtagagtaaattcaacggtctttccccaaccctaaccgtgttcataaactgaaaccgaaagttctaaaaaaaaacaacctcaaacggcttcagaaataattttttatttgatctttcttaatcttataagtaactaggatttgggaaagtagcgaacctctttgggaacgttgtagtcgacgatgaaagaacc

SEQ ID NO: 219366 - DNA, 434 bp, Glycine max
  unsure (1)..(434): unsure at all n locations
ttcaacctanaggagacagaccattccaagtgttttatattatatcgacnangcctacaagattgacttgcctagtgagtataatgtaagtgccactttcaatgtgtctgatctatctctttttgatgcagatggaggagccttggatttgaggacaaatccttttcaagaaggagggagtgatgaggacataaccaacggcaaggaccatgaagcacttgaaggtcccatgaccagaggcagacttaaacaagcccaacacgtcatagagacaaggctggtcatttgtatagctgccattgatgatgattgaaggcccaagtggagaaagatgaaagcccagaggcagatgcactaccaagactaccaattgttcttgaacgccatactaacttgaagccncaagtaaataagttttaattataattatttta

SEQ ID NO: 219367 - DNA, 434 bp, Glycine max
  unsure (1)..(434): unsure at all n locations
ggatctctaaccgaccgcggcatcaagcttgactaatagagactttgttttgttaancgattaccagcgatagtttctgaacaaaatcaaaagatgtaactcttccaatagttttcaactttttcaaatggctttcttaagattttctaaaggttataactcttctaatggttctcttgaccaaacatgaagagtctataaaagcaagactttgatctgcatttcatgtactttttcaaatgcattctttagacaataaacttttgccaattgatttctgagtctctttgaacttcttcttcttcttcctttagccaaaatctttccaaagttttctggttttcaaaccttgaaaacttgtgctattcatctttttcattcccttccccttcttgcaaaaagaattccgcaaggactaaccggctgaatttttt

SEQ ID NO: 219368 - DNA, 342 bp, Glycine max
  unsure (1)..(342): unsure at all n locations
aaacctctcctattctctatcattaagnacatgtgnncatttctttngatttgtttctatcaattttctatttctcctctcttggtccctagcatctcctcaaaataagggtgatccttcataggcaacacatcatgcatacaaaatcacaactacatctgcacctgtttttgtctcattattttttgttcatgtacattgcccttttcattcttttgtacaggtccttacttgtagccaatgctggagattgccgagctgtcctgtcccgccatggaagggccatagaaatgtccaaagatcatatgccaagctgcatcaatgaaaggacgcgagttgagt

SEQ ID NO: 219369 - DNA, 449 bp, Glycine max
  unsure (1)..(449): unsure at all n locations
agctaagaggatatggacttcttcggagaaagggncgaagcggatctaaaaagaggcaaatttaatcatcctgcttggacaaatgataaaactggggcaaatgaagagggtgaggatgagggataaacccatgctgtgactgccattcctatacggccaagtttcccaccaacccaacaatgttattacttagccaataacaatccttctccttacctaccacccagttatccacaaaggccatccctaaatcaaccacaaaacccaccttccacacaaccaatgctaaacaccacctttagcatgaaccaaaacaccaaccaaggaaggaattttgcagcaaaaagcctgtataattcaccccaattctggtgtcctatgctaacttgctccattatctacttgatactgcaatggtagccataatccctgctaggtttcctcaacct

SEQ ID NO: 219370 - DNA, 315 bp, Glycine max
ttatttcgtaaaaatttcattttttttatttttgtaaaaattccattttcttttttatgttagtcttttgagttaaccttaatactgaaaactatcttttcgttaagtaaatcaataggtattttgaaatgctatttttaagggtgttacaagaacaacaattcacaacaattcaattggtgttgggacaacaacgacaacttcctctaagctggctaggactctaactacaattggaaatcctaaaacaaaggtaggcttggggtctccagcaagccataaaatggatccagcgacttaacataacaaatgtat

SEQ ID NO: 219371 - DNA, 458 bp, Glycine max
  unsure (1)..(458): unsure at all n locations
agctntttctatatatggacatgatcttcaagtatttgttgncncacaatagctgaattctgcattttgatcttcgtttgaagtctttgagtatgttgaaacatttaatacttgcattaaatgtacacctcttattcatagaatgtccatgataataagttagcatgtcttgtgcttgagtatgtaagtcaattcttttatcatatttgcaacaacaaaaataaaatagaccttttgatgaagaatatctttcaaactatagacttcatttatacttcatacgacttttacatatatcctacgatacattcatatttataataataaacaaaattaatatgactggactatttgaaatagtgttgacaaaggccattgttaagatggttatgtcaaagtttataaaaaaatgtacagagcacgccattcatatttaaaataataaacaaatttaatat

SEQ ID NO: 219372 - DNA, 383 bp, Glycine max
  unsure (1)..(383): unsure at all n locations
ataaaatataaaatgttattcaaacgaacttttttaggtgaagacgtagtatagattcgctacagaatagtcaaatgcaaatgattaaggtcggaaagacatggaaatgaaatgaaatttaattttaatacattaaactaaaataaaaaggaaagcttacatgctgactcaaattcgacgctaatttaaagcattaaactcagcataaccataaaactggaaagtgaataaataaggaagcacattaatagagtcaaaatcctcaaatggaataacttgatcaacagatcagaaattccttaacgaaatcacaaaataaaaggaaatggaagcatacactcacatcagaagaagaaanaagagaagagcgtgcgtcgaagctg

SEQ ID NO: 219373 - DNA, 354 bp, Glycine max
  unsure (1)..(354): unsure at all n locations
tggtcataactttcactcggaggttttatntatgcgcattttatatcgagacgctcgaaattgaacaatggaagctcttgagcaattcaaatggtcataacttttcacatggaggttggtatatgcgcattatatatttagacgcttcagattgaacaatggaagctcttgagcaattcaaaagggcataacttgtcacttcgaggtgggattccagcgcatattatatccagacgctcgaaattgaacagtggaagctcttgagcaattcaaatggttattacttttcactcggaggtccgattcaggttcataatatattgagacgctcgaaattgacaatttaagctcttg

SEQ ID NO: 219374 - DNA, 420 bp, Glycine max
  unsure (1)..(420): unsure at all n locations
caagctgggacgataaatggaatggtagcctatctatcatggtaatgttattcaaccgactctgattaatagactctgaaattggttctcgaaatgcaatcccctctgatctttgcatcgacattctagatgttctctctaattccatttcctttctcacttcgtcttccaactctcgtcgttgtgcaaaagccatctcacgagcaatganttctctcctgattttttccttctctagctctcgccatatttgctctttctccaactctcgttggaatacttcgttgacattgatcggcatgaccattgggaaaactctaggcgctgaaacattgctaggaaagccacctgatgcanagtcacaccctggaaattggattgtaatagaatgaattgtgacaaaagtttgtattaaacaaa

SEQ ID NO: 219375 - DNA, 405 bp, Glycine max
  unsure (1)..(405): unsure at all n locations
tctcttaccaccccattttctcccnctgtggtaacatcaataagccaaagttcgtgggaatcaatacacataaaataatgaagtgaacataagatcaattataagtcataaccaaaatataatccaaacagtcataattcaaaaccacatagaatctaaacataaaagactaaagttcaaatactaaaagataaatagagtgcagaaaatgatacgttaaatagcatagccaaaatacagggcttaaaagataattagaaactaaactctaagaaggtggaggtggtggtggaaggttgaagctctgacgaatataacccacatcttcttcaagttgtgtgagacggatatccatgccagcaaagcaagtatccagagaatcaaaatggtcgccaacataagtac

SEQ ID NO: 219376 - DNA, 440 bp, Glycine max
agcttgcttctagagatagttcaaagaccattttaatcccataaacttcagaaattaaagtgtcgtcttggatttctaggttttaatagaaggctttaactaaattagagtaaacatgtaattttaaagacatgaaaggaataagattggagttttcaaatgcctgaaagcatttaaaactctcatttgaaaagaaatccatatcaatgaattctggatcaataatggaacgagaagagaagagatttgtgtaccgtatccgctattcttcagatgaaaaaaattaggcgaagggaatagaggaaagtatcggtgtttcctgagtctcagaatgtcgttgactccgactcgaagaaccctgttgcttctttgatggttccgccattagaagggattatttgaaatttcaatcggttcaaatgaaagagaataaaaaatat

SEQ ID NO: 219377 - DNA, 329 bp, Glycine max
ggcaaaactgggtgttgaagagtcaaatcttggttcggtggaattttacgtgtaaatccagtttgggcaagtttagattgatgttatggattggtgtgatgcgagagtttgcttcaaatttatctcattctaaatttcacttttcaaacctagaaaactcattgaatggaggggtgttggacacctacattctgtgttgcagtgctttaaagcttgactttggtttaaacatgattgatacatgatttgagacttgtacgaattgatttgtgcaagattggatgatggaaagtgtgacttttcaaatctgcacttatgcagaattttgc

SEQ ID NO: 219378 - DNA, 438 bp, Glycine max
  unsure (1)..(438): unsure at all n locations
agcttancacctgaaacctggacggtccattgactaatctgtcaatgctgggcagagagtatgcatctttgggacacgccttgttcagatcaatgtagtcagtgcacattcaccatttttcgttggccttttttagcataacgatgttggtgagccaggtggaatatctgacttctctaataaagttagcattgaggagtttgtccacttcttctctgacaggtttgcatcgttcttctcccatctttcttttttactgagatattggtttggcctggggacagatggcaagttcgtggtagattatgctgggatggattcctggcatgtcagatggttgccaagcaaatgaatctgcatttctatgtagcacgtcggtgatgtgccagtgttcatgattggtgagggccctatagagctgcgtacactgctcgagtt

SEQ ID NO: 219379 - DNA, 363 bp, Glycine max
gtctaagagagaaggtccaatttccaaatatatctgagagattgtgctgtgtgaagatctatatagacgacagctcgaagcggaagccattctgagaatttgagatgagtttgtaagtgattgcgagatcatagacgggaaggagacatcgtcaccacttggatttctgctatctatcatcttgttcttctctgtgtaggaaaggaggtttctggaccatggaaagctaaattctctggtggatcttccctgtaggtacctgatgcaaatatatttctatctatgtaatgatgttccgtgtgtctctgcgctgtctgctttttattccagagtgccttaccttgatccatagaagatgctttg

SEQ ID NO: 219380 - DNA, 219 bp, Glycine max
acaacaacagccagttcattgcttaaggagcatccctcaccatgtcaccacgctttacaagagaggaccatccttattggaataacaaaactgagatggacatcaagttcaacccctacaaactctggctaatcctcacaaatggaaatatacccattcccagaccttgtcatatcggagctaaacacaacaagtcattatactctaacatgtaatcta

SEQ ID NO: 219381 - DNA, 451 bp, Glycine max
  unsure (1)..(451): unsure at all n locations
agcttctccgaagggcatggttattttcagtttcctgaaaatatctaagaatctcaccaaatgccggtccttctccttgttggaaggtaccacatgatatggtacttccgcaccttcattcacagctttttctcttttcttctctctagcttggtcacttctactcctctcttcattcttattttttttcatttttttatttttttcatttcctttttctttttctacttctttttctttttcttggtcatttaattcttttttcttgaccattatttgtttttctttttcctgattcctttcacctctcacatcatctttcttttcatcagtacctttcttttcagcagctttcttcttggatacaacactatcctcatcctctgcctccacaaacctcttactncttgtcatcacagctttgcattccttcttgggaatcttttctata

SEQ ID NO: 219382 - DNA, 444 bp, Glycine max
  unsure (1)..(444): unsure at all n locations
agttttgtacatgcagaagagtttatgaactcangttcaatactcaagccccactaaaacttgtgtcaatactcaatagcatgaacacattgagttcatcattagaatatattcaatggttgtaaactcttttataataacatttgtatacaaagagaagagattataacatttgttttatatgcaaactatgatttgcttacttctttttaggtccttacctcaattggtaacttttgcatttgctttatagctatagggatgatttttgacatattgaatatgtacataaaggaaaacaaatctattactaaggcttaccacgaggtatgtgtgtatgcctatgttatgtngtatcatgctataattggccattatcctttntcttttctctatttcctctagtaataataattctcttggggctcatcttaatacgatatt

SEQ ID NO: 219383 - DNA, 284 bp, Glycine max
  unsure (1)..(284): unsure at all n locations
ttcttttatttgtctattggaatggaagcgttgctctgggtaacattcatttttcttgttttcccttgtgatcttttggggccactaagaccttcttcttcctcacacatatcccactgacactgcaggtgcaaaagaagcgcatgcagttaccccacattttgcacagatgctttattntagtctggtttctgtattggctcaggctcctatgcacttcactatcactcaagctgtggacctgtttcagatgtttcggaagagtaggccccttctttactttc

SEQ ID NO: 219384 - DNA, 273 bp, Glycine max
gatgagctcctgctattagagctgacgtcatggccactcctgctgacactttagaagtgatccctacatcaatacaaagaaaaacacgttcacaaagacttgctcaccgtcactggccttaaaacaaacataagccttacttctattaacaaattcacatggaatcccaaaaccccccaaattatccttgctgtgtcataacggcaattcccacacactgagattacagtttttctctataaaaattacctaggagaaaaccgttctcctgat

SEQ ID NO: 219385 - DNA, 447 bp, Glycine max
agctatgtctacaggcaacttttttatcttttaaggccaagcttacattgtgtgtgatccctctaattcttctcggtctcacccgccatgagcttgggggaggggatattagagtattcttactcctctaagtaaagtgtattggtttttacaagtgttagcttgtcaacgagccatcagttagttacatttactaactctagttagttagtaaccgttagagttagttttttgttagtcactacataatacagcgcgctgacattgatcattgtaacttaccattttcatttcaatcattgataaaattagtttttcagtttctcacaaaatctatcataaatcaacgaaatatcaaaccccgcgtgataaaaaaaaaagtgagatattaaagaaggtccggtaatatatatagacacacagaactatagcgtggtcataaatctg

SEQ ID NO: 219386 - DNA, 461 bp, Glycine max
  unsure (1)..(461): unsure at all n locations
actcagcttaagaaaggcccactcccttttcaaaatctgatttcatgcttaaataggtggctttgntcgggctcatgcgcttagtgcacttctgaacctcttagcgcgcattagtgaattttggcttatcgcggcttttctcgctcagcaaatggaccgaagcgatgcgcttagcgggatggcccttcgctcagtaaacaggcacaactcatccttctttcagattcttcctcgcgcttagccgaggattgttgagctcagcggatggctcgctacaccagcggattggcttagtgagagggtgaaaattaacacttcaaaacttgcctaattatcctgaaattgagacaaaatgattattacatactcaaaatggaagtactacgtgattattacctatctttaacaaaaagctattataacactactaacataccataaattggaggagtttgatacaa

SEQ ID NO: 219387 - DNA, 355 bp, Glycine max
  unsure (1)..(355): unsure at all n locations
tataacagtttttttgttttactttaaggagttttgtcgaagaggagaataattctaggattttaaaattccaagttttactattcatgcacattgttcacgtaaaataaaattcgttttctgcaatttccgttctgcctcaatctacaatttcgttttctgctgattaatgaaaggctaagtctccagcgttgttttctcttgaggatcaagcacaactctctttgaggttttgttattactatagaattctgataagtttttcctattcaccaattactctgtatttgttgctattaatccatgcatgcttagagctngattaattgtctctgcacttaattcacattcatgc

SEQ ID NO: 219388 - DNA, 431 bp, Glycine max
  unsure (1)..(431): unsure at all n locations
tgtgtagactatatgaagnntggtttagattattattgaatattctttcaatggcttgaagggggcttccagaggctggaaaatgattgcgatgtgttggatatgtgcaacatatgctctgttgatgttgccaacgatgtacatgtacactttaaacatgtagtggatgaaatgctggagatcatacctgctgatgtgcttgaaaatgttattgggggaaaaaatgatgcggctaattgtgagaatgaagtttggtttagtttattatttaatacctaattaggggcttgagggtggttttcagaggttggaatatgattgggatgctgtggatatgtgcaacatacgctttggttgatgttgccaagatgtacatgtacactttaaacatgtagtgaatgaaatgctggagatcatacttgctgatgtgc

SEQ ID NO: 219389 - DNA, 444 bp, Glycine max
agcttgtgtcacgattcactgtgacagttttatttccattcacttagcaaatcaccaaatgtaccatgagaggacaaagcacatagatgtaaaactacacttcatcagagatgtgattgaatctaagaaggtgaaggtggaaaaggtttcaacagaagaaaacccagctgatatgttcacaaagtccctctctagtgtcaagttcaagcactgtctgaacttgatcaatttcgaagatgcctaaagctgattggtagaagtgcagccctgaatcacaagatagacacttgctaatttggagtcaaggtggagatttgtggtgtgtgactcaaaatcacaattggcacaagtgagaaggcttcaaagtggtgttgtcgtaacttttttcagttattataactaaattggtcttgacaccaatgtatagcccttgttcctaagact

SEQ ID NO: 219390 - DNA, 420 bp, Glycine max
  unsure (1)..(420): unsure at all n locations
ttgaaacttcgcttatgcgaatcagagtgattcaagatggtggatgatttcataagatgatgacaaaggtgatgacaaacagctcaaagatcaatcaaagaatgagttcacgatattcaagatagaatcaagaacacttcaagattcaagaggaaagttgatttcaagaatcacgaatcaagattcaagagatcaagatttcaagaatcaagattcaagagatcaagattcaagactcataattcaagaatcaagagaaggcttaatcaagataagtatgataaggtttttctcaaaaattgagtagcacatggatctttctcacaacatgtntaccaaagaggttttactctctggtaatcgattgccagattattgtcatcgattaccagtagcaaaatggtttgaaaaagttttcaa

SEQ ID NO: 219391 - DNA, 449 bp, Glycine max
tgaggcatgcaatcttctagccaaaaggagtgacagtgaattattttctttgatagcccctttgagcctatggtcccatttctttgttttgaagctcattacaagccttaagtgaaaaaccatgataacaccttacccttaaggaatattggagctttgaaattgttttgggaataagtgtgggggggtatgtttcattagaagatatgatttttggccatgcttgatgtatatatatatattaccaagttcttgctttaatcttcaaattcgtattgtctaaaaataaaaaaaataaaaaaattcaattgctgcaaatccgtactgttcaaaaaaaaagagagagaagaagaatcgaagtgaagttgaataaatgaggtcttgttatgaggactttgattgggagccttggttgattttgttcatattagacggtttgggtctactac

SEQ ID NO: 219392 - DNA, 305 bp, Glycine max
caacgcaaacccgatagtactcacttttatgagatatgggacccacaatgcccctctgttttatactggctctgaccatattgtgcctacgtacaacactcttgcaccccacttgagacttccactatctttgtacaatcctttaccacttctgaaccacacacggacaacccattccttgtgttcatgaatccttataccctcagagaccctctatcccttattcaatcttactgggtgagaacatagaccgaagaattatttcttgaagagaaggatcttacaatgaagatccatggatgaac

SEQ ID NO: 219393 - DNA, 325 bp, Glycine max
gaaaacccgtgatgtacctaagcacgctagctcctggcggtcatcaaatgaaaggaccatataccaccacgctcggaggcttgtgtggcggctggccacctgtgaatctagtgtgatatatgggttgaggcctctggtaatcaattaccaagggtggttaattgtttataacgcttaaaaatgaagacaggaggctaagatggtctctggtaatctgataccacagggtgtaatctattaccaggcttgaaaacgaggtcaggaagctatgagggcttctggtaatctattaccaatgtggtgtaattcattaccaggcttagaa

SEQ ID NO: 219394 - DNA, 341 bp, Glycine max
actatcatctatgagacgctccaaactcccaccatagacactggagaagttatggctggagaacaggaggaaccatactagatgaccccctacaagaatttcctaattcagggggtattgctatcatacgagaacgaagtctaacatctgaaatataagcccggctactacgttatctattcaatggggtggagaagttcacttggaaacacctcatatgcaagtaccgcctcccacatgccatcattattgacaacgacccgcaagtcaaagatcatgcttatgaagacttcctgacgaggctaagcatcaagcgccttgtcacctttgtcgaacattct

SEQ ID NO: 219395 - DNA, 147 bp, Glycine max
  unsure (1)..(147): unsure at all n locations
cttcccccccccccccgcctgtctaacctgacccnnaccaacacgagccaccaaaaggaatttattttacaaacgaggccaccacaccaaaaccccaacaaaaaacaaacacaaaagaacgtcccacccaggacatcaccgacaaca

SEQ ID NO: 219396 - DNA, 320 bp, Glycine max
  unsure (1)..(320): unsure at all n locations
cttgatacccctctaggaagtttaaaagtttatgaactctttcctaaaatagaacatgtggacacttgntgtaactttgatgaatgagagtcttgtgagacacaactcaaagttcaacttctctccctttgtcttccttcaatttcgtgctcccccctctctatttctctccctctttcttttcctccattgaagcatcctctccaagcttcttatccaaggcttatcttggaggtgaagctccttcttccatggcttattccctagtggatggcgccttctctcacctcttatcctttatcttccgctgcatcttcatg

SEQ ID NO: 219397 - DNA, 358 bp, Glycine max
ggcgatggtgcacaacaagttttccacatccacaaagtgcgcataaacccaccatcccctgttgcccacctccaactgagctcacgtcctcccacgtagcccatatcctcatttctttcaacaccgggtccccatcaatcctcccaagctttcccaacatcaaagcaaaacaacattcaaacagcacaagctatcacagccaagcaaaacagagcaaaggcagaaaactctgccaaaacaccaaccaaatcacagcttttctcacttaaagaccccagtaacaattccttcgatccaattcgttaaccggtggatcgactccaaaatttactggaagtcataatacatagcctacatt

SEQ ID NO: 219398 - DNA, 178 bp, Glycine max
cctcaaagctacttcttgttgacatccttcgtcttgaatggcaagccatgacaaggttattgttactgtctttgatatttggtaaatgatattgtgtcgctggacagaaattcgactggattactcgccatccttaacttgcccatttggtatgacaatcgctgtaggatcacctatg

SEQ ID NO: 219399 - DNA, 270 bp, Glycine max
ttaaccaaaagaggagagtagggggaacaaacttacctaaccgactcacaacatttttggagtggttactaaagcaactccttctttacttttcatacaaaaacgtaccctaaattattctgtcacacccacaccctcttttggaaatccgagacatggctacatattaagcgtgaggatctattaaaaaactcgcgaacttcggcccctcacaatgagagggattaatccctctcatgcatcaggctcaacccttattaatagacaaac

SEQ ID NO: 219400 - DNA, 446 bp, Glycine max
agcttataatatagagctaatgtgaagaatttttttatacattctttttaaaagctgttaaaactatttatgcttttaatgtaataaaatataaattttttaataagattatgtgcttatttcattaatttaacatatgctaatattttaaaataattatatataagtttaaaggactcttatatatactcgaaattgatgacaaccttaggtatatgatgacaaccttctctgtagtggtggcaacattaatattttttggagcatttgtgattgaaggtatgtgtactcaaaattgacggtaaggacaattattagacaattcatttatacttgtttaaaaccttagggaaacacattttaaagttttttatcaagcaatttttgacggttttaaccataataaacccgccgaaatcaaccaccacatcatcacttaacttacg

SEQ ID NO: 219401 - DNA, 459 bp, Glycine max
  unsure (1)..(459): unsure at all n locations
cacctccgacaanngngtcttgttctactttttgatcaaantcacattatccatgcccttagagaagatgattccttatccccgatccatgaggaagctatgtcagaaagacctacggatttgaaggatcgccgcctatggaaaaatccttacacctccactagaaacccttattgagggaagagagagagaacctttttcttgttgatccttaacatacgtctttcttgctatgacattatatggtacataactttgtatatagtaattgttttctaagcaaaacagagtattgactatggtaattacacctaatttgcaatcgaacaaatattgacatgcatgggagtttcacatacattattgaagagctcacgaattattggttctattctagtcgagtccattttccattcataagatagaaaaagattcatgtgttgaacatgttctttcaaa

SEQ ID NO: 219402 - DNA, 216 bp, Glycine max
tttcgtacccataaggggcactaccaatatgtcatcatgtcgtttgggctttataatgtcttgtcaacatttcaagccacgatgaatgatttgtccaacctttatccataaattcgctggagtttttgatgaattttgtgtatagcataatttgacaacacttaatttttgaacaggttttcatacttaaacagggaaaatttattaaacctccca

SEQ ID NO: 219403 - DNA, 382 bp, Glycine max
  unsure (1)..(382): unsure at all n locations
ctcattaaggactagaacaccatgtaggatgtgtctgtttnttatgaaagctgtctgcctctcatgaataagaccagatatcacttgtctcaatctatatgctgataacttagttatcaccttgtacatacatccaatcaaggagatgggtctgtagtcatcaaatgactggggatgtttaattttgggaatgagagctatgaaggaagcattactgcctctatggaaactgccatgtacatggaattcatcaacaaatcttctgaagtcagcttttagcatagtcccaaattctgtaatgaaattgaagatgaaaccatcatgtccaggacattntgtcccatcacaactccatgctgcttctttgatctccaaatctgaa

SEQ ID NO: 219404 - DNA, 365 bp, Glycine max
ttacattgtttaacaacaaaaactactttgtatgtaaattatattatagacaagcgatataataaaaagtgtgcatgttgatgagcttttgagacataaaaaattttcaatagtgtgaaaactctacatgtattcacaccgagattgacctttattcctcaacaactttgacaagtgaaaaaatgagaatagagaagtgatattcatatcatttcaacgtgcacgcctaggctttatttatagcacgtttaggataccaaatttctgatcaaatcacaatcattaatgatagcatccttttataagctatactaattctggtgaccttgtattctaaccatttagcattaaaattgatatattat

SEQ ID NO: 219405 - DNA, 338 bp, Glycine max
ggagtgctgaggtatattcccatcaaaaactacaatctcaccaaaaaaaaaaaaaaaaccagctttgaatcgcagaaatactactatggcttatcatccatcacatttgtgaaagaaaggcgccacttaattacgaataactcattccaaaaattaaatctaaccatatttgcgacgaatatgaaatgattcaacctacaaaaaggaatgcaatgtaacacgcatcaggatgtgttggaatgaaaagtgagaaagctattcatcaaagttgaaatcaatactccaatgcatccaagatagaattcgaaatcgaagaaatcatgacacatttgaaatga

SEQ ID NO: 219406 - DNA, 262 bp, Glycine max
ttttcgaacctgctaattcagaactttgtccacattactctaattgggagaagacatttaatgaaaaaagttatctctccctcacaaaaatgttgtaaaaaaataaaaatgtgtgttaattagcaaaccattacaaaaaaatggaaagctactgttatacaaaatcttggatattagactggttttaaactaccttaactaaaaccggaattttgtcccacttctcaaccaaaagcttgattgcaacatttactgtgataaa

SEQ ID NO: 219407 - DNA, 84 bp, Glycine max
  unsure (1)..(84): unsure at all n locations
cccccaacacgcgcccnacaaaagagatttcccgccgggcaaaaaacccggcggacgccccgaccacgacccacaaaaacccac

SEQ ID NO: 219408 - DNA, 235 bp, Glycine max
gattttacccataacctaaacttttccaaatgaatccttattatttgaaattaacttactgaatgaacgttagcatattaataaagagttttggaaaaaaatgctgctctattatctaatctgcaccccttgcaatgccatccccataaccgcttaaatcacttcttcaagccttaatgttgaacaacaggcaaccttcttgagttaaacttcacagaacctctccttatccttc

SEQ ID NO: 219409 - DNA, 417 bp, Glycine max
agcttgtctcagagagtatgcgagattgttatcatcatgctagctatcatcgccaagtaccaagaagagttatgtctagccacggcccactagcatataatcgcagatgagtatgctcaagtatatgcggaaaaagaggctagaggaagggtgatcgactctttacaccaagaggcaacaatgtggatggaccggtttgctcttaccttgaacgggagtcaagaacttccctgcttgttagccaaggccaaggcgatggcagacacctactccacccccaaagagattcatgggcttctcggctattgtcagcatatgatagacttaatggcccacataattagaaatcgttaggaaacttgtatggtctctcagaccttgactggatacgactttctttttgaaataaaatgagtt

SEQ ID NO: 219410 - DNA, 230 bp, Glycine max
ttttttttacacgccaacgagatgaatttaattaaaacttctctactctgagagaaggcaaggtattgaatgtaaactatatgcacacacccacacatcatacatgtcctcaagagtagataaaaataccttgtcaagtcaagcttacctagtactccctatttaaagagcaacgtgtttccatgacaacccacagggtgaatacacaaacacagggctattgagaaaaa

SEQ ID NO: 219411 - DNA, 415 bp, Glycine max
acacaccatcttctcatagtagaacactttaacgtgttcactatcatggggctcatctccctctccatcattgggggcattacttgagctgccagatccctccacctttgggcgtattctttgaaagattcatgttccctcttacacatgttttgtagctgcatctatccaaatccatatcagaattgtactgatactgcctaatgaaggcaaccattaggtccttccaggaacggacccgggaaggttccagattagtattccaggtgacagctaccctagtaagactttcctagaagaaatgcatcaacaatttttcatctttcgtgtatccccccattgttctatagtacatcttcaggtgattcttgtcgcaagtagtccccttcgacttatccgaatctggcaccttgaa

SEQ ID NO: 219412 - DNA, 317 bp, Glycine max
tgtcttctccctttgccaaaaagaattcgccaaggactaaccgcctgaattctttttgagtctctcttctgccttttccaaaaaaacgaaagactaaccgcctgaattcttttgcgtctcccttctcccttgtcaaagaattcaaaatgacatagtctgagaattcttatgattcttccctttcccatatacaaaagttttcaaaggactaaccgtatgagaattcttttgtatccccattcacaaagtatcaaacgcttaaccgcctattatctttgtcttaacaccttggagggtacatccttcgcggcacaagt

SEQ ID NO: 219413 - DNA, 310 bp, Glycine max
cgacatccactccacataggttgatagttaggaaaccttcaatcctattacgcatcgtggcggacaaaaatgggcaagtaactcgtattggcattattgtcaataccgaaggtattctgggcttcactatccatgttcacatattattgcagcttgtggttacatgagcctgaactactaccaatatatagatgttgtttatacaaatgagcacatcttaaaagcttactccccacaatggcggcgtcttgggaatgaatcggctatttctccttcttatgactcatggacacttatccttgacccaact

SEQ ID NO: 219414 - DNA, 257 bp, Glycine max
tacaacgaaaaaagaatggttggtgtttaaagtccattttgacaaggtagatgactcggtttgtagaaactttcttgcttacataatgaagaggatggaatttggtgaaaagaggatccattggatcatgacatctctgtcatctacctcggtgtcatagctggtaactgataacccgatcatggagtttcaacctataagggggcttatagaatgataccattggtgcctatcttattcacttccgcagacggatt

SEQ ID NO: 219415 - DNA, 451 bp, Glycine max
caagctttatggggttgatcttgagcttattgaggtcattcaatggttattttcaaccatggatatacagtggaaagtaaaggagaagaggtgagaggaggtgtcatccattagggaataagccatgggatgagaagcttcaccaccaagagagtgccttggataagaagcttaaatggaggaaaagaatgagaggggggggggggggggcacgaatttgaaggataaaatggaggaaaaaacgtggaattttgaaatgtgtctaacaagactcttattcatcaaagttatgacaagtgttacacatgtttctattaatagcctaggtcactaactaaatgaaagcttccttaagaagctagaccttacttacacacacccctctaataactaagctcacccccatgctaaaatacatgtaaatacaaaaaagtccttattacaaagacta

SEQ ID NO: 219416 - DNA, 383 bp, Glycine max
  unsure (1)..(383): unsure at all n locations
aattctcttaaaggttgctgtcgctacggtctaaaattacatggcgnngnctacactatggatcattcctctccaatcagagcatgacactcagccttatcctttattgtgagatgattgagcatttgtagcttaatatatttctattcttcttagctcaattgacatctttttaacccttattttcttaccttaactcagttttggtcttgggcaaatgattgagcttaattgagaattgtagctaattgttggatgttgtgcttacttgacctatttgtcttgcgcacggccgagaggaaactacagatataaaagtgaagcatgtgagtagtccctggaaagctaagaataatatattcaattttgtcacacataagctt

SEQ ID NO: 219417 - DNA, 423 bp, Glycine max
  unsure (1)..(423): unsure at all n locations
agctttaacaacttccaattgactatctttattctataaaaacaacttttgataaactatcgaagtcacaacaccaattccatggatccattccttgcctaaaaaattattgaaactggcttgtgaaggaataaccacaaagatagttggcctcctcaaacttccaacaaaaacttttagtgctatcatcccatcaattgctccttatacttagtaaggaggatcaaaatcgttctagtgatatcttctaaagaatcatcaaaaccagatttaaaagtatcaatcaccatttcttctacagtttcatgcattggttttgagtgattctttagaatttgaatccttgctttngttgactgctcttgtgattctccaaaccaacttcctaccctttggtacacctcattgagtttgtcatgtttt

SEQ ID NO: 219418 - DNA, 343 bp, Glycine max
  unsure (1)..(343): unsure at all n locations
cttacccgttgaagatcgaagaatgaggtatatttattgaagaacgncgaagaacgggtgaaacctttgcgaaattcctcacggaaaacgttacggaaacgtttcggaagcgcctcggcttatattttcttcacggaaacaatttttccaagcaaattcgaaagagagagaagtgccaaaggggctgaacccctttcttcttcacttcctcccctatttatagcaaaataggggaggtggttgccgcccagctcgcccaggcgagctcagctcgcccaggcgagccaggttgcttcctccagaagcaacagccttctggaggaatattcttgagggcccaagt

SEQ ID NO: 219419 - DNA, 404 bp, Glycine max
  unsure (1)..(404): unsure at all n locations
agcttatcctataacagacgaagcttattttgtttcgancgcaggcttgtggaagcgaatacatcctactgttctatgggaatcgattacagggagtggtaatcgattaccatacctaaatcaaggctttctctacaaatctaactattgcttactcctaaaaactacatactcattgtatcttttatctaccacaatcagagatcaataatagactttgaaaaacaagcattataaacatcttaactacaaccatcaagcacaatcacaagtacaaatatactcaccaaatcaataatcatcaaatcatacacaaagaaaatcattaagccgcagtgtacaaccattatgagtgtcaaaacacacacaaagataatcattgacaatcattcaatcattatgac

SEQ ID NO: 219420 - DNA, 431 bp, Glycine max
  unsure (1)..(431): unsure at all n locations
agcttgagaaaggctagacaagatacatgtcatgttttggnntaggccaaggataaaagggatgccccacattatttccatgacacaaatgcaaaaatgatgatttggaaactttatgcaaaactggtcatgcatgcacctatgcggacactcaagtgtcaaatttttatggtcatgtgatgctagggctcaggatccatttcctctattttaatcaacccaatgtttccaacatatgttcttttatcaatttgtgcattcatccgagtccatttcgggcgtccggggaaatttcacagcattcacccttcaggtgtagacacattttccaaaaattggttatgatcaatgaactttttcaaagaaaagttggaaatcgtctcttttcaaaagcatgctgttttttagctagacaacctatntttttcttt

SEQ ID NO: 219421 - DNA, 224 bp, Glycine max
  unsure (1)..(224): unsure at all n locations
caagttatgcaccagcctccatgagtcaagcagtggcctatgccaagttgcacgaagaaaaacaaaacggcgcgcgaaagacattncgggcttcagctggagattcctcaagctcttcgtcactaccattgcttacaccatcatccacttcctcacttgttacctacaccggggcgccacaattaaccattggtccttcacaggcctactccggaagaactagc

SEQ ID NO: 219422 - DNA, 261 bp, Glycine max
tatgctttatcttaaacaatgtatctatactctctaattataaattacctcaactccttcaataacacatctatcaccaatattaaatggatgcattacaaacacaaatgacgattcgctgcaaaaatagatcttgcatgtgtttccaaacatgaaagctgcaagtactaacttgctaaagaggaatacaaatactttatgtgtcgcaatctccattagtataatccacacaattatggtcaccatttctaagagtactgc

SEQ ID NO: 219423 - DNA, 322 bp, Glycine max
  unsure (1)..(322): unsure at all n locations
ttgtgctcccctccttctttttgcccactcattatgnnnngnctctcctcctctatggtactgtgccagcctttacccaccactatcatcgctcacctttcccattgttgctcccttcttagcatgctagtgtgacgaccatgaatgctctaaaaatcctgactcctttttcttcagcttcactagattctccctcagctgttatggcatcattggtgccttcctcctcttctcatcccagtgtctccttagatcacgtttacacttctcatgatattgatttgatgtaaagcatgggatatacgtcagagaagggaactct

SEQ ID NO: 219424 - DNA, 374 bp, Glycine max
  unsure (1)..(374): unsure at all n locations
ctctatactaataagccacaaggaccatgcagtgttagctgcgaacatcaaaagagagcctctaatagtatcacctttggagtgcacaattgttaaagggtgagaagtatggttctaattttctggatagcatttcatgaaacccaggtgaggtcctttgactaaagcaaatgttattgccccagcaaggcttataacggaccccaaaatcttggccaatccatgcacacgttttacggaaatgctttccatcctgaaatttcgaaaaccaatttcagttttcaccatatcaaaactttgatttctctctataggtctcgaccctgcttcagaanaataaatggatggttattttaattctacctaattaaaac

SEQ ID NO: 219425 - DNA, 190 bp, Glycine max
tgaatattgtgttgatgaagaccttgccagacaacatattctacgttgtaccttttaacaaaatggagtagctgaaagaatgaacaagaccttttctaaaaggaccagatgcatgttgttcacattaggcttgtaaagaagatattggacttaaacaggtgatacaacatggtatcttatgaatcgatca

SEQ ID NO: 219426 - DNA, 400 bp, Glycine max
ttcttaaaacaggactgattcatttgctttcaaagcttcatggccttgcaagtgaacaaccgcacaaacatttgaaggatattcatattgtctgctccaccatgaaacccccacatgtccaagaggatcatatatttatgaaggcttttcctcattctttaaagggagtggcaaaggactggttgtattaccttgctcaatggtccatcacgagctgggatgaccttaagagagtattcttagaaaaaaatttccctgcttctaggaccacagccatcaagaaggatatcttaggtattacacaactcactggagagagcctgtttgagtactgagagagatttaaaccactatgtgccagtagccctcaccatcagattgcggagcagcttcttcttaa

SEQ ID NO: 219427 - DNA, 214 bp, Glycine max
caccgccgggggcgacactgagcccccccataccggcagcgaaccggcaaccccgaaccgaaggcaccaaggcgccggcctgagcacaccaccgacccccaggggaggccacgacacaaggcacccccaaaacccccaagacagcaacgaccacagacccaacccaactcaacgcaaacacgccccagaacacggcacagcgccacagcaaacc

SEQ ID NO: 219428 - DNA, 442 bp, Glycine max
  unsure (1)..(442): unsure at all n locations
tcaagcaactaaaatcaacgtaagatttactactctatagagccgaaacatgacactgtgaaagaactcatctctcttacctcaagaggacgaaaacatctagtgaaaaagttntcacacatttacacttggaatttgtccaacttaatttgactatacagttattattgatgcagaaagaattccatgaactttaaagaaaagtggatatatgacaagtgccttgtataaattgaaacttaaaatgagagagtaccttgatgacagattcattccttcgtttcctgcctcttgaaactgcatctcatttttccgcataacatctcaaataaatactcagaacaaagactgaagtaaaagttggtttttacatatttgcatttggtaataaaccataaagtccttttaatttacaacatatgttacgagaataactaaatta

SEQ ID NO: 219429 - DNA, 415 bp, Glycine max
tatctagcgtgatgaggggttatacgtattttcatgcacttcttaataaagttaactatcataattaaatctataatataaggtctcatattataaaaatctattaaataaatacttaatcaaattatttattcaacaaatcctatgcatggcatttatcctgtaaggataattaacattgatcagtggtatgtggtacgtccactccacaataatgcataaagtatcattacatttgataatactgcaccattcaattcttaaccgatggtgcgataatatatgaacattgaatagtgtaaacagcaatcacctacagcctaagacgatatgctaattcactttagagggctgcgaactgagggttcttcaatttacaacaatattcaaggatatgtggagaatgaaaatcaac

SEQ ID NO: 219430 - DNA, 343 bp, Glycine max
  unsure (1)..(343): unsure at all n locations
agttagactggtattttcctattaaaaatactacaaaagtaaatccacaggcccgcactttattttagttatatataaaaaacaaaaacaaaaaacttaaatcagcttctaatctggatagttttatgattaaaaaaattagaataaattacacggatactcgttgaggtttattgatattacacttgatatatctccaacatgatatcttctatttcttgacattattttgagttcttaaggggaacggngtcacgtttttatacctaagcggatcaggggaacgatntacacataaaagagaaagtaatataacaaaagtccaaaaataacttgagttttt

SEQ ID NO: 219431 - DNA, 419 bp, Glycine max
  unsure (1)..(419): unsure at all n locations
taacccgacagttaaattgtgcatgaagtgtatatagtntaacaatctcccgcctacaaaactatgatcataattgcaacataattaattaaaatgttctaaaaaaagaaaatatttaatcaagttgcaagtatctagcttatcgaaacctgtaagcaaaggccatgattagtacaattaaaatattttccaaataaaaatctgttgaaatgtgacagtagtactctaatttctggccatcatttcatttaatcgattgtacacaacaatatatacatacataggaaaaaaaaataaaacgtaaacaggaaccctataccagacaaattaccagatcatatcacctataattacacaaaacataaacataaccataaacattaatctataactttacgccctatattctcaagctttca

SEQ ID NO: 219432 - DNA, 427 bp, Glycine max
  unsure (1)..(427): unsure at all n locations
gctggctttgtttatactgacaaagaatttcagagcagaggtgtgaactttagcttttattcttgtgttnttttggggataaaatattgggagggtcgaaatacagaactggaggatctggaatttaatttttttctcttcgtattactgattatataagtcctcatctggttttgtccaggagaaacttcgggaaccacagctacattcgtaatagtggataggtggactgtgactgttgcatctgttggagattcccgttgtatactagatacccagggtggtgctgttacctccttaactgttgatcaccgacttgaggagaatattgaagagtatgtttttatctctaaggcctagtttgttaacttttttgtatgctcttggttacgagttacactgtatgcacaggagggaacgtgtcact

SEQ ID NO: 219433 - DNA, 374 bp, Glycine max
  unsure (1)..(374): unsure at all n locations
acttatctgaatccggtgaagatgagagaaaacgcccattaaaaagagaaagggaaaaacttcaagaacatggtcttcactcttcacgtacaagagaagaatccccacaaatatcacaaacaactctttcacggatttcaccaatccaagcactcacgttcaaagcaaataacaagagccacagaatcaaacccatcattgtcttttggttttccatggttgagattganaaaaaaacaacaaaaaatggtatctctcacaagcactatgtttttggattttatgagtagttctcttatcaccataatgctcctaaaggatgtttattgctcatagtgcatcgaatttttcaccgacatgatattttatattat

SEQ ID NO: 219434 - DNA, 356 bp, Glycine max
agcttcagtggctcaatgagcatagtgaatttataatcaatcaacaagtgaagatagtcttttctataggagattactgtgaggaagttctatgtgatataatccctatggaagcagggcacattttgttaggtagaccatggcaatttgacaagaaagcaatccacaatggtctcaccaatgaaataaccctcacccatggaagcaaaaagttcaaacttgttcccttgacaccttcacaagtgaatggggatcaagtacaaataaaactccaatggaatgaggaaaagaatagaaaaagaagagaagaacatcctttaatggttaacgaagagtgtaaggaggtaagtgatgtg

SEQ ID NO: 219435 - DNA, 284 bp, Glycine max
  unsure (1)..(284): unsure at all n locations
tgctttattggngaccacagagtggtacctggagatatgtcgcgggggtcatgagaccttggggacgtcaagtggggtgctattgcccaaaaccaagcttgaccaatcccgacccaacccgagcatagtcggtcagtgagaacctgtgatgtacctaagcaggcgagctcctgacagtcaacagattaaaggaacatagaccaccaagcatggaggcttgtggtggctggcccgctgtgaactttgaatgatatgtggggtatgggctctggtgatctattacc

SEQ ID NO: 219436 - DNA, 456 bp, Glycine max
  unsure (1)..(456): unsure at all n locations
agctntaaaaggccatcacataggctccatttttggctntaccaaaattttcacacccattcaccttagaaacggatgcttctggaattggtctagctgctattttgagccaaatgcaccatcctattgcttatttttcaaaaaaattgaatgcgagaatgcaaaaaaaaattagcatatgcaagggaattctttgctattacgacaaccatagctaaatttagacactacctacttggtcacaaatttaccattaggactgatcaaaagagcctcagatcactaaataatcaagttgtgcacactcttgagcaacagaactagatacataagttgacgggttatgatttcacaattgagtacaagccaggaaaagagaatgtagttgctgactctctttccaaatcaattatgatggctatatctcaactgaaatggcaattgattccagaattg

SEQ ID NO: 219437 - DNA, 449 bp, Glycine max
  unsure (1)..(449): unsure at all n locations
agcttagagagggagcttcaatagatgatatgaatgagagaaaaagagggagagaagttgaactttgaagtgtgtgactcacaagactctcattcatcaaagttatgacaagtgttacacatgtttctatttatagcctaagtcacaaactaaatgaaagcttccttgagaagcttccatgagaagttagagcttagctacacacaccctctctaatagctaagctcacctccttgggaagcttccttgagaagctagagcttagctacacacacccctctaatagctaagctcaccccatgccaaaatacatgaacattcttggctacacacacccctctaatagctaagctcaaccccatgtcaaaatacatgaaaatacaaaaaaggttcctactataaagactanctcaaaattcctgaaatacaaggctaaaatcctatactat

SEQ ID NO: 219438 - DNA, 408 bp, Glycine max
  unsure (1)..(408): unsure at all n locations
acactaagcaagttgccaactcatttgcatgctagtcaacctttaccttcatctgttttacaggttacaggttgcacactttatggtggagctcatgggtcaggcttttgtattcccactgaagaaacatctcatgaagctaattacatgggaaaccagcctagacaaaagtttaatgcacgtggattttctggatttcaacatggccaaccttaccagcagcagaataaatggagaactcaccctggtaatcagttcaataaagaccacggtgggccacctaacaggccacaacaacaagggcctagcttatatgagagaacaacatagctggaagatactctagcttaggttatgcaggtgtcattgactaatcatangagcacagagtcagccataaaaaatcta

SEQ ID NO: 219439 - DNA, 241 bp, Glycine max
gtgaattaaattgtgacgacaatgggggagatccatgcttgatgcatctctggtgtacatgatgtggaaagacgcccaatatctgaggagttgctgcacagactgatcaataggggtctaattgaaatccactatgccaaaaaggacgaaggagaggtattcatgcagccgagtgatataagcccaagtaagcctaaacctttgctgacgcattttaccaaggatattactacgtatatac

SEQ ID NO: 219440 - DNA, 233 bp, Glycine max
aacacttctacattttatctctaacaagcattttctttctttacccactcctcacgtttggttttttagggaaaacactataactaaacgcgccgcaagggatccctatcgcaccaaatccaaatctaaaacgatgggtgatcaagaggagacacaggaacagatgaaagccgacatgtcggctctgaaagaacaaatggcctccatgatggaggccatgttaggtatgaagt

SEQ ID NO: 219441 - DNA, 287 bp, Glycine max
  unsure (1)..(287): unsure at all n locations
tttctaaaggaaancatatctagtcaagggctgagagaccatacaagtttcctaacgatttctaattatgtgggccattaaatctatcatatgctgacaatagccgagaagcccatgaatttcttccgcggcggagtatgtgtctgccatcccctttgccttggctaacactcggggaagttcttgactctcgttcaaagtaagggcaaaccgatccatccacatgggtgtctctnggggtaaagagtccatcaccctttctctagcctcctttttcgcgtatactt

SEQ ID NO: 219442 - DNA, 190 bp, Glycine max
gacgacccgaaagaccacaccaccgaaccccaaccagagacgggtagccaacgcccagacccccccggcagcgccaggcggccaggcgagaagacaaacggaacacaacgaacccaccctcaagcatcaaggaggactgcaccggcgtgtgagacgagctggacagcccagggtggcaccccacgagcgc

SEQ ID NO: 219443 - DNA, 317 bp, Glycine max
gcctctgagcataatcaaacgataataacctttttactcagatgtcggatagagtcctgtaatatattgagacgctcgaaatggaataccgaagctctgggcaatattaaacgacaataactttttactcggatgttcgatagagtcccgcaatatatcgaaacgctcgaaattgaatgttgaaactctgagcaaattcaaacgacaatgaaattttactcggatgttcggatgaatctcgctatatatccagaagctcgaaatggaatacccaagctctgtacacatataaacgaacatcactttgtactcggatg

SEQ ID NO: 219444 - DNA, 434 bp, Glycine max
  unsure (1)..(434): unsure at all n locations
agctngaagagtatgctgtaatggatgaaatataagagagaaggggggagcacgaaattgaatgaataaaagagggagagaagtgaaactttgaagtgtgtctcataagactttcattcatcaaagttacaacaagtattacagatgcttctatttatagactaggtagcttccttgagaagctttcttaagaaacttccttgaaaagattctttgagaaatcttccttgagaagctagagcttagctacacacacccctctaataactaagctcacctccttgagaagtttccttgagaagattcctaaagaagataaagcttagctactcacacctctctaatagctaagctcaccttcttgagatgagaagctagagcttagctacacaccccctataatagctaaggtcacccttgattccaaaatacat

SEQ ID NO: 219445 - DNA, 397 bp, Glycine max
  unsure (1)..(397): unsure at all n locations
tatgctgcacacatatacaacagactcttctaacctcattatcaaaatcgaccacaacagaacaattatgacctctccagcaacagatacaatcccacatggaggaatcaccctaatctcagatggtctagccctcaacaacaacaacagcagcctgctccttccttccaaaatgttgcttgcccaagcaaaccatacattcctccaccaatccaacaacagcaacagccccagaaatagcaaacagttgaggcttctctgcaaccttccctcgaagaacttgtgaggcagatgactatgcagaacatgcagtttcaacaagagactagagcctncattcagagcttaactaactagatgggacanatggctacacaagtaaatcaacaacagtcct

SEQ ID NO: 219446 - DNA, 386 bp, Glycine max
  unsure (1)..(386): unsure at all n locations
aataacgaanggaaaatgtgggtcatgttctgcgcagcggagcaaaagtaattacgattgaatttttggtcgtggtcattggtctcctcctccctatatatttattcataaacactttgtgttccaatatgaacagtgaggtgaccgatgaccataatggataaatcggcacatgattgaccactgaccaacatcatttgaaacagtttctggtatgtcattgcttctcctccctattcatgttcacttgctgctctatatgccaatcaccatagtgtatataaaccgtcaccttccatatacatctatgtgcatgtcagggacaaaatcacatcacattacatatgaataacattntaatcgatgtaaattgagaattgagatat

SEQ ID NO: 219447 - DNA, 421 bp, Glycine max
  unsure (1)..(421): unsure at all n locations
tgcagcttcttataaacagaagaagcaagcttctctatcagttgattagcaataacgaagggaaaatattcgtccatgttctgcagcacagagcagaaagtaattaggattgaattttgtgtcgtggtcattggtctcctcctccctatatatttattcataaacactttgttttccaatatgaacagtgaggtgaccgatgaccataatggataaatcggcacatgattgaccactgaccaacatcatttgaaaaagtttctggtatgtcattgctcctcctccctattcatgtttacttgcttttctatatgccaatcaccatagtgtatataaaccgtcaccttccanatacatctatgtgcatgtcanggacaaaatcaaatcanatacatatgaataacattntaatcgatgtaaa

SEQ ID NO: 219448 - DNA, 334 bp, Glycine max
  unsure (1)..(334): unsure at all n locations
agcttatggagagcgagccttgaccgaaggtagtcataacggctacataacctttggtctttactcgcttccctgtgaagccgaggagtggactgacataaggttggataggtgtaggtgaaacttcaagtctctagaaattcttccaatataaaatattagtggagctaccctggtcgatgaggagcttggacaccatgaagttggcaattatgatggagacaaccatggngtcgtcttcattgatgaagttgatacccttgaagtctttatctgtngaaatgataanaggaagacttcgtggtgatggtgtatcgacatagatgatgtcgat

SEQ ID NO: 219449 - DNA, 484 bp, Glycine max
  unsure (1)..(484): unsure at all n locations
cagacatgacttatgtgtactcttattatcnggntggagaaacactacttgtgattcctgctacagggatgccattctctttcggaatttaattaagtagatgcgtgatgttaattattaatggtttaaggtatataaatgttatgttattaggctgcagttgttgctataggacccatcgagggatatgaattgtttcttagaattntggatgttggacgactataaaaatcgggataggacatagcatgtgttgaacctggaataacaaacctaagatatcatttttcttgagacaaacaccggttaagagcatcttagattctagacaagccttaagaaaattaaaaacctgacaacctattangaagggacanaaagacatgatctgttatcacctatacaattattgaaagtgtagaagataattttcacacataaatatctncttgcattaactcgtgatggatcacataattttctt

SEQ ID NO: 219450 - DNA, 459 bp, Glycine max
  unsure (1)..(459): unsure at all n locations
aaatcaattgagggagcttcgccaagtgtccccatcgaaattgaaaaacctttattcaaacctttcaaagttagtgagaaggctaaacggaaaattagggaacttagaaaaactaaatccttaactgaaggcgtaggtgacaatcatagtgaattactaaacaagattggtagtttacttaaggtcattccagatactccccaagcctcggaaaatacttctaaaatggtaacaagaagtacctccaatataattaatgttattaatgaagatagtggaccaaactcagataacacaactgagataggatcagtaacagaaaagaatatagatccaattaattccaaaaactggaaaacacccttccatatatattatcaacgtccaactggccctgaccttctactagaagaaagaggtganaaccaatttataatgtttagtgcanataacatctac

SEQ ID NO: 219451 - DNA, 337 bp, Glycine max
  unsure (1)..(337): unsure at all n locations
gcaactacccatcatatctcccaaaacccattacccgacgaatatcatgatgagactgtatgtctaccttgaacctgataatttcgaagacccacacgtaaagattgcgctcacgactccgaatatgccttcctttcgcgatttggagcatatatggtgactatagggtggagctatggtggaggctacaatggagaggaagaagaacagagtggtaatgtgatagaacgagagatcaaggcgtctgaaattctgggctgagtgaggagagagaatacagcanttgaattcaaagaaaggctgtgtctactctataatttattgaagctgtgcacat

SEQ ID NO: 219452 - DNA, 328 bp, Glycine max
acgagactggacctcgcgtgaagagtgttggaacgggttatgtaactcaattacaattaggatgaatgctgtcattttctactgtaacaatggatagcattttcaaaatgaaattccaaaattactcaatcaaccagataacaatggattaagataaaataaaaatataaaaagcataccacgccgataaattagactatcaacgatcgtcatagataaggatggtcacagtttccaatctcatctgtaatatctgcacttgagacgaaagtcctgattaccttatgtgcataacaaaacgaaaagcttcactttcacgggtattaat

SEQ ID NO: 219453 - DNA, 345 bp, Glycine max
  unsure (1)..(345): unsure at all n locations
agcttcaggcacaaggtatatgatgcatatgttgttatgactatggctatgatgactacaaacgatacacaagtttcaggagaatcctgcagtccatatgccatgttgagggaagggacaataaatttgcacccttggattttcaaaccccaaaaagaattgacaatcactacttcataaacattggtgaagagaaaggcttgntaggttttgacaatgttcttatcaaccatgacttacatggaaagattacagagcaggtgtgggcttatgcctctaatgaanaannattggtggcttcatttgctaaatctatgaataagatggaaaacatcaatgttctta

SEQ ID NO: 219454 - DNA, 490 bp, Glycine max
  unsure (1)..(490): unsure at all n locations
agctnggtgatgccatgttattgcctcattatatttgttaagcatatagcataatcttctgccttgtgatatttcattgacctgcattctattctataaaaacaggaactagtacagagtgcattattggagagcaacactgggagagacgacagaattctttataataagctagtgcggatgagtgatatttgatgccccttgtgtctatttcattgtttacgaaacactggaattgcctgtgttgggacttgggattaatggaaagtgcttttgtaaaattacagttggactntatttgattgttgagagggctggtagtctttcgttntagcgaaagggtaaaacctttcttgggcattacaataggaaaccaagtattttatttacatggtttgaattttntaatctcatcttttcgggaaacttctgggtatttattcgtggcccgagttttcaaattttggcgtatttctaaatataactttcg

SEQ ID NO: 219455 - DNA, 413 bp, Glycine max
  unsure (1)..(413): unsure at all n locations
caacaaccttctggaggaatcttctggagggcccaagtgggcctggttgctattntcacccccatatttactaaatacaccccctgccctcttttggtgattctttnttcgtaaagttacggaaacttacgaatntcgtaacgatacttgttttctttccgtaatgttacggaaccttgcagattacataatcatccctttttggacttacggaatgttacggaacctcactaattgcgcaacgatgcttccttttgatttccggtgtggtacggaaccttacggattgtgcatcaatattttctttngatttctatgcacgtcacggaatttcacaaatgcctaatgatgggtgccaagcaccttaaaatgaccaaacacaangtgcatgccaccaagcacaggtccccgga

SEQ ID NO: 219456 - DNA, 493 bp, Glycine max
  unsure (1)..(493): unsure at all n locations
agctntgaagtaagtattaagcttacgttatttttttgtgttattgggttggggnttatttgactatttgtgatgttatgctaagtaaatttaattaaatttatttttatttaatgatatttatattaaataccttttatttaattgtattactatttttaagatttttattttattcttaatatatttaatttcaatgaaaatattttaaaaataattntgttttttatttaagatttgtgaaattagatggttntatctaattntcttaatttangtgaaaatgatattttttatttatacatgacttcaaaggaaatatatatctagtagtcattagttttattattaattagttggattcattgtaagttntgtgtaatactactttaattnttatgattntgtaatntttcatgctactcnctctaagcggacccattaattatctcatggatntaacatanaatttcattcaattatagaacaccta

SEQ ID NO: 219457 - DNA, 405 bp, Glycine max
aacagaaacattcttttgctttattttcatccgtgcaagaatgtactgtgccttgagtcacagtggtatttggctctgtgtgagcggactttgtgcaaggttcactctaagtgcacatatcccaagggaggttagcacactaatctagaagattaagataatatttaccaattttaacaaaaacaatttttaccatttttggcaaaactctactttatccttttatagttagttttggaaaagtgcaagaagccattcaagagatggctgagcttgtggagatctcctcaagggctgtacaagctgccaaataatcatattaatggtcactcaaagtgctgagaataagaagataaagatttggccttgcaatttcatttgttcaagcatttcacctacaataag

SEQ ID NO: 219458 - DNA, 318 bp, Glycine max
ctgcactgccttgtgagaccacacgtttttttcactttcacagctgccaaaacattgtaagttgatctttaaactaagtactatgttccgctcaatattttgtgcacatacatggatctcacattgctggagggagagagtttaccaactactgcatcaattgcaaaactgtccatgtctattgggaagtatcattcatgaaaacactactagcaaataaacttagtcataccctgtttgtttgcacaaataagttacttgttgcatcataaagttcagaagtgtgtagttgatggaataacgtaatgttataaaata

SEQ ID NO: 219459 - DNA, 400 bp, Glycine max
  unsure (1)..(400): unsure at all n locations
tgacgtgtaagaaaggtaatatcttgttcatggttgctctgaagtatatctagcttttgtacctaaaatatttggtgagtggactctggtgctactactcacacaagtgtattcatgcaaggatggctgtcgagcccactggcaaatgatgatgaaaagatcatatttgtgtgtgacaaccaaagattgcgaaggaggttataggaacctttatattacactttgaaactggattttatatggattcatttgagacttttgttgtatctgcccttataccgaatntgatttcatattctaatctggacaaatttgatctctctttgtcattgcgaaattataaagagtatcaacctacattcaaatttgtattgtccggtctttaatcgatatctatata

SEQ ID NO: 219460 - DNA, 383 bp, Glycine max
tggaatggatgaatggaaatgactaataatttccagtgcagcagcttatgccattcactccttcctgataaatcaacttttatattattttttaatattgtgtctttatttattaatagacctttgaaaaagattgctaaatgaaacatatttatgaaaaacaatataaaattcataaatttatcgatggcttaacagataatcaaagacaaaaaattaaattattattgtattcacacttaatgaaaaaatcttttatggaaaacaacccatatttgagttttattataataaaacatatttccttcttattatatagttaataaagtttatcctttgcacgattttattactttattaaaaaagttccatgataaagctat

SEQ ID NO: 219461 - DNA, 412 bp, Glycine max
  unsure (1)..(412): unsure at all n locations
tatagnnctcgagtgttgatggttttatcaagcccggtccaatatttaatgaggcctataacaaattttaagagactcttattttggatgttgctaggtgcacctttntttttactctaaatgaaatagctataagttagacgtttgttcaaatacatgtgacagttttatggcaacatgtgtcacctcttttggtttataaaaatcactaacaaatcatattatgttagtgggcctaaagcttgaacgttttagttgctttactcttggttcaccatcagtgttattatatagttctccaaatactctttcagatgaaaggatttagaacataaaanttcgtggtgcttttcaaaatgcatatccagaattatttggaaaaacatttacatattgcttagatcatgactat

SEQ ID NO: 219462 - DNA, 438 bp, Glycine max
  unsure (1)..(438): unsure at all n locations
gtcacctgcggctgcaagcttgagcaattctaatgcaaaacttttttctatatgtctgatcagtcctgaatatatcgagccgctcgtaattgaaaacggaagctctaataaaattaaaatgacaataaattcttactcggatgtccgattgtgtcccgtagtatatcatgaagctcgacattgaaaacataagctatgagcaaattcaaaccacaataactgtttactccgatgtcctgatgtgtcccgtattatatcgagactctcgtcattgaaaacagaagctcgtatcaaatacaaacgactataactttttactcagatgttngattatgtcccgtagtatatccatacccctctgtattgaaaacataagctctgagctaattctaacgacaactacttttaactcagatggcctatagagtgcctaatata

SEQ ID NO: 219463 - DNA, 268 bp, Glycine max
  unsure (1)..(268): unsure at all n locations
ctaagcggcggacgggcgatggtgacaacaagctttccacatccacaatgcgctcataaacccaccatcccctgtcggccaccttcaactgtgcttacgtactcccacgtatcccatatcctcgattctctcaataccgggtccccataaatcctgccaagcgtccacaacatgccagcaaaacaacattttaacagcacaagctattacagccaagcntaacagggctaaggcagaaaaactctgctcaacacactaaccaaaatct

SEQ ID NO: 219464 - DNA, 369 bp, Glycine max
  unsure (1)..(369): unsure at all n locations
cgatgaaganaccgaatgaagaacgtctgaagaacggttgataacctttgcgagattcctcacggaaatacgttctgaaacgtttcggaagcgcctcggcctatattttcttcacggaaacaattttcccaagcaaattcgaaagagagagaagtgcctaaggggctgaaccctcttcttcttcacttcctcccctatgtatagcaaaatatgggaggtggttgccgtccagctcgcccaggcgagccatgttgcttcctcagaagcacagccttctggggaatatctgggggcccaaagggctgggtgcatttgcctccattttactaagacccccctctgttgtttggtgttcttttcgataggtac

SEQ ID NO: 219465 - DNA, 413 bp, Glycine max
  unsure (1)..(413): unsure at all n locations
agcttgaaggcaaactggatgcatttgttatctttgtaacccagctggccttgaatcagaaatctgtacctgtcgcaagggtttgtggtttgtgctcctctgctgaccaccatacatacctttggccttccatgcagcaacctggagcaattgagcagcctgaagcttatgctgcaaatatttacaatagacctcctcaacctcagcagctaaatcaaccacggtagagcaattatgacctctccagcaacagatacaaccctggatggaggaatcaccctaacctaagatggtccagccctcagtaacaacagcagcagtctgctccttccttccaaaatgctactggcccaagcagaccatacattcctncaccaatccaacaacagcaacaactctagaaacaaccaaca

SEQ ID NO: 219466 - DNA, 340 bp, Glycine max
  unsure (1)..(340): unsure at all n locations
aagtgactgangctgcagctntcgtntcaattatgagcgtctcgatatattactttactcaatcggacatcccgaaaaaaagntattggtgtctgaatttgctcacagcttctgttttcattaccagcatctcgatatattacaggactcaatcggacattcgagtaacaagttattgtcgtttgatttttctcacagcttcagttntcaatttcgagcgtctcgatatactacggacacaatccgacatcccagtcaaaaggtattgtcatttgaatatgctcagaacttcttgtttccaatacgagcgtgtccgtttattacgagactccatcggaca

SEQ ID NO: 219467 - DNA, 385 bp, Glycine max
  unsure (1)..(385): unsure at all n locations
agagagccatgagggtgagctcatgggccactttgggatagacaagacccttgtcgtactcaaagaannagtttggtggccccatatgaagaaagatgtccataagcattgcactatgtgtgtggcttggttacaagccaagtctagggtgatgcctcatgggctatacacacccttacccatcccatcttcaccttgggtagacattagtatggactttgtccttgggcttcctagaccccaaacaggtgtagaatctatctttgtggtggtggacaggtttagcaagatggcacactttattccatgccacaaggtggatgatgcttcgcacatctcanaactcttttttagggaagttgtgagactccatggttngcctatg

SEQ ID NO: 219468 - DNA, 420 bp, Glycine max
  unsure (1)..(420): unsure at all n locations
agcttctcgatatattatgcgcctgaatctgatctctcaattgaaaagntatgaccattngaatttctcgagagcttccgttggtcaatttcgagcgtctcgatatattatgcgcatgaatcggaccttcaagtgaaaagttatgaccatttcaattgctcaaaagcttccattggtcaatttcgagcgtctcgatatattatgcgcccgaatcggacctncgagtgaaaagttatgactatttgattttctcgagagcttccattggntcaattcgagagtctcaatatattatgcgcctgaatcctacctcagtgtgaaaagatatgactatttgaatttctcaagagcttccgttggtcaatttcgagcgtctcgatatattatgcgcctaaatcggacatccgagttaaaagtatg

SEQ ID NO: 219469 - DNA, 479 bp, Glycine max
  unsure (1)..(479): unsure at all n locations
ttagagtcacctgccgcatgaagcttgacataccttngattgatcattggcaatgttgaaagaagctcttgcaattgcttgcaaaatcctgctgaatcgtccatcgnttggattgtgagagggaagagttttggtgcatgttttatattttacttgtgttttcggtaatagtagagaccattgaacattaattggtgaaggcagacgagtgggtgaaatgagagacattttcacctgcacaattaaatggtattctggctganagcataggaaacatagaggcaataatcaataggtgtacattggaaatcacatanagtaatggaatggcgtgttgacgattgtggaatttgattagtcaggaantatgatggntgtggagatttggttgggcgttgctcatggaatgaaatacgagagcagttttagtaatgttgtagtggtagagtgaaagacctgagaacaacatcgagaagagt

SEQ ID NO: 219470 - DNA, 484 bp, Glycine max
  unsure (1)..(484): unsure at all n locations
agctttgactngagtcatcaagagattataattatgtgaccatagcangagnnncaataatcatcaatcatctttgaatcatctatctttcaatcttttttcaacatcatctctcanacatctttcaatcaatctttcaatgtctttctacagaatattctgattcatttctcttcatcattctaaaagttttttatcaacactttctcttccaagagaagttctttgctcaaaaacttgtgctattcatctttttcattctcttctccctttgccaaaagaacaaaggactaaccgcctgaattcttttgtgtctctcttctcccttacaaaagattcaaaggactaaccgtctgagaattcttttgattcttccattccccttaagcanaagatttcaaaggactaactgcctgagaatatctttgtttccccttacaaagattcaatggactaaccacctgagaattctttgttccaacac

SEQ ID NO: 219471 - DNA, 300 bp, Glycine max
  unsure (1)..(300): unsure at all n locations
cactcccttgaaggaacctccttcaaccagtctaagtccggcacacggtctctaagatcctttatttcctcatttgtcaagcaatcaacagcatttataagggccttctccaatggggagtgaaaggtcaagtgctgcacagagagatnggcttctttctctatcgcctccaccttgaagcaagctttattgtcactgnggtgctctattgcttcgaacaggttgaagatgactntntgatccttcacgctcatctccaagttgccattccccatgtcctcgacacattntgcagtaagc

SEQ ID NO: 219472 - DNA, 513 bp, Glycine max
  unsure (1)..(513): unsure at all n locations
gtcacctgccgcatgcaagcttgtctcctactgcccgacaagcgttaattctttctgtattgcactgctaattcctaattcaccctcaaacatagtctctgaggtaagctggtttcgctattcttctcttgggcttgtgttctttatgcacctttgttactgcttgcacccctgtgtttgttgtgtgttctgcttccttatcactcaccttctcattattttagttacaatcaaaccaagagatcatatattttgtaacaaataccaattaaagaaaaagaaaaaaaaaagaagagagagatcttctatgatgccatacaaaaaagaggcagagaagtgctttcaaatcctgtaagaaaggtgaaatcttaatgatttcaactcttgaggaattgaaccatnggctatccagctcatataactcccattatgcattctgaatatgtaagtacaagccagtaaataagatactaatgtttcagaggttttttttaaaagaaaaagatcactgat

SEQ ID NO: 219473 - DNA, 476 bp, Glycine max
  unsure (1)..(476): unsure at all n locations
ggatcttaagcaccgcggctgcagcttanggtgctcattgactccagattgctgcttataangacaaagatctgtatggtgatctgcagaagaacatagaccacagactcttgcaacaggtgcagacttctgattcatggcaagatgagttactaggttgaccaaggcatcaagttttccctcaagctttntattttcagcagatgaagatgaatctgtggccacctcatggactcctttgaggataatagcatcatttcttgcactgaattatngngagttagaagccatcttctcaatcaaactcctagcctcagctggagtcatatcanccagggcttccaccactgaagcatcaatcatactcctcntcatgtttctaagtccctcatagaaatatngaagacggagttgctcagaaatctggtggtgagggcagcttgcacataanttcttgaatctttcccagtactcat

SEQ ID NO: 219474 - DNA, 290 bp, Glycine max
gtgggcatgaaaagatgcaaattcgatcattctgctttgatgaataggaagcctgcggcaaatagagagaataagaatgagggaggaacctatactgtgactgccattcctacatggccaaattccccaccagctcaacaatgtcaatattattggatcaagtggcctcagaataattaagaagggggcggggttgaattaatattaatgtgccttgactaatctaaaaatttatcctttttaatgtactagatcaaataggctttcttctatacttcaaagtaagaaca

SEQ ID NO: 219475 - DNA, 424 bp, Glycine max
  unsure (1)..(424): unsure at all n locations
tatcttctgcctctctctctctctgtctctctctaaactcctcactttctcatgttaaaccaacttcaccaaaaccccctcaaacaatgatgaaggacaaaggcagcaaagatgaaatataatggtgatggcaaatgaactttgacagctctacaagaatgagcaagcagctgctaactaaactgatctaggagcaagtacagtggaactacaactacactaagactatgttctgcttttcaccaaaaaaagaacttaaacttgactcatccggtttgtacactccaatcagtttaccaattnttgacaaaactgtctgtcccaccaattcgtacttgagtgccagcatctctgatataatgtgtgaattacctagccagtccactggtcagactagaaagtctgatcttgagttcataattat

SEQ ID NO: 219476 - DNA, 256 bp, Glycine max
  unsure (1)..(256): unsure at all n locations
agctntttatacttcatagatgagttatatttctgtactgcgaanaatctgcctaatgccttgcgtaaaagggacagatttgttatgtagctggagcatgaatgggatgcaatttgataccttaagtgccgctagaatgggatgacattgctgagtgatccaacagtattgagtggcagttcttacaggacaaggatctgacgtactaagtaactatggaatgaagcatgccctgattttattccgccatttacta

SEQ ID NO: 219477 - DNA, 433 bp, Glycine max
  unsure (1)..(433): unsure at all n locations
acatatgaagatactttcaccaatgaaaagtcaaaatgcctaatcaatgtgacaacttacaagtgtccttagcatataagccatcttatataatgaaagaatctncataaactagtaggaggcaaatggaacagaaatggtttctcatgtaaaatagtgaaaaacttgtgaatagctctctcttgagaacatttttgattccacctatttaatttatgaagagagagatacacacaaacttttaagatgaccttgtcatgagaaaatatcacatgggataatccattcttgatcagagtaatcattttcttcatgggataatggagttagcttgaccatgatctcatcaaacttaatgcacacacanganaggcattacgtaagtatacatatatatagcaacaagcacaattgtcaattcagtcatgatata

SEQ ID NO: 219478 - DNA, 429 bp, Glycine max
  unsure (1)..(429): unsure at all n locations
caagcttgagtcntacggatagcatataagactttttcttagtctcggntgaaagatgctgacatctccggtgatggtgcagatggcgtcgttagtcactgcatgctaacaggctttgagtcttacggttagcaaatgagaccttttcgcagtctcggctggaagacgctaacatctctcgggaaggtgcagatgatgacgtttgcattgcatgctattgggctttcagtcttacggatagcaaatgagacttttttgctgtctcagccggaagaagctaacttctccggggaaggtggagatgaagacgttagtcactgcttgccattgggctttgagtctacggatagcaattgagaacttttaacagtctcggccggaagacgctgacatctacggggaacgtgaagatgatgacgtagacaccgc

SEQ ID NO: 219479 - DNA, 226 bp, Glycine max
aatggtcatgagggagatggctgagtagttggacaccctcaactcgactattatattaataataaaaaatattaaaattcagtaaaaatcatggggtaaaggtacatcacttatattataataaactataaaataattcgtaaataagccgcaaatataaaatttgtaatatgagaaataataactactctgcataataaactatgccaggaatcatcaaatggcc

SEQ ID NO: 219480 - DNA, 421 bp, Glycine max
  unsure (1)..(421): unsure at all n locations
cttaagcgacgagctgcagctgagggaatggaaaccctcatattttgtttggagncttgggtggtgattattacaatttataattctgtctttatttctcaatacaccataaacaaaaaaaatagagaaaaaaagactacctcaaaagcaaacaatgatattacaaattaaaggttgtgttcgctgtctatttaaagaaagaggcactaatatactaaaatcgatcccttntttggttcataccacgtggntcatgaatcttggtcctttaaatattttgctctccatntcaactnttaactgtgcanagtatctggaaaagaagatccagttttaaaatgcgatataaattagaaatgctactcgaccgagatttaaatatatccgatataattatgatagaatcgtctattaataatta

SEQ ID NO: 219481 - DNA, 191 bp, Glycine max
aagactgatgaccgggagcgctatatagagatcgagggtgtctcaacaagtacaagatcaagataaaattcaagtttcatgagaagaaatccagaagattcaagaatcaagagaagtttgattgccagactcacgagaagactattccatgacttcagaacagaaatctagatgacttcacatgggaagta

SEQ ID NO: 219482 - DNA, 322 bp, Glycine max
caaaaaacaaagagagagaggaggcaacgcaccgccaatccggaccagcacaaggaagaacagaaagaaagaagggactaaaaccacgcggaaaagatcgaaacccaggcgggacgccgcccaaaaccgagcccccaccagcgaaagggccttcgacaggggacgccatgccgacaaaaacgcgacgcagcaaaccaagaggggcacagaaggactgctggcaaaacaaaacaatcaagcaccagagacaagcaccgcagcatcaaaagtgcagacccgacaaaaaaacaccacacaggcaggggaaccgagaatggacaaa

SEQ ID NO: 219483 - DNA, 106 bp, Glycine max
  unsure (1)..(106): unsure at all n locations
caagctggcatgattacatctcgccctntctcatcaatattcttcttgatatcatcaaaatcttcatgatttacattctccgcctgatagataaaagataaaatag

SEQ ID NO: 219484 - DNA, 266 bp, Glycine max
tcaaggcagaaagccaacctatgcaaatctagatcattcttactaccaattgcatgcattcaccctcaaggcttgactgaaagtcatgggcttgactcttttccttctgctctactctttcatactccaaattctagctcaagaaccaaatatcaccgctaatgtggatggagcatattcagccttccgtactctcctctttgtaatggactacttggtagcaattccaaatggcccacagtggtcagactcgatcaaaacatctc

SEQ ID NO: 219485 - DNA, 339 bp, Glycine max
tctcactaagtgaaatggatccttttaaggtccaacgccttaataggaccacctttcaaggaaaaagaatcgcttgattcaccctttagaaagaactacgtaggtctgatttcctcttcgatggagggtacgtaagagcaagagccccacttttgtcgacctcaaaaattaataagaaatataagcttaggaacacaatctcacacaattctaatttaaggctggtatcctttgggataaacgtgagaggtgctaataccttcctcaaacgtaaatataactcccgaatctggaatattcttcatgaccggttttcttcgggtgttctgacatttttca

SEQ ID NO: 219486 - DNA, 321 bp, Glycine max
tatatatactgaggcaaaaagcaaactgcgttgaggtattattatgtacccaaatattgagaacacatgtgttattaatgtgacagatggcatttgatgtcagaggtcaccgagtggaccattgcattgtcagtttgaacacttaaactatattatttggccgaacaggtgtgatgaattaatacaccttgaactctattgtatgtgttttatattattatttagagatctatctctatggatgtttaaattaataacgtctctgacgtctctcttgcattgcatgcgtctagagaaaatataccatacctcactctctag

SEQ ID NO: 219487 - DNA, 468 bp, Glycine max
  unsure (1)..(468): unsure at all n locations
agctntactatgcagagaatatccattgtatattctcttatctgacttagcatcaaattgtcctaagttatcttttccattattcaatacaaaaaatttacaaccaaagatatgaagatgtgagatgtttggttttctgccattgaacaattcatatggagttttctttaaaatgggtcttattaaagccctatttaaaatgtagcatgcagtgttaatggcttcagcccacaagtattttggaagaggagtatcatttaataaagttctagcaatctcttccaaagatctatttttcctttcaacaacaccattgtgttgaggagttcttggtgcagaatagttatgctcaatcccatgcttatcacataataattcagattctttattctcaaactcacccncatgatcactcctaatagatataagtcttagaattttcttattgtgaatgattttgcaagtttc

SEQ ID NO: 219488 - DNA, 416 bp, Glycine max
  unsure (1)..(416): unsure at all n locations
agctntaataccttatcattcagcacaactcatttctttctattcagcaacatatgtttttgtgaggattgaagcttgaaaatctttggaaagaaaaaaatgattggttttccttgataaatggtagtcgatgaatctcatttcatatagcagtttacatatgctagctttgttctttcaggggagcagaaagagagttttgtggatgcatctaaagaagagagttcacttgaacatgaattacatgttgactcaccgcagactgaagaaatggatgctgatgtacaaaagcttgaggaggtttgtttcanacctaaaatgttcttggggacattatggtgctgtttgatatggccttagaaggagatgtgggcttaggtgatcggagagtaagcccaagtgtggaaagttatgag

SEQ ID NO: 219489 - DNA, 280 bp, Glycine max
  unsure (1)..(280): unsure at all n locations
agctntatgtgatattgagataacattgntgatactcatgtgtggngctcttttagtatgtgtatctcccattgctattgagtacatactcccactaatgatgctcttaacctgttggaagaaataacatattaatgttttaaaatattaaaattacgcataagttaatggctacatttactgatggaagctntcttgagaaccttctatggaggctggatctttgagcttcaaagaggcccttcaatggtgattcttcatcatggagatgtaacagaag

SEQ ID NO: 219490 - DNA, 297 bp, Glycine max
  unsure (1)..(297): unsure at all n locations
ctcttggttntgctgcatggaatctctcttaaacccttatttaaatagaagagttaagaatgagcatcaagcaaggcgtaagagtgtatgagtatgcggaagagaaagatgaagactaaagactccattctgctgccttactcactttgtgttctttactccattgtgatgacttaatttgtactttttaaaataacttcattggaggaataattccatgcttgcttnttattctttaatttattaatcggggaagcttcttctagacttggtttaagttttagagttggattcact

SEQ ID NO: 219491 - DNA, 455 bp, Glycine max
  unsure (1)..(455): unsure at all n locations
gcacatgtatgcattattaggaattgaatatatacattgataatttatccccagaagtttcaattatgaatttcggtggtcttggtgtctctactgtcgcatatcctttggacttaccggtgtaagatgttaaacaatgcataacctttaggtaattgagcttttactaagttgatcaaattggtttggttctgcacttnttgaaatcctggnttctgtttctgatttgagaaatgtgggaagcagatttgtatttcacagataatgccgtgttgttggatggattatattgtttggtagacaattcaattctgccatatctaattgatgaatgaattttatgcggtccttgatgacactatgcagatttttctggttttgtaacaatagtcacgagcctaaatggattngactcaataatagtagagagtctaatcaanagtgtgatgaaatat

SEQ ID NO: 219492 - DNA, 388 bp, Glycine max
  unsure (1)..(388): unsure at all n locations
ctgctggcttagcgagcgtccgcgaagcgcaacactcctgggctaagtgcgaagaatactctggaagaagatgagctatacaggttcgctaagcacaccgcttcatctcactaagcgcaccgcttcagttcatctgctaagcgagaaaggcgcgcttagccaaanatcactaatgtgcgctaagcggtccataagtgcgctaagcgcacgaacacgaacaatgccacctatttaagcctgaaatcagaacttttgaagagagttcggactatgattcagagctttgcatgtctagggtttccagagagagaaaggttcaagttccagagaggtttgagagattttctgtgtgaaatctgcgagaccagagctgaagtgggagccattg

SEQ ID NO: 219493 - DNA, 492 bp, Glycine max
  unsure (1)..(492): unsure at all n locations
agctttngcacagagaagaagaagaatatgtcattgagattcaaaggttgtaaaggattgtattgtaaaggttgttcaagatacttgaaatgcaaaacaaagccttgcttttatagactcttcatgtctggtcaagacaaccattagaagagttatgacttttagaaaaacttgaaaactaattcgaaaaagtcaaaaaccatttgaagagttacatcttttgatttattcagaaacaatcactagtaatcgattacacaaagcttttatgtgaaaggatgtgactcttcacatttgaatgtgaatctcaacgttcaaaggcactggtaattgattaccaaaacattgtaatcgagtacagcttgttgaaatcaagtggaactttgtaaattcatttgaagactatgtcaaatccattgtgctactngtagatgataccataatctggtatcgataccaagagaaaaactcttggaatatgtgtgagaaaat

SEQ ID NO: 219494 - DNA, 451 bp, Glycine max
  unsure (1)..(451): unsure at all n locations
gatcctctaagtcacctgcggctgcagctttacccaaggactaccttgtattttttcttgatagcccttttgagccttggttccctttccttgttttgaagctcactacaagccttaagtgaaaaaccatgatattaccatatccttaaggaatnttggagctttggaattgttttgggaataagtgtggggtggttttagttcattggacaacttgttttgttggctatgcttcatgatgtattttgggccatacttgatgtatattgtatatnnggtaaatgtggacatgctgaatgaaatgttgtttctcaaaggctaaagagtataaaanaaaaaataattcgaaaaaaaataattcgaaaatagaaaaaaaagcataaagttgatgaatagatctaaatggacaagatgatgaactctggtttactctcatgttaattntatctta

SEQ ID NO: 219495 - DNA, 457 bp, Glycine max
  unsure (1)..(457): unsure at all n locations
actctccttgtccccataggggtcacagttgtcaatgctgcactataatgacgctatagtggcatggcagcctctggccgctagatgcattgccagagcattgcacttcactgtagcgaccatagtgactgcaataacatccaaaatagtggcattttatggtgctaaaacaccgctatgttgatggttcccaaaatcctagaatgccttccaatattaatgttagaagcgcttttttttggagtaattntgggtaaaaaagggtttaaggttgtaactattgtgcttcacttcaatatagaggttcacaaggattgagctcctgaccccttcctaatatagagggtctgatgcaatntcaagaatcaaatactctaagctcaggctatgacgtccgcttataaaaggttctatatgtattanggtgtaacatctcgtctaatatatgtagtacatc

SEQ ID NO: 219496 - DNA, 408 bp, Glycine max
  unsure (1)..(408): unsure at all n locations
agcttgagttgaggaagtgtagaagggtgaatctttctgcttttattcgttgaccacagagtggtacctggagatatgtcgcaggggtcaagagaccttggggacgtcaggtggggtgccattgcccaaaaccaagcttgaccaatcccgacccaacccgggcatagtcggtcagtgagaacctgtgatgtacctaaacaggcgagcttctggcagtcaacaaataaaaggaacaaagaaccacaagcaaggaggcttgtggtggctggccagctgtgaatcttgtgtgatatatgggttatggcctctggtaatcgattaccaagggtgggtaatcgattacaagggcttaanaatgaagacaggagactaggatggtctctggtatctattaccacgtggtgtatc

SEQ ID NO: 219497 - DNA, 499 bp, Glycine max
  unsure (1)..(499): unsure at all n locations
agctttggctaagagctgctcttgtttatgtttatgaggaaaacactctatcaaaaatgggtcaaggtcacttgatgatgtcctatgagtccatagaaatctctgagttctgtccatccaaccactatagttgggttcagcaaatcttggttgtatacaacagggtgcatgtggtcattactatctagcaaatacttagtatgctctagttgatccttccatcttctagaanaagtcctactcacttcaccatacgactacatttaaagtaggtgtaatatcaaaatgagaataattccttgttcaatntctcaaaagaattgaaatatggatatngtatatcaaaatgagaatgagaataaattgctaacttgattcttaacatgaacagtgttgaacatttcctctagttttctggtaatcttcataatggtcttagtcatttcattccagttcttttgatcttcattcataatctctaaacttcgattacaatata

SEQ ID NO: 219498 - DNA, 169 bp, Glycine max
tgcagctgaactctgaactaagtagttttttagttaaatttaaatgtaattgttgggattaaaaacaatcataaattacaaaacaaaaattaaaaattcaaatcacatttgggggctgtccaacacccaccacacactgccagggcaggagatcaagattgaggcccca

SEQ ID NO: 219499 - DNA, 386 bp, Glycine max
  unsure (1)..(386): unsure at all n locations
acttcgcgagttaaatgattttttaagacaaaatatactttgtaaataattntaattctttttatcaactcttataatgataaaatattttattatcaataaaaatcaaaataaagaaagtaatgactaaaatgattaatttagtcccttcaccttntcaaaatataatggttaatccctcaattcttttcaacttttagcccctcaactatggggcatgtcttatcctctaantgtttggccctactnttagctctgcttattttattactaaaaattagtcttgtctggcaaattaagcactttatttctatatattacccacaacaagttatatttatattcatttgacaaaaatatactctttcattcattacatatcacct

SEQ ID NO: 219500 - DNA, 268 bp, Glycine max
  unsure (1)..(268): unsure at all n locations
ctaattaagacccggaatacatcgagacgctcaaaattgaatggtgaagctctcaacaaattcaaacgacaataacttntttccttagatgtctgattgagacaccgtatatatcgagaccaacgaaattggattcttgagcctttgactaatccaaacgacaataatgatttgctcggatgtctgatagagtcccgtaatttatcgagacgctcgaaattggattctgaatctctgagctaatgcanacgacaatatacttttactc

SEQ ID NO: 219501 - DNA, 367 bp, Glycine max
  unsure (1)..(367): unsure at all n locations
aaaacgagattttgtaaataagaggggggaaagaacaatagtggaagagacatcatttgtttaaagaagaaaacagaactaataaattctattcttgatgtgagttngttacctccttcggattgaaaaatcaagtcatagatccattctcgattgttaaccgaaattacaggatgatttggataaaaactaaatcaatgaaatcaaatgctgtgattgaccacacatgccaatcaattcttttcgaatgcgaaatccatcctcatgatggatttgcattgtagtccacatcatccactgaaaattaaaaacaacaatagcttaccaaatgagatcagcttgaagcctggactttatctacatacta

SEQ ID NO: 219502 - DNA, 401 bp, Glycine max
  unsure (1)..(401): unsure at all n locations
atgcactcctctaatgacaatagcatcatttctggcactaaattggtgggagttggaggtcatcttctcaattaaattcctggcttcagcaggggtcatgtctccaagggctccaccactggcagcatcaatcatacttctctccatgttactaagtccttcataaaaacattggagaagaagttgctaagaaatctggtggtgagggcaactggcgcataatttttgaattnttcccagtattcatataggctttctccactgagttgcctgatgcctganatatccttcctgatggcagtggtcctagatgcaggngaaaattctctaagacactctcttangtcatcccactcgtaatgaccttggacaaggagtataccaatctttgccactccctc

SEQ ID NO: 219503 - DNA, 372 bp, Glycine max
  unsure (1)..(372): unsure at all n locations
tcctcgattgtctattcaacattgttcaataccaagtacaatgaaactccatagcgatgaagaacatgaaatcactgtgagatatatatgttgagataaaaaaaataacgcattaggatgcatacgagatccgatagataggcacatcatcatggatgttaagttgcgtgtatgacttgcttaagtcttctatgtttagntgacgaaataagaagactcaccccttactctnttttatgactagatggcaggtgaggagccgacactccatctcgaggatgagtgcacttggaggtgatagatacccgacgtgactaaaggtgtggatcacttgctttgatatctctattatgtgtggaccctattgactat

SEQ ID NO: 219504 - DNA, 311 bp, Glycine max
  unsure (1)..(311): unsure at all n locations
gcttcgaggaattgcgtatgctgatcataactcnatgtgtcctcctccaacaaaggttaacacaaaatgtgcgctgaagaaaccgatgaatagaaacccatggtcaacaaagcgtgatccatcttactgggagtatgtagatgcttttcattctcaacaaaatagcaattcgtcagtgaggcatagttcatcatcttctgaccaacctaatccaagaaggatgatgcctatgttggatcaatttcagccatttatgcacgacttcattgataatattgttgatgtcgaagttgatggaaattgtggatatc

SEQ ID NO: 219505 - DNA, 470 bp, Glycine max
  unsure (1)..(470): unsure at all n locations
gcttcttcctaaagtaagaagagtatatatgtttatataactctgatgattngaaacatacacagcaggagtatctggacgtggcagattctccaatccctcaattgtttctggaaggcataaaatatatagtattattaataagagcaatactactagaggtacttaagtgcaattttacaacaatagctatgctgccagcctcccataaaacacatataaacccatcacaagtccgcaccaacagacaaaaacaccccagattaaccaaaggcctccataagtccccacatttcttctgtgaagattagctctactagggagcctatcctttataagtctccaagtgaaaatggcagcctntggggggaattttaatttccaaataagctgaaagttcctcccatctggngcaaaactatgtagaattgacagaagtctataagctaatctagtagagtacatcccag

SEQ ID NO: 219506 - DNA, 344 bp, Glycine max
  unsure (1)..(344): unsure at all n locations
agcttctcgatatattatgcacctgaatcagatcctcgtttgaaaagntatgaccatttgaatttttggagagcttccgntgtgcaatttctagcgtctcgatatattatgcgcctgaattggacttccgtgtgataaggtatgaccctttgtaattcccgagagctntccgttttcaatttcaagcttctcgatatattatgcacctgaatcagacttccatttgaaaagttatgaccaattgaatctctggagagcttccgttgtgcaatttcgagcgtctcgaatattatgcacctgaatcagacttccgttcgaaaagttttgaccatttgaatctatgg

SEQ ID NO: 219507 - DNA, 400 bp, Glycine max
  unsure (1)..(400): unsure at all n locations
aaaatgatataaagatagganaagcttgtcttcgttaacacaattagagtgaggttcaactcgttttaattgattctaaataacacaaaataacaaattaagccaaattgtgtgaataaatagaatcatggctaaaagcaatagagacatgccaacttcagcagtaaaaaccaagcattaatcaagtttgccaaaaaatactagtacgtaagtaaaacaaaataaaatggatgtcctcccatgggattctcttccaaaggctttgggaaattcaatatttagcttctcaatgataagaaatccagcaacaacctttttcaactgctttcgcttttactagaaaattntactctttcgggtgcaaacatgcataggattggngaggctattnntctttctc

SEQ ID NO: 219508 - DNA, 368 bp, Glycine max
  unsure (1)..(368): unsure at all n locations
agcttgaatgctctattcaatggagttgtctttaatatcntcagactgatcaacacttgcacagtggccaaagatgcttgggagattctgaaaaccactcatgaaggaacctccaaagtgaagatgtccagattgcaactcttggctacaaaattcgaaaatctgaagatgaaggaggaagagtgtattcatgacttccacatgaacattcttganattgccaatgcttgcactgccttgggagagaggataacagatganaagctggtgagaaagatcctcagatccttgcctaagagaattgacatganagtcactgcaatagaagaggcccaagacatttgcaacatgagagtggatgaactcat

SEQ ID NO: 219509 - DNA, 441 bp, Glycine max
  unsure (1)..(441): unsure at all n locations
agcttcactaggaagaccctcctgctnttctcattctaaggtaagggtggaaatttccatcctaggtcaaggttatggcaaaaagtcgatgtttggctcanaaggcctacaaatggcgggacataatgtatgtcgtgatatccgtttgaccaatggcatagaaagaaaggaatgcccaaatcatttccacgaaacgcatattatgataattagaaattcatgcaaaatcaatcatggcacatatccatgcggacactcaaatataaggctttgtggccatacaaacactaaggcttagggtttgtttccatattcaggtcaaaccagtggttcaacgatcgcttttttatcaagctgtacaaacatccgagtccattttggattcaggaaagttttcattggtttcaccctctangtgcacatttcttttctttttcaaaa

SEQ ID NO: 219510 - DNA, 371 bp, Glycine max
  unsure (1)..(371): unsure at all n locations
aagaactgaaactcagctcggcaagttgttatatgacatgactagaagtgtggacagaagagaagacgagtatgcaaagattgaagcacatcaaggaagcattcttcaagttaccacaatccatcatcaattgatcaacaaagaagaaaaggatgaagtttccagtactccagaatatccttgcatggcaattgcttggttatgtgtangtatagataaaggtcgattggaactcagtgtggaggatcagaacatctctnttgacctttgtgaagccatgacacactcagatatgggtgatggcttgtttgaagaagaagagcgnatcaagaaatagcatcatcagctttaaccattgatattacaattcc

SEQ ID NO: 219511 - DNA, 337 bp, Glycine max
  unsure (1)..(337): unsure at all n locations
acttttttctttttctttctcttcatcaacttggtntctagatattcataaccccaacgagacaacacgtgaggggaagtgttttggttctggatgacctatngcctttttcgcacatcctataannaataaatggtattgaaagtatcattacaatggataatagtaagtgaatttaaagtttanaacaatgaaaatcagaaacttaaactccacgaagggtctctacgagtctgacaaaatggggccacttctcttgctaatgtcatacttttgatacagngcatcgacacttcttgcagtgtagtgccattcaacgtcaataggcttaaatgct

SEQ ID NO: 219512 - DNA, 449 bp, Glycine max
  unsure (1)..(449): unsure at all n locations
cttttatgtgcccacctctttgagnggcatttgtattgattattgcatcttaatctctatctatctatatgtacatcatgcatcatcatgtaaaggtaggaagattgtttctaaagttagaaaattcttcagtgcataatactctctattntaatcgattaccaagttgttcgtaatcgattacaagagttgcttgtagcttgtagagagattatagtttcgatttaatcaattactagttatctataatcgattacatagttcagttgataccatgtctggttnttcatgagtctctgctnntaatngataccangtgatngtaatcaattactttgttcttaaaagtgttcccataagtgttcgacggtcggtaagtgcaccggatcgctcaagtagtataaaacagtaagtgaatactgagtatcgaactctcgagtctcacaaca

SEQ ID NO: 219513 - DNA, 460 bp, Glycine max
  unsure (1)..(460): unsure at all n locations
catgtgcacacattaagcgtcatgcacatttcatctgacttcaatgaccactagatgctgtgacacatgttcttccaaggtggacttctcgcgctgagcgcgcacaggcacaccaagtgaacggcttaagttctaacatttttcagtccattgttgttgtactaaaactctataaaacaagctaaaactataaaattcattaacattaacttcctgaaggcaaaaaaaacaatcgaaatttttatcgaaaaccgagcattaaaagagaaaaanaatgagataattgctatttaatttaagtgcaaaaaccaagtatacataacaattntcatatagtggagatggaactntattgcttatnatanaggtatagttggtaaggagaagattgtgactnnttgatcactatggggcaatctttttctaatctaccanatgggggatagttatgannatatta

SEQ ID NO: 219514 - DNA, 419 bp, Glycine max
  unsure (1)..(419): unsure at all n locations
agctntcatagttaggcaagtttctatatgatatttgttagggattntagtactgtggcagcacctcttactgagatttccaagaaaaatgtagcatttaaatggggggaaaaataagaacatgcattcactgcacttaaggaaaaattgatgtatgcaccaattcttgcattacctaattgtgacaaatcctttgaaattgagtgtgatgcatctggngttgcgatagcggctgctttacagctcatgaactatctactccctcgtcagagaacaaagactaccctctgtatttttgtgctctctctccctacaaagatcgaagactaccgctgaaatttttgatcttcttcccttagcaaaatttaagactactgctgaatattttgttccctaccaaataagactaccccgaattt

SEQ ID NO: 219515 - DNA, 92 bp, Glycine max
aaaaaaaaaaaaaaaaaaaataagaaaaaaaaaaaaaaaaaaagataaaaaaaaaataaaaaaaaaaaaaaaaaaaaaaaaaaaaaaaaaaa

SEQ ID NO: 219516 - DNA, 58 bp, Glycine max
  unsure (1)..(58): unsure at all n locations
cccccccccccccacccccgcaacccaaaccccccnccaacgcttgacccgaccccat

SEQ ID NO: 219517 - DNA, 334 bp, Glycine max
gaacacccactttgtttccagttatgggttctggcgccccatgtgttccctcacccatcccaattctcatgggctacctctcttgcaatgcccactcctcaatcgccacctgccacccccaccacaaacccctcgccgcaacaccaatccgacactttccctacgccgacatcgtcgccgccgccaacggcttctcctccgacaccttcctgggccgaggcagccacggcagagtctacagagccaccctggacgccggcaagctcctcgccgccgtcaaaacgaccaaacttgtcgccaccagcacctctaaaaaccacgccaccaaatgcac

SEQ ID NO: 219518 - DNA, 445 bp, Glycine max
  unsure (1)..(445): unsure at all n locations
atcttggctctgtcaacanaatatgctcatgagacctttttttttatgttctcctttcgcttcttcccatttttttctataaattaagcgtttgctgcttgagatcaatttgtttggtggtgtcaacttatttggaatcattcaacatattatatattatgatgttgttcaaacacttagttttatttattaaaaaaaatactaagggagtcttaattgagcaagtcgtctgaatatcgcgttcaatttctttgtataaaaatatacattaaaaagtaacttgtatggtacataacaatgctcgctcacatgactctctattattctattattaaaaatatacttgagtcggtctactttcaattgatggaaaatataagtcttataaagaagtgacatattagtatcacaactatgtctccttattacaggtacacacacaata

SEQ ID NO: 219519 - DNA, 408 bp, Glycine max
gatgcactaagtatttattacctatacttaacagaaaatacttatcacacattggaagagtttgatacaatttacacaagttttatacacaaaagctagtcgtattcactgactaacaactcccccaaatttacagttttgcttgtcctcaagcataaagagaacaacttacttgtccttaagtgacaacgacatgcagtgactatgtacgaaggtgtatgcaacaaaagttactgattgcatgataagagaaaggagtaaaatgccataatcactgggcttgctcactatcattcgctatagaccttgttacatcagcacacttttcttctgttgttttttaatacaacatactcgttgtgtgtgttgatgccttacctttttctttgcattctatctgactttact

SEQ ID NO: 219520 - DNA, 415 bp, Glycine max
  unsure (1)..(415): unsure at all n locations
tatttgagaagcttccttgagaagctagagtgtagctactnattcttctctaatagctaagctcacctccttgaaaagcttccttgagaagctagagcttagctacacacacccctctaatagctaagctcacccccatgccaaaatacatgagaattcatagctacacacatccctctaatagctaagatcatccccatgccaaaatacatgaaaatacaaaaaaagtaactactacaaagactactcataatgccctgaaatacaaagctaaaaccttatactactagaatggtcaaaatacaaggttaaaaagacgggaaacctactgtaatatttataaagaagcgtggacctaaccttgtctcatgggctcagaaatcaccatgaggttaagagaatcctggggcttctt

SEQ ID NO: 219521 - DNA, 295 bp, Glycine max
  unsure (1)..(295): unsure at all n locations
ccccccccctccccctggcgataccccagccgccccccccccccgnnttgacccgacccnaaaacccccccaaggccacagagagttttccccccccacgacccacaccccaccccctaccgaccgcgcccacccccccacacccaacaccccacacacccaaccccacgccccacacacaccaaacccgcccaaaaccagccaaccccccccccccccccccaacccccccccccccccccccccccggaacccacacccccacccccccacccccccacccaccacccccccc

SEQ ID NO: 219522 - DNA, 392 bp, Glycine max
ctccttccaaacatctttgaaactttcatctatgtaaggggttagtcatgacaaataatacagggtgcacttatgatcagagctcaacaattggtaatgacttcttactattattgataatctgatataactatggcatcatatttactcttaagcaaatataaccaagtaaaccgagtatgggcattaacaaaagacatgtaatatctgaaaccagattgtgaaaccatacgagagggactccacaaatcactgtatattaattccaaaggagatttatacacagtttgagaagagaacgttaacgatgtatcttgctcatacaacaagcacaacaaatggaagatcattcttaacacgaaatttcagaatacaactattaacaacaagct

SEQ ID NO: 219523 - DNA, 377 bp, Glycine max
  unsure (1)..(377): unsure at all n locations
gcactnnccnngcattagcatactccgtctgatatataacaatcggcattgcgctccttcagcgttacacaatatttttagatttaccattgactatgtcatataacaaatagttgtatcttcatccttagtcaatcgatcaatgtatggatgtccaactaatgactctgcaatttatgactgcgactcacacacattaacttcaccatccattcttaacttccaaccactagtttttcactatacttaaatggacacccacattttctactgccaatatttccaatacttcttcttacaaaatcctttctttctagacctatactaactactgccttcacaacccattaagacaaatgaagtccttcttctcatac

SEQ ID NO: 219524 - DNA, 303 bp, Glycine max
ccgcatacaatgggaatagacatggcaaaatacgacttcatatataaactcatagtgctcgaatatcactgttattcaaaatacaaactatacacacataaacatacaattctaaataccaatctatcaaaatgctggaatgaacgtatatcccatgtgaaacataaataattcgtaacgtgccacaacttcacaacggacactcgccagtatgactaataataccccgaaggccccccgctcgcccctcgccgttgtagctcgctcgccggaccaccattatccccagcaccatcactcata

SEQ ID NO: 219525 - DNA, 351 bp, Glycine max
gccggtgacgcgggaatgttcccgcgtgctgccccgcgggcggatcttattgcctgccgcgttgagactgccttttactccgtgtgcttttattatttatgcttgagtcgggtttagcattcgctcccctgtcggctcggaactgagcttgcggagatactggagctggttgccgcgctaatccggaataaaccgctccccgtaagaatgggtatggcctggaattatttcctgccgggggtatagtcccttccctgcggaaaggcttgtcctgatctggggccgggaggacgatgaactatgacgctgctgcgcgcttggatgcctccgggagatttgtcgttcttttaa

SEQ ID NO: 219526 - DNA, 197 bp, Glycine max
  unsure (1)..(197): unsure at all n locations
tttgtgcttctacatctcttaatatggataattgacaacctttgctagatgagttcgaaaagtttgaacaggattaatatgaggaacgtacaaagttgcaaactgaactttcatgtcttaaagatgtttttagaanaatgaataaacaaaagagtgatcttaatcacttacttattgtgcacaggcatactaccgat

SEQ ID NO: 219527 - DNA, 474 bp, Glycine max
  unsure (1)..(474): unsure at all n locations
gcgtctagcatccgactaactgacttacgngtaaaaaagagggggctgtactcgaactattcgacttcgctgctgggcggcgggctanctattgctttaatttgatgtgttgagctctattgctcgttggctctttatttcgttcttatctgggtggttttatctgatgttgatttcgtataatcggtcagtgtgtgacattctttttctcattatgtttttgcctgcgattctatgttctctaattcatgtgtccacggtgtccatggtactgatcgcgacttgggttattctacttttctttggtctgagtgtcgggtttttgtggatgttgtggcttggaggatgcgggttctcttgtgtaccggtgctcggcggagatggccgcgtggactggttggctcgctagcggtggaataaaaatttgcctgtaggcctgctccttctgatcgtagaatgtgattttgtagtttt

SEQ ID NO: 219528 - DNA, 419 bp, Glycine max
  unsure (1)..(419): unsure at all n locations
caacgagcttcttgaaatgtttcatcccacgcttcctggntctgaataccatattttatgcatccacatggttaccaaatgtatttgattgacaactatgaatgcgttggttatagttaatagaacatgtttaaatttgtaagcgaaaatcataggaaaccttcggtgtttcaatatgaagatgcttcttttgggcagattacaaccaaattatgtgctatgtgactccctataaatttgtttagcaatttataacgaagctgcttttgttagcagttccaaaatttgtatttgtggtcattacatggaanaactgttgagtcgtgttgtgcatgatagctttaatacgcttttcaaaanaacaaaagtagcaatgtagcatataagctgatataaaaaatggtgaaatttatgactta

SEQ ID NO: 219529 - DNA, 359 bp, Glycine max
atttccgggacatttggccgctcaattttcaggtcgatttcagggcaattacaccgcaacggtgaggggcggctcaatttcttgggggccttactttggcgtttatatatattagaccttaaaacgattccccggccggcggctcggccgccccgtgggtgtacttttgtaaaataagaaggaccaccctacgcaccctaacatacgctacgcacccaacatacctaggacggccgccgttactctaccggcgataattgtggcaataaacccttaaaaccgaaagacgtggactcccccgggggtcttagtctgcccccggacagggggaagatggcgcgggctttaggtcatttcgt

SEQ ID NO: 219530 - DNA, 442 bp, Glycine max
  unsure (1)..(442): unsure at all n locations
gaagctctgatanccactgttatacaagtggtctcagatatcttaagaatggngggggggngttgaataagatattgcaaactacttccccaattaaaaatctatttcactttctattcaaggtataaattcccttaataatgaacctcttaaatattgattcaaataaaacaatttgaatatgaatataaagcaataataaacaaaggagattaatggaagagaaagtgcaaactcagatttatgctggttcggccacacccttgtgcctacgttcagtccccaagcaacccgcttgagagttccactatcttgtaaattccttttacaagttctaaacacacaatgacaatccttcctttgtgtttagaattccttctcaacaagagacccacggtctcttaatcccttagagaatgaggagaagaagaataatgaatct

SEQ ID NO: 219531 - DNA, 329 bp, Glycine max
gatgatgaccggcccgtcgggcgggatcaggaatcactccagcctcgtttaacgcctcgtagcgaaaagatgggaaggtggacgtactttcgggacgtatttagggacctggttcgaaagcgggtgaaaaggtcttaacgcagtcgtgtatgcattcgcgatctaggcgtctatcctgacgacctgccggccgaccttcgatgacggggacttctcgaacggatgttaagtaggctgctgatcgtcctcggaagattcgggcttagtcgaccgatgacagcaaaccataaggtggtagatcttctcgtccggcgcgtcctgcgtagtgc

SEQ ID NO: 219532 - DNA, 284 bp, Glycine max
atggtacctggagatatgtcgcgggggtcatgagaccttggggacatcaggtggggtgctattgcccaaaaccaatcttgaccaatcccgacccaacccgggcatattcggtcagtgataacctgtgatgtacctaaacatgcgagctcctggcagtcaacatgatatatgaacaaagaccacatagcatggaggcttgtggtggctggccagttgtgaattctgtgtgatatgtaaaagaatggcctctggtaatcgattaccaagggtgggttatcgattac

SEQ ID NO: 219533 - DNA, 155 bp, Glycine max
gttgggtttttaaaaaagagtttttggcttcgggggccgtggttttggtgggtcggggtcgctagggattggccggttgatctgcggggttgtgttggcctgattctgggatgtgttggttaccgttgttgttatatgttaatttttttacttcg

SEQ ID NO: 219534 - DNA, 416 bp, Glycine max
  unsure (1)..(416): unsure at all n locations
aaaaaaacacaagcggattgtatccatcccgacccactaatctcctatcgaagtttcagtttgtttaaaacgatgacgcatattttagaattctacctttcgtattgattcaaactgtatactatattttagacaaatgcttattactttgacgtttagctctcattggaggttttacttttaaatcttaatttacaattcaaacatttattagttaacatagaanatatgagattcgaatacatgccatgtaattactcgaaaatcctaacattcaaataattccaaatttccaaagaaggatacangttngacaacatctctaaataattattgtaaaagtgtctagcataaaacatagtttaagttgacactagtttaatttagcttaaattagttcgcaaaaaataaaccga

SEQ ID NO: 219535 - DNA, 166 bp, Glycine max
cgttcagacacgggatgacgatgacgcgtcctctggcgccggttgacgttagactggagttcgagagggttcaagaatgtgacacggttcccttggacgatacggtacccttcgacgtccgggggactgtgttttcggtgccggcggggcccgatttgagtctatg

SEQ ID NO: 219536 - DNA, 308 bp, Glycine max
  unsure (1)..(308): unsure at all n locations
tacaatctacccctttttgtgatgacaatcttttatatcaataaacacacacacacacattntcctaatcgatcattcacataaatttccattctccccctttggttttgaatttatgcctttcttaaaattaaagtgaatactcatgtgagtttttgatttaatccctatttctctccccatttggcatcaacataaagccaaagtgtgttacaaatttgaagcatacaaatataacttagcatccatacaacatccatggaaaaatatataccaaatcatgaagcaagaaccatgaatagatcaaa

SEQ ID NO: 219537 - DNA, 350 bp, Glycine max
tagggccgttcatgggcgttggtgagaagacctggtttagcgtgctgtgacgatcttgtaccatattaccctgattgcgcggcaaaacaatagttagagcgacctgcaccggaaccggaacgttcttgcaaaattaggcggatcgcccaggttaagttatactttccatgcctgcctctgaaggaccgcggaagagtttatagcatgctcccggccgcgtaccgcgggggccacagtgtcggaaactgtggcagccacttgccgtgacgcagaaaccacaacgtatccgttcgcggcggaagtcggaacatgatgtacgtactgaggaagcgccagcgcatgtttcacga

SEQ ID NO: 219538 - DNA, 422 bp, Glycine max
  unsure (1)..(422): unsure at all n locations
tgacaggacttcatttaattatttcgattttcgaatagtttttaatttagttttttatttacttagtattttactgcttttgaaattgaacagtggttgactcttgcatttcatgattntattcagcaatggtgtttgttatgatatttggtctgaactgaattgattgcatgatatgagtgacttacactgtgaaatcatatacctcgaataattttgcttatgtagaagaggaagggcatgaaaattaagggcataagtgaaaatggtagcttgcatgacaggaaaatagtgaatgtgtaccaattgttgtaacccgatgagttgtgtgaatctcaaactatgagaggacgactagaatctagtactattttttgcatgaatctttgaatactgaatgaatgcatgatttggaaatgatg

SEQ ID NO: 219539 - DNA, 174 bp, Glycine max
tgggatctcgcgttgggtgtaatctctcgaatatggtgaacgctaaaatcggaattgtcccagatagtatggtgattttatggctgcctctggtgactttatgcggagggttatgcgttaacctggtgggggtgatgttagataattcgatacgagctcattgtcggcgtgttt

SEQ ID NO: 219540 - DNA, 453 bp, Glycine max
actgtatagttccccaatttatggttattttgtagtgatttttgtaaataaatcttattttatgggtaacgctgtctctagaacatttccattggatttaatgatgaaatctgtgcattttcaagtgaaaaagaggctaagttttgaattgcaaatgtagcagttgggctaagctcagtagttgggctaagtgcatatccaccgctaagcgcagcttcagcacacttagcgcaaatgagaatttggcagagcatcagcatcatagccgcatgctaagcgcgagatcagtgcgctaatcacatcatgtgccttcatccatcctaatctcgagactggcgctaatcccaatttcacttactcgcgctaagtgcgagggtggcgctaattgcatcttcgcgattcaaagcctatttaagcctgtcttggcataattatgtacaaatttacatcttt

SEQ ID NO: 219541 - DNA, 254 bp, Glycine max
gtgaggcgcttatcgattcgttgtctgggacgtcccttagcgctgaagcggactgagagttatgccgctgttactgcggttaataggcctgtggagggagggctcctgattacccccgatgaggcttattatgctgtgcgggcgtttaacggggccgctggcgcgaataaatagaacttttatggaacgtgtcgtccggacgccctaagcctgggggtacgaaatgatccggttataaaggggcggaatatttg

SEQ ID NO: 219542 - DNA, 315 bp, Glycine max
tatataccaccatcttaccacctctagtgttcatcctctccatcaaaattccctctttctctttgtatggacctctaaacttatgtaaaggaatcccttcatgtggactcaaaccccatgattgtctttcggaggattcaaccatggcattgcatgcttgcctctataggtattactttttctttacatgtgtcatttaaatgagtgatgttatttcaaaattatgttttgttgttgaaactgatttgagagtgcatattcctcttttatccatcttttttactctttatttctttgggaagactctaaataaaa

SEQ ID NO: 219543 - DNA, 404 bp, Glycine max
  unsure (1)..(404): unsure at all n locations
gaaaagaattcgcatgtgttcctcataaacagagacctaccaccaaaaagaaaatgtggttggtcatcttattcagtgtatcttcaaacataaattgattatcttcagtgaaaataatggtttatcagattattggatctcctaatcaaattttggattagtcagaaaaaaaatnttctgataaattgaaggttaaaaaaaaacataaactggatatatattttctaaaactcctaacagttaataaaaacttcataacatactttgcatagattcatatagacatttcacattatcattggttctatgtacagactatcacatgcatattaattattttcctatgtaataacaaacttattgctagcacacaactaataagctaacttaatattctctcactt

SEQ ID NO: 219544 - DNA, 263 bp, Glycine max
tttgcttgctgagtgtggatttggcggggtttcgtttgtgtaggttggttgctgttgtttggagttctgttggtttgttggggattcggtgcggcttgggtgtattcgttagcgtggcgtggagttgtatggtctctgtagaagttgcatggtcctatattggtttctcgatttgggttagtgctttgttcttggtgcttctctgtgctgaagttggtgggtcggttggcttggtgccgtgctgagcttttctttcttttctg

SEQ ID NO: 219545 - DNA, 433 bp, Glycine max
atttcttttgggaaaggccttatagcctatcttcattattctttaaaaacaaattttggagttcttacttctccattgctcacaagctcagacaagggagagagaaatccatttctttcttctttcaagcttcatacaaatgctcttgaggtttcttccatcaaagtattggtaaggagctcttaatcttctttcttttcttgttttccttaccaaattcatgaaagcttctcattcatggttccaaaatttcattttcactcttagaagttcgagacatcaagtacctaagctctttgtccatctgagtcatttcgtgtagcttcattcagtgtaaggtgagtctttccacttcttgaaccctaaccttgtctttggaagctaagcttcatttgcatgttgtttgatgttcaaatatttgtagctacctcct

SEQ ID NO: 219546 - DNA, 438 bp, Glycine max
  unsure (1)..(438): unsure at all n locations
aatagggttcgngagcggagtgataatagtggggtgatgctggtcggggccgggggtcagagtgtatcttggttttggtttacttgattgtggggcgattgttgctcctgttggtaaacggagaccgcgtgaagaattccggaaatgtggcggtcttaggggatgcggggatagttacgtgttttcgttgtcgctttattggtagctctcggttttaggctggagggcgcgggttaatgagtggtgagatatttttggggtttaggatgtttttgtgggattgtttattgttattctgtccggtggttgggtaaatgttggggtttttctattgtgttgtgggattcttttgtgtggtggttcgtttgggcggttgctggagattggtaggaggccgggggtgtttttttgtgtgtacatcggtgtgggatagtgggg

SEQ ID NO: 219547 - DNA, 294 bp, Glycine max
  unsure (1)..(294): unsure at all n locations
agtgatgttacttgttggaattgtgacaagagaggtcactttatcaatcagtgcaatgcaccatataataacaagtcgcacaataacaagaagcgcgatgatgatgaatccgcatatgcagcaactgatgaacttgatgatgcatttaattgcagtttggatagtcctattgattcatggatcatggactcatgtgcgtcgttccacactactccctctaaagattattgtctaactatgtttctggaagatttggaaaagttaccctgcagatggnaaatctcttaacattgt

SEQ ID NO: 219548 - DNA, 388 bp, Glycine max
  unsure (1)..(388): unsure at all n locations
gcggtgtgaatgaggtaggcttacaagattggacgaaaggagatcgttnttcgtgtgaagtaggttggggaggtggggtcgggaggcgagggggcgttgctggcgcggtgtgttaattgaaggaggcgtgtggagattactcgggcggggattggactgctgtctgttttgtgcgcgaccccgcctcagattgagtgccgatggttaaagattcctcagttctgggagagaggcggggcgcgccggtcgcgcgggctggagtcgacttggcgtgagtgatctgtggatgcgaggacgtggacgaggcggacggaagcggcctctcgngctgttctcagagcgtgtgagtctctttgggtccggtgggcggtctggttttgttgggggg

SEQ ID NO: 219549 - DNA, 380 bp, Glycine max
  unsure (1)..(380): unsure at all n locations
atctgcggacgaaactcattttaagttagtctaaacctgagagggctgtctcaattgggactatcccaacaagagggatctaatgacgaagcttggattgattccgtctgacgaagggtcgaggtttantaattcaagctacaatgtagaacacaagagcgtggttgattagagaaatatatttatatgcatcagcttgttgtttgaaagacccaacatttttacctattgctgtcacttttacttaacttgtattttattagttttagcataaaagttagtgtaaattgtgtttgtattatgaatcatacatgttctttcaacaatgcttcatttttgaacttaaatcatgctaacatttgttccctgtgttcgatact

SEQ ID NO: 219550 - DNA, 314 bp, Glycine max
aggacggttcttttgggtcctgatttctgatctgatctggagggtctctttcttctcgaggtgttttgggaggtttttttgggaggttatttgctgccgcgttttactcgtcgttttttttaagcggcgtctgcaaggcgttgaagcgggcgtctgcaaggtcatcacagatgaagttctctagagcaggattgtccatctgcgaggaataatccagcgggattgatcatctgggcgtctgcaaggagagtacgcttccatgagtattgagataggggcgtctgcaaggcgttgaggatttccatgaggattgt

SEQ ID NO: 219551 - DNA, 363 bp, Glycine max
  unsure (1)..(363): unsure at all n locations
gttcgcacatggttcgcgtgtatgatatacactcgacatatgtttgaatttatgagaccntcaatcttattacgcaacgtggcggaaaaaagggggctgttaactcgaatggccattatcgtcaatgcggaatgtattatgcgctccactatccatgtacacacattattgcagcttgtggtacatgatcattaactactaccaatttatatatgttgtgtacaacaatgagcacatcttgaaatcatactccgcacagtggtggccttttgggaatgaatcgacaattcctccttctaatgatgcatggaaacttattcccgaccctactacaattcgcgcgatatgtctgccaaaatcaac

SEQ ID NO: 219552 - DNA, 411 bp, Glycine max
  unsure (1)..(411): unsure at all n locations
gcgtctagcatccgactgactgacttacgngacaatgggaagcggcaccatcattgagtgctttaggagaggaatttttgactttgcgatgctgccgacgggatgattgactttttcgaaaactttgattataatgatattgatgaatatttcccggacgtgatcgtcctggccgtctctagctttgggccctgatagccctcttgagctggtcgcttccttgttctagcccgcgctccctagctgcctctttaacgtgcccttttgctgcctctttagggaggaaccactctgccttgagcctacactttccttttctccttccttatttgattgggaacttcatttttagcgagtattggctccccttggcctagagccgtgacgattggacgccctgtgcgtcgcatg

SEQ ID NO: 219553 - DNA, 351 bp, Glycine max
acttattatataattcataaaagaaaatccaagaaaacgtcgatgatttttttgcttatttctaaagatttttttgattattatattattattttacctctttttggtttccaacgtggttacggcatgaccgaacagtcggatttcattttaacagaaattaacggatattacaattcaaatgatcggtggaaatttattttattgtttgaataggcgagaaaatgactcaagttaatgactaatgcacgtcaaaagggggtacggaaagttaatgatacgaaaataaaagtacgcgaaatatatgtggaccaccaatggtacatataatgaattgaatagttcgatttt

SEQ ID NO: 219554 - DNA, 67 bp, Glycine max
ttagaatctacattattgagagggcttacgtttattttttttttttgcattttttttgcttttattt

SEQ ID NO: 219555 - DNA, 390 bp, Glycine max
ttggagtagaaacatgggaccaactcattgtatttcattattgaagtcatatctagtcaaggtctaagagaccttacaagtttcctaacgatttctaattatgtgggccattaagtctatcatatgctgacaatagccgagaagcccgtgaatctcttcgggggcggaatatgtgtctgccattgctttggccttggctatacaatcggggaagttcttgactcccgttcaatgtaagagcaaaccgatccatccacatggttgcctcctggtgtaaagagtctatcaccactcctccaacctcttttacgcgtattcttggcatattcgttcgaatactatgctcgtgggccgtggctagatccaactattcttggtactttgcgatga

SEQ ID NO: 219556 - DNA, 350 bp, Glycine max
cggagtgcaaatccttgttgaaggacgcggcgtcgagtacacaataggcataggatgagagatgacctcgatggtgacgagaaagagtaggcgtaatcttgaacatatatttagtggcctgacctttgtggtgaccttcttaaggcgattgttgactctgggattggtgacatggtctattttaatttgtcgaacctgtagcgtgaccggtatattaggcgaagccgtgcgaagaaaagccttaaggagctgcggctctatgctgacttcgtgctttgtgcggcgctcctaactatggcttacctaacgatgtatgaaagtgaggatggttctaggctgtgcagtgttta

SEQ ID NO: 219557 - DNA, 274 bp, Glycine max
  unsure (1)..(274): unsure at all n locations
tcagaaaatattctcaacagtcacatcttttcattttgttcttgaatggccatcaaaggcttatatatatgtgacatgagacacgaatntgccaagagtttttcagaacaaaaaggtcttatcctcttaacaagaaaaattggtttatcctcttacaaattacgtggccaaaacactngtgattcaataagaaattatttgagtgctcaaattgttcaatctatctctgtcaagagagatttcttcttctcttcttctttattctgaaaaggga

SEQ ID NO: 219558 - DNA, 351 bp, Glycine max
  unsure (1)..(351): unsure at all n locations
ngccacccagctcgcccatgcgagctcagctcacccattctagcaatgttgcttcctccagaagcaacagccttctggatgaatcttctggacggccanactgtgcctgtttgctatttgtacccccatttttactaaacacaccccttctgccatttttaggcgattaattttccgaaatttgaccgaaacttacgaatttcgtaacgatactcgtgatctttccatgatgctactgaacatatttattaccacttttttgacatacggtatgttactaaaccctaacttttgtgctactatgctttcttttgatttacagtgagtcactgaccttacagaatgtgcatc

SEQ ID NO: 219559 - DNA, 389 bp, Glycine max
cgactacgcatatattgtgaggatggggaggaggggctgatgatctttttacccttttattgatgagcttgtggatagcttcttaggcttatttgcttattatggcttatggcttatattaggatgggcttatggcttatggcctatattaggatgggcttatggcttattttatctgcggattattgcttatggttatattatgattggctctaaattagtggattttaatgggggctttttcctttctgtactgtaggggaggggtctttttataggggcggtttggaggcgttaggtcctatagtgggtcgcgcgcagttgcatggtcctagggccgagttgcatggtcgtagatcgttttggatgggctttttacgggttcgatt

SEQ ID NO: 219560 - DNA, 394 bp, Glycine max
  unsure (1)..(394): unsure at all n locations
cgtatcccaccattntccatagtagaatactggtaatgtgtctactatcattgtcatcgtttttttgtcattgaggtgccactttgagcttccatgttctccacctttgggcgtattctttgaaagatttgtgccccctttttgcacatgttctgtagttgcatcctatccgaagacattatactgacactgcctaacgaatgaaaccactatgtccttccaagaatggactcgggaaggttccaagttagtgtaccaggtaacagctaccccagtaagactttcttggaagaaatgtattagcagttcctcatctttgtgtatgcccttatcttccgataatacatctttggatggttcttggggcaagtagtccccttgtacttgtcaaagt

SEQ ID NO: 219561 - DNA, 310 bp, Glycine max
aatccggtttctccacaacgactacggtattgcaggggttattcggggggggtgtgctagggctatggttgcctgggctattgtgctatgccatcgccatggctattgctatttatcgctgctatgtagtctttttaggggctttcggatagactctatggaggtctttgcgggtccttatagggttgccgaattgcatgtccataaatattgcatgtcctagacctctggagagtgcaggtcctgagggttttcaggtatgggcttgggttatagctctcgtagatttttctgggggtttgctgggttt

SEQ ID NO: 219562 - DNA, 401 bp, Glycine max
  unsure (1)..(401): unsure at all n locations
taagctccttcaactgcacaaggctcttaatatgtgatgagtatccttgtggaaccttcacccgacgaagacactgacaataacttatcttctcctntttggaaaaagtatggcaagttgggggcaagtataatttcttcccatcataccttggatgcaactgtgatcgtatgcccatatcagctagatcttgacgggtattcaagtcatccttcgtcttgccttgaatgttaatgagcgtctcaatcacactgtcacaaacatttttctccacatgcataacatcaatacaatgtctaacgtcaagatcagaccagtacggaagatcatagaatatggacctcttcttcatatgcaactcttacttttatccttcttttgggtctttgcaatacatattc

SEQ ID NO: 219563 - DNA, 380 bp, Glycine max
atgccgcgtatagcatccgacaactgacttacgaattgcgatctgccagatattttaggtgagtcgtgggattgggcgcttatgcggccaggaggcttggggatccggcgcatctgtggtgacacccattgcaatctgccagagattttaggtgatcgtgggattgggccgatatagggccatgagggttcggcatacagtgcatgtgtggtgttacggattgcaatctgccagagattttaggtgatcctgggattgggcgcttatacggccaggaggcttgggcgtaccgcgcatctgtggtgacatccattgcaatctgccagagattttaggtgtcctaggattgggcgcttatacgggcaagaggttggggatac

SEQ ID NO: 219564 - DNA, 91 bp, Glycine max
gtgagatgtcttgacactctgatgttcgatacaggcgcagatgatgaattgaggccgcatattgatattacgaacctgatgaggacctcaa

SEQ ID NO: 219565 - DNA, 213 bp, Glycine max
ctgtcaggcgaattgagtgccgcctggcccttgtctcctacgtagattccgaaacgtatgatctcgtctgtgacggccgctgaccgggtgcatttcgagcacctcatggtgattggactccttcccgacgacccaaccctccgggtgaggtccgtgtgcttggacgcgccgtgttcgtgtacatctccacggtaatcgtcacgtttttgtccc

SEQ ID NO: 219566 - DNA, 297 bp, Glycine max
acgggagtcgcttccgcgatggccggatttgtagggcggagggcggtatcggcgtgttatgcttgattcgtccttgagtgtgaactgttcctagttgaatgcggcgtagtgcgtgcgtgacttccttcccttgccattgctcgtttaccggggcttgattcggctcgaggtactatgttttattgcccgactcggaagatgccgggatgagtgcgtttttggcgaatgacgaccgaggatgatacgagtagaaaggctacttctttgaatcgctttgacgagtcttcttttagttgt

SEQ ID NO: 219567 - DNA, 392 bp, Glycine max
  unsure (1)..(392): unsure at all n locations
aatttttcacacagagaacctggcttgagtttctctcacttggaagggtttaacttaatttcatgatgctctttgatgaactcttaatgcctccaagaagaacatttgaatttgacccactcaacttacagacttctaaaggaagcaaaaaaatgtgacaattgtcagctcaagacagattacaaagtcattctgaggaacctttctgatgagcattttgaaggtagaccaaaatgatgattntaatgttagctgagaaaggatccttatgaaagtagatcacgttgatgaagttcaacttatatggctttataaagaaacacaacttcatcaatcttaacacatcttcacaacatatggcactcaaaagtagaatgcttcatagagataaa

SEQ ID NO: 219568 - DNA, 419 bp, Glycine max
gcgtgcctcggtcgttctgggcgttggagatggcctcgggcggaggcgggcgctgcgttctgactgtcggtggctttttgctgatgggttctctgacggctgcctggctgacttgcttcgctcttctccttgggttttttttgtgttggtgaggcactcgactgtgggtatattgcttagctttcgaggctagtgacggctgatctgactgtcgtcggtgcctcttcttttagtgagtttctgtttgtgtttccttgtgctcttttttttagagtcgtttaactgttggtgttgttggtgttgtggctgtttttcttatgctaattggcttttcgccgtgatcgaagccgaggacgaaagacccgatgccgatagagccgcggtgcgagtttggagttctctgatagatcgaataatag

SEQ ID NO: 219569 - DNA, 448 bp, Glycine max
tatgcagcatatatatacaatagacctcctcaacctcatcttcttaatcaaccacagcagagcaattatgacctttccagcaacagatacaaccctggatggaggaatcaccctaacctcatatggtccagccctcatcaacaacaacagcagcctgctccttccttccaaaatgctgctggcccaagcagaccatacattcctccaccaatccaacaatatcaacaaccccagaaacaaccaacagttgatgcccctccacaaccttccctcgaagaacttgtgaggcaaatgactatgcagaacatgcagtttcagcaagagaccagagcctccattcagagcttaaccaatcagatgggacaattggctactcaattgaatcaacaacagtcccagaattctgacaagcttgcttctcaagctgtccaaaatcccaaaaatgtca

SEQ ID NO: 219570 - DNA, 355 bp, Glycine max
  unsure (1)..(355): unsure at all n locations
tgttttattactgagagttctcggaggagttcgggatgattgatatagggnagatatctcttcgctttaggcttcggcgcgagcccgggggcggcggcttggtgagacgccccccgcgcgcggggccgcctggattgctgccgcgccttacggcggtgcctaactctggcggatgaacattacgccggcggcctgaacggtggcccgtagaatgaagaccgccgggcgccgcggcgccggggccggcctcggctgcgcctgaagaattttgctcctggattaatccgctggattacggtttatggcttccggccttttacgcccttacttacgggctgtgcgtagagttaaattt

SEQ ID NO: 219571 - DNA, 350 bp, Glycine max
gtcttagataaatattctcaaatagaaacagacttattcatattattgattcccagatttcttaagatggagaaaaaagctttaaaaaaatacaaataacattgtttatattttttaacgtgtacattattttatatatcatttgtctaaaaaattttatacttgtattatttgggccatttttttgtattaaataggtaaaaaattctactcatgtaaaacacaaacttttgtaagtcttgttatttgaaataaaaaacatgtattgggtcccatatctgatttaatgtctgtctcttgatattcgtagttctaatataaaatgatcggttattggataattacttgac

SEQ ID NO: 219572 - DNA, 412 bp, Glycine max
  unsure (1)..(412): unsure at all n locations
acggtacaatgtgattgaactcgttacgtggggtgtggcgtgggtntcgacttattatgccacggtacctactgtggtgacacgctacccctgaacccgcttggcgaagcactttattgttcacggaacatctgtgaagctcacggggccttaagtacctgctcgatagatgctgagcgggacggttcagtttgttgcttccgctagggatgtgacgcctgagtttatggtggttacttaggccgttgatgctttgactgatttttctttctcttctttacggttttcgtaaggagcgccctaattacacggcggttcagtggtgcgatcacgagtccgctcgaacatgcttgattcagagccgagagcgacgtttgcgggccgattctagggtaccgggaccggatctcct

SEQ ID NO: 219573 - DNA, 374 bp, Glycine max
gaagatttgatttcaagaaagaattgtcttcatggattattcaagtaaacatcgagcaatcaaagatattcaagtgagattgactagataaattcttaagttagatattcaaggtatcgattatcagatattgtaatcgattaccataagtacaaaagatttttgaaaatcatttcaaacatttttcaaaggttttcaaaatgtgtaatcgattaccaacatattgtaatcgattaccagatgcttaaaacatttataataccatcaaaagatgtttgaaaccttgtaatcgattacacaaatattgtaatcgtataccagtgactcagaacgttggaaattcaaatgttaaattaagagtcacaactggtcaa

SEQ ID NO: 219574 - DNA, 255 bp, Glycine max
tttgaattgcctgaattggttgttgaacgtcttccttactgggtcggtgggtgattgatagagactgagttttctttattggatcacgcgggcgtgtgtggggatactggtcttctggattgaccgtggcttccgttttggcgtattgattttgtgatttcgacgtgggacttctgggggtactccttggttttggatgtctcttcttaaagaaattttgtgtccataatccccgatagatgatggattctaggg

SEQ ID NO: 219575 - DNA, 358 bp, Glycine max
attatcacactgggcaaaacacacagaaatgaggtattaaagcatgtcgcaataaaatactgggcggatactctttttataaatacttgatagagaagaacattgaataatataataaactgttctcattacatattattgaaatttttaccagaaactctgtcaccttcttcaaaagactaaatgtgtaagtttgattctgagttatgagagaatttcaatgtattttacactcttgttttcttcacttataaatgtttaagaaaaaaattatctaatatatataatggcgacctaatcaagatttacagacaaggaacaccaatatagctataaatgcccacaaacattgattaat

SEQ ID NO: 219576 - DNA, 252 bp, Glycine max
acgactgctgatattctttagctcgcggaagcgcttcttcttcacctcgctaggcgacccgcgggcttatcgctttgaactcttcgatcgaacaccgcgcttcttatcgcggggatctggaataaagtggactttcgtgtagactgagcttttcgcgtcgggttctgccccggggcctttttccgttgacggaatggaagatggggaatacttcttcggcctgctcggacgggccgattgggaggcggttcg

SEQ ID NO: 219577 - DNA, 299 bp, Glycine max
cacagccagttaaatgcttccaacgatattaacatagtcctcattgtcaatgttcattctactgatgcatgttccaattgtgaaatcattctgtgtttggataacatttaccgatgtgttatcatatctgtcagagtccagtccagagattttcaggataacatcacgtttacgaatctgcagtgcagcaagtacgtataaattaaaatatatataaaaataatgcaaatcatctcatattctatcaatgaagaatggatcatgtaatattaagataagcacagaagcttgaacatact

SEQ ID NO: 219578 - DNA, 383 bp, Glycine max
ttagatccacaacgactacgggtgcctaggggagaggagagattggggcggggcctaacggtggcccgtagaatgaactccgccgcgtctgcgggcggtgcggcgacgatgcgccgaatttttgtccggatacgtctatgccagccgcgtctattacgcgtcttatttacgggctgtagggaaggagattggaaggggtgcggtggtaggtcacctggtgtattgtggtggcgtgctgtggacctgaaccgtccgttatattaagagccgaccgccgtgattcgtctgatctgtgctcggctgccggtgtgaggccttgaatattaaactcgggtcggaagatgatcgtgttgcgcagagacgcggatacctgtttaggtgtg

SEQ ID NO: 219579 - DNA, 257 bp, Glycine max
gcccatttccccatccctgaggtttcattctccttctctccccctcgctctcacgtttttctctctcatctggctctgttaacatgaaaaaaaattaatgaattgttttttcttttacccttaattattcgaatgaaattacaaatgactatttatattgttaagtttccggcataagtgaatgaaaagttagcaagaataaaatgtgaagtacgaatgtagtaagggagagattaaaacatatgaggcatataatt

SEQ ID NO: 219580 - DNA, 410 bp, Glycine max
  unsure (1)..(410): unsure at all n locations
tcaacaataatcacaaactgctttatagacatggtattgtttgtcttgcgtgnggaagtgagatgttaatgttatttgcgtatcttctttttcatcttttggtaacaatttctgtagtaaacatgaagcgcataactgtttgaactaaaaacttcctctaattgaagaaagagctattatcaatgagtttgtgatttagaaatacaacaataactgcaatgtcatcgcggaagtgtctcctcactccttgttcaatcttttgaaggtctgagactctcatttctctcttcctagccgctactcgaagcgccgctttcacaagccgcctatcaattccctgtacatgaatcacaaaacattaatattcatagaggactcttgcattgcataataagagaacatactttaat

SEQ ID NO: 219581 - DNA, 329 bp, Glycine max
  unsure (1)..(329): unsure at all n locations
ggaattagacaagtgtctctcgggaggaggatgggtcaatgaaccgggacgatgattgaaagaagaaagttgatgttgtacgatgtggaccgatagttgatgtggaggaaacgaanaaattacggaacctcagtcattgatcttccgcttctgaaaggtcggccgttggcgctgccgcggctgggaccactaggggggctggctgctttactaatgatgctttgggagcgcggggtatccgccgggtggcggggaggtgattatccttgccactttgggatgagaaatcccgtgcggggggtgttgctctccgaagtgagacgtcgtgt

SEQ ID NO: 219582 - DNA, 355 bp, Glycine max
  unsure (1)..(355): unsure at all n locations
tcggtacactatgntaaattttcctatggttctaatatatttatcgattcattaacaataaaaaaattcatctagttgaaagttacatggtgaagaatatataatatcttgaataaaaattaactcgaagtatatacttcattgtataaatttttaaaagttaaggtactttttggttaaattgctataagaattttgtttctccaaattatacacgtagccaactcattaattttaatccttcacgggtatcattgattgtattttatggaaacggtaataacaaataattatgataatatgacagactttccctttcttaaacaaatattcaaccgcctcacatgtaactaat

SEQ ID NO: 219583 - DNA, 384 bp, Glycine max
  unsure (1)..(384): unsure at all n locations
aaaatanattcaccttggngtgtctgtgtctggagggacgaagtgcggatgggctaatcggtgtggagctgctgctttttaagaatatggagtgttgctttgatcgggaagaggggatgatgatgctgatgatgggatgactttgatgactttgaaacggggcttagggtttggcttatcttgatggcttattgtcttacctcttctgcttatgatgctcgtggtggggtaattgaattggccgttggatgtgtgctttaaagggaaccttagttgggttaggttttttagagggggcttatatgggtcgcgcgaagttgcatggtcctatgatgagttgcatggtccaagaacctttttgaggngtcttctacgtcgtttgtg

SEQ ID NO: 219584 - DNA, 411 bp, Glycine max
  unsure (1)..(411): unsure at all n locations
tcatgatgaatcaagattgattcagagaagttctattgtttacaaatgtgatgacaaatagctcataggtcatgaacacttcatgataacaaaggtgatgatctcaagaataaaagaatgagttcaagatgttcaagattgaatcaagaatcaagattcaaggctcaagcttccatgattcatgatcatgattcaagactcaagattcatcaatcaagagatgaattaataaagataagtatgataaagttttttcaaataatgagtagcacatggtttttttttgtcaaaacctttttaccaaagagtttttactctctggttatcgattaccagattatggtaatcaattactagtagcataatggatttgaaaaagttntcaactcaatttacaatgttccaattgat

SEQ ID NO: 219585 - DNA, 330 bp, Glycine max
gagtgcggcgactttgggcggttttgtgaggagggctgttattcctgaggcggccgatgcctcggggggtttttttctgttgctgagatcctgattattcttttcgttatctcgtgttgtggttgtgttgtttgacttctgtttactcccattttgattttcttcttcttgatttgctttggctggtgctttgaattactatgtcctcgatcttgttctggtttggctgttcggcctcctcttctgggctaagccgttgaagtgaacgaggtctccggctgtgttaatacttccggtttttaggagggtgctcggcaggacggcctggat

SEQ ID NO: 219586 - DNA, 245 bp, Glycine max
catggtccggcggaattaaaatatcagctttgcctgattctgagtgcaattatgaggcaacgcttaacctgttcatttcatgttacccagactatggtgatacaacactcgagaaaccattcatggttgagaataaatggacaacaagaccacctggcgactcgctcatgctggctcaccctctgtaagctaaacatatgtcatatgacctggatgttactgtgccgagtgaaataaactactta

SEQ ID NO: 219587 - DNA, 330 bp, Glycine max
ctcccgggtgtgtctgggtgacgctctcgggggtgtacttgcggtttgatagcttttccgttcgtctgacttgacggttgtatttttgatggatattttcgttatttttacgaaagggccgcctagttagacggcgggtacagctcgtacggatcagtgaggtccgcgtataagcggagttctccggtgcgcgtatttgcgatatgagcgctggcgcttgtggcgcctgcggaattctatctggggaagccgggattgagggctcgactgctttgtaaggatttagttccggcgatgctgcgtgtcgctgggttaaggtcccgggcctgt

SEQ ID NO: 219588 - DNA, 339 bp, Glycine max
cgcacatcgttcgcatgtatgatatccactcgacaaggtttgaagtagaggagaccttcaatcctataacgcaacgtggcgaacaaaaatgggcagttaacttgaatggccattattgtcaatgcggaaggtattctgcgcttcactatccatgttcacacattattgcagcttgtggttacgtgagcatgaactactaccaatatatagatgttgtttacaccaatgagcacatcttataagcatactccacacaatggtggcctcttgggaatgaagcggcaattcctccttctgatgatgcatggacactaatccctgacccaactacaattcatg

SEQ ID NO: 219589 - DNA, 331 bp, Glycine max
  unsure (1)..(331): unsure at all n locations
taattccgaccggatgactttagtcaacgcaccagcatagtttacgtgtgaaaggcgaccccgcaacagggaacgcgtccaccanatccgcctccgcgggaccaacctgcctcgcttgaggacgatgcccagggtacaggccatcgggtcgagcagctatggcgtcggcgggtatgatacgagtatctcggcccggccaacctgtacttggagctttacgaggtcctggggcgagctcttctgactcttgtgtctccgccctgagtgtgactcatgatcgactgaggagtgagtgaacgaccacaaaaggggatcatctttcccttcccgt

SEQ ID NO: 219590 - DNA, 428 bp, Glycine max
cttagtgactatggctcacgagacttacctctatttttctttaaacttgtacaatctacgacaatggtgtttttatgaaaactgtcttcgtattgaatagtcttaagatggttgtacccaaaaccgtcattaatatgtgcacttatttacaaaaatgtctctgattatttgttaatgacagctttggtaaaattgtccttattcatgcatcgtagaaagctgtttatttagtagtgactgaaatttaaatatattcttagcatgcatatgatatatcattttatacttttaatattaatcaaacgatttaattgaacttttatctcttcccgtctatctttcatgtttgtagttgtaacttgaatatgatttttgtaaggaaactatcaaacaattaacaataatgatatcataacatacagtattat

SEQ ID NO: 219591 - DNA, 448 bp, Glycine max
catccgacaactgacttacggattgatccgtttctggtgaagtcggtgcgtgatttagcggttaggtgggaagggtgaaaagatttacggtgaagtcggttcgtactgactagaagacagagacactgctgtgacgggtagcgatttgatttggtgaagcagagctgaggaaggcgggaagggttattagagctttgatttgggacgtagtaggggcgacgctaagaggaatacggggtgactatcgggaataattggcagacgtacttggggcgcgactgggagtcttgggcctgttgtagttaattcgtggctgtgaatcctgatgctcgaggtttccggtttactacggagtaggaggatttttgttgctctgatgggttgagccgtggtggcgcgggcgcggagttgggtctctggaggggaatacgagagtggattcgggatt

SEQ ID NO: 219592 - DNA, 433 bp, Glycine max
  unsure (1)..(433): unsure at all n locations
tggagatgtatttccctccttcattgtttgacatcatggtttacttaattgntcatctaataaggaaaattaaattttgtagtcccgtttatttgtggtggatgtacccagttgagtgatacatgaagatcttaaaatggtatacaaagaatctacactgtccataatcatccgttgttgaaaggtacgttgcagaagaagctattgcaaaacctgttggcttcccgagtctcaacatgatgaaagagtggaaggtaaaggttcaagaggattgcatgttatcactccaagtctagaagaattgcaacaagctcaattgtatatactgaataacaataatgaaattctgccatacatagttcgtcacatagctttagacatagaaagtaacccanaaatgactaagaatagggtgttgaaatagcataacaag

SEQ ID NO: 219593 - DNA, 448 bp, Glycine max
  unsure (1)..(448): unsure at all n locations
acgggtccttataggggtcgcgcggagggcgtggtccttgggtcgtgttgcatggtcctagtactttagggaggggattttacgggctttcgattgggtcttcaggccttggttgggcttttgaagagttgcatggtcttatggggaagttgcatggtcgttgagagggattcaggatttggctttggcttggagattatagctctgccgggctctttttgacgggagagttgcatggtcttgatgggaagtttcatggtcctagatgttaggggattgcttttatgagttcgcggccttgaaggggcttagggggcgtttaaggtgttcgcggcgttgaaggggcggatcctaacggattatagcctgtnttacttatccggatcggactgggcgtgttcgnggttattcttgggtggtcttgccgggtcttccggattgcgcgggt

SEQ ID NO: 219594 - DNA, 430 bp, Glycine max
  unsure (1)..(430): unsure at all n locations
ctacggggcggatcgctngatggcaggttctgtatctgagttgacattgctatgtacccaaagtgataaaggaagcgccttggcggattatttggcttattaacctctcaatgactaccatccaatgcatctggagtttccagatgaagacatcaaggccttgttcgaagcatccagtggattcccttcgatgcagatgctctgagtcagttcctatgccacccactggtcttggcggatggctatcattgtgagtacaaccagatgatgagacaagtctctggctttgatcatgatgtcgttgcctatctattatgcataccggtgcatgatttcacccagaccgttgcatggagatgggtgcgaatcatgcgcaccaacatgacctccctttcccagatatggacaacgtttgtactcagcaatattc

SEQ ID NO: 219595 - DNA, 312 bp, Glycine max
tcggtgtaggctctcttttagggcggctgtgtctcgcaggacgctgtctctcttattggccgggcctcactgctgggtctctttattgccggcgtgtctctggggccgggtctgtctgagtgtttgtttttccgggggcggggcgggtgattctgatcggggggctcttgacggcgggcgggggtggtactgggggaaggctggggtggggggtattcatgagggcgtttgatttttcgcgtctcaaggccaagttgggctctttctcgtgcatcttcttcatttcttagtccatcagttcttcggtttgat

SEQ ID NO: 219596 - DNA, 323 bp, Glycine max
  unsure (1)..(323): unsure at all n locations
tcattagtactcttatacactaagcttgaactgangaagtgttgaaaggtgaaacttcctgcttttattgttgaccattctcctacccaacccgggcatagtctgtcattgagaacctgtgatgtacctaaacatgcgagctcctggcagtcaacagataatatgaacatataccacatatcaatgatgcttgtggtggctggccatctgtgaaacttgattgatatgtgagatatggtctctggtaatcgattaccaagggtgggtaatcgattacaatgcttaaaattgaagacaggaggctaagatggtctctggtaatc

SEQ ID NO: 219597 - DNA, 350 bp, Glycine max
gccggcggcctgaacggtggcccgtagaatgaacaccgccgcgctccgcggcgccgggagcggccacgactgcgtctgaagaattttcctcctggtttaagccgctggattacgctttatgcctaccgctgtgttacccctcttacttacgggctgctgcggtcccggtgaatggtcctccgttggtctcacctcctacctgactgatgatctcaaagctgagcccggcccccagccggattaaaataccgccggatcgagcaatcataaggctgaagagtgtgtgtatagtgaccctaatatcagcatgggggtccccccaagccctgctaaaaccatctccttctgtc

SEQ ID NO: 219598 - DNA, 312 bp, Glycine max
agaagctagagcctatcttctcatacctctcttataactaagctcaccttcctgagatgagaagctagaacctatctacacacccccctattatagcttatctcacccccatgacaaaaaacatgaaaatacaaaaaaaaatccttactacaaagactaactaaaatgccccgaaatacaaggctaaaaccctatactactagaatggccaatatacaatgcccaaacgaagaataaacctattctaatatttacaaagataagcgggttcatgcttagcccatgggctcgaaatctaccctaatgctcatg

SEQ ID NO: 219599 - DNA, 187 bp, Glycine max
gcgggatcgggccgcctgtatcggcttgaatgaacactagttcctccgttgactcttcttggcgcccgcgaagagaggggctcggccgccgctgcggccgctcgcgcgggccacggtgcttcggcactggatcgttgagtcgcgcgtgcgcgttattgctgatcgggcggaggtaaactcggtgtga

SEQ ID NO: 219600 - DNA, 384 bp, Glycine max
  unsure (1)..(384): unsure at all n locations
tcttagtttcagatgatgcagatgggtttgtagctacctcatgcacttctctaatgactatggcatcatttctggcgctaaactgctgggagttggaggccatcttctcaattaaatttctggcttcaacaggggtcatgtctccaatggctccaccactggcagcatctatcatacttctctccatattactgagtccttcataaaaatattggagaagaagctgttctgaaatctgatggtgggggcaactggcacatagtttcttaaatctctcccagtactcatacatgctctctccactgagttgtctaatacctgagatatccttcctgatggttgtggtcctgtgagcanggaaaaattgntctaagaatactctct

SEQ ID NO: 219601 - DNA, 381 bp, Glycine max
gtaagtgaataaccatgatatcaccttacccttattgaattttggagctttggaattgttttgggaataagtgtgggggcattttgttggataacatgttttgttggctatgcttcatgatgtatttttgggccatactgatgtacattgtatatgggttaaatgttggacatgctgctgaatgatatgctagttctcaaatgctactattcaaaaaaaaatttcaagttgaatcaatttgaaaaaaaaaaagaaaaaggcttggatttttttcatggaaacaatttttttcaccataaacagctgaaatgcatagtcagggggatcatggatatttataacaacccccttctgcctatttataggataaagggggaggag

SEQ ID NO: 219602 - DNA, 431 bp, Glycine max
cgtgacacttacaaactatgctatgtcccacataagccctacaaatgtgcaaagttttctgtgtattgggtctcaccaataaaacactgtcccataccccatccgaattttacctggacaaattagtacatggagtctaagttggtacttgaaccaacactcaacgagccatagtgtcacctcaaaattaaatttcactcatcgagccataatgtttttcttctctcaagctttataagcccacccatccctcccacaaaggctcaaacttgctctctatcaagacaatatcttgttggatacctcctagtcgagttccctctctaaacgacaaacaattatatttgttggatatctccaattatatttgtttctaagtataaaaaatatttatgtattgaccatgttacactatatttaatcataaatta

SEQ ID NO: 219603 - DNA, 367 bp, Glycine max
cgttttgtttactttgttggtcggcgacagatcgtcttagttgtgttctggccttgactggtgccgactccgtggttcgttcgtagttggattacgatttgctcgagtgttccgattattacgcttacatcttgtgccgcagcggcaggagttcggctgctggtgcggccggctgtccctgcgagctttgtttggttattagtgtgagttgaggctcttatttggttcctcttgacctggaggtttagatatattccttccggactttatagacaattgtccttctttactgctcaggagtcgtgtcgctgacgcgcctttgttgccctcggatctattatgttgtaggttgcttcgtggctatagt

SEQ ID NO: 219604 - DNA, 418 bp, Glycine max
tgtactcttgttcttaattattctggggttcactttgcattgaagaccattggcaaaggttaaatggaatcgtcagaaaatgcacgtctcataatgacatgataccagtttaccagtgtacttatgaatatcattccaacatctttaatttttcatcaacccatgtatgtctgttactttgaatcgtaaggttctcttctcagttcccactttcaagtacacaaattactttcaatgtcctatcatgtcgggaatattactcaattatgtatattgttcacttcttaattgtcacatcatctacgcatgtagcattactcaattgaattcctaaaattatcataaataatgtcgttttaatgcttaaaatcactttttatgattgttggaactaaattcgtcagtactacttattatt

SEQ ID NO: 219605 - DNA, 418 bp, Glycine max
  unsure (1)..(418): unsure at all n locations
tgccgcgatagcatccgactaacgacttacggctgatgatgattgcttagtggnnggtggagtgatcttatgatgatctttttacaccttattgatgggcttatggatagcatattaggcttatgcttatggttgggcttacggctgatattatttgcgtgttatggcttattgcttatatttgggatggggctatggcttatattatgattgggctatggctgatattatttgcttattatcggctttaaattagtggattttatgggggctttttctgtctgtactctaggggagggggcttttatagggggcgttttttggggttaggtccatagtggtcgcgcgaattgcaggtccagggccgagtgctggtcctgatgttaggatgggctttacgggtcgttgggactcaggc

SEQ ID NO: 219606 - DNA, 264 bp, Glycine max
  unsure (1)..(264): unsure at all n locations
ctacgtgggagtacgtgagctcaattggaggtgggcaacangggatggtgggtttatgcgcgctttgtggatgaagaaaacttgttgtgcaccatcgtccgaccgccacctattaccacatgtgatgggtaccccataaccctacaagcttgagatgaggaagtgttgaagggtgaaacttcctgcttttattgttgaccacagagtggtacctggagatatgtcgcggnggtcatgagaccttggggacgtcatgtggggtgc

SEQ ID NO: 219607 - DNA, 261 bp, Glycine max
ttttaagctcccggaccggggcggggttggacgaattttgaggcaatttttgctacctacacggcttgagggcaatattggccattaggctccagcgctcagggtggcggcgtgcagcggctcgctcatgtgtccgctcctcggggctgcggtgagccaaaaaccccgaaggaatgggtgcgacgcgtcgggttcccggatcaacgttccggtggttgcgggccgttcttttttttggccctcagatctgtccgtcgcagt

SEQ ID NO: 219608 - DNA, 368 bp, Glycine max
tctttccttataagatagagcttgttataccctaatttcgtctggggaccgttgtttggtggaatgcaaccttcgcttcaccgcttcgaggtacttaacacccgccgttaggcaatctgtgaagttccacgacatgtcggaagtcgaaaggaagcattgttgcacaatccgtaaagttctgcaacattccagatgtcaaaaaaggcattgttgcataatccgtaaggtttcgcaacattccggaaagaaaataagtgtcgttatttaatccgtaaagtttcgtaatgttatgaaaaataaaccagcaaaaaagtaaaaagtggtgtatttagtaaaaatgggtgtgcaaatagcaaccaggcccactt

SEQ ID NO: 219609 - DNA, 393 bp, Glycine max
  unsure (1)..(393): unsure at all n locations
acgggacgcctcatcacgttgagacgggcgggcgctttgctgggcgaggttggatttagggatttcatgagggtggttgaatagtgcttggttggatttggggaacttaaggtggaggtacggctggagtagaggataggggatagctgaggacgtttgcttaaatagtgcgaggttggatttagggatttcatgacggtagaggattggcgatcttcacgttgagaagcccccattctgaatctttggtgcgaggttggatttggggaacggctgcttaaagaaagtagaaaggcgaggagggccggggatagtagaaaggcgagggcgtagtctcgcnggtcccggactacggctgcttaaagaaagtagaagaaaggttcggaaggaggt

SEQ ID NO: 219610 - DNA, 236 bp, Glycine max
catgtttgcaacaaaatgctaccttttattatttacgaatagagatacttttagtctttgaggttggaaggtggcaacaccatatgacagatatgacatcattctccctgttgatatgcatgctattcatattgcttctaatggcttgatatgagtgctgtcctctagtcaagatttatgtagtatcatgtaccccttttactctaaggatctttggttttgtataatctctctac

SEQ ID NO: 219611 - DNA, 383 bp, Glycine max
  unsure (1)..(383): unsure at all n locations
acggttgagcatgaatgtccctatttgtggcgatgatggttctgatcgactcgttcgctatctgtatagaggggggccggcggattcggatggccctccgccctctcggggatgagctcgcgngatcaaacctatcgctgcgtgaattggtggtgattatgaatctgattgagaaaagtccgctgcgccctcctatgcgcccgctggacgctactgatctctgcctatctgaatggcccaaccggatggtcttcgggtgagttaacgtaaaataggctagcgttcgcatatgccggaatatactgatagccgacctggttgggaactgtctggttattatttgaggaattgcggttgatgccttctagttcgggctgtaatcg

SEQ ID NO: 219612 - DNA, 427 bp, Glycine max
  unsure (1)..(427): unsure at all n locations
atatgctagatcccatatctacttgataattcaatggtagccataaccctagccaatgttcatcaacctccatttctccgagaatacgactcgaacgcaacgtgtgcttgtcacggagaatccccggggcgttccattgagcatggtatggctctgaagcgtaaggtgcaaggtctaattgatacgggctggctgaaatttgaggagaatcgcttgttgaatcctaacattgacaagcaacaccatacatggggcaattttgaaagttgttgttaggtgtccctaatgactcatcanggtttccaagtttatgccattattgtaaaccacagctacaatgttaaatgaaatggataaagttgatatctttgtccctcatcctctcacatacgcatgttggcttattcaaactttcaccggaatgtgg

SEQ ID NO: 219613 - DNA, 437 bp, Glycine max
cgactacgtgcgtctgtaatattaaacgggggctgctggggatgggggatcaaagatcggccgtaggaggcgattcagtgaggaattttgagagtttgtccccctggggcgggaaggtaggttgggggccttaaggcgagggcttttggggagactggcggttcgagacccggtgtgggaaatgattcgcggctgaggggagtgagtgttggcgtttagtaggtgtagtgcgggggagggccgccggggggatataaacgtgagagcctggatgagacctcagtggttttttttgtttctggacttgagtgagttggtgagtggttgaattttttgggtttcgtttctactctggattgcctggctagctgggtaggctgcggcggaggctggcgcgtagacgcggctgggatcacggcgttgtgatggatgagcgt

SEQ ID NO: 219614 - DNA, 391 bp, Glycine max
  unsure (1)..(391): unsure at all n locations
acacattgcaattattaccacatatatgccatcagtaactgatgtggattgactggattttgatgaattaaagcattgagttcccctgcaaggtaacttcacattaacagtttctgggatatctcttgtggctgctccataaggttcangtctgctaagattgacacgatccgaagcattgcaagctttcagtgatgaaaacccaactccacataaccccatattgtattcatacagaaatccatcatctagtctcttaagagcttcattgaaccaagaaaatgcatataaacacatttcagataagcaaacatattactgaagaaatggaaagaaccaacatgattaaacatacatgtgcagtaacatcattattaccatgatgtacatt

SEQ ID NO: 219615 - DNA, 350 bp, Glycine max
  unsure (1)..(350): unsure at all n locations
catccgactgactgacttacggagactttgcttagctcgcccactggggtgcgcgtgcggacgggagtgannaatcgcatccgggatctcaaattaccaattaagcctgtgctccggcggttggagtctctgaaaactcgacaccccctttgacacttagttattatatgttggggccatacgcgcagagccagttttgactggctgtgctgactgcactgttactgcgcggctgttctgctgttgaatctgtgccgactgggagccaggtgctgtggccaaccgctctggggactgatagctgaactgctgctgactgtgacaggcttctttcgggggatgcggacttt

SEQ ID NO: 219616 - DNA, 396 bp, Glycine max
tcgaagaacgatgtataacgaatgaagaacgtcgaagaacggttgaaacctttgcgaaattcctcacggaaaacgttacggaaacgtttccgaagcgcctcggcttatattttcttcacggaaacaatttttccaagcaaattcgaaagagagagaagtgcctaaggggctgaacccctttcttcttcacttcctcccctatttatagcaaaataagggaggtggttgccgcccatctcgcccaggcgagctcatctctgccatgcgagccatgttgcttcctccataagcaacagccttctggaggaatattctggagggcccaagtgggcctgggtgctatttgcacccccatttttactaattacacccacctctgctgttttttggtgattc

SEQ ID NO: 219617 - DNA, 341 bp, Glycine max
  unsure (1)..(341): unsure at all n locations
ttccatcatcgaatgaatgaaccaccactcgccgctctcgatgatgtctatgagacggngccagtgtctcctgaggtgcgatatacgacctcagtgaaggtgcatgaaagtgaaacacgacgggctgtctaactgttgggatgaagggacggacatgcttgacctttcagagggtccaatgctgacacctcttgacacgaggagggatacattttccgacgagtccagctgcttttcaaactctgtctagacttagaaccagatttattttctttttgatgaagacgcgatcaaggctaggcgagagatgttcattatatcagggagtcaggacacgatcg

SEQ ID NO: 219618 - DNA, 123 bp, Glycine max
ggataccgtgaggtcccgacggagggattacgctgtctaccggtagatttttcctatgtgctccgtcccgttgattgggaatacggaattggagggaaattttcgagagaaaaaaaaaaaaaa

SEQ ID NO: 219619 - DNA, 330 bp, Glycine max
  unsure (1)..(330): unsure at all n locations
gagcttctatggaagctggatctttgatcttcaatgangtcctccaatggtgattntacatcatggagatgcagtggaaggcaaaggagaagatgagagggaaggcaccatccactatggaataagccaaagaagaatgagcttcaccaccaagaattgccttggataaaaagcttgaagaggatgctttaatggaggaaaagaaagagagaaggggggagcacgaaattgaaggaataaaagagggagagaagtggaactttgaagtgtgtctcataagactntcattcatcaaagttacaacaagtgttacacatgtttctatttata

SEQ ID NO: 219620 - DNA, 227 bp, Glycine max
acacactacaatacctggggtaaggggggggcttcatctcttaccagaactatacgaaattccattcctgcataatccgctaatttagcttgactctgaaccctttggattggatttattatatttgagggtgatcgctcgttcgggattgacctacgaccgacgaatttttatcatatttcgaatttttccgttgcctcgtattggatcgattatcactgttatac

SEQ ID NO: 219621 - DNA, 376 bp, Glycine max
  unsure (1)..(376): unsure at all n locations
acctttgtctannaatttaatctctaagtatggtgggtggaaggaggaacttcacttcccaatggtggcaggatttgaagagcatctttcatcagcaacacaatgactgttttattgataatttaaaatggagggtgggaagggggtccagtatcagtttctggaaggataaatggatggaggacaactgtaatctccaaggaaaatatccccaattatatttaataagtaaacagcagatatcatcaatcaattctatgggagattttgtggagggtaggtgggaatggaagttatcatggagaanggacnnttttgatcatganattcacttggcagctgattctctatctgagatcgattctactcacattca

SEQ ID NO: 219622 - DNA, 385 bp, Glycine max
  unsure (1)..(385): unsure at all n locations
taaactatctgaaacacttatcaaaaagtgcttatgaaaataatgtacgatcaaatatcatatatcacagagcgattacatctctagtatgtatactatagttataaaactattacatctctagggcttaagacatatatgtatatatatatatatatacatatatatatatattatatgcacatacaattgggatattgactttatatatgcatttctagagatccatttgatttataaaaagctcaaaaaaactatgcttcttaaattatcaaagtttagaattattctntataagtttcgtctgtttctcatccctataaaaatataatctatcagttcttcatttacaaatatgtatggatgaatatggacctatgtgaca

SEQ ID NO: 219623 - DNA, 399 bp, Glycine max
cattacggaactatgaaactcagcttatatatattgatacgctcgaaattaaacatcgtattctctctataaattcaaaggccataacttatcacacggatgtccgattcgtgcgcataatatgtcgagaggctcgaaattgaataacggaagctcttgagaaattcaaatggtcataacatttatctcagatgtccaatcttggcgcatcacatatagtgacacacgaaattgaacatcagaagctctcgttaaattcaaatggtcataacttttcacactgatgtccgattcagggttataatatatcgatacgcacgaaattaaacatcgaaaactctcgagatattcatatgatcatgacttttcacacggatgtccgattcaggcgcataatat

SEQ ID NO: 219624 - DNA, 427 bp, Glycine max
catccgacaactgacttacggactgatgtttcggcgtgaataaggtgtggtggatacggcttgttaaagccggcttgaagattgggatgcctaataggactagaataatgttttatattataagatataataacagctgcctcgtgaattcttagccgaattaatattacggctcctccttatagagcgtaatgttgtttcggtgtttagattacggcctgaataattgtgttgaaatatatttatatatatagaagagaatttggattgatattgtgaatatcttaggattcgggattagagtgctctcttagggcgcgggctgctttaggtcttcttagaggtctctgacggcgtgggtgtaccgtgagtacggccggatattacggccggtgattacgtagaggtctccccgcgttgtacgtta

SEQ ID NO: 219625 - DNA, 342 bp, Glycine max
gttaatggatgtcaagagcacgatattgcgccgatacctttgactggtgagcatgtataccatcgggttcaacacctgaatactgtatttggaaagacccaaaagaaggataaaagtaaaacttgcatatggaagaagatgcccattttctttgatcttacatactggtctgatctatacggtaaacattgtattgatgttatgcatgttgagaaaaatgtatgtgataatgtgattgggacgctccttaacattcaaggcaagacgaatgatggcttgaatacccatcaagatctagctaagatggtgatacgatcacaagtgcatccaaaggttgatggg

SEQ ID NO: 219626 - DNA, 313 bp, Glycine max
atataccatgaatatttgcggtgggttagtctaggagttgttgtgtgtccgtccgcacgttggcttatcatctcatcagatattgacctatgaaagtcggacgatacgacgccgccgatgagttgattcacatctccacaccacatcaccccgcggaccatttctctccggccacaatgcctccaccctggccataggacaattttccgcccctccccggccttcgaactctctgcaattaacgaaatgttctcatacaatagaacaaaaccggtaccgtagcttttgccgcactatataccggcggagcggc

SEQ ID NO: 219627 - DNA, 261 bp, Glycine max
ctcttgatgatagcttgctcgagaagcttctatgaaagctggatctttgagcttcaataaagtgatccaattgtgattttatggctttatctaaacgggccctagtgcttatcaacatggatggcgaggacctgcctttacccgagaattctgatgttgacaaacgattctacgcttatattgcggtgcaatagatgatatcgctgcatgctcttttatttgttggtattcttcttggttccccgcaggattcccgtttac

SEQ ID NO: 219628 - DNA, 345 bp, Glycine max
  unsure (1)..(345): unsure at all n locations
catccgactactgacttatcggagatcctgtggattnttaggagggatagtgtttattatggnggctctgttacttcttatttatactcctgtgccgggcggtcgtacgtactttttaggttaatgtgctagtgggttttatgggattttgggcgggttttgggtgattaatgtgtgcctagggattgaattaccctataggaaggggggaaaggtcgagttttgttctggttcgtgcttgctccctctcgatactggaccctcttgacgtctgacgtttatgtctttcttttgggtaattattgtgatcttcgttctttagtgttcggtttcctttggttttta

SEQ ID NO: 219629 - DNA, 396 bp, Glycine max
  unsure (1)..(396): unsure at all n locations
ttataagagtctttgacttcccttaannattgaaggaaaaaaatatatttgtaagtcgtagtttgtggcaactggcaacaacttacgtataaaaaacttaacagtagttatggtttatgaacataagctaaatataaaaaaaactttgtatcccattgtccggaggctcttcgctatgtgaaggtatggggagggatgttgtactcgaacccatgaccaacaagtcaccaagacacatctttaccgctgcaccatggttcaccctcaccataagctaaatataaataaaaaataattatttaaccttaataagtcacagtttaagactatgtgaaagtccacgtatatagatgattaacataatgaaaaataatgttacaactgcagtcaagtgaa

SEQ ID NO: 219630 - DNA, 445 bp, Glycine max
  unsure (1)..(445): unsure at all n locations
catccgactaactgacttatcggtncggctccggacggtttggcgggtaggttagttgtgggcgtgggnggggccgcgacccatgaatggcccgtccctgatcctaggggttcggtgtggtgttgtttaggatgcgatggtgcccattactggtccggcggtaggcggtctttccgacattcgtctggcggtcggcgtgggaatggctggtttgggcttgtcgggtgagattggctgctttttccggtgattgtcgaggggcgattagaatggctggcttgggcaggacttgtcggaatttcggtcgcgacgcgtgagtcgcccgagtgggtcccccaggattgtgggtttggcttgggggtgtcttcggatgagttgatatgtttggtcaactaaaggtggatgggcgaaggagattctaaaggngactgttgcgtacgcgggg

SEQ ID NO: 219631 - DNA, 385 bp, Glycine max
  unsure (1)..(385): unsure at all n locations
ttgaggacaactattaaaaaatgttgataaatggaagttgacaatctgtaaaggttgaaatgtattgtgtattcttggaaattcaaatgaagctggtttgataggacaaaaatagttagtaaatatgattnttagcttcttaaaaattctcataactagcatatttactgaaaattgataagaaggtgaacattgagaattttgttgttgcttgggaggaaaanggaagatgtgagaaactaacattatgcttaatattaagctgaacaaatgctatatctgtgaataaaaataatgctattaattagttctttacttcaatatcttctgttctatgcttaccctttattatcttgcttgacttctacctgaatgagttgaatgg

SEQ ID NO: 219632 - DNA, 361 bp, Glycine max
  unsure (1)..(361): unsure at all n locations
acgtcatagaaatcgggctttgggctcagcgaaagaatcggcgggcccgcggatggggcagaaagtgaaaagggaaatttctgatgaaagtagcggacttaagggtgacgagagatgatggtgggagattgactgggacgattttcggaggatttggacctgagggaaagataggtatctgtccctggcgaggggtcaagggggagatgatgtgggagatgagggtgtgacgatttggacgatgaatttacgaggtgtgtgaataaagtgttcgttccgtngaggtgtttagatattgagaagaggtggtagagttcttatagataacgggatgtaggaatttacgttcggnattggcgag

SEQ ID NO: 219633 - DNA, 386 bp, Glycine max
  unsure (1)..(386): unsure at all n locations
gagtttgcgttcaatattacagtacttggtaacaatcttgaccatgaaatcgaaaatctatatgcatcaagccctgtttccagcattaactgcacatcttcctgtattatatattttcgtgaaaacaattaatatcttttcaagtcttaaagggcattataagtataacaaaataatgactaagcttgttttctttgtccagcttatgcctcaatcttttttattttccacaaatgatgtgcagcgtattcaccttgtacttgtggtacccatcacatgctacatctccattntctccatgggcatatcctgttcattaaaaataattgcatgagacccacgtttcctaagtaaatgatcagtaaacatgacatgcatcagtgcta

SEQ ID NO: 219634 - DNA, 469 bp, Glycine max
gctccgacaactgacttacggtgcggattgttggagagattttttgtgtggggagaggcgctgtggtgtgttttcaggctgttgccaggggacttttgggggtagtcgtgggggagccgctcttttggttttgagtggtgggggggagggcgcatttcttaaggcttggattccgtcagactgatcggggggtctgcaacgtgtgactgttgcatgagttttttctgctctggagtgtgcatggtgtagtgttttgtgctctgggtctggtaggtgtgagttttcgttgctgctctggctctgggtcccgtcgggggcccgggccatcgggcggattggagagatgcggcgggagcgtcggcccgggcgaacgcagggcgaggtatcttagaaccgctgtgtgcggttatatataaaaggagttgttatgtgctctatcgtgggccgcttgtattcgggttcgggccgg

SEQ ID NO: 219635 - DNA, 470 bp, Glycine max
  unsure (1)..(470): unsure at all n locations
tactaagcttacacaacacttctgcagcatctntaaaataagagttgtatcttccccaactaaatcatactaatgatggaaatccaaagatatgatgtttgtgatcctctagccatgacttggtttggggatctacacaaatgagaacacaaccagatttattgttcatacaatttttaatcagaacaatatgcacgacatgagatagaattgcatccgtcttacctccaagatatgcaaatccaaaaaacctctgcatgttttcaacagtctcatcaagcacccattctcttaaagcatggtcccttgtgacctaaaagtttggattaaggttgcaggtagactacaggactttataccattggtaatttcataaaggagaaacaagtacctttgcaactatgcttgcaccactgacaatgggctaaaggctatcatccttctttgcaaccacaaatttgatagatgga

SEQ ID NO: 219636 - DNA, 402 bp, Glycine max
aaacatttgaattacttggacctgaacgccaatgtatttcttggagaatgtatgtcaattccttctttcctttggacaaagacttacttgaactacctcaaactcgctcttacttcattcatggggaagattcctctcagatcgggaatctctctaaacttcgatatcttgacttgagcttcaattatttcctcggagaaggtatggcaattccttctttcctttgtgcaatgagctccttgactcacctatacctctctggtacttgattccatgggaagaatcctcctcagattgggaatctctcaaatttggtgtatcttgacctgagttctgttgttgccaacggaacagtaccctctcatatcaggaatctctctaatccttcatatccttgactga

SEQ ID NO: 219637 - DNA, 374 bp, Glycine max
ggatcgtattcctcgctgtgttcggtgggctcttggttatatgtacgtcctttgcgcgggagcgcgttattgcccggggtcgcccgtgatgatatgcgtttttatggtttttgatgtgtgtgtaaatcgttttaatttgagggggttttgatttatgtggtgttggtgttttagctttgctagttggtatggtttgctgtgtgtgtctgagaatattcgttctgatgggttcgaagatttggatgtgttcgttgagttgggacttcgtgcggtcgtgatctacgacctccctgcgttagttggatatttatgtcttctctctgcctgtgatttgtaggtggcgtttttggatgagtgtgagttgtgttttattt

SEQ ID NO: 219638 - DNA, 338 bp, Glycine max
  unsure (1)..(338): unsure at all n locations
ctgatttacatatgcttcattaaaggaaatttctttccatttaaatgtactaatgagacattaacctatgaaatgaaaagaacttaaatggctgaatgtaattgaaattgtggcaaccaatagtcacccacatgatgatgcctattctgccaattgggtccttattacaacttgaactaaaccaaactaaagcccttttagttgagtaactcactgttttttattgacaaattttaagagtaaatatngcatttggttcctgactgttaaccccttttgtaaattagtccctatctttttataatgtaaaaaatagtccttatttttgcataagtttt

SEQ ID NO: 219639 - DNA, 383 bp, Glycine max
  unsure (1)..(383): unsure at all n locations
cctgtgatgtacctaaacacgcgagctcctggcagttaacagataataggaacaaataccacatatcattgaggcttgtggtggctggccagctgtgaactttgaatgatatgtgggttatggcctctggtaatcgattaccaagggtgggtaatcgattacaaggcttanaaatgaagacaggaggctaagatggtctctggtaatcgattaccaaggggtgtaatcgattaccatgcttgaaaacgaagtcatgaaactaatggagcctctggtaatcgattaccagcctgtgtaatcgattacacagaaggatgggtcaactgtaatcggataccaggtatattgtatcnattacacagtgcattcttgatatttcatgt

SEQ ID NO: 219640 - DNA, 356 bp, Glycine max
  unsure (1)..(356): unsure at all n locations
tcatgatgaatcaagattaattcaaagaattgttgatgataacaaaggtgatgacaaaaagctcaaaggtcatgaacacttcatgataacaaagatgatgatctcaagaatcaaagaatgagttcaagatgttcaagattgaatcaagaacatttcaaggttcaagagaattcgatttcaagaatcaagaatcaagtttcaagattcaagttccaagaatcaagatcaagattcaagaatcaagaggagactcaatcaagataagtatgaaaaagttgtttcaaaaactgagtagcacatgantttttctcataaccttgtaccaaagagtttgtactctctggttatcgattacc

SEQ ID NO: 219641 - DNA, 325 bp, Glycine max
  unsure (1)..(325): unsure at all n locations
aagaactcgcacaagcgaagtgttgcgacaggaaagaccaacaggccctaacgtgaaggatagttggagtggagacgaaaggtgaagaactgactagttgagttcccccaaactgattgagaaaaacgccaattatcgagtgcaaacttgtgtgtgtccacgaacctacgctttntaacaagtggctgtgagatcattatctagctttctttntagaatacatggattccgctttttaattattgaggtctccaatgagacatcctctacccttaccattataactaacgaattaaacaaatcatacaaaatctattggaaagac

SEQ ID NO: 219642 - DNA, 445 bp, Glycine max
acagttccccgagagttcgatactcgattcttatcgttttatactacttgtgcgatccgatacacttgccgaccgcaaacagtgtcttcacatatggttaaaccatgacaatggaagcttgggttgataccaagtatgtctgtcatggaccaggcaataaagttagcgtattctcgattgactcgttgtatactgctactgtcgtcctcgtgtaactgatttcctaattggatgacctgtccttccctatgccccagctagaaagtggttgtctctttaaccgatgtcacccggctattgtcactgtgtgttggtgtcaagctcgagttcttctacctcttcggccttgattctatcctccacatggtggacagcttccggtgtccttccctcgcctgggggtgtagcctaaagttagccatatgacattctttggtcttcctct

SEQ ID NO: 219643 - DNA, 455 bp, Glycine max
  unsure (1)..(455): unsure at all n locations
tgccgcgtatagcatccgacaactgacttacgagtatgaccgggtttaggnggtaacgcggagagtgtttcttgagaatttactttggttatgcagatatggcatgtataagaatttagtcgtgatgtatgtctgaatattgaatattactccgaagcgtgggacattagggcggcttattctggtatggaggacccttgtctcgtgaaggaaggcgcctttggtattgaagagaattatttattatttccattcgggttgaatctgtagattatagtgattatagttgtgttttcggccgctggcggtgaatggattactcgttggtttatcaaggagagtagtggtttgcatagtccttcctaaggggcgcttatctccggggatggtggcttaaggaatttcctagggatatcgtgtctctggagatgacgtgcgattgggtttggtgttgc

SEQ ID NO: 219644 - DNA, 412 bp, Glycine max
  unsure (1)..(412): unsure at all n locations
ntataagcgcgggtctgggagacaaaggtcaagtggtcgtgatatgcttagatgacgttccgagtacattggatttggtacgaccatgccctcctgatttccagctgggaaattggcgagtggaggaacgccccggcatttacgcaacgagcataatgtaaacctttacggttttaaaagctctatagttgggcctaggctttagagtttttttcttttgttaaggctttgtgtcctttgttttgaatttataaatacaaggatctttcttcatctgttccaacgtctctacccattctgatccatttgcatgtttacttctttactttttaaaacggcagatccgatgacaagtccctcgaatgtactaatacctgtgacccgcctatcaacttcgagcatgaaacgaatc

SEQ ID NO: 219645 - DNA, 348 bp, Glycine max
tttcgcgtattaggcgctggcggtggatgcctcagagcggtgaggtggacgtttgtggatactgggtgggggtgagggggtggccgggtttgtgtgggcggttcgggttggggtttgcgtggggatgggttcttggtgagcttgggggggcggttcctgcgtttaggtggcgggggtgcgggtgggagaatgatgtggtggttcctcggtgggcgggctgtgtcgtgatggtgcgggtgggccgttgcattgcgctagttcggtgcgggtttctatttcctgctgaggtttttgaacggagtcctcttgtgttgggggtggactttggtcttgtgataggtggtgggt

SEQ ID NO: 219646 - DNA, 445 bp, Glycine max
  unsure (1)..(445): unsure at all n locations
tcttccatatgtctgagtttgttctcatccattgcaacatattgtgctacatcaattatgtgctcatcaatttcaatcatcggccttggatataatcantttgcaccagggtttggttctattatatcatcttctatttctgcaagagatgctttaataacatccttcttagcaggatctatatcttcaaaaacagtgacaacttccatctctgctagtttctttgtagcatatatagacataagttcagttgcatgcctcacaatagaatgaactcttttaagatcctccatcttatcccttctttgctctttcacatatttttctggattgattcaacaatcacaacttcaggcattggcttcccatttatntccatcatggtggcctcttcaacagcttttcttaagacttctacagacaaagtcatcatagattccaaaac

SEQ ID NO: 219647 - DNA, 344 bp, Glycine max
tgaatcggacctcagtgagataagttatgtacctttgtttttctccatagcatccgttgatcaacttccagcgtgtctacatattatgcgcccgaatcgtaatccgtgtgaaatagttctgaccattaggatttgctcattggcttccgatcgttaatttcgagcgtcttcatatattataatcctgaatcggacctcagtgtgaaaagttatgaccatttgaatttctcaagagcttccgctgttcaatttcgagcgtctcaatatgtggttcgccggaatctgagatccgtgtgagaacgtatgaccatttgaattgcccgatggcttccgttgttaatttt

SEQ ID NO: 219648 - DNA, 451 bp, Glycine max
  unsure (1)..(451): unsure at all n locations
gccgcgtatagcatccgacaactgacttacgggagattctgtggtaggaatggcgcgcgctgtgttttgngggaatggcttcccgcgccgcctccgccctttattacctcttttctttggttcaacggccttcgtttataccgctcctgggagtctcctagctcgcataaaatatttgtttcctgattggggtgggcgctgccggcttcttcgtgcgatagagattttttaagtagtggcggtcggcctaaggttgcctggatgctcagatcggggatttcctttgaaggccgcgggttttatacttacgctgtggccggaatcttagcggatgctcgtttgctgtttaaacccgtggcttccggggtgactgcgcggttattccgattcgtagccctggcgttagagtngtttcccccttctgatggctgtgcttagagcacttccgtcc

SEQ ID NO: 219649 - DNA, 367 bp, Glycine max
ctcaaccacttatgatagccggcgatgatcccattacttgttcccctaagctctctgtcctttcttcacgccgcatcccatgccttgcgaactccttggagtaccctcgcgttgtggtcactgaaacctcgtgcgatgaaaggaatgatgctttcgtctgatggcactcctctcatgggacatccttcgcatgaagatagaatcctgattcttccttccttctagcgagggaaccatttaacatacgcccctccatgctagccaagagttggtgcacaacaaacaattcttgcgccgctctttcacatccccggtcgaacgtgtatacatggcaaaatggcgagaccgggctttctttgcatgatga

SEQ ID NO: 219650 - DNA, 396 bp, Glycine max
  unsure (1)..(396): unsure at all n locations
ctgactcacgagacggcgtctgtgagaggacggttggtctgttgatcgagcggtgnagtttnncactcggtagttgggttgggtgaaggaatggttagaaggattccgatgttgatgtttggcgcagttccgtgatgttatatcggacggagattgcttaaaatttcttcagagnggttggcgatgtggggggttggtttgcggacgcacgagcgttgggtctttttctttcttccccccccccttggcaggtggaggggtggtcgtgcgaggtgattaagggaaggatcctggacgcgggaaatatcatccgtgatgctcgggcgtatgtcgactgggggttgagggctggatggcaaagtcatccgcgtgctttgggaacaccaggaccaaaat

SEQ ID NO: 219651 - DNA, 320 bp, Glycine max
  unsure (1)..(320): unsure at all n locations
cttcagctaagacctcattagcaatcatcacaccatggagaatataacttcctttgagaaaggcaatttgcctttcatcaataatgtgaagcaaaacaagggtcagcctattaacaatgactttatatactattttattaacacaccctataagagagatgggtcgataatcattaagagattgtgggttattggtcttggggataanggctatgaaggatgcattgcttcctttggggaatgtgccatttatgaaaaactcgtccataaacctgataaaatcaggttttaaaatatcccaaaactgtttaataaagttg

SEQ ID NO: 219652 - DNA, 398 bp, Glycine max
atccgataactgacttacggattcttcctacgaacttatagccggtagaggcacgggcggctccgaactgttcaaattagctgctcgccctcttaccgattgaaccttcggacttctaggggctagacggaccttcggctccgaactgttcttattagctgctcgccctcttaccgattcatccttcggacttatagccggtagacgcacctacggctccgtactggattataatacttctcgcgcgaggataagatatataatcggagtggggtgttcaggagcccgctcgctcgctgtacctatatcaagtttaagaatcatgaagatctcttgaggtgaacgttagctctgacataatatgacccgatctgcgcgacctcctcgtccgcgccggt

SEQ ID NO: 219653 - DNA, 285 bp, Glycine max
  unsure (1)..(285): unsure at all n locations
gacatttgtattggntggtaacttgattgttgcatcttaatatatccgatatttgttntgctttgtgtatcattatagtgtgagtgaagaagattttcttgttgcatcgagtggcctcataataattaagaagggggggttgaattaattattcctaaacctttactaattaaaaaattactcttctaaggcttttacttatgttgttaagagaatatggagtagaagagaaacttaacaganagtataagcgaatattaaatgcacagcggatagtaaaagagt

SEQ ID NO: 219654 - DNA, 434 bp, Glycine max
catccgactgactgacttacggcgtggaactacctcgctgatctctgaggcgtaacggcgttagggtcgatcctccctcgagcgtgggacggagggatgaggctcggcgcgactacttggtgaaggtgacggtttgagcgggtgcgattttatagggcgttcggctggcgggactgtagtatgggcccttgctcttttgaccggcggactggggacgcgttcccgcgagggtgctggcggcggcctcggattcgcccgaccctgcttgtgacgtgtcgcccggttaactatgggtttggctgcgtatagtgctttcgcctgcccgttggccttcggcgaggctccttcgcctcgtcgggatcgtgtggataatgtttcggcttctgccgctgcggctgctgctcgtcgttgaaatgtggttacgccgcgattga

SEQ ID NO: 219655 - DNA, 404 bp, Glycine max
  unsure (1)..(404): unsure at all n locations
taagatgtatggcaaaacttattactggtggtctttacatacatgtgagcctgtaacaaatcttctagacntggagtcatcacatgcagtccctttgaacccttaccacccaccctgtcatcctggcgagactcatgaatgccaacatgtttaaccttctcaatgtcttctgaacaaaattcaatggcttcttctgcaatgtacctctcaacaatagatgcttctggacgatatagattgtttgtatgcccttttaagatcttcatgtatcgctcaaccgggtacatccgccgtagataaacaggaccacaacatttgatttctctgaccatatgcacaatcaagtgaatcatgatgtcaaagaaagcagggggaaaatacatctccaactggcacagtataat

SEQ ID NO: 219656 - DNA, 429 bp, Glycine max
tcaataattattgaacaacgtcctattttttccttccacaatgacgtaaatcattattgtatatggtggttaaatattttaactctcgctctctcacagggacttataaattaatacattttttcattatagttttttataaggacataaaacaaaggttaccctctcacaggatcaataggaaatatagtatagtttcatccaaagaacgacatgtcctctcacatgacaaggtcctctcaataagactctatggatgtgccaaatcattggtacctccatagaatgacatgttctctcacagaacaaagtccactcatcatgactctgcagagcatccaggaaaatgtgttgtcatgaacgcaacatgtccttttactatacaaggtctactcaatatgactctacggagcattgaccatacttctg

SEQ ID NO: 219657 - DNA, 423 bp, Glycine max
  unsure (1)..(423): unsure at all n locations
ttgatgccttgcttggactcttggaagccgncgaattttgtctaaaatttctcgaagtttntattttgaccaatgtatttccgacatgttttgctctatttcatgttttcaaatttttcttttcttttcttttctctttcttctttaatggtgatgcattgtattctctaagctagaagtgttttcaacacattcgagcttgcggagggtattagacataaaattaatttagttagttactagaagttatttgagtaagttagttggttactcaagttatagttactaaaagttatttgagtaagttagtgttggttactcaagttagttattttctatctttgtataaatacatcaacattgtaatactctgattaatgaataaattcgaaaactattgttcatttctttcattcctaatat

SEQ ID NO: 219658 - DNA, 478 bp, Glycine max
tccttgctttacggacctataatctctgcttatcatcagaccacttcaggtgctggaactacttctcatggacttgatggggcctatgcaagttgaaagccttggaggaaagatgtatgcctatgttgttgtggatgatttctccagaattacctgtgtcaactttatcagagaaaaatcagacacctttgaagtattcaaggagtttagtctaagacttcaaagagaaaaagactgtgtcatcaagagaatcaggagtgaccatggcatagagtttgaaaacagcaagtttactgaattctgcacatctgaaggcatcactcatgagttctctgcagccattacaccacaacagaatggcatagttgaaaggataaacaggactctgcaagaagctgctatggtcatgcttcatgccaaagaacttccctataatctctgggctgataccatgaacacatcatgctacatccacaac

SEQ ID NO: 219659 - DNA, 262 bp, Glycine max
gaccgcgcctatccgccatagcttgataacccttcttgaagagtatcaaaatgtctttgcgtggtcgtatcaatacatgcccggtctggatttcgacactgtgcagcataagtcgcacttaaatcctgagtcttctccggttaagcataagttatgaagaatgaaacccgagatgtctttataaattaaagaaaaagtaatgaagtagtttgatgcaggatgcttatctgtggcacggtacctgtagtgtgtggccaacatt

SEQ ID NO: 219660 - DNA, 282 bp, Glycine max
gaccgtgagaaggagaatgatgggcgcctatgggtccgaaagcttcgggtgctatatttttgctatctccgggattagtgggttaataggatagcgttatcggctttatatttttatcgagagatgcttgtattggtgatagatcctgaactatatagggatattctacttagggtcgattgtcgactctgcgattaactgctcgctgataggcgcgactacctggtctcctcttcttttgaactgtgggatttaatttttctaatcgggacttattacgac

SEQ ID NO: 219661 - DNA, 429 bp, Glycine max
ttcttccattggtgctcccctcatggtgtaccctaactgtcttatatcatgcgcgggattgtagttaatgcaacccctcattcctatcaacgggatgtttgggtagcttccacatgataagagaacacccttctttccttctttccatcgtggaaaccaattgactattctgcctcctatcccagccaaatgttggtcccaatctactcttcttttctcgacacacgagccatggcttcggagcggacatggatgccttatgtcttgttggaataagtgtgacaccaaccatacacaaagagcgggtgaacaacagatgattcgtgcactactcttttcgcaccttcggtcaaatgtgtcaaataagtcttgcaagacagtaccaccggactctctttgtatggtgatatgcaatgaatgcatcaatcg

SEQ ID NO: 219662 - DNA, 432 bp, Glycine max
  unsure (1)..(432): unsure at all n locations
cagtcccaaatgccgcgatagcatccgactgactgacttacgggatattactgagatgcgtgagatgcgcggaactgctgcttttctggctacggatgccgggagcgtctgtgcgagtctatataagcttgcgcgccccgttccgcgcaacaaagaccagcattaactgaatcctcctgaattcggaacgggtgtgaaattacaggtttctagttgggcgccttcagacggggaaactggttagggtttcgaattcctggtgcatgatattccggaacctcatcagaagcctgactgggatcgatgtctgactttacccgaggtgtccggcgcccgtaattaaatgggcggcggctacattgacatatgtaggaggtacaagatgaggtggatcatagccgccntaccggttctatatgtgcggaatcgtct

SEQ ID NO: 219663 - DNA, 369 bp, Glycine max
  unsure (1)..(369): unsure at all n locations
tataatcacgccaagtatgttataaaactaacacttaatagttaacactgacttgagtttcagaggaagtactaagcaaagtttaagtttcacctcacactatggcagtgaaggtttcagaaccaaaagatatgaactatgggccagtatgaaagcagttattggttcatagaaatgaagcatttaaggctgagcctctgaccaccatatatactcattcaacaagacatcaattaacttatcactcttctaaatagatcanaagtccagttagaaagaaaatctgttagttgtgattcttaatatcccaaatgtagatatattacttggcacagaccacacgagactntttgccccatagtaacatca

SEQ ID NO: 219664 - DNA, 177 bp, Glycine max
agtcgacgagatatcccggcttccctttgctgtgtctatgcgggatcacctccgactatgctgcttgtatcttgtggaccgcgtcgcctacgtaaaacttgacctgttcggcggccgaattccgagggtgtctcttgtgggtggtgccggttgttcgactgcgatctcgttatgatt

SEQ ID NO: 219665 - DNA, 405 bp, Glycine max
  unsure (1)..(405): unsure at all n locations
tcaccatcatatgacacgcatgctgtgtttgaangtttatctanaannaaacacggactatgatgttggtgagatctgcaatgatgactggtagctagctcaaatgcctatggttcatggttgtgatcctttaccaatgagatggtgcttttctagatcccctaatctatacaaccatccattttccatcaatgaatccttgtggaaacttcctgatgatagaaatgtcagatggagccattaccggtgcaagaacttcttgtgtcttgccatcaacaccactcgtaatggattcttcatgtgtgcagactgcttcaatctcaccatccatgagatgccaagatggataaacctgatgctgattcaaaccaaacagcggatttcttatatctgatgtctttgaat

SEQ ID NO: 219666 - DNA, 374 bp, Glycine max
atttcggccgacggggtggaggatcctctatagaagtccgagtatgtgagcacaagaagctgatatccggagaatcagctaagaaaagacgtggacccttttccttacggatccttgcccatcccttcccaagctgtggcgagctagatattccgagatgagtccgtttctatcatgcgccgagctagcttctttgttttaattctttatcctctttacttaataacggagaagaacgaacctacgagattggggagagatgtgagaatagtgaaccgcgaagttgcatggtccttgaagaaagttgcatggtctaacggtttttgattatcaatgacgttataagcgcgaagtgcatgtcctcagagagtgct

SEQ ID NO: 219667 - DNA, 295 bp, Glycine max
agcggtcactgtttataccccctcgtgacgtgctttaacgcgcccacttaagacatttctcggttaacttatgaacattataaatttccaccggacggctgaattatattatgcacgaactgcggtgtaaataaattccgaccgttcggtcgtgccgtaaccacgtcggaaatcatttaaaaggtgcttacattgtataattatcagcgagacatcttttagtatacaaaagcggaaaatcaatcggacagtgtctcttcgggatttctcattcgtaaccgaactgagtaataac

SEQ ID NO: 219668 - DNA, 311 bp, Glycine max
  unsure (1)..(311): unsure at all n locations
cggtttaatcggcgggtgtgtgttgtcggtggaggatatcgtttctctggtgtcgtgtgggagtttgttcancttttgtggatgacgcgcgggaaaaattctcctctcctgtgtcttcgatgtgacgtgtttggggttctgtgggaactggttgtgacgctggtgtgttcggggcggaaaggtgttgtttcctgatgctccttggacgctgtgggtggtgtgttttctcgtgttccggaagtggggttaccgagtctgattggctggctgttgttttgtgtgttgtactgcgggggtgttgtgattttgcg

SEQ ID NO: 219669 - DNA, 266 bp, Glycine max
ttatcaattcccatacaaattccattccctgtgaaaatgctcatatttggcattctaaacttggtcataatctacaacaagctatcaaacatttgaataataaaattggtctgcacctttctcactaatactcttcttctaattcttctgattgtcctcttgctaaatttacaagattatcttttcctaactctaaccatgtatctaagttaccgtctgacttaattcactgtgatatatggggtccctatgctcaccctacctat

SEQ ID NO: 219670 - DNA, 380 bp, Glycine max
ctgacttatcgtcttaagagcgcgtgtgtgttctcgttgatatctctgaggggtctttccttacatgataaatcgttatcctctctaggggtctgtcctcaatgagagatctttaattggttgtcctccttcgcgttcttgagtggttagcggtgtttttaattctttctggttacgtttatagttttgttttattgtagggttatttgagttgaaagcgggttggggtccagccgtctttagtttcttataaatttcggtcttggggacctacccgccggagcggggcctttgtggaagccctcacggcgggaagaagttgttagggctctggccgcactacttttgcctctggtgatgctattgctggtgccggtacg

SEQ ID NO: 219671 - DNA, 383 bp, Glycine max
aagctcaacgactgtgaagaatttatccacagagcaagatgatggaagctgctagtttgtaaccattgaacaatagcagactaaccacttgacttgctcaaccactatatatgtaatgtactattttcagaatctcttcatgttccttcttatttcttccgaatggttaatattgttgaacattggacataaggaaaagaaagtataacatattaaaggcctctcatgatgatgctatgccagccaaaagttctcgagaacctgccaagtgtcctggtacatgttgccttatctcttcaaaagcacacaaagtttctgcatccagaccaccagcatactacaaaaagcataccacaattagaaaatcagcctaatcaattatg

SEQ ID NO: 219672 - DNA, 245 bp, Glycine max
ctttcggtgccggtgcgggaatacggtgcggcgatttgttctggagggactgcgcgcgcgacctttcgggcggcgcaagatgccgatccgggccgtgtttgtgaactgtcctacgggttaaaagggctcggcgcgctttcggtcttgggatggaccttggatggcgtcatgaattcgggcggaagtgcgggggtttgatagccgtgggcgcgaggccgatcgctcgttgcagattgtgctcgggg

SEQ ID NO: 219673 - DNA, 406 bp, Glycine max
  unsure (1)..(406): unsure at all n locations
tggcatataatacattgcctcacatagtctcttatatcttgctgcanttttggccagtaaaattgcttgcaaattcgtgaaactgactttgtaactccctcatgacccccatatttataggcatgaaactcctgcataatttgttcttttagttctttattggaaggaatcatcattctacccttccaaaacaacaacccatctttcactgcatactcagtgccttgtacagtaccttccatgcattgtttgtaaattgcagctaaagaattatcctcttgtaacaaagctgatacttgattcatccaaacacctacagcttctaaccaagccatcaaaaagcttcttgataaagcattatcaggtagattntctctaccatgcttatattgaatgacataatcat

SEQ ID NO: 219674 - DNA, 404 bp, Glycine max
  unsure (1)..(404): unsure at all n locations
acggtgtgtgtggggttttatggtggtggggtggggtgggcggtgtgtctcggactcatggcgtgctgatggggcgtttggagtctatgtgcggcttttggatcttcgcgcggctgcttcctctatgtttatgtcggtaatttgaaagaccttggagcggttctttttatgcgctgggtggagggccgtctgtgcttaagtgttttcatatgcttgacttgggtcgtcgggattacttggtccgggggccggttgcatcggggccggactaccgcccatggcgatacctagcgtcattaaagcgtattttaaactggcattctttctttactggtagttgatttctctttgctagtacgtcgttagcagttcctttctcttccggngatgcgcctcagggatcc

SEQ ID NO: 219675 - DNA, 320 bp, Glycine max
  unsure (1)..(320): unsure at all n locations
ntcatatgtgaaatcatgtgcaagcatttcccttatagttctctcacggngtggagggtgtgccatgttctcataatgtgctaaatcagaatgctcaaaattataatgctcaaaatcatgatgttcaaaatcaccaataacataatgcacagattcaccaataatggaatgctcangatgatcaaaaggtataaaaggatgcctaactaatctatgaaatgtcctatctatctcanggtcaaagggttgtaagtcagatggattgcctctattcatacactacattcaacatgcataactagttgccttgtcatgtaaat

SEQ ID NO: 219676 - DNA, 456 bp, Glycine max
  unsure (1)..(456): unsure at all n locations
gcatccgactnactgacttacggggaggcgttggagggtgtgcggggtgacaagatttgatgaaagacgacgtagagctcgttgggaataattgatggttctcgggtggaggattcttgggttaggagggcggggggggtggtgagttgggatttattgatttctgagggttaggaagtttcttttgatttctgaggattgatcttccttctgtagtgtggttgtgcgccggggggacgtttgtattgctgtgaggtcggtggaggaaatcttctgtgtgggtatgaagttgagagggggggagaaattttgtttgtgactgagcggttggccgctgacttgtccctttggggtgatggggttggattgtatggatgggagggtagtgtgggggttctgtgatgttgatgccgtgtggggatttggaaacggaggtggaaggggggaggtgatttc

SEQ ID NO: 219677 - DNA, 412 bp, Glycine max
  unsure (1)..(412): unsure at all n locations
actgatccacttgttgcccaagtttcatggtcttgcatgtgaaaaccctcataaacatctgaaagaattccatattgtctgctccaccatgaaacctccagatgtccaagaagatcacatctttctgaaggcctttcctcattctttagagggagtggcaaaggactggctatattaccttgctccaatgtccatcacgagctgggatgacctcaagagagtattcttagaaaatttttccctgcttccatgaccatggccatcagaaaggatatttcatgcattaggcaactcagtggagagagcctaaatgaatactgggagagattcaaaaactatgcgccagttgccctcaccaccagatgtctgagcaacttcttctccaatattnttatgaatgactcagtaacat

SEQ ID NO: 219678 - DNA, 376 bp, Glycine max
ggttagctccgcaactgactacggaggctttcgtaattttgcggttcggcgaggcactctgcaggcacgagtgatgtgcctcgcatctaagggattatttaatatccggcttgccgtgttcacttcagaacaatctttttgaaactaggttcggattgatcctggtggagcttgactattaagtggggacacggctcgtgcctgaggctctctggtggactacggagaaggtcagatactgattcgtcgtccttgtgtgtatgaggagggtctcattgatactctgcggttttactgtcgccactctagaagaaccgcggaaattgattacaacttggccgccggcgatgattactgaatctcgttgcccgatccc

SEQ ID NO: 219679 - DNA, 420 bp, Glycine max
  unsure (1)..(420): unsure at all n locations
tactaagcttattagtatgtaatgaatctagagcggatcanattaatgaaatagattacctaagtgattaaggactctagcaccttaattaaattaattaacactaatcaagttagaactttaattaaaactaattaagactagaatagttatctagacataacctagattcaattgaaggataaattgagatagattaagagcctaattatcaattaacctctaaacatgacacctatgacatgtgggccctaccctattcgggtttgggacccataatataagcataacatgagaccctaacctagagtgattcaccgttttcatctaattaagaggggagagggtcattttctctcttctctggtcttggtgtggaccaaatgttacctttccatgcattttggtggtagagttctt

SEQ ID NO: 219680 - DNA, 235 bp, Glycine max
  unsure (1)..(235): unsure at all n locations
tggggggggtttcgtgctatcgggngcggtgttgcttaatcgcgttggtcttgggtgagagatagctgagacccggggtgtggccgctggtggggatggatcgggccggggggggttcgggccgtggtcaggccgtggctgttttgtggtttctgggtggagattattatttggtttttttacgtgctgacctatcctgtcggggtttttaatctaaccattgcttttgttttag

SEQ ID NO: 219681 - DNA, 394 bp, Glycine max
tccttttaatgcgtcacatccaaaaccgagttcgttgtgtttacgatctttcgacagtagtcggtgagaggtgatgagtggaaatgacatccccattcagatatgcccccacacttgcaatgtggttttccaagtgatggacataaatcccgcctacagctgccttttggggaggccatggatccacgcgctatgagtggtcccctcgacgcttcaccataaactgaaattcgcagttggtggactcttggtgatagtgtcgggcgaagaagatatgttggtaagctgcccctcctcggcaccatatgtatatgcagcggaggaatcattggaaacagctttccaatccttcgaagtggtaagttatgcctctgtggaaacaaacccattgcta

SEQ ID NO: 219682 - DNA, 221 bp, Glycine max
gtgtcgttgggttccgtcacggctgccactatgcccgctgaggaaacgtaacggttttgtttctactggtggagttcttctgtgggatttccttttcggttgcgactatccccggtcggttatcgtttgggctcgccgacggcttgcttaggcgataacttctggtctgggcccttgacgtttagctccgttcgactctctttgaaagatgctatcgtttt

SEQ ID NO: 219683 - DNA, 382 bp, Glycine max
  unsure (1)..(382): unsure at all n locations
ntanaagatnggctaanattgtgttaaaacataagcacttatacaatgaatgaaagctggagttgctgcacatgctgtctaacattatgtcaaggaatcagatcgggctgcacaatgcacnaggcaagataaaatgtcaaatgaagaattgaagctgcatgatccacgatgtctgatacgatgtccatgacatccggcccgaaaatactggacacataaatctgttatatctttaacagattattgtgcagttagcaacagattatacgatctatctttaggaatgaattaaaagataattaaagttcgaattacaaacttgaatagttcgttcagggattaaagaataaagataaaaactaatagatcanacggtatcttt

SEQ ID NO: 219684 - DNA, 384 bp, Glycine max
  unsure (1)..(384): unsure at all n locations
cgcgtntagcatccgactaacgacttacggctgccggtatgcccgcgggggagtcgtnacggttgttctttacccgcagaagggtatcgtccggtttcgttagcggcagcctctaacaccgctgggttatcttaacgctacggtgtgtacggtgatttagggtatcgttgggttccgttacggctgccactatgcccgctgaggaatcgtgacggtttgctttctactggtggagtcttcgtgggatttcctttcggttgcgactatgcccggtcggttatcgttagggtcgccgacggttgcttggcgaaacttcagttgggccctgacgttagcccgttcgacctttgaaaatgcatcgtttctgggttggttaccgattat

SEQ ID NO: 219685 - DNA, 425 bp, Glycine max
  unsure (1)..(425): unsure at all n locations
ttaaaagaatggctaaaattgtgttaatactttagcacttatacaatgaaagaaagctggagttgctgcacatgctgtctaacattatgtcaaggaatcagatcgggctgcacaatgcacaaggcaagataaaatgtcaaatgaagaattgaagctgcaggatccacgatgtcggatacgatgtccatgacatccggcccgaatatactggacacataaatctgttatatctttaacagattattgtgcagttagcaacagattagacgatctatctttaggaatgaattaaaagataattaaagttcgaattacaaacttgaatagttcgttcagggattaaagattaaagataaaaacctanagatcaaacgttatcttttagatccttaagtgcagaattttcaggagaatgatagatctca

SEQ ID NO: 219686 - DNA, 317 bp, Glycine max
cgactacgatgtttttgggatgggcggggtgtggtgaaagtataaacctcttttacctccttgattaattatttgtatgtcgggatggcattactgtgggggggtggattatgttgccaatcttttccgggactcggggccgctccgggggtttggttggtcgtggtattggtcgtgaggggtggtgcgttgtggtgtcatatggtcatacggtgttggtcgtggaacgctttcgtggagcttaggtgggggggttgcctctgggatgtggtgcggtgtgtgtgaaggcttcgcggttttttttttcgagagagtcg

SEQ ID NO: 219687 - DNA, 336 bp, Glycine max
ttctttatggttgtatggttctgtttgaaaggtaccactggtacggtggtacccttttagtataataataaaattttccttctactgataaaaaaacatgtgcaaattttactgtaaattctcgatgaaattaaatagtcttttttgacttggcaatgagatgtgtttttccttaatctaatttttttatgataaaaaaagaagatttaattgcatttgttaaaagtgcatatggcattatgaattgagaaagatttcctttgcctggtccgtatcttcagtagattttacaacagacaaatttgatgatacattttcatcttatactcacaaatc

SEQ ID NO: 219688 - DNA, 311 bp, Glycine max
gtgtatagttccacaatttatggtcattttggagtaaattttgtgaacaaatattgatgtaacgttaacactgtctctagaacatttccatgggatttaatgatgaaatctgtgcattgtcatgtgaaaaagacgctaagttttgaattgcaaaaagtagcacttgggctaagctcaccatttgcgctaaacgcataaccaccactaagtgtatctgtagcacgcttatcacaaatgagaatctatcatagcatcagcatctaagccgtgcgctgagcgtgagatcagtgatctaatcacagaatgtgcct

SEQ ID NO: 219689 - DNA, 472 bp, Glycine max
agatactcagcttcactgaagacattgagtactatcatcaaggaattctatgcaaacctctacgacccagaagacaagtcacctaagcatgtgagggttagaggtcattcgatcacatttgatgaaaatactttgaacacattcctgaagacccttgtaattctggaagagggggagaatctctgcgcttattcctggtttccactcctgaggcctgatcctcaggagttggctgctaagctatgcatcctaagaaggggattccagttaaatgttgatggttttcctttgaagatcctaagaaagaacatgaccactctcgctcatacctagagcgttctttccttctctaacttggatcctacctcccacacatctgatgtcacactagacacggtcaagttaatctatggaataattatgaagatggacatgattgtggattacctcatctaccaccatatttctctta

SEQ ID NO: 219690 - DNA, 479 bp, Glycine max
  unsure (1)..(479): unsure at all n locations
cactcacgctgtaactattcgcattattcttactcttgctctatcctatgaatggaaactgttccaacttgatgtgaataatgccttgttaaatggtactcttgaagaaactgtttttatgatacaacctcctggttttgaagttgcagacaaattactggtctgcaggctaaataaatctatctatgggttaaaacaagctccaaggcaatggtatgacagactcaagtctactctgttacagtttggctttattggcagcaagagtgattcttccttatttatctatggacatcaagtggatgttgtttatctgttggtatatgtggatgatataattctcacaggtagctcagccactctgattcagcagctcacaaacagattaaatattgctttttctcttanacaacttggtcatctggattacttcttgngtttgaaaatcaaatatttgtttaacagtgctatcttaatga

SEQ ID NO: 219691 - DNA, 470 bp, Glycine max
  unsure (1)..(470): unsure at all n locations
nntctccccaatttttataaatagggggagaagtgaagtatacaagggttcatccccttangcacttctctctctttcgaatttgcttaggaaaattgtttccatgaagaaaatccaagcctatgcgcttccgtaacgtttctgtgagtgatttcgcgaaggttntcgaccgttcttcgacgttcttcattcngtcttcatcgatcttcagtcttcaacgggtaagtacctcgaaccaagcttttcgattcattctatgtacctgtggtggtccacattttgtttcatgtatttttattctcgttttcattcgctttctatacccncttttgacgtgcttcagtcatttatttaagttgtttctcgtctaatctaaaaataacataaatttccaccgttcattataattgtagtattcgttaatttctggtaaaatgaattccgaccgttcggtcgtggcgtaaccacgt

SEQ ID NO: 219692 - DNA, 469 bp, Glycine max
  unsure (1)..(469): unsure at all n locations
cttggaaaatgatttctatactccaaaatatacagttatgcttgtcctgaagcttataaagaacaattcacttgtcctcaagtgacaaatacagtggccaatcaaaagaaaatggtgtttgattcatcaaggacatcaaccatatcaactgaataccatggaatgcttaaatcaattacttctcacaagcatgcagttttttcaaagataagagcacaagtattagagtcacaactgaaataagctagtaagcatgacaaaaatcaaggaaggatcatcaaccaaaacctcacagtcattgtttcactcaaactcaagntgttaggcttattccatcataaataaccaacataagttccaacctttgcatttcatctcctattatacaacaatgaacacacaaaaatgaattcgaaggactttctacgctcgtaatggggttgggctgccaaaattcatggttttccta

SEQ ID NO: 219693 - DNA, 481 bp, Glycine max
  unsure (1)..(481): unsure at all n locations
tactcatcttaccacttccgactaaacttncagctggagctcatataccctcttgtgcttggcctcggacgtatatattttcaaaagattgctgtctggttttatgtttgcatatcctgcttttaactggcatgttcttttcttctgtaactgcaaaaaaatatttacttgttgagtggcttctaactttaataatctttaacaatttttaattaaggaatgatgcccattgctgattgcatgaacaaatgaattggaatccttccaatcctttgaataacttctcatgctatcatgcatgaggaatatagtgcaattttattcatatgccgacatatataaattcttgacccaatcaaatatgttattaacttattatctattagtatgaagttctggtttgaatgttacatttcatgtagaagagggtggatctgagtatcccagacacatgccaggagctgatcacaagcaacccaat

SEQ ID NO: 219694 - DNA, 448 bp, Glycine max
  unsure (1)..(448): unsure at all n locations
ntgcacttgataatggagacacatgatcagcgctaggcaatgacattcatggtgcttcgaacaaaggtggagtatggacgattgccttgagggtccgcacttatgcaatcatgaaactcagctccgaactcgaaagtggaggacacatgaacagccctaatcaataacattcatgtggctccggaacaggatgagaatggaggattgtcttgagggtcctctcttatgaaatcatggaacacagctccaaactctaaagtggaggacacatgaatgacaacgcaattcattcatgtgactccggaacagggtgagaatggaggattgccttgagggtcctctcttatgcaatcatgacactcaactccatactcgaaagtggagaacacatgaacagccctaagcaataacattcatgtggctccggaaaaagggtgagaatggagga

SEQ ID NO: 219695 - DNA, 458 bp, Glycine max
  unsure (1)..(458): unsure at all n locations
ntcagccacttcagacaaaaataacattgtactcggatttctgattgagtaccgtaatatatcgagacgctcgaaattgaatgttgatgctctgagcaaattcaaacgacaataaatctttactcggatgtctgattcagtcccgtcacatatctagatgctcgaaattgaatgttgatgctctgagaaaattcaaacgacaatatctttttactcgcatgtctgattcagtcccatcacatatcgagatgctcgaaattgaatgttgaagctctcagccaattcaaacgacaataactttttaatcggatgtctgattgagttccgtaatatatcaagaccctcgaaattgaatgttgatgctctgagcaaattcaaacgacaataacattgtactcggatgattgatngagtcccgtattatatcgagacgctcgaaattgaatgttgatgctctg

SEQ ID NO: 219696 - DNA, 435 bp, Glycine max
  unsure (1)..(435): unsure at all n locations
ttgagccaattcagacaacaataacgttttactcggatgtctgattgagtcccgtaacatatcgagacgctcgaaattgaatgttgaagctctgagccaattcaaacgacaataacttttttctccgatgtctgattgagtcccgtaatatatcgagacgctagaaattgaatgttgaacttctgaggtaattcaaacgacaataactcttttctcggatgtctgattgagtcccgtaacatatcgagacgctcgaaattgaatgttgaacctcttagctaattcaaacgacaacaactttnttctcggatgtctgattgagtcccgtaatatatcgagacgctcgaaattgaatgttgaacttctgagctaattcaaacgacaataactttnttctcggatgtctgattgagtcccgtaacatgtggagacgct

SEQ ID NO: 219697 - DNA, 458 bp, Glycine max
  unsure (1)..(458): unsure at all n locations
ttgaatcccagtccagactctctctctataatcaaattttaggcttaaatagctggccttgtttgtgctcatgcgcttagcgcaattatggaccgcttagcacacattagtgaattttggcttagtgagtgcctttctcgcttagcggatggactgaagcggtgtgcttagtgagatgaagcggtgtgcttagtgaacctatacagctcatcttcttccagagtcttcctcgcgcttagcccatgagtgttgcgcttagtggacactcgctatgccagcagattggctttgcgagaaggtgaaaaacaacacttttcaaagcttgcctaattaacctgaaattgagagacaatgattattaaacacacaaaatggaagtactaagtatttattacctatacttaacaganaatacttataacactacaaaataaccataaattggaagagttagatac

SEQ ID NO: 219698 - DNA, 446 bp, Glycine max
tcaaaaaatgggagaactggcctagactatggctgttataaaacaacacttattgtaggtgaaatgcttgaaccaatgaaattgcaaggccgaatccttatcttcttaatctcagcactttgagtgaccattaatatgactatttggcagcttgtacagcccttgaggagatctccacaagctcagccatctcttatatggcttcttgcacttttccaaaactaactataaaaggataaagtagagttttgccaaaaatggtaaaaattgtttttgctaaaattggtaaatattatcctaatcttctagattagtgtgctaacctcccttgggatatgtgcacttagagtgaaccttgcacaaagtccactcacacagagacaaataacactgtgactcaatgcacagtacaattcttgcacagatggaaatctagctcagaatat

SEQ ID NO: 219699 - DNA, 362 bp, Glycine max
tatagggaaattgtataacacaaccataagatctgtgatgttgtatgggacagagcgctggatagtaaagagtcaaccagaaattaaacgtcgcaaagatgatttttgcagacagaatgattgagagagaaagtgagagagagcactagatagagaaagagtgaccaagtgagagagcgatacagagagagggttattgagacacccagtctcagctatgccggaaaagggtaccagcgacctactgcgacgatagtggccgcaagactaggggaggggacgcagaacaatcggagggatgcaccacatgtgtattcattctacttcacgcgattcccacggaatgtgcgaaaacgaactat

SEQ ID NO: 219700 - DNA, 449 bp, Glycine max
  unsure (1)..(449): unsure at all n locations
tcatctgatgtgtagtaggtaatttctaattggcatattaatcattatagaataaaatatggtgtatgcttttgcgggacaattttaaaattattatcttctttttctaagtagatgtgattaactacactaaacactggcattggtgacaaatatattgttcaaccttcgtaccagtttttcgcgaacaacgattttagccatggagatgaagttatattttactgtaggtattattattattattattattattattattattattattattattattattatttagtttggttcatgtttttccttcattactgatatttcctgtcttttttttcctttctgactttcccactcgcaaggtaatccacgaaaaaatattcagccgccaagnttctttctttatgttntggtttatgcatgtttattattattatgattattattat

SEQ ID NO: 219701 - DNA, 452 bp, Glycine max
  unsure (1)..(452): unsure at all n locations
ctcacctaaagtattgacgggaaaaatgagattgagtggaccttctcctttgtagccaacagcctctaatgaaagaaaatccctttctcttttttgccaagttctgatagaacataccctattctccacctaatattttttcaacaaaaattataagaaggaatttgggactttatttgggtgaatttcatacttaaaacatcagccttatttantaataataaacaaaatacttataattgaataagaaatcttttgaagaaacgtgattaagtatatagtgctaatgaattaccaattaaattattgatttacttgccaacagagcccctgccctcaatgatttctttttgatgggattctatcccgcacgcacaggttatagttacagaattctatatgaatanatatggtntttggtattttctcaccctctttgttaatattatctc

SEQ ID NO: 219702 - DNA, 384 bp, Glycine max
ccacaataactggtaactcggatgtgtgattgagtctctgtcatatatctagacgctcgcaaatgaatacggaagcacgtaacaaatgcctaccgcaataacttttaactcagatgtccgaatgaatcccgtaatatatcgagacgctcgtaattgaaaacagaagctctaaactaattctaacgacaataactctttactcggatgtctgattgagtctctgaatatatcgagacgcttaaaattgaaaacagatgctctgagcaaattcagacgacaataaattttaactcggatgtctgattgagtcccctaatatatcgagacgctccaattgtaaacggaagcttgtagcaaattcaaccatagatacttttactcgat

SEQ ID NO: 219703 - DNA, 459 bp, Glycine max
  unsure (1)..(459): unsure at all n locations
atcctgactcaccataaaccttgacccatggtgagaatgtctatccttaccctcggaagcaaaaaagaatagaagggaaatttccaatcaaaaaagaatagaaggaaaatttccaatgaaagcaaaaaaagaaaagaaggaaaattccccaatcaaagagtgggagaaagcaaaaagaaaagaaaggaaattcccaatcaaagaatgggagaaagtaaaaaaggaagaagaagaaggaaagaaagctcctgatcagggatcgaaggaaaaacagaagaaatgtgcagagaggtctttagactggacaatatctgaacaatacagaattgtcaccaaatgaacaaaaagaaggaaaggaaaccacgacctanaatggtcttctccctttgattaccaaccaaaatcccgtgcgctagcgactntntcgccccgcactaaacaaaanaaatagaanaagaa

SEQ ID NO: 219704 - DNA, 470 bp, Glycine max
  unsure (1)..(470): unsure at all n locations
ctatataatactcactctngagagagagagagagagacacagggaagatgaggtactgtggatgaaanatgatgcgcccggcttcttaaccattctttgttctgcgtgtgtccgcgactggttttggacttatggtgcgttcgctcaagctcctggatgctcccgctaattacacagcgcctctctcaagagcttcttcttcttcttcggagttcaacacttcattcaagaaaggctcgcgcgtgataggcgtcgtggcggttccgcgcgtgggaaagaagccatgcatgaccgtggaagacatgggggaggatctcacaagtggtgcctggaagaaagagtctctctgagtgagaacgatgattcaaaatccatttcttgccacggtaccttcgccattcttaatatgatccctactttcggctctctgctatggtaaataaatgtttttatatatcgtaaaatccaag

SEQ ID NO: 219705 - DNA, 451 bp, Glycine max
gcgacacctaaaactcagcttccccagaatgcgagaactgttatgcttgactccatcaagcaaagctaagctatacatgccataccacaaaagcgcgtatctattataagaaatatgggttaagacttatgaattggctatcttcagaactatatgtcatgagcacgttaaaaattactacctcttgtttcgcgtgctaataaatgtttgcgagagagttgtctgattattcattcactacggatgacagggcaaataacgttcgtcattggtgggatgaatgtaaatataccctgcaacactactattttggtacaaaactacttttggctaatattacgataagctccagattattgttgaaacttgtccgtggatagagtctttctagatgggagaggcgacaacgtacaatgacaacaattgatattttcaggctagttccatttgt

SEQ ID NO: 219706 - DNA, 456 bp, Glycine max
  unsure (1)..(456): unsure at all n locations
tcaacatcagaccacttncaggtgctggaactacttcacatggatttgattgtgcctatgcaagttgaaagccttggaggaaagaggtatgcctatgttgttgtggatgatttctccagatttacctgggtaaactttatcagagagaaatcagaaacctttgaagtattcaaagagttgagtctaagacttcaaagagagaaagactgtgtcatcaagagaatcaggagtgaccatggcagagaatttgaaaacagcaggttcactgaattctgcacatctgaaggcatcactcatgagttctctgcagccattacaccacaacagaatgggatagttgagaggaaaaacaggaccttgcaagaggctgctcgggtcatgcttcatgccaaagaacttccctataatctctgggctgaagccatgaacacagcatgttacatccacaacagagtc

SEQ ID NO: 219707 - DNA, 438 bp, Glycine max
tcatcttccacgttcaatttttcttttatcccaacagttctgtctgatgcccatctcctctgatggcttccacgggcacaaatcaaacataccaactctagcaattttcttgcatcttttatgcaagctattttatcatattatatgcagtcaatagagctatacattccccttgcatttattatacaaaggcagaatgtgagaggcatctttatatggaaatatttcagcagcatggatggatccaaaatttggacccttaatttttcaggacactggattatcagtgacaatagaaggaatatattcttgggaatatgtcatactattcaaacaggatggtgttgctgcaccataataaaagtaagccatgacttttgaccattcttctgcactgcgaatgactgagagaccacctaatggaagttaagtaaagtc

SEQ ID NO: 219708 - DNA, 458 bp, Glycine max
  unsure (1)..(458): unsure at all n locations
tgaacttgatcgtgatctttgtcttataaaagatgaagtattgctgaaaatgaanagaaaaacaaaaagtctaatcagtaagattattcaataaccaaaaaagagaggaaagaagaataaatgaataagaagccaagctagttagaataatcgttattaaaatatatccttgtctcataaaacttcttgtttttttttcctattaattactaattaatggtttttctgacattcaatttgcaaataggttcgtggagattatcctaaagcagagcagtatcttgaaagagctattttggctgatcctggcgatgctaatgttttgtccctctacgcggatttaatatggcaaacagagaagaatgctgatcgagctgagggctattttgatcaagctattataagtgccccggatgattggaacataaatctacatggatcatggtttttcttggttg

SEQ ID NO: 219709 - DNA, 453 bp, Glycine max
  unsure (1)..(453): unsure at all n locations
ggctcgtnctgctgatatntatcatgcagactnttctgatgatgaccgaggaacaattatggatcaacttgaaacttatgtgcttcaagtgagaagaaatgcttctttttccacttgtgaagatgttcaaagtttggctatgaagatggttcaaactgagaaacatttggtatttccattggtttataaacttattgagctagctntgatattgcggtgtcgacagcatccgttgaaagagctttttcagcaatgaagattatcaagtctaaattgcgcaataagatcaacgatgtgtggttcaatgacttgatggtatgttacaccgagcgggagatattcaagtcgcttgatgatattgatattattcgaacatttaccgcanagaagtctcggaaaggacacttgcctcgtaattttatttaacccgctatcgtaagattatgtntatct

SEQ ID NO: 219710 - DNA, 426 bp, Glycine max
  unsure (1)..(426): unsure at all n locations
ngagtcaatccatgtatttgttgaaaataattgtgtatgtctaagatctaatacattatgtaatcaattctaattccaacaataaagtattattatttctttattatattatattgtttgataaaaatagttgacttcataaagttcttgattaaaattaaagatttgttatcataatagagattataaaaaagagaaacaagtctcttatacttttaatataaattgttcttgatcataggattattataaataagacattaataatttggatagatcgatatatatgtgataatattcattggatgaatattaatagatctaatttattaatttatatatatatatatatatataaatgatgtgcatagagatgtgatcattgaaccgactcaattgagattttctattgaataatattacctt

SEQ ID NO: 219711 - DNA, 412 bp, Glycine max
  unsure (1)..(412): unsure at all n locations
tgaaacataacatctattgtaggtaccaccgctttagcaactttggtttttatcgctttctccattgcatcctaaaataaccaaaaagagaattcaccatgtaatacgtattctgaatcggtaataaagaaaatggaaaacaaggacaattgaaataaaaaatagtatgcaggatcaaaccatgaaagcatacgcagaaatggacccctaaatatatatttttatcaaaaaggtttttcctattaatagttgatagttcttgcatatagcanacccttaagaaaattaaatatatatatatatatatatatatatatatatatatataatcaaaacaccgtctaacactcattcttaggacagggataactggacaagtaacccatggatgattaaacaatcccttggtgtc

SEQ ID NO: 219712 - DNA, 464 bp, Glycine max
  unsure (1)..(464): unsure at all n locations
atattctgcatattatattcttagcagggctccttataaaagttttggaaaaaccccttatgagttatggagaaaaagagaaccaaatctgaaacatcttaaagtgtgggagtgtcttgcaaaggttaacattcctattaataagaaaagaaaaattggaccaaaaactattgattgtgtttttgctggatattttttgcatagtactacttatacattattggttgttaattntgaagtgtctgaaatttctaataatactattagggaatctagagtaaccactttctttgaaaatgtttttcctttgaaaaataaattgtctaaatctgtttgtgatacttgttgttctaatttaccatcttgtagtaatgctaataagaatgttgtttttgaacctatgaagagtaaaagatctaaaaaatgctaagggaatttggtttgaatttattctttttacttgg

SEQ ID NO: 219713 - DNA, 374 bp, Glycine max
agtgatccctacaaactcatgttgacacgtgcccctgcattttgcaagaatgcttacaaccatgaggcaattgtgcgtatcgcgaccttaactttctttaatatatctaattttgcagcataacatgtacatatctatgtgtaattatttaaatcatgtttgacacggtgggatgacagggcatatttatttatggactattacatgcttttttcatgagtaattcatagtgttgggagtatgaagataccccttggtgtaattggatttccattacaaatggtaatttgacactgattctctaatctgagtttaactctcgcttgttattgaacacatattgccctaccccttgacaacactaagcaaccaac

SEQ ID NO: 219714 - DNA, 431 bp, Glycine max
  unsure (1)..(431): unsure at all n locations
tgaccaattgtgtatgataatcttgttgttcatgcttaattttagtggattactctgatataatagtttcaactcaagacanattgtggacgtagctaacaagtgaagatgatcatgtcggctgagaatgatggctctgaacttaatagtaggatttactaacttattgatggatgagaagactaggtagatgctgagaactatttccctctggatgatctcctttctaaacttactctgttttactctattatgaatgtcgttcttcctctattcatttaggtaattctctgccttcataattaatagtttggtgctttgcggaattttctcatatatatgaccgagaaagaatattttgcattgacctattaaaaaatcatactaccatcttcagctaccactattatgccttgatttattaatgtcat

SEQ ID NO: 219715 - DNA, 449 bp, Glycine max
ctcagcttacacttggtcgatcctataagttcacaagacccaagtctcgacgtagctccataggcttatcaaaacttggggcaaacacgtcattggtccaaggctcgataaacccaaggttcacccttggtgagtgataattactaattataggtatattttgggattaaattatataggaattgatattcttggctctcttatttgttccttttcgttcaaataattgttattttaacatcatttaagtttttatgcagaaaatattaaaagtggatgaatttatgatggttagtaagtaaagtaaatcccaaaagagcaaattggaaatctgaagaggcgcacttagcgtgtcccaggcactcaacgtgagcctcaagcttagcgggaacaacacgcttagcaccagcatgataattcaagaaagtatgctaattcaagaaagagtc

SEQ ID NO: 219716 - DNA, 457 bp, Glycine max
tgtagctgcatttgtccattcattgtgtcgcacaccgaatatctgtggcctctgtttacctgtgcacatctcaattccttattggtgaattttttcatctgttagctatcataatggtaactcgtacgtgaatatttaaacaaggatacctggataccccttttatccatatttactatcaattatatcacatgttatagttacagaattaacatgaattgggtctaagaaaaataactaattttccaccaaacacgatatctataggaaaccaaacaagaaaataaaatagcataaagatggttacctatatgaatgtaagagaagataataagacacaagaagcaggctgcacaaagtgaaaagcaacatctccagatatggtaagttagtaaaaagctagaaaagctcatttgagaagaataaaatataatgaatatgagaaaatagttcaata

SEQ ID NO: 219717 - DNA, 458 bp, Glycine max
  unsure (1)..(458): unsure at all n locations
gctaagctccttcaactgcacaaagctattaatattngattgtttccctgtggaaccttcacccgacgaagacactcacaaaaacttatctttatcttttaggacatagtatggcaggctgggggcaagtcaatattcttcccatcataccttggatgcaactgtgaacgtatgcccatattaactagatcttgacaggtattcaagtcatccttcgtcttgccctgaatgttaaagagcgttccagtcacattgtcccaaacattattctgcacatgcataacatcaatacaatgtcttacgtcatgattagaccagttctgaagatcaaaagaaatggacctcttctccatatgcaaatcttactcttatcctatctttggccttctccaactcatgattcaggcgtagaacccgctgatatacctgttcacccaccaacaggatccgcgcaatat

SEQ ID NO: 219718 - DNA, 461 bp, Glycine max
  unsure (1)..(461): unsure at all n locations
tctaaatccaagattgtggtcagtgagaattgcatctaatgattctaaaattgcactcagtcctgaggatattgtgctcattgtgaattgtgactgttttacatcaaaaaatgtctcatcgcgaggaacataaaaatctaaacttctcttctcagatgatggatctgtaaaacaacaacaacaaaaagtaaaaagcaaatcgtgttaacttacatgttcaaaacttcaaatccttccacaccaagcacaataactagtatcactattacagaaaactttttagaacgattaaaaataactttttagaacagttagtatctaaaaagttattaaagctattataataagttttttttagatcagttatgtccgttctaaaatgttcactttaaaaataaatgaacaaacaatngattaaagctattattaatcagggttttttttttttgaagtaagctatg

SEQ ID NO: 219719 - DNA, 450 bp, Glycine max
  unsure (1)..(450): unsure at all n locations
cccgcttattganattattcatnctntaagaacttaagtaagtctttgcaataatgaaagtcatgcttgttgaagtaataccaataatttccaatagtggaagatgatacttattcgtcttgcaatctgttagaaatgaatttaggagtttgatggaatctgggtgtgcctacattatatctctgacgacatcttcattgtccaattttctaaaccaataaacatattggttacattctatcaactctattagatgttgtatttccgtccttagacctttttcttagaaatgatatctctaacatttattgtatatggttttgatggtactaatatttgtctgatcttgatctttgattgtcaacanaatttgactaagctctaccatgtttttcataaattagttaaccattatattttcttcattgcttaaacaaccaacatatgaat

SEQ ID NO: 219720 - DNA, 436 bp, Glycine max
cgcttagagctgatttatgggtatgggcttactgctctttctgtgctgagcctggctgaagacacctactgcacttaccgcactgatctcacgctgagcatgcggtcttgatgttgatgctctgccatattcttttttgcactaagcgcactgaagctgctcttagcgtgggatgcacgcttagcccaactgcagagcttagccccaactgtcactttttgcacttcaaaacatagcctctttttcacctgagaatgcatagattcatcattaaatccaatggaaatattctggagacaactgtaacaataaaacaagattatctacgagattactccaatatatccataaatcgggaaactatacaagtcttggaaaatgatctctatacacaagttaatcgtattaaggcgactaacagctaccactagatgtc

SEQ ID NO: 219721 - DNA, 461 bp, Glycine max
  unsure (1)..(461): unsure at all n locations
agaaagagcaacacacatagtcatctaataagtatcaagtatttaanacaaattgtatgtataaaataaaagtttgtgtgctgctatttaagaaaagggaaagctaagtgcagaaaggcaagtaataaagcgggaataaaaagaaaaaggttgatctatggatgaatgctctcttagaacctaagctttngcatcctagaaaaaccaagaattgattacagcccaacctcgttacaagcctagtaaagtccttcaaattcagttggtgtgttcttgactgtatggcatgagatgaattgcaaatattgagacttatgttagttgttgattgttgaataagcctaaacacttgtgtttgagtaaaacaatagttgtgaggctttggttaatgatccttccttgatatttgncgctcttactagcttatttccagtgtcttccttaataatcaagtcacatct

SEQ ID NO: 219722 - DNA, 467 bp, Glycine max
  unsure (1)..(467): unsure at all n locations
nntgtgggcaacaatggtggatgggagaaaagaagaagatggctgcgtgagagagagagagagagagagaaaaggcttctgaatttctgctttggctgagtgaggagagagaaaagctttttggttttaataaaagggttttccctttttccattattntattcaagctctgccacatgtccctatttgattggagcaaaagggcccactttctcnttttgactgtgacccatactcagtcacaaaagtgagaaaaatctgacctttgaaacgctaaaatcctgcctcagtttgcgtgccgtttctctgattccagtttctcgcgtttctctgcgtccgccgaggccagttttcgaaagcaagcaatatatatatcaaaacgctcagaataaaaccccgagcgtggtttagagggtggtttcgttaatatttaagtcgcacgcaaaacgatgattttaactaattag

SEQ ID NO: 219723 - DNA, 470 bp, Glycine max
ttctatgctttcttatcattgaaggagtgttgctagatctttctattctgttcttgaaacttgtgatatcaactctcagatgtcctgcttgattacattcataacactttggaacagaagatgaatcttctcctcttttctttggtttgaagtatgctcttcttctgatttcctttgtttcttacgaacttattgaatctctttacaaaaacaactagaatcatcatcttcctctatttcattcagaacttctttatcacttccttcttgaattgaaaatgaagctttaagtgcgactcctttctttttcttggcattctcttcatggtgatttagtctcatgagttccatttcgtgctcctgaagcattccaaaaaaagttgcaagagacatgctagtaagatctcttgattctataattgccgttacctttggttgccattccctgcttatacatcttataactatgt

SEQ ID NO: 219724 - DNA, 454 bp, Glycine max
  unsure (1)..(454): unsure at all n locations
taaaggaagtgaacgaattagcatatgcagaaatgtctccgcattgattgggaaatttgttccccaaattcctgacaaatgtaaagatccaggtacatttagcataccttgcattatagggaatagtaagttcgacaatgccatgctagatntaggagcttctgttagtgttatgcctctgtctatttttaattctctatctctaggtcccttgcagtcaactgatgtggtaattcatttagctaatagaagtgttgcctatcctgttggtttcatagaagatgtcttagttagagttggtgaactgattttccctgttgatttttatattctgaatatggaggaatggatttctcaaggatcagttcctatcattctaggcagaccctttatgaanactgctagaactaagatagaatgttatgcaggcacactatccatggagtttggtgat

SEQ ID NO: 219725 - DNA, 454 bp, Glycine max
  unsure (1)..(454): unsure at all n locations
tanactntntntaccatgtatntacatctgaaaaggctttgagttcagcaagtcatcgtaaaattgatgacgatgatgataacttagacgagtttcttgagggggtgttttcgtgatcctggctaatttgattgtggtaacaaaaggattcatcaaaagagttaagaaaaactcctatcgagttcttgtattagagatactctaaaattgaactaagctaacataaacatgtagtatttaacttaaacttatcataatttttatattaaattctcaaattaagtaatgccacatgatatcttttttacatttacaacaacaagttgatatgagatctatttagaacaagttgcagaatttcaagaaaacatttacaaagaaatgacacccagtttttccagtgagacaaagtaatagtaaaagcatacaagtatagtcaacanacttgtggata

SEQ ID NO: 219726 - DNA, 462 bp, Glycine max
  unsure (1)..(462): unsure at all n locations
tgtggagtgagacctactggcttgtttgtcttatataagagatgtaatataaaatcattcatgcgtctttgctaataacttgaagctattgaaattgtgtaggtctacaatggtattagagcctctatgaccaagtgtctagagttcaattcttgctgctcccattattctaacgagaaggtaggttgacttgtgcattatccatttttctagcccaaagggctcttaagtgaaggggcattttanagttgtaatatatagccattcatgtgtcttcatcttacagattatgttttggggaataagtggttcatgacatctgaatatacttttcatgattcatgtgtcttcatcttacagattatgttttgnggataagttggttcatgacatctgaatatacttttcatgtgtaataacactgaaaagtgtaacctattgtcttagaaaccctgtgccttt

SEQ ID NO: 219727 - DNA, 461 bp, Glycine max
  unsure (1)..(461): unsure at all n locations
ntntcgggtagaggatttccttgatgatgacaatagctctccttacacatactaaaaagggaagaagtcaaagaatccaaataagcacatatcattcaaacaaagaacaattgcctacatggaaccttttacacttgatgtgtttatctcaaagcgctttgtatcggcttcactcactcatagggtaacaagcaaacaggttgcagttgccgggaccaactccaaggacataaaagctgttcttaggtctcgttcagacataccagcatgcatagcaattggtaggattttagctgaaagagcaaaagaagctgatgtttacactggttcttatactccaagggacagggacaagtttgaagggaaaatcagagctgtagttcaatcacttattgacaatgggattgatatcaaggtttatcttgattgagtttagtccctcaagttcgtgggactatcag

SEQ ID NO: 219728 - DNA, 440 bp, Glycine max
  unsure (1)..(440): unsure at all n locations
tgttcaataattcactattgntttcacccactccttctataagagactngttctttcttagttccctaatcttctgtttagctntgtcgctaattttgaaaggtatgaataagggtttttctatggggatgtttgattgagattcttcacgagatttttgtttggaaattttctttgttatgatagactctcctaaaacttgcaaatatttgttggtataatttgtctgttccattaggctttttgatatctttggaagttacttcttcgttgatatcttttgtcctaaagggactggccatgacaggtttatcattactgtctttgatctttggcagttgatattgtgttgtgagaggtaattccgattggattcactcaccatccttgatctgccaattggtaattacatttgttgttggattacctatgatatcttg

SEQ ID NO: 219729 - DNA, 451 bp, Glycine max
  unsure (1)..(451): unsure at all n locations
tntcaccatccatgtttgtgagcatcaatgctccattttataaagccattttcaccacaaaaggtcattcatagttcagggcccttttccttctgatatatatctgaacatgtggcaccttcttcaaaacaaggtctccctcattgaatttacacgagcgcaccctctggttgataatgttcttcgctcttgtttactgcccatgactcatagcatccagtatttttccctcaataagattcaaccaatcaaaaaacacctgtgcccattccacctcctccaccttcgcttccgatagaaccttcaaataaggaatctctacttcgaaaaagaggacaacttccatcctgcacaccaacaaaaatagggttgccccagtaaaagtgcgcctagaattttgataatcgtgccatgcgaatgacaacatttcatgccaatctttgtatgtcat

SEQ ID NO: 219730 - DNA, 464 bp, Glycine max
  unsure (1)..(464): unsure at all n locations
tctngaacgtangagacgatgagtggagtgagagggagagaatgagcacgaaattttgtgcctcanaagaggtctgaactttgaagtgtaattctcaaatgatcaaagttgaaaaaattcacacacatggcctctatttatagcctaagtgtcacacaaaattggaggggaaattgaatttctattcaaatttcacttgaatttgaaattgaatttgtggagccaaattttggagccaaaatttcactaattatgattagtgaattttagttatggttcagcccactaatccaagatcaagtccaagattgtccactaagtgtgctttggtgtcatgaggcatgtaaagcatgaaggacatgcacaaagtgtgactatatgatgtggcaatggggtgtagcaagcaaatgcttaccttcccctctaanatttaattggattaaagcttctccaattcaattaaa

SEQ ID NO: 219731 - DNA, 437 bp, Glycine max
  unsure (1)..(437): unsure at all n locations
gtgctctanattacattgatgtttgtatgtattggaggatggtgtatgccgtttcttgtttaagggtagcatttcttggctaaactaactttccaaatgtttgccttcgcaagaaatggccccgacgaagcttgcctcaaagaggtccacgaaggacaaggcggccgaaggaactacttccgctcctgagtatgacagtcaccactttatgagcgctgtacaccatcagcgcttcgaggccatcaagggatggtcgattctccgggagcgacgcgtccagctcanggacgactagtatactgatttccatgaggaaatacggcgccggcggtggacatcactggttactcccatggccaagttcgatccagaaatagatcttgagttttatgccaatgcttggccaacacatgaaggcgtgcgtgacatgagatcct

SEQ ID NO: 219732 - DNA, 473 bp, Glycine max
  unsure (1)..(473): unsure at all n locations
tgcttgtggagcttctatggaggctggatctttgagcttaatgaggtccttttatggtgattttacaccatggagatgcagcggaagacaaaggagaagaggtgagaggaggcgccatcaactagggaataagccatggaagatagagcttcaccaccaacatgagccttggataagaagcttggagaggatgcttctatggaggaaaagatagagggagagaaagagagaggggggagcacgaaattgaatgaagataaagggagagaagtttaactctgagttgtgtctcacaagactctcattcatcaaagttataacaagtgctacacatgcttctatatatagactangtagctttctttagaagctctctttataatacttccttgagaagcttctttgagaaaacatccttgagaagctatatcttagctatacacaccctctcataactaagctcacctccttga

SEQ ID NO: 219733 - DNA, 436 bp, Glycine max
ttgtatcttctcccccttaaaggagtgtgtgagagtatgtatttatactgcactttgtgaagctagacaagcacctactcgcctaaagttgactggtctagtggaaatattttgcactggttaaattaaaatggctggaaatgtttagtctaattatgttcaacctgaacaaaatgaatcgatcctctttgcgattataaactcgtcggttgagtctaattatttttttgaatacttttctactatcatttagctgatgcaaggcaattacaacaaaatgttatctaatgacaattatgagtgaatttttgcaaaatcatatattttctctttttttcaaaacaaaatcttgcgcatctacataataggaaaaacaatccaacacataaaattgattaatttgaattcatgttctttcaatccgatccaaactttg

SEQ ID NO: 219734 - DNA, 426 bp, Glycine max
  unsure (1)..(426): unsure at all n locations
tgcactttgaatgtgttaagatgtcattcatcattaattaatcatagacagctctttcctgctgaacgttagtaatatattcattttcaattttgacagagaatctgaacctaattcatgggaagatacaatgaaagatgaattataacgtgaaaaatatcctcgtatgccttggcatgatgttcattgtgccctttggggaccaccttgccgtgacattgctaggcactttgttcagcgatggaattatgccaaggttagtcttattttgcagttgcattgaagtcttgaagcattctggtcctattcctatattcccaacataggaaataatattttttttattaacatcagaggaacanagctccatatgagcaagcaattccattacttatgcctcagcatcatatggttattccacattac

SEQ ID NO: 219735 - DNA, 450 bp, Glycine max
tctagaacattcttcttcgaagaactctgaagcattttcggtgccacatcttcgttggatttctccgacaacacctccattgaaccgcgatagcttctagaagctgaaaaccaaaaaaggaaaacacgaagttaaggaactgaacttaaaactaccattgtaaaaatagtcaacgttttctcttaacggttaacgtcaaatttttatctagagacttaaatagtgaatttgaaaaaaaaaaaaactaggataagaattaaaaaataaagagacccatttaatgaattggaaaaaataaggggactcattttataattaagtctaaaaaaaattaaaagttttggtgactttggaatgggtcgtcgctcttcaataagttatatagaatttcaattgctactactacaagaataaaatcctcgatacgcgcactctccaactcggtttacg

SEQ ID NO: 219736 - DNA, 453 bp, Glycine max
  unsure (1)..(453): unsure at all n locations
nnttgtgattgtacttcaaaacatttctaagtgataaagttttcttcttgacttctctttgagttctgctcatggcttcttttacaagtctagttctaggctgatatgcagtggagttggaaatctttattccagtaatgaccttgggtattttttctgttttctttcttactctgtttgtgaggatatcttattctcctctatactggacacacttcctttctctcttcattaaactttcttctttatagagatctgaacttgtggaatttgtgtccaggttttgcaacagttgcagtctatgactctgatgaccaatctcataattttctttctgtttctcttttgttatttctcaattacacatcccgttgtttatacatctggtgttttaatcccttctatactagttgttcattgtgcttaatatagattcttctattttaatctcat

SEQ ID NO: 219737 - DNA, 447 bp, Glycine max
  unsure (1)..(447): unsure at all n locations
tggatatgagatcgaagaatctcgcgtatgaaaagaaatcttctctnacagtcgatggcatatgatcattggatgaagaagaaattacaatcgcttcatcgatggtagagaggacatgtctagaatatctatgaatacattggattagagaagaatgactaggttctctgcttgtaagtgtgaaatctgtcaacgcatgcaagaatataaagaagatgtgtctaagagatgggcgaggtcaaggagcctctagaattttctattgtgcactgcagatataatatattattaactttaataatattattcaaattctacttgcaaaatatactatatctagtacaattaatacatataaacccatcatacatgactgtaattaatgcaatatctgttatatttgatacatattaattaaacagtgaaatatcatttaatgtaacacta

SEQ ID NO: 219738 - DNA, 467 bp, Glycine max
  unsure (1)..(467): unsure at all n locations
ggaccttaaaactcagctgaatcataaacgaataaacgcttttgcactcttaaccacttatgtatgaattacgacagcttgaatcggttaaacaaagactctgaactactgaagaaaatttctaactttagaaactttctccttactcctacatcatgatgcatgatgcatatatgaaatgatggcgactaagttgcaacgcataatacaacaaccaatacaaatgtcactcgagagagttggccatgtaaaaggcaaaacttcttcaagctttaggactaagtcttcatgttgctccccatatctctaacaaacatcattaatccattntcaacacaaatttccctaagcacacaaaatagcccccaaaattgcattagaacacanaatgatggtacctaatgattctagaaattaaccctacgatgttgtatatgtattccaatggtttcccacccatagtactc

SEQ ID NO: 219739 - DNA, 442 bp, Glycine max
  unsure (1)..(442): unsure at all n locations
ntgacaactttaaagtagaagcatatgagccatgactttgaccggtaaaaaagggaatctaaaagcaaacagcaaagtcagaaagagagacattgattaatttattttgcttgtgcaacaatttatttcctggccatgatgatagcccttatgtactcaaaggaattttctggtttcctttctaacttgcttgttcacggtcaatggtacaaagctgattaacacactcagaaaatgatcgcctatcttccttcacaacctcaactttgatggtggtgggtgtccttcatcatgatgaatattgatgaagatttttccttttatgatgacccaaatgtcataattaagtttaatttgtaagtgttatgcaataatctattgtagatatatatattccatcaatttctatataagatcagttacttaattcattaaaataaaa

SEQ ID NO: 219740 - DNA, 449 bp, Glycine max
  unsure (1)..(449): unsure at all n locations
taatgctgatggttatccgttgaagatattgagaaagaacatgaccaccctagcgcagacatggagtgttctatccttctctaacctaattcctacctcctatacttctgatgtcaccctagatagagccaaactcatttatggcatcatcatgaagatggatatgaatttggggtacctcatttcccaccagatctccctcatagcacaacatgacaatccagacttggatatcgtgccttgatcacagctttatataaggctagggtagttcagtcatattcgaggtccctagagagcctgagtttgaccattaatttggcatatattaagaagaactgttggaatcttgatgatctagcagtaactttcagaggacctangaaagccaggggtaagagatctgaggccccttccacttcagcaccatcagaggcaccaacaccttc

SEQ ID NO: 219741 - DNA, 469 bp, Glycine max
  unsure (1)..(469): unsure at all n locations
cttgacttgagtcatcaagagattataaatatgtgaccatccttgaatcaatctttcaacatccttgaatcaatctttcaacatctctcaatattttcttttatctctttcaacactttcaaaagaactttctaattgatttctcttcatcattctaaaagtttttgttcaacactttctcttccaagaaaagttctttgataaaaaacttgggctattcatctttttcattctcttctccctttgccaaaagaacgaaggactaaccgcttgaattcttttgtgtctctcttttcccttacaaaagattcanaggactaacctcctgagaattcttttgattcttcccttccccttaagaaaaagatttcaaaggactaaccacctgagatatcttttgttcccccttacaaagattcaaaggactatctgcctgagaattctttgtcccaacacattggagggtaca

SEQ ID NO: 219742 - DNA, 466 bp, Glycine max
  unsure (1)..(466): unsure at all n locations
nggacaaaganagtgtcatcatgcagaaaatgtgaaacattactacaagattcttgcattacctttcacctgccctagtgcgttacccaaatggtgtggtgttgaccatcactcanaatgactctttattcatcttccgatttgtaggatcccggatgacaagatgcaaatgcatgcatgtttatgatcaaatgttaaatataacaattaaataggtgttatcatggtcaatnttacttaaatgcttacagaaccccgctgatcgagtgttagtggatgaatacgactaacttttgtgtataaaactcgtgtatattgtatcacacttctccaacttatagttgttctataatattataagtactttctgtaaatataggtaatagataatttatacttttgttttgtgtgtttaataatcaatttctctcaatttcaggttaattatgcaaattggcaaaagtgt

SEQ ID NO: 219743 - DNA, 373 bp, Glycine max
gggtcaggaacttttgacctctgtggggtgtattgccacaaccaagcttgccaatcccgacccaacccgagcatagtcagtcagtgagaacctgtgatgtacctaagcaggcgagctcctgacagtcaacagataaaaggaataaagaccacaaagcaaggaggcttgtgtggtggctggccagatgtgaactttgattgatatatgggatatggcctctggtaatcaattaccaagggtgggtaatcgattacaaggcttaaaaatgaagacgggagactaggatggtctctggtaatcgactaccacggggtgtaatcgattaccaggcttgaaaacgaggtcaggaagctaggagggcttctggtaatcg

SEQ ID NO: 219744 - DNA, 404 bp, Glycine max
  unsure (1)..(404): unsure at all n locations
ccgccaacgtgcaaaaatacttcacaaatagggtacaaaaacttgctaagccatgataactcctcatctccgtcacggacttatgtgtaggccattcttgaatggccctaaccttctcctcatcaactngcactccttttgaactctcaacaaaaccaagaaacacaacatggttagtacaaaagatgcatttttcaagattggcatacaattgttcttctctaagcacagtcaggacacgatttaaatgatcaatatgcaaatcaagtgaagcgctatatataaaaatatcatcaaagtacaccacaacgaactttcctatgaactctctcaagatatggctcattagtctcatgaaagtgctacgagcgttaattatgccaataggcataacttaccattca

SEQ ID NO: 219745 - DNA, 450 bp, Glycine max
tatgcgcatatttccttacgaacgttctcttgcacaagtaattctattaactaagaaaaatgcacccatacacaatcaaggcagcttcgttacctagattatttacacgtacttccaaggtgtatttgttacttacatcacacacatctccttggctaaatttacatacaggcatactcaaagcattttggggtaccaaaaattgcacatgtgcacatcttggtatttctaatacctatacatacgcaaacttcatgatgaatcttgactatcttcacaaaaaggtgctacatttcatgctttttttttttcaagtttttgctacttaaagccgcatgcaaattcaagcatattttcctttgctgactaaaatcgtattcaaattaaaaggtatattttttgtaatatgttttcttcacataacatgcaacacatttatatacatttctt

SEQ ID NO: 219746 - DNA, 423 bp, Glycine max
  unsure (1)..(423): unsure at all n locations
tcntctacctctagattctagtactttatattgtcttattatgtaagcactttatntttcaaattaatgttacaatcaaacatgcgttcttggcggaaatgccacctgagaacgaataatgcttaacgccccaataaaataatttattattaatttggctgtcgatcaaatacgaatgcaccattaaaatacaactttatattaaaaatacaattgctttttgactgctaaaagacaactactttaacaacttaataaagtattatccaaacgacaaaatataaaattgtaatgaaatattttaatcattaatgcatgttagacagtttataaagagaaacaccgactctggccatgctagctttgaccttctgaagtcttcataagtggaacctacgtgtgaagcaccaactctctcttcac

SEQ ID NO: 219747 - DNA, 348 bp, Glycine max
ccctcctctcgctttagttgtagagtgcgagcacttttgagatttaaacactattcattttagcaataaaatatcgtttcttgcttcaatctacaattccggtctctactgattaatggaaggctaagtctccaacgttgttttctcttgagatcaagcacaactctctttgggttctattattactattaaattctgatcaggtcttcctcctaaccaattactctgcatatgttgctattaatccatgcatgcttagtgctgcgattaagtgtctttgcgcttaatttacgttcatgcttaatgaacgcacatgattaactggtgtatgagttgctcaatcacata

SEQ ID NO: 219748 - DNA, 219 bp, Glycine max
ctgatggataatttaaacatgtaaatgacgtaccacgtggaagtgctacaacgtgatcctacaaatgtcctttgtgatgccgtggaaaagcatccatgctcaatgctggttgtgggtagtcatagttacggggctataaaaaggtacaggctcattttgattctagtgattatttttctgttgctctctaaagatataggccatataggagagtatgac

SEQ ID NO: 219749 - DNA, 187 bp, Glycine max
  unsure (1)..(187): unsure at all n locations
cacttgccgcatctttatcatcattttatttcaaagcgcaggaacaaataatattgacaacgtgtgcttaaattaccacaccagctggatattatngtctttgcaaaatgctatccactctgcacccggtgatttatcagttattatgtaattaatatgactaaaatcagctaactggacaaaagct

SEQ ID NO: 219750 - DNA, 392 bp, Glycine max
tttgtgcaagaatcagtccgtccaatggaacgacgactgtcaagtggcgttcggaaggaccaactgatgcctcatgaatcctcctgtgcttgtgccacccatgcctggaagacccatcattctatacatgactgtgttggatgagtcaataagatgtttgctggggcagcatgatgagtctataaagagggagcaagacgtctattacttaagcaagaagttcacagcatgtgaaatgaactactctttgcttgaaagaacatgttgcgccttggtatgggcagcccatcgtctaaggcagtacatgctgagctacaccacttggttggtatcgaagatggacccagtcaagtatatttttgaaaagcccgctcttatcggacagatcgctc

SEQ ID NO: 219751 - DNA, 298 bp, Glycine max
taatgatggatatggatatgactctagcacgctagacacaagagaagaggaccggaactataagtactatcgtccgattcagaaacaggaagtaaaggaagcgttgaaaagaatgagtaatggtaaggcggtggggccagacaacatacctattgaagtgtggaaaactcttggagatagacgccttgagtggctcaccgaactctctaacggaattatgagatccaaacgcatgccggaggaatggaggagaagcacgttagcgccaatctataagatcaacggggatatacaaaat

SEQ ID NO: 219752 - DNA, 455 bp, Glycine max
  unsure (1)..(455): unsure at all n locations
ngctaaccattccatacctaanaccatatctacgcctccgaggccaatcaagaagaactgctgctgtactggtacttcttgcactttcaggggaacttctctacatactcccttgcatttaattntgtgtccatctccaacttctaccacgtatgccggagtgtcatccatccacctttaattgtaattttttcaccaattccttgaaaatgaagttatgggtggcaccacaatctatcaatactttgactttgtgatcatcaatatttccccaaacctttaccgatcgtcgagaagtaaatcccacaataatattcatggataattggggtggttctcccaattctggttcgggttccttttcggagtctgtaacatcatcttcatctngtactaacattatccgaagttgtttatttctgcatacatgagaggtgctccatttttcgtcacag

SEQ ID NO: 219753 - DNA, 474 bp, Glycine max
gctttttcaaagtcaactttgaagatcatgcaagggttatatttgcacttggctttatctaaaacttcattagcaatcatcacaccatggataatataactttctttgagaatagcagtttgcctttcatcaataatgtgaggcataacaagggtcaacctattagcaaggactttatatactattttataaacacaccctataagagagatgggtcgataatcattaagagattgtgggttattggtcttggggataatggctatgaaggatgcattgcttcctttggggaatgtgccatctatgaagaactcgtccataaacctgataaaatcaggtgttaaaatatcccacaacctgttaataaagttgaagtttaacccattcgggccagggcttttatcaccaccacaagcccaaactgcagatttgtattccccttccgagaatctagcaacaaagctttccctctgc

SEQ ID NO: 219754 - DNA, 431 bp, Glycine max
  unsure (1)..(431): unsure at all n locations
gaagtgaccgataagaatacttgtagctttgagataagttatggaactctgggattgccaagaactgggcgtagacttggggtagagatgaactagtataaactcttgtgtgcttttctttactatttatctttgtgttcattgacaacagttcaaattttttattagataatacatctagttntgatctatcaagaaaatggtttttgatcatcatttgacaaagttttcttaatctatttttagctatatttgcatcagacgataaatgagttttcagtcttagaaaaagtnttaaatttctaaaaacacaattcaaccccaattcttgtgttatttctaaaaagttcaatggttgttacaagcaaattgttgctttatagaanagcaattacacaaagaatgatgtgatggttaatgcatanttctat

SEQ ID NO: 219755 - DNA, 467 bp, Glycine max
tcgaggaattgatccattgagatgagtattattggatagtatactgccattttcttataattatgactaattaattggctataggattaagctaaataaattgtgtaattacataatattctcttatttattattagatagtaattagagatttattttgctactctattagattgatgaatgtaattaatactgatctcacttactttgtttaaataaaggcttcatgtgatgatcaaaacacacacaacttacaacttacaatagtacaacatttttatatgatattagagcaaaatattcttatccttggatgaggtatcactaaaatcctgtcttacccggaatccactgtccccagtgggccatccgctgaccttttcaataaccagtttaaacttcacggccgaagcttcgtgacctttccagtcaataacccacgcgcgtgcatctcacgctttcaatgt

SEQ ID NO: 219756 - DNA, 343 bp, Glycine max
tgccatcttctcacaatgcgctaaatcacaatgctctaaattataatgctctcaatcaggatgttccacatcaccactaacagaatgcacagattcaccagttatggaatgctcatgatgatcaaaaggtataaacagatgcctaactaaactatgaaatgtcctatctatctcacggtcaaagggttgtaagtcatatggattgcctctattcatacactacattcaacatgcagaactatatgccttgtcatgtaaataaatgtgcaggtttgaactacatctaccctcaaatgatatccacatgacttgaaatcttgctagcaaccttatataatgatga

SEQ ID NO: 219757 - DNA, 456 bp, Glycine max
  unsure (1)..(456): unsure at all n locations
ngcgcttccttctatacaataattgctgatcattcttgtatgacaaaattgtacttttacccgtgatcgtgttgcagtcatttcatgtcacttttaggggaaatttggtcggattttttttttatctctcaagtctaatatacattttaaaaaattaacattcttgaaaaaggacatctccccccgaaatgtaattgtagccgtacccaagtttaatatattgaagaattattattagtatgtacaggtactaattactaaagtntggtggattcgtaatcttacaaatattatataattgtgtattggcccaaatggtcattgaaactaaatttctataaaatcctcaaaacaaatacatgatctgcgggccgtcaaaattgggagttaaacaacgtcttcaatgttttcaagaataaaatactggtatcattttcaaccaaataagtaggcttc

SEQ ID NO: 219758 - DNA, 455 bp, Glycine max
  unsure (1)..(455): unsure at all n locations
ggctctanantacattgatgtttgtatttatgggaggaggttatatgccacttttgctttaagagtaatgtcccactggtaaaactaactttccaaatgtttgccttcgcaggaatggccccgaggaagcttgcctcanagaggtccaggaaggacaaggcggccgaaggaactagttccgccccggagtacgacagtcaccgctttaggagcgttgtacaccagcagcgcttcgaagccatcaagggatggtcgtttctccgggagcgacgcgtccagctcatggacgacgagtatactgatttccaggaggaaatagggcgccggcggtgggcaccactggttactcccatggccaagtttgatccagaaatagtccttgagttttatgccaatgcttggccaacagaggagggcgtgcgtgacatgagatcctgcgttaggggtcagtggat

SEQ ID NO: 219759 - DNA, 463 bp, Glycine max
  unsure (1)..(463): unsure at all n locations
tggntaactctataggagacatcctataaggggctatatattcgggtccagcaccaggtactaggtctatggaaaactctatctctctcttcggtggcagaccagatatatcctcatgaaacacttcaagaaactctttgacaacagggaggtcacccatgaaaacctttgtctctgtcgctagattagacaagatcatgtacacttgaccatcttcttttaaagatgtcacaacttggttggcagagataaacatcatatccttactcactccagaatcatcaaacgccacagttttatcaaaatagtttaacaagacatggttggaagataaccagtccataccaagaataacatcaatctggctcanaggcaaacaaatcagatcaatcaagaaggtcctactagaaatttccacaggacagtccaaacacacattagaagttaacacagaaccactagt

SEQ ID NO: 219760 - DNA, 411 bp, Glycine max
  unsure (1)..(411): unsure at all n locations
ngagatgaggaagtgtagaagggtgaaacttcctgcttttattgttgaccacagagtggtacctggagatatgtcgcgggggttaggagacctcggggacgtcaggtggggtgctattgcccaaaaccaagcttgaccaatcccgacccaacccgggcatagtcggtcagtgagaacctgtgatgtacctaaacaggcgagctcctggcagtcaacagataaaaggaacaaagaccacaaagcaaggaggcttgtggtggctggccagctgtngaatttgtgtgatatgtggattatggccactggtaatcgattaccaagggtgggtaatcgattacaaggcttaaaaatgaagacaagaggctaagatggtctctggtaatcgattaccacgggatgtaatcgattacc

SEQ ID NO: 219761 - DNA, 444 bp, Glycine max
  unsure (1)..(444): unsure at all n locations
gttggatccatatgttgacctctatctttaagaatctgatcatcaaaaccctatctttcatccaagaagattgccaactcaatattcactttcctctctgccttcacatcatgaaaaatactcttgaagcattatattctttcacaagtgagtttcatgtcttgatgtggaggaactcgattagaatcttcacttagccattcatgactataatatctacaattaaaaagaaatatatacatgattaaaatttatataattctaaaaaaatgtaagtaaaaaagtatagagttaattaccttagatttaaggaatgagctaaacaatggagaggagtgctactcttaatccaacggtcaattaatatggagtgcactacctcatanaagggtgatccttcactctcctcctttccctcatattgatatatgacattcttcacct

SEQ ID NO: 219762 - DNA, 468 bp, Glycine max
  unsure (1)..(468): unsure at all n locations
taccagaagcgccaatcagtggactctgttgctggtgattatgtctgagctatcatgaataaagatcgtttacccactcattaatacaactagcttattgctagcaaaatcgagtcatattcatagtcctgatgctttcaatgataatttccttattgtggtaatgcttcttctgatgatgagatggctcttgatctgaggatgaatcttcttcaccctgaaaaggatcctgcagtgcaagattgaccaaagttgaccaaaaaaagtcatccgtgtccatttttttacaaaggagtacactctttcgaatggaaacgaccttctaaggagactgcattccctactagcaatgtgttgatggatattctagactacttaattaaattaagagcaagctaatgagttttntttgcttcaagctttcattgntgacaactcaacattgtaatngatgaccgtgatgcatgt

SEQ ID NO: 219763 - DNA, 472 bp, Glycine max
  unsure (1)..(472): unsure at all n locations
agcgtctcaatatattattggcctgaatcagacatccgaatcanaagttatggctgtttgaatatgccatgtgcttccatgttcaattttgagcatctcgatatattatgcacctgaatcgggcatctgagtgaaaagttatgccatatgagttagccgagagcttcgttgttcgatttcgagcgtctcgacatattattggcctgaatcggacatccgagtcaaaagttatggcaggttaaactttccatgtgcttccatgattaattttgagcatctcgatatattatgcacctgaatcggacatctgagagaaagggtatgccatatgagatagctgagagcattcggtgtttattntcgagcgactcgatatattattggcctgaatcggacatccgagtcaaaagatatgggccgttgaatatgccttgcactctgatgttgaattgctagcatcttgatatactat

SEQ ID NO: 219764 - DNA, 419 bp, Glycine max
  unsure (1)..(419): unsure at all n locations
ggaaaaaactatttaagctccacgaccgtggagagattatccacacagcaagatgaaggaagctgcttgtttgttaccattgaacaatagcagactaaccacttgacttgctcaaccactatatatgtaatgtactatnttcagaatctcttcatgttccttcttatttcttccgaatggttaatattgttgaacattggacataaggaaaagaaagtataacatattaaaggcctctcatgatgatgctatgccagccaaaagttctcgagaacctgccaagtgtcctggtacatgttgccttatctcttcaaaagcacacaaagttgttgcatccagaccaccagcaaactacaaaaagcataccaaaantagaanatcagcctaatcaattatgaaaattgtaagaatattaccaa

SEQ ID NO: 219765 - DNA, 473 bp, Glycine max
ctgcggatttggtcttcgccagtgaaaggatcgatgtgggttcgaaaagatgcaaatttgatcatcctactatgacgactgagaaaactggggcaaataaagagggtgaggatgagggagaagcccatgctgtgactgccattcctatacggccaagtttcccaccaacccaacaatgtcattactcagccaataacaaaccttctccttacccaccacccagttatccacaaaggccatccctaaatcaaccacaaagcctgtctaccgcacttccaatgacgaagaccacctttagcacaaaccaaaaaaaaacaccaacaaaaaggaattttgcagcgagaaagcctgtagaattcaccccaattccagtgtcctatgttgacttgctcccatatctacttgataattcaatggtagccataaccctagccaaggttcatcaacctccatttcttcgagaatacgactcg

SEQ ID NO: 219766 - DNA, 446 bp, Glycine max
  unsure (1)..(446): unsure at all n locations
ntcatangtgaaatcaggtgcaagcatttcccttatagtcctctcacggggtggagggtgtgccatgttctcagaatgtgctaaatcacaatgctcaaaattataatgctcaagatcaggatgttcaaaatcaccaataacagaatgcacagattcaccagtaatggaatgctcaggatgatcaaaaggtataaaaggatgcctaactaatctatgaaatgtcctatctatctcanggtcaaagggttgtaagtcagatggattgcctctagtcatacactacattcaacatgcagaactagttgccttgtcatgtaaataaaggtgcangtttgaactacagctaccctcaaatgatatccaaatgacttgaaattntgtgagcaaccttataaaatgatgagaagatagcacanaaaatttcagacaaaagttcatagtctaac

SEQ ID NO: 219767 - DNA, 455 bp, Glycine max
  unsure (1)..(455): unsure at all n locations
tagaanagaagaattatgaatggtcttatatatatatatatatatatatatacagatatatatgataaaaaaaactaaatttgaacattgctgtgcattatcagccataaatttcttttttcatgaacatacacaggagttctcataacggcgatcggatcctctcctttagatcataaatcttactccaccaaagtgtatatcatttccattttatttattttttcaaagccttataaaatagaagagatcaaggaaaaaagaaatatgaagaggatccatatccctcgcaacgatatcgatgatatgaaatacgaatcctcttcgcagagatatctctacctctttgaatcagttcttcaatctttttatttatccataatttgttttcttcttttcaattgaaaaagctccaccgaaacacagcattcatttcaacgaaacacaacgaacaa

SEQ ID NO: 219768 - DNA, 448 bp, Glycine max
  unsure (1)..(448): unsure at all n locations
ggcctgtccgatgcagcagtaatgatggcccgagttatgttggggaacggttacgaacccggaatgggtttaggcaaagacaacggcggcataactagcctgataaatgccaaaggaaatcgtgggaagtatggtttaggctataagcccactcaggcatatgtaaagagaagtatcgcgggaaggaggagctgtggtcaaagctcgcggttgagacaagaaagtgaaggaagcccgccctgccacataagtagaagctntataagcgcgggtctgggagacgaaggtcaagtggtcgcgctatacgaagatgatgttccgagtacattagatttggtacgaccatgccctcctgatttccagctgggaaattggcgagtggaggaatgccccggcatttacgcaacgagcataatgtaaacctttacggttntaaaagctctatagt

SEQ ID NO: 219769 - DNA, 474 bp, Glycine max
  unsure (1)..(474): unsure at all n locations
gacctataaatctcagcttgtatggtagaaagagcacacactaatcatctttttgccacagtattttaaaaaaactggcagggttaaataaaagtgtgtgtgctgctatntaagaaaaagaaaagcttagtgcggaaaggcaagtaatatagctggaataaaaagaaaacaattgatctatggatgaatgctctcttagaacctaagcttttgcatcctagaaaaaccatgaattgattgcagcacaacctcattacaagcctaataaagtccttcggattcagtttgtgtgttcttgactgtatggcatgagatgaattgcaaagattgagacttgtgttagttgttgattgttgaataagcctaaacacttgtgtttgagtgaaacagtagttgtgaggctttggttaatgatccttccttgatatctgtcactcttactagcttaattcaattgtgttccttaataatcat

SEQ ID NO: 219770 - DNA, 370 bp, Glycine max
  unsure (1)..(370): unsure at all n locations
ctggagtcgctgcacatgctgtctaacatttgtctaggaatccgatcgggctgcacaatgcacaaggcacgataaaatgtctaatgaagaattgaagctgcaggatccacgatgtctgatacgatgtccaggacatcctgccctaaaatactggacacataaatctgntatatctttaacagattattgtgcagttagcaacagattagacgatctatctttaggaatgaattaaaagataattaaagttcgaattacaaacttgaatagtccggtcacggattcaagattaaagataaaaactctctgatccatcgttatctcttatatctttaagtgcagatttttcatgagaatgatagatctcatc

SEQ ID NO: 219771 - DNA, 346 bp, Glycine max
  unsure (1)..(346): unsure at all n locations
atattctaaaacttgacctggaagggttttcaagcatgaacttgaaacccttatgaaaaagattaagcttacgagtctgaattgggtttccatgaagaagttttatagactggaagcttactagtcatttctggaatcatatgagaagccacctatagatggagttcatcatcagattaggtgttgctattagactctgagccactcttgcttccgtaaagagacttccttcaacatggtcttctctttgactanggattttaatggtatgtctaattgcaacttcttttctggtgtggtttgttcctactncaaattcatcttcacttatcatgttcagcatatc

SEQ ID NO: 219772 - DNA, 468 bp, Glycine max
  unsure (1)..(468): unsure at all n locations
taggacctatgaaactcagctaatgttactggatactttntaattttagtaatggatgtttcattttatttaagcataatcatcccattggtactgatatttnttgtgatagtttacataaattgaaatttggcactaaacatagtttaatgaatgaacgatttgctttcttgtggcataagcatttaggtcacatttctaaaaaaaaggatgaaaagattaataaagaatgaaattattcctaatctagattttatggatctaaatatttgtgtggattataataagggaaacaaacaaaacatacaaagaaagaagttacaagaagcactcaccttcttgaaattgtgcaaactaatatatgtgggccttttgatgttaattctttcataaaggagagatattntatcatctttattgatgactattcacgttacgattatgtctacttactgcatgagaaatctc

SEQ ID NO: 219773 - DNA, 448 bp, Glycine max
  unsure (1)..(448): unsure at all n locations
tctctaccaccccatnntttctcccctttggcaacatcttaaagccaaagtttgtgggattcaatacagataaaataatgaagtggacaaagatcaattataagtcataaccaaccaaaatcataaataagtcatgaccaaaatataatccaaacaatcataattcaaaaccacatagaatctaaacataaaatactaaagttcaaatactaaaagataaataatgtgcaaaaagtgataacttaactaccatagccaaaatacaaggcttaaaagaaaattagaaactaaactctaagaagatggaggtggtggtggaaggtcgaagctctgacgaatataacccacatcttcttcaagctgtgtgagacggatgtccatgccgacaaagcgagtatccagagaatcaaaatgttcgccaacataagtacgaagaccccgtaactcg

SEQ ID NO: 219774 - DNA, 455 bp, Glycine max
  unsure (1)..(455): unsure at all n locations
agcttcgaagagagagaaaaagaaaccttcctatcattacttttatgccatngcgnnnncagtntttctgaagatggtgaaaacgactntatttggttttcaattttaggcattatttaaaaatattttctaaaacttaagcaaacatatttttagttttgttttctattttctccgacaatgaaaacggaaaatgagtgaatcaagcaccacctaaaagtcttaatgatgtgttttcatttagtaattcatttattggtatatagttaaatatatttttggtcataaactttttttgaatttcataaaaaattaactaaatttagcttttatattttattattttcctcttgtgaaattaaaataagagataaagtgatttggaaacgtaaaaataaaggtgtcgggttcaaagattttgatatttatgatcttngtcatcaaatcaaatgtca

SEQ ID NO: 219775 - DNA, 373 bp, Glycine max
tcattggttccaaaggtggagtttttagccttctttctctttttggcttttgaaaattctgctgtgcaatatgaaactgcagcaaaaattgtatcttcgtgaaggaacacttcttgatggaactgtgaaaaagatcttaccgtatggagctcaaattaagctacgaaaaactaatagaacgtcagtgactacttggatatggatggctttgtgcatattttctcttgcttgataaatcgcaactgagattctgctaggtattattctttctttcacggaataattccatcttatagaaccattggatgtttcaagttggatcctacatatggctgatggaaaagatatagaacaactcattggcatacaagtg

SEQ ID NO: 219776 - DNA, 379 bp, Glycine max
  unsure (1)..(379): unsure at all n locations
taaaaagaccctatttaataaattggtttcaaaataagccttctacagtaaatttgccttgaaaaaggcatcatattgaaagaggcatcaatttcagggttaagacattttgtcatccaaaacaatttaacttaaggatattgccgtgtacctcccgtacgttcaaacagcaattcctctattttgtaacttanngcccttgaattgtttttttcctacatctttttgttttgggggatatattcttatccgcctacacctttctatttctcttaattaattattttttacctttcactgatttatatttttaaattttttagggatatgataaactatattttttgtataaaagtataagcaacttcacgtatatatg

SEQ ID NO: 219777 - DNA, 401 bp, Glycine max
  unsure (1)..(401): unsure at all n locations
actcagcttctccccatttttataatagggggagaatgaagtaaaaatggttcagccccttatgcacttctctctctttccaatttgcttaggaaaattggttccatgaagaaaaatcaagcctatgcgcttccgtaaccgttctgtgagtgaattcccgaaggttttcgaccgttcttcgacgttctcattcgtcttcatcgttcttcagtcttcaacgggtaagtacctcgaaccaagcttttcgattcattctatgtacctgtggtggtccacattttggttcatgtatttttattctcgatntcattcgctctctatacccccttttgacgtgcttcagtcatttatataagttggttctcgtctaatctaaaaataaaataaatttccaccgttca

SEQ ID NO: 219778 - DNA, 450 bp, Glycine max
cgtccccttgacaacattattgttgatatctctaaaggggtaacaactacacattctcttacagatatatgccataatatgacttttgtgtctatgattgaacctaacaatttagatgaagccataatagatgatcattggatagttgctatgcaagaagaactaaatcagtttgagagaaacaatgtgcgggaactagtagagaaacctgaaaactaccccatcataagaacaaaatgggtatttaggaataaagtcagacgaacatggcataatcattaagaacaaggcaagattacttgcaaaaggatataatcaagaagagggaatagattacaaagaaacatatgctccaactgcaagattaaagccattataatgcttttagcttatgcatccataatgcaatataagctttatcaaatggatgttaaaagcgctcttctaaat

SEQ ID NO: 219779 - DNA, 407 bp, Glycine max
  unsure (1)..(407): unsure at all n locations
ttggaaatgatttctatactccaaaaattacagttttgcttgttcttaagccaagaaagaacaattcacttgtccttaagtgacaaatacagtggccaatcaaaagaaaatggtgtttgaatcatcaggacatcaaccatattaactgaataccatggaatgcttaaatcaattacttctcacaagcatgcagttttttcaaagataagagcacaagtattagagtcacaactgaaataagctagtaagcatgacaaaaatcaaggaaggatcatcaaccaaaacctcacagtcattggttcactcaaactcaagtgtttaggcttattccatcataaataaccaacataagttccaacctttgcatttcatctcctattatacaacaatgaacacacaanaatgaa

SEQ ID NO: 219780 - DNA, 444 bp, Glycine max
  unsure (1)..(444): unsure at all n locations
agctnggctgcattgngcagagattataaaaagcttggcttgtttgcacaagaattaaaggtagtcttataagctactaatgaaaaatacaagtccatggttgatgatgcatgacatgagacagcttcatggcaaagtgaaagctaagtgtgctgtttgttgtccaaacagacagcttcatgacatgagacagcttcaagaaaaaataactagtctacttcccactcagttctactactaatccaacactctaacttttggtttggctgtcacaaattcttacgtgattaaaataataattaccatcttgtagaatgttatgttaataataaatactaattggactgcaatattagagttggacaaatacctcaatgaactttcgaaaaccatggcctagaggagattcatgatacaaatcattgatgcacccgatagaaagca

SEQ ID NO: 219781 - DNA, 419 bp, Glycine max
caagatgttgagagtgttgacaggaatcacattctcattttgaagtcccctctttcaaaaaatagaacatttaaaattgagattgatgtgatagaacagaagtgttttaccactacagtaaacagtgaagagtggttatggcattacagatttggccatttaaattttatagatctgattaagctaaactcaagagaaatggtgctgggtttgcctcagatcaagcctcctagtgaagtatgtaatggttgtttacagtgtagcaatcaagaagtactttaaaacaaaatgtaccaatcaaggcaaaggagaaacttgaggtgatttactctgatgtgtgtggccctatgcaaattgaatctctgggtggaaacagatacttcatatcctttattgatgaattgactacgaaagtatgg

SEQ ID NO: 219782 - DNA, 360 bp, Glycine max
  unsure (1)..(360): unsure at all n locations
ctgggcatctgaagtgtaatgaatctaaagtttgtcatcagtatagacaaagccttctgctatcccacagtcaatgcaaatagaacctaaaatcaacacaatcagaagaatttaataataatataaaatttggtacttttctttaacctgttaaaagtttttttcatttagtatntaagtacgtataaattgtcagagaattttgatgcaagctcagagcagtaggagaaaaatcctcaccagtacatcatctagtttccttcttccttggttgggaagcatagagttcttccctatggccataactatggactttcccagtaattctgaaaccgtatatgcaaggacacaccacaaagt

SEQ ID NO: 219783 - DNA, 374 bp, Glycine max
ttttaggagaaaattaaataaaatactaatgaggtcattacttgtctttcttacgatgatgtgttaattaagttagcagagacattctaatatcgcaaatgttaaaaaggaaaataagactagtttaatttactcacgagtaaacgtgttgatttgtagtgaattgtaattactagtttataccacgggaaatatgttcttacgctaattccctcctcaatatatagttgctcttaccaatttttattcatcgctgtgactttattaatatcattactttttggcagtttggaccggacgtgatcaatcactaatattatgtgtcgtggtttgactatgacacaaacacttggttgacaaagtaattgaatttc

SEQ ID NO: 219784 - DNA, 271 bp, Glycine max
tttttctgaacgtaaactgagctatgcagctctacacggctgtttctctacttgctccctcgtctaagcttcagagcagtgatatgcatatgacatggttactttccaaaaaactgggccacaagggacaatggttcatagaataccacaagatcctgctatgttaatacaaattcatttcaatcattaacacccagacagaattactagaaacagtctacattgtaactgaaaaaagaaaaaaccgatgttgcggagtcaacaaaatatg

SEQ ID NO: 219785 - DNA, 424 bp, Glycine max
  unsure (1)..(424): unsure at all n locations
cttttaagcgagtagtcacatattatactataaatcatgcgagaatcataggcactatcaaggatttgttttaataataaacttcatgcttcgagaaagaaaataactcaatcaaacatataagcacatactcataatagcaatcaattaagacaaacaaataaaattttgttagtcatcatataaacaagttaattgaaaggaaagtttcaaccaacttaatttaaaagagaatgggtttgatgttacctttttcatgatttaagtgcttagatcttcaaagatggaagtcagactttggctttntgcttaatcttcttgagagatgttctcatcactctcatagtccttggatagaagggtgatctccttctccgaaccatcggatgagtcnatggcatcctaagcaatatacgccttcttg

SEQ ID NO: 219786 - DNA, 439 bp, Glycine max
  unsure (1)..(439): unsure at all n locations
agctnttttgtgaaaggatgtgactcttctctattatattngaatntcaacgttcaaacacactggtaatcgattaccatatcagtgtaatcgattacaacattttgaaattaattggaatgttttaaattcagttgaaagctatttgaataccattttgctactggtaatcgattacaacaatctggtaatcgattaccacagagtaaaaactctttggtaaaaggttttgagaaaaattcatgtgctactcagttattgaagaaactctttaatacttatcttgatggagtcttctcttgattctttactcttgagtcttgaatctttgatcttgattcttggaacttgaatcttgaaacttgattcttgattattgaaatccaatttccttatgaaccttgaagagctttaattcaatctgaactcatttttgatc

SEQ ID NO: 219787 - DNA, 271 bp, Glycine max
  unsure (1)..(271): unsure at all n locations
tgactttttatccaaataaaaatatgaaggtttctgccgaaaaggatcaatgagacctcatcctaccaatattatcaatgaagaaatatttcaacaatcacacttatggcattatattactcctttgttaatattgaaccncctagaataccctctttggctaaggttaaacttcattaatcataattagtagttccctcctgaataccctgttgaactaagggttaacttccttaatcataattaatagtcccttcctaaaaactctctt

SEQ ID NO: 219788 - DNA, 428 bp, Glycine max
gcagctgcaagcatttacacaggaaatccaagattactgtttcttttcctatggtcttcctctgcacaacaaccatagaaacatattcaattaggcttgctttgttttaagcattgctccgtaagcttttatactcatgctattatttgaccaaccagttttagaaatatctaaagacctcattttggcccagactctaacgacctcctaacaactaaaaggagatgctagacatatctgttgtgatgaatgattccgatttggaattttctatcacgctcatgaacataataattattgctgggcagcttcaattgtcgaaagacctaataaaattgagctaatttttaactaactccatattctcgagcacttagcacacactgcatgaatgcggcccttgtagtgaggtcttaatatattaatga

SEQ ID NO: 219789 - DNA, 352 bp, Glycine max
tctttaagtaagaaccagcttgttctgatgtcaactttcttggttgtgggctggtctttgataccactgtggaaaaagagaaagatgatgatgatgattaatattatttaatcattatcaattaatggcctcatttatctccagtcattgttcacttttcaagttatattcagagaattagtacataaaatatggaaaagggaagtccaataagaactgattgtcaatgtaattgaacgaaaaataatgaatataagaaaagaagaacatcttttttttgtagtctataacaaggaagcacctatatgatgactgttgcttttcagtttacatttaccaagtctttgcttgt

SEQ ID NO: 219790 - DNA, 418 bp, Glycine max
  unsure (1)..(418): unsure at all n locations
agcttcatataagctgaaccattttatgaatattgacaagtngagctttattcacagaattagagtttatctcttttatcttagtgagagtgattctcctaaattcttgagtgactcaagaacaccctggctgtatcaaaggacttttactacctttgtgtgttgacctccccggaaagagtgattttttccttcctttcatcttcaactntgttctttcaaaccacaatntcagaaaatccacttctgcccagaataatttcgtagccataactctcattttacgcactcaaattaagtgattttttagcctaaattgaatttcaaaacaagaccattcacctcgttttggaatcatctcatttggagctntgtagctcgagttattgtcatttctatatttctggccagccaccac

SEQ ID NO: 219791 - DNA, 392 bp, Glycine max
tggcttattccctagaggatggcgccttatctcacctcttctacttgcttccgtgcatctcatggggaaatcaccattaaggacctcattgaagctcaaagatccagccttcatagaagccccacaagcaagcttccatcatcgcgctaagcctggaaagcgacagacgactcttttagcaagctgataatgctctaagcgtgtgcttgcgtagcagatgtctttcgagatttccctttactcgctaagcgcgctggtgctgggcttagccgttaatgcgcgctaagcgcattgagctcgcttaacacgatgactccttggcacttcttcaaataaatcctttttgcctgacataaagaaaattaacattaatccatgtaagaggctttact

SEQ ID NO: 219792 - DNA, 418 bp, Glycine max
  unsure (1)..(418): unsure at all n locations
gcttttgcgctttcttatgcattncattaaagggttccaaaacttcctcaaattcagaatttaccccaatttcttcaacgggtgaggagtcatcggttgaatcagccattaagcacacatttgcaatttcttctccactaaaagagtcaaaggatgatgactcattttcttcccaagctatgtaggcctttttcgggtttccatccttcttccctttcattttagcataatgctttttgaggtagacaggacaattcgacttgtcattttagcataacactcttagagaatattttgctttngaacctttgagaaatttgccaaacttctcgacaatcaaattcaaattctctacatcttcatcatcactagagtcttctttgaagaactagctttgagtgcaatatttttccttttc

SEQ ID NO: 219793 - DNA, 426 bp, Glycine max
  unsure (1)..(426): unsure at all n locations
tacaacatcaatgcacattcaagcatcagaagaacttcaaaagcctatgtcctgaagacagagaacagtcacacagataaaagattctggaaacaaaatctccatttgaacacctggtgtgctgaattcaacttgtcatccaagtcccaagctaagaaacagaataaacaatttactttgtgggaggtggccaagataggttcaaattttacttgttaatacaaaagcatacacacatttcctagtctttagattatacacatcaganataaaattcagaatanagggaatttgcctttcaaccataagggttcatgatgtagtaccaataaacacggtcatcatcatcaattagtgaatgcacaacttcctcttccagcagttgtgaacctgaaagaatgccacattgttgtacatttgaaatca

SEQ ID NO: 219794 - DNA, 411 bp, Glycine max
  unsure (1)..(411): unsure at all n locations
catccncatggactgagcgtaaagactcgggtcattaaagactacgcatcttttaaggcacaaagcgaggattagaacaatgaaaccccaatcctatgttctttgaaagactgcgatgagaaaattacaaaggacaggaatccctgngggaaaccacagaaaataaaaacatgcagcgactttcttaattgccccagatcttaagcatagtatcgcttgacaacgtcggaattcacgggtgaaggtagttccttgtcatccatgttggcaagcacaagggcccctccggagaaagccctttttacgatgaaaggcccttcgtagttcggggcccacatttccctattgtctttcagggcttgggagatttcttcataccaggtccccttactgaacctgcgcgagcgtact

SEQ ID NO: 219795 - DNA, 329 bp, Glycine max
  unsure (1)..(329): unsure at all n locations
gctaattcaagccctgcttttataaaccttttatgtttggccaagaggaccatttaaaagaagtttaacttttataaaaacttaaaaccaatttgaaaaagtccaaaaacttttgaagagttaccatatttgatttattcaaaaacaaacattggtaatccattaccaaatcagtgtaattgattacaccaagcttttgtgtttaaggatgtgactcttcacatttgaattngaatttcaacgttcaaagcactggtaatcgaatacaaaacattgtaatgattacagttttgaaataattggacggtgtaattcacttgaaacttttc

SEQ ID NO: 219796 - DNA, 427 bp, Glycine max
  unsure (1)..(427): unsure at all n locations
tctgaagcactacctcaccgctttattttccctctccttcgcatcggagacttggccagttccggcggcgtccgtcgacgatgcattccagtactccgacgtgccgaggcctcggaggcgaaactccgagtggaagccgtacgtgacgccgatgaaggctctgatcgagagagtgaaggcggagaaagaagttcgaaaggcgcaaccacgtatggttttggaagagccaccggagaacgggttgttggtgccggaactggtggaggttgctcgtcgcgtatatgaagcttgcggctcgctcctcttcagtctgagccaactcgtccgagtcattcccngtttacgctgccggtatgtgagttaattgatttgttacatgtttagctgttactttttcagttttaatttctagttctcngttctgacc

SEQ ID NO: 219797 - DNA, 305 bp, Glycine max
  unsure (1)..(305): unsure at all n locations
tcgtggcctgcgatgtcccgtgcgttggatagatcctccatttgctgcaagaggatgcagatctttgagaagaagggtttcaccttgggggttgtgcttcttgtggttcaatctgggcatgataagttggtgaggaccaaggttgaaagtgctttgaagtttgccatgaagaggccgaaaaccggtgctgtcaagcttccctttgggctttgtgggtgccaagaggagaattctatagggggagaccttgtggagatngaagaagaaatcagtgatggttaccgtgggaagggagttgagaattc

SEQ ID NO: 219798 - DNA, 263 bp, Glycine max
acacggtcactacatctcaaaatatcttttacaagacatttacttaaaaagcttttataaatatccaggtatgatcatagaaagacgatgaaaaaattacggaggccattcttacacaccagttttgagattctacactatccggcgacatgcttatgccctactccccttcttgacataccattttggctgataagaactattggctcacgagtcaatgcttatcaagccctctcacttagcataaactatttacctctgac

SEQ ID NO: 219799 - DNA, 341 bp, Glycine max
tgctttaacttttacgtaataattgctttccatgtaaataaagtgtgcaagaaactaacatcaaagccgcaggaaattccaaccctattgcccaactcacgtttgactgtatgtagacaattagtgacaaagacaccatctgagcaaatgtgaaggtaaagaagtaccaattgaagaagctattgattcccttctttccagactcagtgttggggttgaactgatcaacttccaatgctaagttacaaggtctaatccctgcagctgccacaattagaagtccaaatccagcacgtagaaatccccattgccctgtgggtgggactatgcatgtgatgcta

SEQ ID NO: 219800 - DNA, 339 bp, Glycine max
gaaccagaagaatgagacaaattttgttctatcaaaaaaaaaaaaattttggaaaaaatagcagagaacaaaggggaaccggggataacttgcgccttaggataaaaacggttggttgctcggcattgaaagcttttaaggttattaagaaacgcaaacaactgaggaatattgccaaatttttggaaaaaagggtttgggcaaacccttttaggagggctatgtgtcttacctgaaaacaaatatggcgatgttgatggcggagaggttggggttccgagggaaacaaggtgatgaaattagggcaagacctactttgaataatggaaaaaacaccgg

SEQ ID NO: 219801 - DNA, 460 bp, Glycine max
  unsure (1)..(460): unsure at all n locations
acacaagaaactaagcttctccccattntctataatagggggagaagtgaagtataatatggttcaaccccttatgcacttctctctctttcgaccgttcttcgacgttcttcattcgttcttcatcgntcttcaatcttcaacgggtaaagtaccttcaaccaagcctttcaattcattctatggacccgtggtggtccacatttggcttcatgcatttttattctcattttcatttccattttatacccacctttgacgggcttaagccatttatttaagtcatttctcgcctaacctaaaaataaaataaatttccaccgaacgtttgaattgtaccatcccctaactttggttgaaatgaattccaccgatcggtcctgccgcaaccacgttggaaaataaatacagaggtaaataatatattattataaaaatacctttcttaaaaaaagcgaaa

SEQ ID NO: 219802 - DNA, 394 bp, Glycine max
  unsure (1)..(394): unsure at all n locations
catgcaagctacgccanctcactgagacaagaactgcattgttgtgttccagctgttagaagagaagtaagcatattaatactgaatcaatgtgttactggtctgtctgctgaggtaattaaatattttcttttttcttacacaggtacacaaggcaaatttactctcagaggcttcttactctcacccgcgtctatggcttctggaaacatgtgtttaaccttgaccgccgtgagagccgccgctttcttgagaagttctatgcttctcaagacccgtcaattggtttgtataaaataaaacaccctctgctcatttttattcaggaactttacaccataattcttttctattaaaaggggtatttcctcttcatatttaccatgaaaatgtt

SEQ ID NO: 219803 - DNA, 441 bp, Glycine max
  unsure (1)..(441): unsure at all n locations
acttttgtcaacacaatctatatgcacacaatatgtaatagcacatacataatcataacccactgcttattgccctatcaaacaccagaaaagccatcttcacccataaataaagtagaagcctttgctttaatgagtatttgtcaagatcacaacaagcatactaaaaatgtaaagacagaaagcaaaggcatgataaaatattttacattgtaatcaatggacaacatttattggcactcttggcagcctcacattcttatgaaactaaaactgcacaactaaaaactttcaacaattaatagggcattacctctttaagagcaagtataatttcagtaaggaaaatgtctcgccagtgctccatattatcctgcaggcagtgcataatatcagaatattcatactcatacatgtcantagtcccacaaacataataag

SEQ ID NO: 219804 - DNA, 400 bp, Glycine max
tttgactgacgaaagcacaaaaataatttttagcgttacacactaacactttaaactttagagatataagataatccaccatgttccataatttgagcattaaattattaaataacaaatacaaggaattcttatttgaagagaactgacaaaatggatctgccaaacaaaaataattttgcattgctctgcaaactagtttatacattttgataacaagatggtttgacaacttgctgataaattttaagcctgtactttggtttatatagataattcaccggtacctgtttgtcaccaaaaatgtagctcgtccagaatctctaagcatattaagcatgggaactatggaggtgtcttcattgatatacctaatattttcgggtttaaaagaaaaatg

SEQ ID NO: 219805 - DNA, 249 bp, Glycine max
  unsure (1)..(249): unsure at all n locations
tcacactttataattaatgtttggtggggtggcatcatctcttgggtctaacacttttgcgctcttttgtatatggtacctagaatcatgagtcaaacatcatattcctattcacggaccgtccgtacagatctagtcatatggaagtcattgaccatgtcttagatttcctctccctctcttttatgctttgcccgatcctttgtccaactatggacatanacatcgcaacaaccgngattccctgat

SEQ ID NO: 219806 - DNA, 439 bp, Glycine max
  unsure (1)..(439): unsure at all n locations
agcttgctgcagccttancatacattatnttatatttatccagaaatccaaccgaatcatgaatgttaattaaattctcacaattgcaaaatgattattcttgtaaatttgggacaccatataggtcacgtatctctcttatatattgacaatcattaaaattcaaaactctcatcttcaaaaaaatctggccaaacatacaaagcagagaaagaaataggagtccaacaaagaatattcagaataattgattgatataaagtagagaagagaacttgtatgcttaccttcttcgacttgagcacatcaagagacattaagcaactataaggaaacttcagtatgacaagtttcttgggattgaaatccattggcaaagatggtgaacggtataccttccattctaatactcttaaactattcggaagagtatgggacc

SEQ ID NO: 219807 - DNA, 415 bp, Glycine max
  unsure (1)..(415): unsure at all n locations
atgtaatttctttagtttgaaattttttttttatatttgttgcatccctttaattacattataaaatctctgtaaaaaacttagcgaagccgtggttattattaatattattattattattattattattattattatttatgcaggttgtgggctgacttgtagactatctcatggcaagccgtccacacaaatngaattaaaagacagtggactgtaaataatactggtgtggttcgttgagatgtgacaatgcatatgaagctttatttttattttgagtcattcttttatttatatgaagtatctactaattcattctactaatgagtactntttgtttggctgattatntttaagtgagatcttaatctctaatcatatgtttttgatttacaaaactcaaaatcttaat

SEQ ID NO: 219808 - DNA, 247 bp, Glycine max
tgagagatgaggtgaaagagttttttaggagaaaaaatagaagaagaaaatataattatgtgaagaattagggaaagaaaataggattgtaatgtgatgaaattagtaaatggtgattgtatgcatggatgaattgaatataagaaagaattatgagaaaaaggaagtaattaaaagatattagttaggagtgagagaaaaagtgtggaatagtcagagaaaaatagaattgggaattaatgaggtg

SEQ ID NO: 219809 - DNA, 403 bp, Glycine max
tatacccagcggaaaaatataagaataatgttagggggccacaaaaatcaccataggccaaagactaaccaacttaatgcttaaggtcaaagtgtttgtggggacgaatttttattttaattaacaataaatgctggaggctgttttatattttggaaaacgactgtccctgtacacttacacctaattctatccctccatatacaatttttatatttttattattatggaataggtgtttacttaaatagttaacccaagtgtagaataagtgtggaaatggatcttttacatttcacaaattaattacacctaacggaattcttatcctaatggttttctttatacttataactttttatgacaactgattttgatcgtcgtactatttgtagttaaattt

SEQ ID NO: 219810 - DNA, 419 bp, Glycine max
gcttttcccaccggcccccatcgcctattccgtggcgcctctaccttcggcaacattgctatcgcgactgtcgatctaactcaacttcgcttgtactccaagcatatgtgaaggttcaatcttccttttatatcctctttccttctcaattctctattctatttatcgcctcatggaaacgattactatggaagcgtgattagtggtatagataatcgaacttttttgaaaattgatgtggacagatataccttagagaaaaaagcttccatatgtaaacttatgcatgatccttctctgaatcattgagtatgattgagaaaccaccgactcaatttcagatgggaaaggtacactgtcggtgtctgcacaactacccatgaaactctcaatagttcttcgggtaaatccgcaatcca

SEQ ID NO: 219811 - DNA, 346 bp, Glycine max
ctcttttcaactaatacacacgcacatgtggacccaatcggtaaggggaaacttctcttcccttgcctcgcaccttctcaactactaatatggtctctgtgtatatatggccacaaagcacatacatactctcacttaacgaatcaaatcatatggattatgaaatcgctgagagcactgacaaggccgatatcacttgtgatgcaaggagttttaattgggcagtggacagtgcgataaagagtgagactgcgtcaattatgggagaattcccgaatcataagttttggttcgtagtggacaatgccataacgagtaggactgcatcaaaattgggaacatctcc

SEQ ID NO: 219812 - DNA, 373 bp, Glycine max
  unsure (1)..(373): unsure at all n locations
agctngactagtcatatatatgttacataacaatcaaagcaaaaattgaatcgattattacagatataggaatacttaaacatacctgccaattaggggtgttgtggctttttgcaaattccgcccatgtttctggatcaaggccatacttgatcgtacgatcagatatttgccaaccttcattgtcagcaaagacaaattttgaagtcaatgaagacttaaattgcctccatctttgatcgaagccgtacccgaatcaaataaacatgaaaatgcagtaactaggaagtgatcctaggtcgtttcccaacgagcaatgacaaaccaaatgttcataatatacttgcgcagtaacaaaaacgatagggggggg

SEQ ID NO: 219813 - DNA, 444 bp, Glycine max
  unsure (1)..(444): unsure at all n locations
tcttacaatagtttctttcagacttcatattggtttgtttcaaacatgaaatttattnttacctaaaattagttcttcttttgcttattttaattgctgaaatttgttttgcttatgaggtgtttgacaaaatgtttataatagaatcaaggtctttttttgtttaattttttagtttcagtttttgtatattgttccttttttggtataaggcttcactaggttgcatttatgtgtttcatttgaacacgatcttattaagcttgaaggacccgagaagcttattcacaataattnttttcagacttcacaccggtttgtttcanacatngaaattatttttacctananaagtcattggtctgtatagatgtntcattttttgcttgcttatgattataggtgtttatacaccattntgcgtatatatatatatatatatat

SEQ ID NO: 219814 - DNA, 359 bp, Glycine max
ttacctatcaatattatacaaattccacattttaacaataatttaaagcacataaatgcataataaaacacactacaccaagttgtaaatgtaactacataattagaaataaccttagatggtaaggcatagaaccgcctttctatttgttattgtatattgaacaacatattttgagagtataagtgcaaaatccatttgtgatgtgaagtttaatatgctatgtcagtcctatatttaagtgcagagactcggggaaaccaaagaaatagaaccaagtcccaaccaaacagaacaaccaacaactaaatatatttgatgaggaatagatcggaatttagatttggacaaccaccaac

SEQ ID NO: 219815 - DNA, 363 bp, Glycine max
  unsure (1)..(363): unsure at all n locations
gatgaatatatgaatgatgagaattctaatattaactttgtcaggttgcttctcaaggtatttcttcattgcataagacttccataagagatgtaagtcatttctattntaaattctaaattcctttctataatgagtgtcatcttatattttttttttgcacacactaataaaattatcaaataaataagagaaaataactttataaaactaatgttatccttaattaagattgaggatggcctaaagttatgaaatatgaaactttatttcttgtcttaaaatataaagaaataatatctttaataaatctattaatttttaaaattatattttattatttaaaatattttaaaaaataca

SEQ ID NO: 219816 - DNA, 417 bp, Glycine max
  unsure (1)..(417): unsure at all n locations
agaatgaacatgtgattgttatgatgactaanaatgttagtcagtttatcagattgattgtgaaggaatgcattgaccgtatactagtgagagtgtgatccttaaatttttgagagaaacgactatcatttagtactgatttttgcgtgaatctctgaagtatggactgaatgcatgaaattgaggatgatgaaggccatgtttgattgtgatagctataacgacccgcctcgtcgctacggtatccacactctaatattcgataatttcaatttttataaaaagaactcccttaatttttgcttacgaaaatcaaagtgattttgtcacaacataaattcatccaacaacacaccattacttaagtgaataagcataattacatagaaacaataattcggtacatgtcatacacat

SEQ ID NO: 219817 - DNA, 385 bp, Glycine max
  unsure (1)..(385): unsure at all n locations
acacaagtatattcaccaggaaaacattggtgtggaaggaaattgtagtgttgtgaatcaaaagaaccttttacccaagcctaaagaccttgggagtgtaaccatttcttgttcaattggagaagtcactgtgggaaagactcttattgatctgggagccaatatcaacttaatgccactctccatgtgcagaagggtgggagagttggagatcatgcccactaggatgactttacaacttggtgactgctccattaccagaccatatggagtaatngaagatgtgttggttagagtaaaacattttatcttcccagtagaacttgtggtaatggatatctgtgaagataatgacattcctgtaatatggggaaggccatcatgt

SEQ ID NO: 219818 - DNA, 382 bp, Glycine max
  unsure (1)..(382): unsure at all n locations
gagtcatcttataatttgagacgnctcaaaatgaatgcaggagctcttaccaaattcaaatgccaataactttttactcggatgtccgattgagtcccgtaatatatctagatgctcaaaattgaaaacagtaactctaagcaaattcaaacgacaataacttctaactcggatgttcgattgagtcatttaataattcttgacgctagaaattgaatacagaagctctcaccanatttaaatgacaataactttttactcagaagtctgattgtgtcctgtaatttatctagacgctcaaaattgaaaacaaaagctcttaggaaattcaaacgaatgtaacttttgactcagatgtccgattgagtcatttaataattca

SEQ ID NO: 219819 - DNA, 451 bp, Glycine max
  unsure (1)..(451): unsure at all n locations
gcactcaaatctagtatctaaaccctctatttttggtatttcagggttgagaagtgaaaatgagaatggggtaaatttggagcaaactctcaccttacacaagtctattaccttaatctaaacttgctcaaactggttttacgcctaanaatccaccaaatcacaaattgactcctcaacacccaaattttaccctagaaatggctcttgccttcactttggtcttttgtttttctcctttgcacatcccaagctttcccacagtcctaaatgacatttcaaactaggattaactcactttaacctncaatttctactgaatccagatttagcctttcaaaccctcaaagcatcacactgttccactcataacactacattcttactgtctaaccctaagtaactataccctcatcctagcagtttccatcagcaattcagacataacata

SEQ ID NO: 219820 - DNA, 345 bp, Glycine max
taaatctgcatttataacaaccttctcttgtagggatatttctaatgagagaagtgtaataataataagcacactccttcaaatacaatatctgtgacagcgaaacaaacaatacaatatttgtgtaatcttttaaaaataatattatgttgtgtaaaataaattattaaaattttaatgaaaaacggtgcaactatgcgttttatctgctaatatccgagaagacacaatcatcttctccatcgtgttaaatttgccgagatgtatttcctttgtattgcttctccactcagggaaaaaacagctccatccaatcatgtgtttccaactaattaactctgattc

SEQ ID NO: 219821 - DNA, 429 bp, Glycine max
  unsure (1)..(429): unsure at all n locations
acctttaaactcagttgctgtcactttctttaagccccatttctggattctcatatacccctctatttgtaccttaagataatcaccagctgctattttcagactattatattcagaataaataagccagatcttaccattctcttctggtgtgagacgaccacctgggagtttgcagaatgtgtttccaatttgcagaagaagtatatgaggatgattgggctcttgtccttgcaatttaaaatcataaagatgagataggaaaatgagcagaatcttgaagggaattagatagtctttctctatgaaagtagtgccatagatgagaattaacaagaacacagtgagaaaccaatatatgtataagtaattgaaaaagtaaaatggaagtgacctaaatgagtntagagcagaattgatcagatgtat

SEQ ID NO: 219822 - DNA, 448 bp, Glycine max
aaatgacatggaaggcatcttttctattgctgttatgtttcaagcacctagtaatcgattgcctaaggtggtaattgaatacaggttcagacagagagtaggactttttgtcttcactaaaataatcagattcccaagttggtaatcgattacaagtttacccagagaactttgatatttgcctcagctcaaaataattgactacatgatacaataatcatatgatgtgtaatattcaagaatacaaatcacatgtaccaacaaccaatcaaacaaatgtaaatgcatatgtacatgaatatactccctaattggcttaagtaagattaaactcacttagaatgccaagttcattgcgaaggtggaagaacctactcctttgctaaggtttagtgaagatatcagccacgtataagtctgtataacaaactatatcacactcaccctt

SEQ ID NO: 219823 - DNA, 359 bp, Glycine max
aaatcccaatacatgatagaaccaaaagcttctggtgattgcttaaaccaaaatcagaagtatatgaaacatacccattaagccaaccaccaaaaatttggtttcactctttagcaaaacaatatggtttaaaaccgaaaattaaggtaaaaccagacattttggcgatcatttgggaaaaaaaatggtttctcaaaccaaataagccctaattgtctcatggtcacaatagtaagtatccggcacaataacacaagtgacaatgtcacatacctccccaacatcactctgggaacgtttaataagctcaatagcaatattcctgaattcagtttcacggcctttgaggtcactatgac

SEQ ID NO: 219824 - DNA, 448 bp, Glycine max
tgagctgcagctttgtcctccacatattggccttttatttctatacttaacaccaccgacaacagcgtcaaggaattcttgcacctcagataaaaaggctattttgaatccagttgcaatgtatcatacataggggcatatgcttgctgaaaagactcttgtccaaggtcacgaatcatatccttcaagcgatctccatttctacatccaacgattcagattgggtcccactctacatgtttggtaattaaccatgccatatgcacattgtataattcttcttaatcccatcacacaacagatgctcccgtatgtcgtcaagtttttgtcatctcacgttcaaaaaattttgcaaggacaaaaaaatttctccatttcatccggtcgacttctttctgaagcaaattgcaggaactgttcgacgcctttctcatacgcagggctcatg

SEQ ID NO: 219825 - DNA, 443 bp, Glycine max
  unsure (1)..(443): unsure at all n locations
tgtagaccacaccttttccggttattccgacattttcctcgaataaacgttggtggtgactccgcgcattntcctttcttggaagacacacccgtgagccctcgcgtcgcccttccgccgaagggtagggttcgacactcatgatagtctagcctaatcctgatcaagtatcgtccgcagattcctcttgttggactaaactcggccaggaccgcattaagacaaacatacaacaactatgttaccgtaccccaattcctcatgaaaatatgacaaactagccccatcctatcaagttctaagaatcagaccggtttacactgttgaatgatcctaaaaacacatgcatctacatgatcaaggcaaaagcatggcagaatgaagttatgatagcacagtgaacacacaaaacatcagtgaataaatataaaaagatatttaca

SEQ ID NO: 219826 - DNA, 444 bp, Glycine max
  unsure (1)..(444): unsure at all n locations
agcttaacanaaggcatgcgaagtgtttggaattcctanagcaattcccttatgttatcaaacataaaaagggaaaaggtaatattgtagccgatgctctttctcggcgtcatgcattactttctatgcttgaaacaaaattgattggtcttgaatgtttgaaaagcatgtatgaaaatgatgaaacttttggagaaatttttaaaaattgtgaaaaattttcagaaaatggtttctttagacatgaaggctttcttttcaaagaaaacaaattgtgtgtgcctaaatgttctactagaaatttgcttgtttgtgaagcacatgaaggaggtttaatggggcattttggggtccaaaagactctanaaacattacaagaacatttttattggcctcatatgaaaaatgatgtgccagaaatnttgtgaacattgcattgtatgt

SEQ ID NO: 219827 - DNA, 397 bp, Glycine max
  unsure (1)..(397): unsure at all n locations
aacgacaatgcctacaagaatgacttgtctagtgagtataatgtaagtgccactttcaatgtgtctgatctatctctttttgatgcaaatggaggagccttggatttgaggacaaatccttttcaagaaggaaggagtgatgaagacataaccaagggcaaggaccatgaagcacttgaaggtcccatgaccagaggcagacttaaacaagcccaacacgtcatagagacaaggctagtcatttgtatagctgccattgatgatgattgaaggcccaagtggagaaagatgaaggcccaaaggcagaggcactaccaagactactaattgttgttgaaggcccaaactaactngaaggcccaagttaaataagttnttagttataaattaattttat

SEQ ID NO: 219828 - DNA, 398 bp, Glycine max
atcattcctctaagcccttaaaactcaaaaatagtcttctgagttaagaaagaaatttaaagacaatgatcatcagatatagtttgtaagttgaacccaatacctgacctaggttgcatatattaaccatactctaagttttatgaacatataatcacattgtaataaatacatcacatcataccaagttaatactgatttgaaagttttcagtctcgtatatccccttttcctttctctacctaaaaccccataaatttaacagagaacatggcaaagaattgatatgatgaatgcattaacatatatcaagtagaacaaacttgggaatcatgtgctctacaacagtcacagatttcccccagagcttaagaaaacaagcttaccataacacttct

SEQ ID NO: 219829 - DNA, 403 bp, Glycine max
  unsure (1)..(403): unsure at all n locations
ttcataattacacttatgaataagctcttgttctttatttcttaattgnagtaattacccaaatacacccctttaccactatataaaggggatcccctttgtgttttttccctaaaatcttgacattatgagcttttgaatactaaaatcacagagaaaaatgttattccaatacattttgtccacaccaagctacgctacttactattgttaaaaatggaatttattttcccctgtttctctaccaatttcaacatttgaatgcaaacactagttattaattatgaatgcatgannagttactggactgtacactgctgttcactgcctgttatataaataagtaaacaatggtgatttagtcttgactaatttttattttgnttatntactcattttgact

SEQ ID NO: 219830 - DNA, 417 bp, Glycine max
  unsure (1)..(417): unsure at all n locations
gcttgatatgacaaagcagactgctgcccattactctaaaaacgcaacacaaacgaatgaaagtaatataacttagtcagtattctctattgaactgaaaanttctgcgtcacctctgcatgcagattgaggcctattggctcaaccaggtaatctattttgctacgttgccttctcatttgctcaaattagcacgtaaatttctatattgcgacatatatgtttcgaagacattgtaaaccaaccatagtggagttatgtcattatgcatcctaagaacccgaacgcgtgacgcttgaactgagtacatgttccatcatcaatcaattagctacagatagttcctaactaaggtcattctggtgtcttggttaactcggacggaaaagggtgatatcatatggtcataagagagat

SEQ ID NO: 219831 - DNA, 334 bp, Glycine max
taatcaatccttattctcctcattattctaaataacaactaaatttcagcacctgcgacttgaaataatcggttcatgtcatgtataaataacagttcaatttcagcgtaatttaaaatcgttggttctctgacatgtcaaatggtaattaatctgtaagcttagaatatattagtcaaatatcatttttatcacaggatctctgaatctttctaacccattttctgaaattttaaataattctttttaacattcgttgtgtccgaaagatattgattacgctttattttattacataatggattatatggttaatatggtattggcacttata

SEQ ID NO: 219832 - DNA, 417 bp, Glycine max
attatgtttaacattaaaggactctgaatctagccgtgtatttggctatattattatgacatttgaacaaattaacatttcctttatttcgatagtatgaatgaacaattattaattatggtatatgactatgtggtttttatatatttgatctattcatgtttcttgcatcatgaatggtttatatttttcaatgaatgtcttgggaatgaatagtaatcgatgtatgttttatatttgttacgcactttggccttttgttgatgccaaaggagcagagaaatatggattagatcaagaactcacaaaagttaataacttaatttcaagtgaagcataaactcacaaacatagggggagaatatggagaattaagtgagtgatctactatgaacaagtgtgtgtatgtgtatcttg

SEQ ID NO: 219833 - DNA, 241 bp, Glycine max
  unsure (1)..(241): unsure at all n locations
agctntactttctgaggcgcgccagtttcgtagtaaatcaatctgaacatcaaacaattaatgacacaagaaatactattaaagatttttttgtgcatgccgatagtgcttttttaaaaggagaaatctatgtctgtcacaattcagggaaataccttaaccgttatttcaaacaactccgccccggaaggaacatcatanatagccaaaatcacaagacaaattctggtgctgactgaaa

SEQ ID NO: 219834 - DNA, 246 bp, Glycine max
ctaagctttcagtcgcacccgaatgtgacgtgggattttggctatttctgatgttccttccggcgcggagttgtttgaaataacggttgaggtatttccctgaattgtgacagacatagatttctccttttaaaaaagcactatcggcatgcacaaaaaaatctttaatcgcatttcttgtgtcattaattggtcgatgttcagattgttttcctcgcgggctggcgcgcctcagtaagtaaagct

SEQ ID NO: 219835 - DNA, 447 bp, Glycine max
  unsure (1)..(447): unsure at all n locations
tgcaagctggatntccttttagtagggaatctattcttcctaagatggagtcaaacccagttaccctcattaagaaactagctttttcttcctctattgcctttagttgaatacacctttgtttggttctctatttggttcttaaccctctcatgcaacttctatgaacccccctgttgcttggtggttctatgaaccccccctgttgtaggcaaattctacacgaggaagatactcatcccaagacttatggttgtctttcagaagaagcccttaaagggtggataaagacctattcactacctctgtttgcccatcagtttgtggatgacaagtggtagagaaaagaagtttagttcctagcttagttcataagggtttccagaagtggctaaggaacttagcatctctatctaacacaatggtcacaggaaacatagagtctca

SEQ ID NO: 219836 - DNA, 351 bp, Glycine max
gcttctcaaggaagctacatgaatctgtctcggttaaaacgctgcccatcctttggtaaccattggatcttctcgaaatgtggtctggcgcttcacagaacacttgtccatgatctgaccattgggatctttgagcagacatctggagtgtgcgcaacgtttccgtttccgagagcattagtcatttgtgcattttgagccttgtagtccaagtagctttggaaaaacaccatttcctctccttctttcttccaaaaccatttccaatgtgccaagcttactctccatcacccatagccaccattagccaccacaaactgcttgtgttctctgttgaaaccccacaccgag

SEQ ID NO: 219837 - DNA, 326 bp, Glycine max
agctctgagtcattacaatcacaagatctggaagctttctgaatttaaaaccaaccgagttcagtaccatggaactcagagagtttaatagcaggtggatcttcagatatatccttagaaatggcccaccaaggattctttctttcacactgctgtgggtaactgaactttatttgcaaaattacggtttcctttatgtaatatgcggcgtatgcaagattaaacttaatttctaacccattagagtttggattgggagaatgcactacagtgatagggcaagtgtctttcccgagtccggctcgttctattccagcaccgtttcc

SEQ ID NO: 219838 - DNA, 332 bp, Glycine max
  unsure (1)..(332): unsure at all n locations
aaattggtctggaaaggaatcccttaaagaaggacttccttttgagatctactttctgagagaaccttccaaatatagctacgctgatttcgtggtgtgtgcccttcatcaagaattaacaaaccacgatagtcacgcaaaacctttcccattgcagtttcaatgtactccctaatccttgcacgtttcttcccttntntcatcnttttaattttcttctcttttttcccatcatcttcgcacaaccccctggctagcctctcatacaaatggtagctgattaatagaatgctcttttccttgtacaacgaacacaacttcaccatttcgat

SEQ ID NO: 219839 - DNA, 258 bp, Glycine max
gcgctgctgagccgggaagtctacataataattaagctacctagacctatataggaggaggaagcattaacaaaaacacactgagtcttatagctatccaaagcctgggcctattccttaagcgaaacctctttctctgtagccatcccccttttattgtattaatatccacccttttttcttacccctaagggaagctctctggctaggaggctaccctttgagggagcctaagcaactctgagtgaatcttcctat

SEQ ID NO: 219840 - DNA, 368 bp, Glycine max
  unsure (1)..(368): unsure at all n locations
actgaaattaaattgaatttggatttaagaatgttagccacattattccagaactaagtgttggttaaacaaactggaccaatggccagaatgggtataatggcactattaggtagaagtacagttttattcataacaagctaataagatctaaaatgatgaagagagcaagtaatatgaatgcttgcaccagaatctaaaagccaacaatcatgaagaaaattggaagtggaagtagaaagaatcataccacttatggaagaaacatcatgaagaatgacaacattggtagcatgactnntctaaagaatcatcaattggctatattnngtgagcataagttgaaactgggaacccaagtcaacaga

SEQ ID NO: 219841 - DNA, 424 bp, Glycine max
  unsure (1)..(424): unsure at all n locations
ctcacagagaggggtgaagttaaattttagatttctcacttagagatttgctcaagatgttcttggttggaatgcttcaacttgtttaaagtgctcttcaaaaaaaccttgataagctcataagaagaaggtgaagtgggtttcactcaacttgacagcttctagagcaagtaggtagaattggatgttatcatgaagtgacagcttgccgaaccattctgagatagtccataagagggtctcattctaaggaacctttctgatgagcattatgaagtatcaacaaaataaccattttgatgtttgctaagaaagcattcatacatgatagattnntgtgatgaagatcanactaatattccattttgaagtagcacaacttcattaaacttaacacttcttcacaactctaagcattttgaag

SEQ ID NO: 219842 - DNA, 457 bp, Glycine max
  unsure (1)..(457): unsure at all n locations
agcttattattatttgttatcgactcctcttattttataaaaattatattgactatattttttttataaaaaatcatcatttaattttaaaactcgaatatttcttagaaactcataaagcactctgaattcttataaattgataaaattcttttcatattataaattcattaaaattcaaacaataaatctaatcataaatcttttaaaaaaatcttaaaactcattatatttttataaaatccttttaaaatctagaggttttttatatcaaaatattttttaaaaatcttaatccaatataatccttgaaaaatgttgaataaattcatcccatgagaaatgaactttgaataatcttaaatttaatcgaaagatatataaagtataataaanaattattttattcaagaattgaactcacgaatacttaatttaagggcatcaatcacttatg

SEQ ID NO: 219843 - DNA, 378 bp, Glycine max
  unsure (1)..(378): unsure at all n locations
actctntnaatcgcattctactagacgctctgaatgattcattacaaaatgaacaacacataaatacattttcttaatttagtatttccacattatcttttaatccaaattaaaattttacactaggagttcgtataggacccgaacgtatcctaccactatatgccgatcgactggtcgaaattgaacctgattaaaatttatccgcatagttttgacatgttgatgttgattgtaccaataactaataaccctgtgtttataacctgtaccactcaccagaaacaaacgtgcttggtaactataaagtttaaaccctcatganaacaatatatcagtatagtcgcgcctaaactaatgtaaccctgtatagctctt

SEQ ID NO: 219844 - DNA, 404 bp, Glycine max
tattcatgccggagcacgtgtatgtcatgctttttgtgtttgtttatttttcacattgaatgttatggattagtgcgaatttcgtcaaagctgatcatgagtttcttctagttagggcagtgatagctgatttgatgattcacatattgacgtttgattctatacgtcggagaacttgcttgcactatgccgcttattatggaaatatagactgccttaaggtcaatctttctgctgctcattccacacctgttgcagattcttggttagacacgattctctctctctctcttcatacacacacaggcacacccaatatcgatccaagcatatacacgaatgactggtgatgctaattgttcaatggaatcgtcacgggatatgcaagatttgtcaacataaga

SEQ ID NO: 219845 - DNA, 452 bp, Glycine max
agcttagcctatcatattacgggtattactaattctaacattcttatatattccatcttggctttatctctagccaatatgggaccttgggtttttccgatacatcccatcacacccaacacttttgggcttggtgcgtggataatatttacagtactaaactctagctgttgattaaaatacttaaaccaattcaagagtatacaatacactaataccctctgcaagctcaagatgggagtgatgcaaaattttcacgcactttgagcttcgatctagaggcagtaaaagaggcaggggacagagccctggtgaggatatcatcacattgctctgtatatggaatggaacatgctgagcatgaaacttcttgctgagaaccttttcttggacaaagaacagattcaattcaacgtgcttattgcgggcatggatgaccagatttaagcaag

SEQ ID NO: 219846 - DNA, 362 bp, Glycine max
tgtggatcaaagtgggagttggattgttggtgtttccatccgagacaccagaagatgacacttgctcggccttgcatgtccttgggactttgatcagacacaggatgtgctgaaatgaagtgtacactgctgagaagaaaggccatcttcctctgtgatgagtgtatcacttgactaacttttcaaaggacctttgcttttctgtcgtacttgctatgatgattgctctcaaatgatggcaaaagatctaatgtctactttatgtgacggacaagatgggatgatttggaacgaaaaaccagctgtgttattatgtttgctgatctaagagagcgtgccagactgttaagaggttctaaatg

SEQ ID NO: 219847 - DNA, 396 bp, Glycine max
  unsure (1)..(396): unsure at all n locations
agcttggagggtgcgtagcccaccatctcttcatattggagtaccgataatgtgtctaccatcacgatcatcgtctccctttccattattgggggtaccacctgngccgccagatccctccaccttttgggcgtgttctttgaaagatccgtccccctttttgcacatgttctgtagttgcatcctattcagaaccatatcaaatttgtactgatactgcctaacacaggcaaccattaggtccttccaagaatggactcaagaacggtactaagttagtataccaggcgacagttgtcctattaagaccttctcaggaaaaatgtatcagcagtttctcatcttttgtgtatgcccccatcttccgacagtacatatttagatggttcttggagc

SEQ ID NO: 219848 - DNA, 454 bp, Glycine max
  unsure (1)..(454): unsure at all n locations
tattcgaagccccttgaattgattgtcgttcatgcattctcaaccattgagtaccgtgccccatgaattgattgcctagcgctgttcatgcatccttcatcatcaaatcttattcggagccccatgaattgattgtcggtcatgcatcctccaccattcagttcagagccttacgaattgactgccaagctctgttcatgaatcctctatcatcaaatcttattcgaagccccatgaattgattgccattcatgcaacctccaccattgagtccggagccccacgaattgattgcctagtgttgttcgtgcatcctccaccatcttattcggagccccatgaattgattgtcgttcatgcatcctncaccattgagtccggagccttacgaattgactgccaagctcttttcatgcctnctctatcatcaaatcttattcgaagccccatgaat

SEQ ID NO: 219849 - DNA, 337 bp, Glycine max
gggtactctacaacggatacaacaggcagcagttaaaaaggcaattaaaacattactctctaccataatcacactaaaaaaactaaaatacctgtctgtagatgcagtaataacaatacgcaatcattctgaacgagtgatttcatagcccatcacaggagcaagtagagagatagcatggagtatgggcattcgaaacaaaaagtgaggatcgctaatcatctccaaaacctgttcatgcatgccaataagttagctgtacttcgaacgtatgttcggtacatcaactcaaactggcaaccgtatattagattaaaagcacaatataccatatgca

SEQ ID NO: 219850 - DNA, 435 bp, Glycine max
  unsure (1)..(435): unsure at all n locations
tataaaataagctttcaatattaaacgactagagaagttctttacagtttaaataactaatgtataatttaaattaaccattagaaaaattaaataagaaacttctataaattagttttatacatatgcaaatcttaacttatattataaaaaatctattctatatatcattctattcttgtctggtatatatattgagaaggtaaaactaccaattagtatggatcaaagtagatctctggtgatatcttttttcttttagcttgagatattgactctgataggaataaattttcaatgaacacagttaaaaaagaaaattagaaggtaaaatggattaaacttctcccataatttaacattaactngattaagctcttcccataaataaaattaactaagagtaagcttctcttacaagttaaattaactaat

SEQ ID NO: 219851 - DNA, 458 bp, Glycine max
  unsure (1)..(458): unsure at all n locations
agcttcattgcctaacaggccaacttacaacagtaattcctcttgagactcagcataaggatgcacaggccacagttaagtatgtgaaaagattgtataaccaagtgaaggtgcaaattgcaaagaagaatgaaagctattataagcaagccaacaagaataggaaggaagttgtacttgaacccagtgatgatccttgacatttgagggcaaatgttttccaacaaggagggaatgatgagaattcctaaaactggccaaatacaggctaaaggcccaagtggagaaggatgaaggcccacaggcaaacagattatcaagactattaattgttgttgaaggcccagattaatttgaaggcccataataaatatgttctatttttttttataatcnttttggcccaaactgtttngaaggcccatgtctatatttatctttttgttcaattacactat

SEQ ID NO: 219852 - DNA, 366 bp, Glycine max
  unsure (1)..(366): unsure at all n locations
atctattctntgtccaagtgtgtttcactatcagattctcatagtattggagatgaggagcaatctgttatcttttgcaaaagctatcctctttccattgcttctgacacctctaatatgtctaagagcagtatgaaacattcaaatgctaacaagttaggggagcatatttcttcaatagaatttggatcttcttcaggtagaaacctctttgaattttttctatacatacgagtaattctattcatacaataattcataggtaatagtctacgggcacttctgaatagccaaggttcacagctttagattagttaattagcanaataattttccctttttgttcctttgatctccactatgaat

SEQ ID NO: 219853 - DNA, 416 bp, Glycine max
  unsure (1)..(416): unsure at all n locations
nntgcagcttcatgatgatgaatcaagtagttttgattatgacaaaaagccccagagaatgatttctagattgagtcaacaagttcaagatcaagattaatttcaagtctcatgagaagaaatcaagaagattcaagattcaagagaagaaatcaagaagacttcacaagggaagtattgaaaagatttttcaaaaaacaaacatagcacagttttggttttcaaaagagtttttctcanaattttctaagctaccagagtttttactctctggtaatcgattaccaattacctgtaatcgattaccattggcaaagtttgatttcaaaagctttaaactgaatttgtaacgttccaatggattcttaaatggtgtaatcgattaccatatattggtaatcgattaccagagtatc

SEQ ID NO: 219854 - DNA, 435 bp, Glycine max
  unsure (1)..(435): unsure at all n locations
tctcttggaccttaggcagatcctcaattcatcnttcatgatcaaactggctacttgtgattggtccctttcgtctctccggagcttaagctcgctgttactgccccacagagcccctcggaatttgtttcggccatattcttccctaagggcccttttggtatcttgttccaaggccttggtggtggctatatttacgtctctcagttcggcattctcctttcggatcttaagagctgctgatttgaacttttctttgattgtttgggctttctcgagttctaccctgagggcctgcacctcttcatcctcctccggagcttcaacttncacccacttagtggttctcaaactcaggagccaatccagaccttgcatgtangctttcaaccacctacggtagccgctgatgggccccggtgtactggctctgag

SEQ ID NO: 219855 - DNA, 409 bp, Glycine max
  unsure (1)..(409): unsure at all n locations
agcttcaataaggtccttcaatgttgatnttcagtcatggaggtgcaatggaagataaaggaganaaggtgagaagaggcgccatccactagagaataagccacgaaaggagaagcttcaccaccaagagagtgccttggataagaagcttatagaggaagcgtcaatggaggaagagaatganananacaggcgggggggcatgggaattgaaggagattaagaagagaagttgaactatgaagtgtgtctcacaagtttctcattcatcaaagttatgacaagtgttacacatgtttttatttatagcctagcacatgggaaactcccttgagaagttaggaagtagcttccttgggaaactagaggaagacaacttcatagagaggggggagggggtnctctcccc

SEQ ID NO: 219856 - DNA, 324 bp, Glycine max
tgctcatgttgtggattcttttgttgagtagattgttttacagtttgcctttgtttggctggtaattttgaatgtgacaaatgaaaattatacttttgtacccaagtttgggtttggctgaaagaagttgaaggttaacttgaggatggctggttttttgtatgggttggtaactttggtgttaatggattcttatatgtgaattcttgttaatcacatgggcatatgttttgtccacatgtttatttttactaatttatatggagtttatcgcggtcttatgtgtgttttgtgaaatttctttggttttttggtgacaggctg

SEQ ID NO: 219857 - DNA, 340 bp, Glycine max
  unsure (1)..(340): unsure at all n locations
ttaaagtttgaaaagagtatgatgaactaanggacgtcaatatgggcaccgcttgaaccttggaatgagaaaccaagaaggcccgaaaggaagaacacgaccataacaagtttgaggggctntatagggcagcaatagtgagctcaaactctgaagaggtgaaaggaatcatcatgggtcaaaggcatgatctataaggacgagctaaggcttgccttangtcgaaaagaaatttgtcccaacagttaaagtgagactgaacggaatatgtgggccatcatcgatgagtgcaaagagaagcttaatctatcggcgactcacgagcacaggctagaagatg

SEQ ID NO: 219858 - DNA, 380 bp, Glycine max
  unsure (1)..(380): unsure at all n locations
acttcgttttgtctgctagnggaaaatttggcctaaactttaatgtgctacttttcaaccgctaagaattctttgtcttaacacattggagcgtacatcctttgtggtacaagtagagccgacatttactctgggtgtgaaactgagaacaagagagggtacatctcttgtggatcagttcaagtggagtgtacatccactttgttgttcaaagagaacaaaggaaggtacatcccttgtggatctttgcttgtaaaggattntacaaggttattggaaatctcaagaaccgatggttgcttgtggactggacgtatgcacgggtttgtgccgaaccagtataaatcttgtgtttgggttcttcttacctatactcttta

SEQ ID NO: 219859 - DNA, 292 bp, Glycine max
ataaccttcttgaataaatgaagttatcccgcaattttacttcaaaatcaatgtgaatcaaattactcccgcattctttactacttctacgttggtttttaagaaaaacgccataactaaacgcgcccccaggcattcctatcgcaccagattcaaatttatgacgatgggtgaccaagaggagatgcatgaacagatgaaagccgacatgtcggctttgaaagagcaaatggcttccatgatggatgccatgctaggaatcagacaactaatggagaataacatggtcacc

SEQ ID NO: 219860 - DNA, 405 bp, Glycine max
  unsure (1)..(405): unsure at all n locations
tggagcatcatctanttatctgatggtagttttcaacgttctctcttctagtttaaaaggatcaaaaatttccatgtttaaagttggtttgggtggtttcctcttttcttctttctctcatggaactaaaaacaaacaacctacttttctttaatggaaatttgataatgtgtttaatttaaagactgattttaatagtaaatcaatataaaaatagctattattacctacatttctctaactttcaaaaagtgatattgtcataaacttcaatttcaattatggagagaaaaacaactagataacttactagtatatgggttcaaattaactttaacatgctcatctaaacaacaaaatactttctttaaacagatagatacatatatatgggtaggcgtatat

SEQ ID NO: 219861 - DNA, 229 bp, Glycine max
gtggtgggagaacagcattaactgaactaaatgcagcctgaagaaaatgcctacgtataggctccacaagccatcatccatcacccgtgggcgttctcatatgtgacaggtacttgtatactcgatacattaactttacggaccgacatgggctgatggttgaattttctgtactttagtattacacatcaatatgtgattattattatcgtaatgaatcgtataatca

SEQ ID NO: 219862 - DNA, 417 bp, Glycine max
ctacatcacacgagagagcaagtaggctttggataactcttccttcctggagagactcaagaagaagggctttgaagttcttttcatggtggatgcaattgatgagtatgctgttggacaacttatggagtacgatggcaagaaattggtttcagctacaaaggaagggttgaagctagatgatgagactgaggaagagaaaaagaagaatgacgagaagaagaagtcatttgatgaactctgcaaggtcatcaaggacattctgggagacaaagtggagaaggttgttgtctctgacagaattgatgattccacttgctggttggtgactggtgaatatggatggagtgcaaacatggagaggatcatgaatgcacaggctctgagagacagcagcatgagtggctacatgtctag

SEQ ID NO: 219863 - DNA, 331 bp, Glycine max
tctctgtatggtaactaattgtaaaaattcttgtcataatacaagatctaatttctctctcttatctggtcctatcacaaatctttatacactcaaattaagtcatctctatttcatgttgaattaaaccaccacccttgaggatccaattaatgcagcccccatagaaactgcagctaatggaggctaggggcgacttcaattaatgcaacattcaaacaatttctaaagcattagtcttaaaatttggctttggacctaactcaaccctacaaaacccgcttgtaaggtgagagttgcctcctacttatacacactaatctggccatat

SEQ ID NO: 219864 - DNA, 408 bp, Glycine max
actcaacttcttagaacctgaggaatagaattctttgtttgttcttgattaaacatactttcatttcattgattgcaccactccacctttacacgtaagtaaaactttggagtcatggctccatcgagatacatttctcttagctataaacatgaaaacattggtaaagttataacaatccatatgcattttgatttgaagaacctatgccactaccttgaagcggattgtatcatagagcaataccactaaatattctatggtcttgactagctttgtgggacacatatgatatgaacacctgagtcatcattatcaaaactgtgtgtgacaacatcgaagtccaattgttttgataggaatgtggacaagggctagaataatagacgggggttgataatataataa

SEQ ID NO: 219865 - DNA, 307 bp, Glycine max
gacggtcttacttctaatataaaaacctcaatctttcttttctcaatctttcacttgcaataacccaccatattcttcccccaaagctccctttaaacccttcttgaatcggagaaaatgcttactattctcacttgacatttatatctaatctccagctgcaagaaatgtcttgagggcacgttatgaaacccaaacagggccattcagccctgctaatcgtttctactatctttcctggttagtataatattctgaagagaatctctttgtacaccaaacgtgttactgtacatccaatactttt

SEQ ID NO: 219866 - DNA, 418 bp, Glycine max
  unsure (1)..(418): unsure at all n locations
tgagaggantgatggggacccggtgttgagagaaacgagtatatgggctacgtgggagtacgtgagctcagttggaggtgggcaacaagggatggtgggtatatgcgcgcattgtggatgtggaaagcttgttgtgcaccatcgcccgaccgccacctagtaccacatgtgatgggtaccccataatcctacaagcttgagatgaggaagtgttgaagggtgaaacttcctgcttttattgttgaccacagagtggtacctggagatatgtcgcggtggtcaggagaccttgtggacgtcaggtggggtgctatttcccaaaaccaagcttgaccaatctcgacccaacccgggcatagtcggtcagtgagaacctgtgatgtacctaaacaggcgagctcctgtcagtcaacagata

SEQ ID NO: 219867 - DNA, 371 bp, Glycine max
  unsure (1)..(371): unsure at all n locations
gaagtttaatgagtttatgagcaacttatgattcaaaagatgtgacatggaccattgatgctatgttaaaaaatatactaatagttatggtatcctttgtgngtatgttgatgacatgttgattgcacgatccagtatggcagaaattaacaggttgaagcaacagttggcagaaaactttgaaatgaaggatcttggtccagctaaacaaatccttggtatgagaattcttaaaaacagatcataaggaattttgaagctgtttcaggagaaatatatacacaagtttgcttgacaggttttacccttggagactctaagaccaggaatacccctttgggatctcattntgagtttcaaagaacaatctt

SEQ ID NO: 219868 - DNA, 453 bp, Glycine max
tatctatagaagaatattacactgcattatcaataaaatatttaaacaatggttattgactaaggaaaaacttaagatggtgatatatttggacaattggttatgctatgaccatgttgtccgcaaagtccacatttttttctacttggtcattcattgtcgtctttgtccatctcaataagaatgcgagttgaaacgggacgaccctttacaatcctctttctccttggatcaggaccccactgatctctttcatattcttgtcacattgattcgtgtggcaataaaccaaaggagttatcgtaaatgtgcaaaatgtgttgtaaagtgaataacatcggcatataggtcataggatcaatattgacagaattacaggcagccatgacgtgagaacatggtaaagtgttagcctgatattcaccacaatcacacttttgggatcgtagcatt

SEQ ID NO: 219869 - DNA, 337 bp, Glycine max
cctcattatctttgtgtgcctgcgcatattctttccacatatcatgtctctctacaatttgatggtcataaagtttatttaggtcctttagatccttttctagacctttcgatttgatttgcaacttctgaaagttctccataaagtatattttcttagaattgtctattctcaagatacttggacttttttcttaaaagttacaagcctcacacaccttagtggatcatctaatgaacattatttatctgaggattttttcacttcttatgatcttggacagattttgaatctttctcagaaggatagttgatagattatgatagcctttagagat

SEQ ID NO: 219870 - DNA, 277 bp, Glycine max
tcaaaagccatcggcccttgaacttgctcagaacttctgttagaaacttcagtgtctcgatttatatacggactctatcgatccttcgagtaaaaggtattggcttttgaatttgcctaaagttactggtatcaatttcggcatcttgatatactacaggactcactcatactttccagtataaagttaatggcatttgaatattgtgagaacttctataatccatttcgagcctcctgaattattaaatgactcaatcggacatctgagtcaaaag

SEQ ID NO: 219871 - DNA, 218 bp, Glycine max
atgtggtgttattaatggaaaaagagtgaggccttgaaagtttgaaggttaaatcttaattctgtggtaaatggacgttaaagtgagttaattctagcttgaaatgtcatttagcacttatgagaaagcttggactgtgctatagagaataacaaatgaccaatgtgaaccaagagccatttctacggcaaaattgggtgtggaggagtcaaattttg

SEQ ID NO: 219872 - DNA, 481 bp, Glycine max
  unsure (1)..(481): unsure at all n locations
tcagtcaaaagcattgacaatccaatgcacaattaggtatgttgtatttctcaagcaaataacacatcaatgtcaaaatttgatgacgattaattaggttgtaaagcacaatcattcaattaatgcatcagaagtgctttatccaatacctagcttgaatcatcaaaacaccaaataaagccataaacacaatccaattcaattgcaaattaaaaggtgtcacaagcttgtgttgtatgacaaaccaaacatacaaagcaatatccaagccatagttgagggctattgaacgagtaagtgcaccttcgtccttgaatacatataaagatcacccctaaaaaggaaacaaatatacatttagtaaaagttaatggtaagattgcataactngagagcatgagaacctagatgtgtagttatatgcaagcattcacaaagttggttngaagtatatnaaaatttacaacactggcacaagtct

SEQ ID NO: 219873 - DNA, 369 bp, Glycine max
  unsure (1)..(369): unsure at all n locations
tgttggaaatttccttcactgcctagctgaactgcctaccatatttcttaagccaataggagtagctacttagccattaagggtttcttaatttttattttgtttttcctataaaaggttaccatggtcacatntttctgaatgagattagagtaaataaaaatagagagattaaatgtgagaaactcttcctcctgtatgtgagtgtgtgtgtcaattcttctctcaattatattctctccgtgcgtgtgtgtttatgggtttaatttatctcacggttaataattggtatcagagtttgagaattatgatagtagtgtgagagagaacaatatagagtgtatcacgaacaagagtgttctcactatg

SEQ ID NO: 219874 - DNA, 417 bp, Glycine max
aagattcctaaagaagctagagcttatcttttaacacctctctaatagctaagctcaccttcttgagatgagaaactagagcttagctacacaccccctataatagctaagctcaaccccatgaaaaaatacatgaaaaaacaaaaaattctctaatacaaagactaactaaaatgcctcgaaatacaaggctaaaatcctatactaactaaatggccaaaaatacaaggcctaaacgaaggaaaagcctattctaatatctacaaagataagcgagctcatacttagcccatgggctcgaaatctaccccaaggctcatgagaaccctagggtcttcccttggatctctgacccaatctacttggagtcttttatccaatgcccttggtgggtaggattgcatcaatgtaccttcc

SEQ ID NO: 219875 - DNA, 330 bp, Glycine max
atatcccaacctttcttaatcaaaaattctatttgatttatcccacaaccaagattcctttaagaatgaactcctaaatcataatgcacattaatcttactaaatacaaattataagcaataaacaataaacgagtttaagggaagagaaaatgcatactcagatttatactgcttcgtgcacacccttgtgcctacgttcaatccccaagccacccgcttgagagttacactatcttgcaaaatccctttacaagttctgaaccacacaacgacaaccctttctttatgtttagatttctttaccacatgagaccctcggtctcttaat

SEQ ID NO: 219876 - DNA, 429 bp, Glycine max
aagtgaaataggtgccaccatcttcctaagagttctctcacgagggggaggttgagccatgttctcagtatgaaaattaattgtggaatgctcaagatcagaatattcagaatcaccttcaacagaatgctcaaaatgcacagaatgaccaggatgcacactatgcctaactaatctatgaaaggttctatctatttcacgatcaaagggttgtaaatcacccggattgcccttaatcatgcactatatttagcaaataatgtgtttctcaacaagcacctaacaaggggggtaaactacagctatactcaaatgatatccaaatgagcttgaaatttgtgaggaaccccctaaaatcatgaaaagatagcacaaaaaatttcaaaccaaaaattcaagtctaactatgaaaactaccctaagcaagtt

SEQ ID NO: 219877 - DNA, 464 bp, Glycine max
  unsure (1)..(464): unsure at all n locations
tagcagccaactcctgaggatcatgcctcaagagtgcatatctataataagtgcacaagttctccccctcttccaacactacagcggtcttcaagaatgtgttcaaggtatcctcatcaaacctcactaaatgacctttcacccttacctacttagatgaattatcttcggggtcataaaggttggcataaaactccttcacaatggcgatgtctatactgctatcagaaaaatcagtcagcttctcatcccaatggcgtctctcgagttcctccttgaactcatcanactctgtataatagactaccatattccagtagcttttacggcactacaatgtcagtgtatctctcccacgcctctntggatgtgaatctggatctatcaaatctggcttaggtaggtatagaaggtggtttcatcttcttagatgccatctacaaaatataaatcaaacaaaagag

SEQ ID NO: 219878 - DNA, 345 bp, Glycine max
attagataattatgtgtttccaaaataaattagatttttaatcaattattcatgcttggcaccccatgtgcgtgtatacatttaagactgactagtcagtttctttttcaatatagttgttttaataaaagtaaaagatgcttgaaaaaaaagtattaaatagtattaattttttaaaaaaagtagtattaattattaatcctcctttttcttctaaaaaaataataaagtgagagtaatatttatttacaatgtttttcagaataataaatgttggtacttggataggtttcttcgggcaagtggttgaacaagggggaagtggatttgatttactgcgctctg

SEQ ID NO: 219879 - DNA, 285 bp, Glycine max
aatgaaggtgggttagttaaattttgtgcctgaacctttggccgcgcaacacttgagaaatatcgtggcactaaagttcttgagtaatctttcaaggtcactcgtcaagggtgctcttcagccatgacttcggctttcaattttgatgtttgagagtccctggatgtacgtgaattagaagatgatgactcaaaaaagtgagcctcttaaggattgatgctattttatgtcgtgcaaagctttcttttctctctacgttgttcttctacggtggctcaattctaa

SEQ ID NO: 219880 - DNA, 464 bp, Glycine max
  unsure (1)..(464): unsure at all n locations
gcatgcaagcttacagcngatttagaatgacccactatcttataattaaaataacttaatgccattaacctagggaattaaaacaaacttaatggctgagtgtaactgacattgtggcaaccaatagtcacccccaacagccaacaagtcagccaccatttggtctcccaaaaggctgatgcctatgttgccaattgggcccttattacaacttgaactaaagcccttttagttgattaacccacaacatattttgtggcagccaactttacaaggattgtgccattatttagacaaactaaacactctagaattgaaataaagtggtgtcatttagtcctcctccatgtgggccatgatacaactcacagacctggacttttctccttgaaacttgggcttgtancaaatagtatggacagcacttgataagagctctcttgctttccttgctctacccttgg

SEQ ID NO: 219881 - DNA, 266 bp, Glycine max
aaaattcaggacatgccggaaaacaaaaaaatattgatgcacaacccgtaagttttcgggacacaccggaaatctaaaggaagaatcgttgcataattagtgaggttccgtaacaatcccgaagtcaaaaaggggatgaatatgtaatacgctaggttccgtaacattacggaaagaaaacaagtatcgttatgaaattcgtaagttcccgaactttacgaaacaagaatcaccaacaaagggcagggggtgtacatagtaaaaat

SEQ ID NO: 219882 - DNA, 394 bp, Glycine max
tccttggcttggtctccaaccatatagccatgcctatctcatattcttttaagtttccaaagagttcattgtctattatggaggcgagatctttagactctaatattgatgtgacctttaggtgtcatgttctattgagggatttcaatacttttacattcaattcctcctcttcaaacattgtaccaaggcctttaatatattgactaagtaaggggaatctttttggacatattcaatagtttctcctagttgcattcaaaaagtttcttactctttgataagagaattattgcttgatcttttaacctccagaatacattcatgagtaactcgtacatgctcatgccctaaaaaatcatcacaattcaaggatgaatgaatgatattcata

SEQ ID NO: 219883 - DNA, 395 bp, Glycine max
atgtcttcctttaaatccccatgcagaatgcagtttaacatctactgctccagggaagaatctttgcaggctccatactcagaataactctgatggtagtcatctctacaactggagagaagaactctttgaaacaattcccttgttctgctgaaacccattcaccactagtcctcgcatgtatcttcttctaccgccagaatcttcatttagcctatagacccacctattctggtacgctatctttccttttggcgatttagataaagaccatgtcttatacttctgaagggatgtcatctcatctttcatcgctagctttcactcaataatgtcattcctctgcgtagcctcactgaaacattctagctcaccaacatcagttaactacaaat

SEQ ID NO: 219884 - DNA, 411 bp, Glycine max
  unsure (1)..(411): unsure at all n locations
tctcacgaggaggaggtcgtgcctgttctcagaatgtgcaaaatcacaatgctccgaatcagaatgctcataattataatgctcaagatcacgatgttcaaaatcaccaataacagaatgcacagaattctctagttatggaatgctcataatgatcagaaggataaaatgatgcttaactaatctatgaaatgtcctatctatctcaagatcaaagggttgtaagaaatatggattgcctctagtcatacactacattcaacatgcacacagctagttgccttgtcatgtaaataaaggtgtaggtttgaactacagctaccctcaaatgatatccaaatgactngaaatgttgtgagcaaccttataaaatgatgagaagatgcccacataatttcagaccaaaattca

SEQ ID NO: 219885 - DNA, 295 bp, Glycine max
gaaccgggatccaactggcaactgggaaagacaaatacttgggcttcttcaatacttgggcatgcaccgtcaaattttattaaatcattagttgactatcaaaaggtttgactattgcaaatttctatctttttaccatattgatcaaacataaagagttttagcttaaaaagtttaattttaaaacacaatgaccccattcttgtgtatttttaaagatcatgttgttacagcagatgtgcttatgaaaacaattcacaagaatgatggatggtaaagcatatctattggacga

SEQ ID NO: 219886 - DNA, 467 bp, Glycine max
  unsure (1)..(467): unsure at all n locations
tcagcttgctggtgaggcttctatggaggctgggagcttcaatggtgtcctttaatggagaatttccaccatggagatgcagcggaagacacaggataagaggtgagaggaggcgccatccattaaggaataagccatggaagaaggagcttcaccaccaagatgagccttggataagaagcttggagaggatgcttcaatggaggaaaagaatgagagatagaaagagagaggggggagcccaaaattgaaggaagaataaagagagagaaattgaactttgagttgtgtctcacaagactctcattcatcaaagttgcaacaagtgttacacatgcttctatttatagactaagtagcttccttgagaagctttcttaagagaactttcttgagaagcttctntgagaaaactctcttgagaagctagagtttagctacacacactcatctaaaaactaagctca

SEQ ID NO: 219887 - DNA, 381 bp, Glycine max
  unsure (1)..(381): unsure at all n locations
gatagaacacttcacgtttgggccagagtggtaagatcttttctcatgagcttccacggtagaccctcaatattaagtacaaatccccttccaaggatacacaagcgggctgcaagctcttgaggatcaagcctcagtctagcaaacctggagtaagagggcaagctctccccttgctccacgaccgctgggtctccaaaaaggtgttgagggaatcaacatcaaattttatcaggtgccctcgaaccctaacttgctntggttctttgtcctcanggacatataggtttgcatagaattctttgacaattgccacatcaatgcttacctcagtcaagttggtcaactgtttatgccacgttcttctaaatcaattctctt

SEQ ID NO: 219888 - DNA, 453 bp, Glycine max
  unsure (1)..(453): unsure at all n locations
agcttctatatatgctaaaccatttatcaatattacatgttgagttctattcagaaaatcagagtttatctcttttatcttagtgagagtgattctcctaaattcttgagtaattcaagaacaccctggctgtaacaaaggactttcacaacctctgtgtgttgccctcgccgaaaagaagagattttttccttcctttcatcttcaaccttgttctttcaaaccacaattccagaaaatctacttctgcccagaattatcttgtggcataactctcattttacgcactcaaattaagtgattcttgactccaaattgaatttcaaaacgagaccttccacctggttttggaatcacctcatttggagacctgtagcttgagttattgcatttctatatttctggccagccaccacttaacctacattntaccatcccattaatccattttat

SEQ ID NO: 219889 - DNA, 417 bp, Glycine max
  unsure (1)..(417): unsure at all n locations
ntaacctcatcatctctcatagtctttagatatgggagccaatccaatccttgtgtccggactctcagccacttatgatagccgccgatgctcccattactgcttcccctaagctctctgccctttcttcacaccgcatcacatgccttgtgaactccttaaagtaccctcgcattggggtcactgaaaccccgtgcgatgaaaggcgtgatgctttcgtctgatggcacttctctcatggggtagccaagctgtcttatggcgaggatgggattataattaatacaaccccttgttcccatcaagagaacatttggacatcattcgcatgaagatagaatcctggatcttcctttcttctagcgagggaaccaattaacagacgcccctccatgctagccaagaattggtcccaat

SEQ ID NO: 219890 - DNA, 454 bp, Glycine max
  unsure (1)..(454): unsure at all n locations
agcttatagaggcctgttggatctcatgcctcatatcttnttagaggcatgttcatgaaaacctgtaaatacagttccactatcaaatatcatataaaccaactaatacaaatgataagaaatgcctaatggtgccttgcctcaataaaatttgcatcaggtaacatggcacggcaagtgtctcggtctcttctgtaaggagatatcagactagcaacacatattaagccagcatcaacaaacagttttgccacttctcctagaattaaataattttttatcagtaaaaccaagttgatatgcatcagattttttaatacactacagctatatacaataactttgaaggattaatagattatttttcatcatggaactaatccaaatacactaatattgattagaagttnttttcatgtaataagttggccaagagtagatngcaatattgtgt

SEQ ID NO: 219891 - DNA, 430 bp, Glycine max
atatgtgaccattgctgaatctcacatcatctttttcaacatctggttcaacaatcaagaaatctatctttcaatcttctctttcaacatcgttcaactctttcaacagaatttttctgattcatcttctcttcatctttctaaaagttcttgttcaaaactttttctttcaagaaaagttctttgatcaaaaacttgtgctactcatcttttttattctcttctccctttgccaaaagaacgaaggactaaccgcctgaattcttttatgtctctcttctctctttccaagagaatccaaaggacctcaactgagaattactttgattcttcccttccccttaaactaaagatctcagaggactaaccacctgagatatcttttggttcccctttacaaacattcaaagggactaaccgctgagaattc

SEQ ID NO: 219892 - DNA, 461 bp, Glycine max
  unsure (1)..(461): unsure at all n locations
agctncatgatgatgaatcaagttgattcaagttgttttgataatgacaaagatgatgnaaaaaagcccacagaatgatttcaagattgagtcaacaagttcaagatcaagattaatttcaaatttcatgagaagaaatcaagaagattcaagaatcaagagaagtttgatttcaagattcaagagaagatgaattcaagattcaagagaagaaatcaagaagacttcataagggaagtattgaaaatattttaaaaataaacaaacatagcacaattttgtttttcaaaagagtttttctcanaattttctaagttaccagagtttttactctctggtaatcgattaccagtttcctgtaatcgattaccagtagcaaagtttgatttcaaaagcctttaactgaatttgcaacgttccaattgatttcaaaatggtgtaatcgattacaagatattggg

SEQ ID NO: 219893 - DNA, 460 bp, Glycine max
  unsure (1)..(460): unsure at all n locations
actcagctttgaatcaacttgcacggaattgataccggttatcgattaccaaagagtaaaaactctggtnacttagaaaattttgagaaaaactcttttgaaaaaccaaactatgctatggttggttttgaaaaatcttttcaatacttcccttgtgaagtcttcttgaattcttctcttgaatcttgaattcatcttttcttgaatcttgaaatcaaacttctcttgaatcttaaatcttcttgatttcttttcatgaaaattgaaattaatcttgatcttgaacttgttgactcaatcttgaaatcattctcttgagccttttgtcattatctttgttatcatcgaaactacttgaatcaacttgattcatcatcgtgaagcttgcttctacagattacatgattatggtaatcgattacggctttgtaaatcaagtttgaaaacaatgctggctact

SEQ ID NO: 219894 - DNA, 407 bp, Glycine max
  unsure (1)..(407): unsure at all n locations
agctggttcttctacaacctagttcaatttatntttgctttgtcgcgatttcattcttcttctgttcctttcactactaaaaaagaggttttttacgacgtcccttctacgacggtcgtgagaaaaccgttttaattaataatgcggcggcattactgttaatataagcatttctggaatgaactctacgacggttgcattaaagacgtcttagaaagcacagcctagtgccatttttgaaattaaatgaaagatgatttaagacggccctatcataaacacgtcgtagttttaatatatatattttcaataaaccctactcagtcttgtgtaacgccgcacctcttcttcttccgctcgaagcccttaaggtttcaaaatatcaagcagcagcggcttgactaacc

SEQ ID NO: 219895 - DNA, 453 bp, Glycine max
  unsure (1)..(453): unsure at all n locations
cataaaactcagcttgtagacaacacagccgcgggcggcagaccattggtagctnccgaatataacaagacagattcatactcatatagctaaatagaaatttacataccatcagatatgttagcatgtctgagaaaaagaaaagcatactccggatactaaattttacataccatcattcccagattcttcagaagggccaggacccacaacctctaacacagcttcctgttcaggttccttatcttgctcagatctacaacatgagagaataaaatgggaatcatacactgattcacgcgactgggggaagcatcaactgtgtttgctaaaagttggtcacagaccagtggctaatgccttttgttctaaaataaaaccttactaagcatgttggaatctggaactaccacctagaattatgtcatttgacttcagaaaaaaacattatat

SEQ ID NO: 219896 - DNA, 449 bp, Glycine max
  unsure (1)..(449): unsure at all n locations
agcttcaacctttggtgctcatttctgctccaaatcgcgatatgagagcantttcggagtcgtgaagtgcgtggctactagtgggacttcgaatatccagggttgggtggacttctttctctttctctcttaaatattcggggtaaagggttttgggagatatgatgggtggttttgttagttttctgctgtgtaatgattatttgtgaaggaacttgttgaaagcttgttgaaattgccatgtttggatgagttacacatacccattctgttttagggtttcgtgatgatgcttatattgtgaaattgcctatggaaactgttagagatgaagggtacagttaacctacggttagaaagtgacaatgtggcgttgtgagtggaaaagaatgacgctttgagagttggaacgctaatctgaattctgtgggtaatggacgttaaaatga

SEQ ID NO: 219897 - DNA, 367 bp, Glycine max
  unsure (1)..(367): unsure at all n locations
gttcatggtctngcaggtgaagatcctcataagcctcttaaggagttccatattatttgttccaccatgaagccctctgatgtccaagaagatcatatctttctaaaagcttttcctcattctttggagggagtggcaaaagaatggctatactaacttgtcccaggtccatcttcagttgggatgaccttaaaagggtgttcttggagaaattaatccctacatctaagtccactgccatcaaaaaagacatttcaggcatcaagaaacctagcggagagagcatgtatgagtactgggaaagactcaagaaaatgtgtgcaagttgtccccaccaccagatttctgagcaacttcttcttcaata

SEQ ID NO: 219898 - DNA, 413 bp, Glycine max
  unsure (1)..(413): unsure at all n locations
agcttgaaagtccttagtgatccaaattgtatgtgcctaaattgagctgaatgcgagaagtatagcaaaacttatttgtatgaaaccaatttgtgaaggagagaaaagcacttgagtgcacctaanaatgagtgaaatacctaactcatgtggattgtatttttcttgcatcaataatggattgtcatgcttcttgctctccttgaattgcaaacctatgtatccttgttatggttccaaatgtagaacattattattggataatcaaaacattgtttcattccttgttgatgagttttattggaacaaacatgtcttagatatattagaatgggatggatcttaactcatggtttagtttgagttcacattagaatttaaattagtttgatattggaggttgttatttttcc

SEQ ID NO: 219899 - DNA, 403 bp, Glycine max
ttttatgatttttgggatgacccatttggtgttgataagaatgaaagtgaccaataatttaagtcttattttgaactatacttgttctccattcattataataagtttgcctagtcttatgggaaacaagaggaatacttgactctataagagtttgcttctgtgaattttttcattgaattaattaatgaagttggaagacccatcctgtatgtactgatttaataacaactgatgaagataaaagtatgttctatgtgtgtcggtatttgacattactttttgttcaatttaatacataatgacgtagtagcttttgttgtgcaaagcttcttgtgaaacaaagatagcccttttgtgccactctatctgcctgaaattaataaacctttatatcatatgc

SEQ ID NO: 219900 - DNA, 433 bp, Glycine max
  unsure (1)..(433): unsure at all n locations
gatccttaagtcaactgaggcatgcangcttcgaaggtcataagctttatgttattgacatctatcagaaagttcgcatgttctcgaaatactgaattgcagactgtgcgggcccctccgaagactgaacggtgacgttatcgaccaccgcattgtcgacaaccttgacgacagcgccggggttgactctgttgaggacgttgcagagaatgataccgttgcggagtgcgaggcagaattcctcttcggagggttctttggagagtgatgaagacgcgccattgtccatttgccgaagccattctgctgctacgtacctccttgaagctgatttcacaagcataaacaaacaacatttgaacaacaaacaacaaagagatggcgggtaatgtctaattgtctatacgccaccgttacatgcacactttttctt

SEQ ID NO: 219901 - DNA, 289 bp, Glycine max
aacggcttctcatttaatccttatataatattatgtcaggggacttattttcaggtagataccttctgattctagataataatgaccacactggtatatggcatgccttacgtttgaaatatgcataagcttcctcttaaccaccgaattaaagtaaagaatccaccatgagctagctataagcttgcacaatcttaatttgtacaatgacaagtccatataacaaagtgcaatttttacatactataataggcacagagaaagatattccatggatatactatctcat

SEQ ID NO: 219902 - DNA, 449 bp, Glycine max
  unsure (1)..(449): unsure at all n locations
agcttctntgggaccttgaacaggcaactaacttctctttcanaaccatgctatgtgctcgcgactggtccctttcttcctttcgcaacttgagttcactattgctaccccatagagctccgcgaaatttgtcccggccatactcttccttgcgagccctcttggtctcttgttcaagggctcttgcggtaattgcattctcttcccgtaacccggcacactccttccgaacgtgtgtagcggccaacttgaacttcttcttggcaagttntgcctttcctaactcgcttttgagagcttggacttcttcgtcctcttccggtgcttcaacactctctttgctgacgacttttaacttggcgagccaatctaaacctcgtatatgaactttcagccattcgtgggacccaccaatgatgccattacgaatgcctctaagctcttgatct

SEQ ID NO: 219903 - DNA, 319 bp, Glycine max
  unsure (1)..(319): unsure at all n locations
gtctgaagagagtatgatgaactaatggacctcaatattgccaccgatgaagccttggaatgagaaaccaagaaggcccgaaaggaagaacacgaccaaagcaaagtttcgaggggctttatagggcagcaatagtgagctcaagctccgaagaggtgaaaggaatcatcacgggtcaaaggcatgatctttgaggacgaactaaaggcttgccttangtcgaaaagaaatttgtcccaacagttaagcgagactgaagggaatatgtgggccatcatcgatgagtgcaaagagaagcttaatctaatggcgactcacg

SEQ ID NO: 219904 - DNA, 384 bp, Glycine max
  unsure (1)..(384): unsure at all n locations
agaaaatattcatttgtatatagttctactccccctttgatttgcaatgttggcttatatgagaatattgaagatttcatatataaaaagctgtctcataaagatttcatatatcttttatctatctctcccctntgtcaacgtgaaaaacaaatcatgaatagagaggagaaaaaatgttaccacttgttgcaatgtatgagaatcaagtgataccaaaaggcattaaaacaatcattcaatattaatcaagaaaaaaaaagtacaataacacatcaatcaaaaacacaatcaatcaaatacacaataaaaaacaatcaaccaaacacaatatanaacaattatcanagacaattaatcaaatataaaatataatccatcaat

SEQ ID NO: 219905 - DNA, 433 bp, Glycine max
  unsure (1)..(433): unsure at all n locations
tgagctttaatgaggcctttaatggtgaatttccaccatgcagatgcagctggaagacaaacgagaaaaggagagaggaggccccatccactatggaataagccctggaaagaagagcttcaccaccaagatgagccttggataagaagcttggagaggatgcttcaatggaggaaaagaaagagggagagaangagagaggggggagcacgaaattgaaggaagaaaaagggagagaagttgaactttgtattgtgtctcacaagactctcattcatcaaagttacaacangtgttacacatgcttctatttatagactangtagcttccttgagaagctntcttgagaaaacttccttgagaagcttctttgagaaaacttccttgagaagctagagcttagctacacacacncgtctcataactaagctc

SEQ ID NO: 219906 - DNA, 468 bp, Glycine max
  unsure (1)..(468): unsure at all n locations
agcttctgcttattagtgcacaccgtgtgtcaagaatttagcatatcttggaatttgctttattgcactagcaagggtatgtttacctctactcttctaaatgtttccaagatctccttctctgcctcttccattttnttgatggaaattgctcttagagggaatggaagagggatatgctgcttctcttcaaattcacctgcagagaaatttctaggtaacttactctttaaaatttttgcaatccatttttttggggaacagagtgaaagttggcgcaggttcatttgcggatgaggaagatgttgctggttgaggtccttgacactactttcccgacctcaatgcaatggcactcacattnttgggattctggacaaattgagaaggtaatctgtcagaattctgggactgttgttgatttaactatgtagccaattgtcccatccgattagttaagctctgaat

SEQ ID NO: 219907 - DNA, 269 bp, Glycine max
ttccttttttcctctttctctcatgtaactaaaaacaaacaacctacttttctttaatggaaatttgataatgtgtttagtttaaagactgattttaataagaaatcaattttaaaatagctattattacctacatttctctaactttcagaaagtgatattgtcataaacttcaatttcaattatggagagaaaaacaactagataacttactagtatatgggttcaaattaggcttaacatgctcatctaaacacaaaatactttct

SEQ ID NO: 219908 - DNA, 437 bp, Glycine max
  unsure (1)..(437): unsure at all n locations
nnagctgctctaaatttacattgatgtttgtatttatgggaggaggttgtatgccattcttgttttaagagtagtgtcccactggtaaaactaactttccaaatttttgccttcacaggaaatggccccgaggaagcttgcctcatagaggtccaagaaggacaaggcagccgaaggaactagttccgctccggagtatgacagtcaccgctttaggagcgctgtacaccaacagcgcttcgaggccatcaagggatggtcgtttctccgggagcgacgcgtccagctcagggacgacgagtatactgatttccaggaggaaatatggcgccggcggtgggcatcactggttactcccatggcccaagttgatccagaaatagtccttgagttttatgccaatgcttggccaacagagganggcatgcgtgacatga

SEQ ID NO: 219909 - DNA, 432 bp, Glycine max
tgccacccagctcgcccaggcgagcagggttgctttctccagaagcaacaaccttctggagggcccaagtgggcctggttgctatttgcacccccatttttactaagtacaccccttgccttttttgggtgattcttttttcgtaaagttacggaaacttgcgaatttcgtaacgatacttgttttctttccgtaatgttacggaaccttgcggattacataatcatccactttttgacttactgaatgttacggaacctcactaattgtgcaatgatgcttccatttgatttccggtgtgtcacggaaccttacggatggtgcatcattattttcttttgttttccagcaccgtcctagaattcacaaattgcttaatgatgggtgccaagcaccttacaaggaccaaacaaaagtcgcatgtcatcaagc

SEQ ID NO: 219910 - DNA, 452 bp, Glycine max
  unsure (1)..(452): unsure at all n locations
agcttctagaatgggacttatcaaaagaaatatgggaataatattaaattaaaaattgaatatatttaaaatcatataaatataaaatacatttaaattctttttatattatgagttgacaaatgacttgaacctatctacctatttatacctgtgttttttgtgtgttgaacaagataattaaccagctaatccattttgattcatcccgcttaacttgtcaaggaaatgaaataagacaaatcaacctgtcaactttttttaaagaaaaaattagaaaacaatcaatattaatctggttattttgactntgtacaactgatttaacatattagaaataccatttaaactactattttatttattttgtctttgtagacagcgaaccactatttgattggtgaagaaatatttgtaaatgccagtaatgtaataatttataatttcttact

SEQ ID NO: 219911 - DNA, 461 bp, Glycine max
  unsure (1)..(461): unsure at all n locations
tttcacaaacttgtatggccagttcttatattaaatcttactctctttgaagaaaaaatatatttaatgggtcatagtcgtataccttcccgcggaatggctctgaagacctgtaaatatgactgtgcatttgttttcttttccatgtgtccattcctgagcatcaatcacgggaatggaattagtttattatacatgaacttgaaatgcatatgattttcatttgcatgaaatataaggacgagtggattctttttcctttcttttggtgaggaaaaacaccctcattcatgtgtgtgtgtgcgcgagtgagacacatagatccagaaacaaagtgatgtccacctaccttgaatgcagggcaatctatgattagagaaatggccagtggccacaaccactgcgtcanagaacttgtcaacttccttctcactcttgttctctttgcttctaacaaccca

SEQ ID NO: 219912 - DNA, 470 bp, Glycine max
  unsure (1)..(470): unsure at all n locations
gatcttaagtcacctgcggctgcagcttcaaggcttagacaagggagtatgagtgtttaaaaatatatacaacaaatggaactactctttttaagagctggacttagggaggaggaaagaacaatcatagctaggtaccttagtgggcttaatatagaagtgagggacaaggttgaactccttccatatagggacctagatgagctagtccaactttgtataagagtggagtaacaacataaaagaaagccttcttcaaaatcttatggctctcactctaatccaaggaaggaccaagcccatggaantttgggggctgcaccttcaaaacccaaggaagataagggtaagaccatagagaaatacacccctaanactagttcccaagaaaggactagcaacattaaatgcatcaaatgtcttgggagaggcacattgcctctaattccccacaaaaaaccatatcatga

SEQ ID NO: 219913 - DNA, 482 bp, Glycine max
  unsure (1)..(482): unsure at all n locations
attcggaccttgaaactcagctttactgattgccacgtccaatgattttaaatggtgtaattgaataccatatattggtaatcgaatactagtgtatctgaaccttgaaattcaaattcaattgtgaaagaatcacattctttcataaaatgctttgtgtattacatggttttggtaatcgattaccagtgacaagttttgaataaaaatcaagagatgtaactcttccaatggttttcaggtttttctcaaggttataactcttccaatggtttttcttgaccagacatgaagagtctataaaagcaagaccttgacttgcatttcaataactttttaagatatacttttacaacctttgaatctctttgaactttntttttgaacttcttcttcttctcttcctttgccaaaagctttctgagttttctggtttccaaaccttgttctttcctagaanacaaaagtgtgctatatctttt

SEQ ID NO: 219914 - DNA, 458 bp, Glycine max
agcttcttatccaaggctcatcttggttgtgaatctccttcttccatggcttcttccctagagaatggcgcctcctctcacctcttctcctttgtcttccgctgcatctccatggtggaaaatcaccattaaaggacctcattgaagctcaaagatccagcctccatataagccctacaagcaagcttccatcatgaggggtatcggggcttttgtgaagctacatccttggtgaaatatattcaccatgtgttaggcccttccaaaactcctctcatccgcggactgcatacatatatgctgctcttgcctcccctcatcgtcgacttccattcggccttgatctatcattctgtgcaacaattcctccactgctaaacatgattctcatgtatgtagctcatcgggatgcaacaaacaagaattctctttatgcccaccgtggggaatcacacttc

SEQ ID NO: 219915 - DNA, 345 bp, Glycine max
actcagcttgtgggaacaaggggagggaaaagaaaatttgtgcgtagagaaaaacttctgaaatttttggggctaatgagaaaagaaaagtgctttggttttaaagctttttcttttctatattattaagcatgcacatgttctttgaggggcaaaaggccactttttttgatgtactatctaccacaagtggaaattgacttgaacgctaatctgctcggtgatgccgttttggtcagtctccgtttttggtcgtcggcagttcaagtagcattttataacgctaataacccatgggtcaagtgttcgtatttagcacaccaacagatttactatatagatacc

SEQ ID NO: 219916 - DNA, 425 bp, Glycine max
  unsure (1)..(425): unsure at all n locations
agcttanccctagaggggatggaccttttaggttttggagaggatcaataacaatgcctataggttggacctcccacataagtatggagtcagcaccacttttaacattttttatttaattccttttgcaggtggagctgatattgaggaggacgaactaacagatttgaggtcaaatcctcttcaaggggaaggggatgatgcaatcctccctaggaagggaccagtcactagagccatgagcaagaggctccaagagggatgggctagagctgctaaagaaggtcctagggttctcatgaacctcagggtagatttctgagcccatgggccaaggttgggtccaattatcttcgtacatattagactaggatgtcattatatttggtctctgtatctacggccccataatgtacgtagggtat

SEQ ID NO: 219917 - DNA, 485 bp, Glycine max
  unsure (1)..(485): unsure at all n locations
tgctattcggacctttaatctcagctacaattatttaatccagcccagtaataaatataatcaaatctagataagatctagatgaaataatatctagatgagatcaaatctaaataatatctagataagataaagatttgtagaataaaatagtctgccctctttaagtccaagcccaattctggattcaagcctaatgctctagtaattcctgaaattagattaanaacatcaaattagctgaatgggccaaaataataaaactgcctaattaatttgacaattaagactaatcaatacttaaaatggtgcaaaaagggttaagaaataggagaatataatggcacatcactcccctttgtgctaacacgagtagttgagggaccaacctcatgctccagaggcagtgcaagtccctgtgattgcatctgtgactgaagatgggactgcatcttgttgaacgatgccatcagctgccgagtcac

SEQ ID NO: 219918 - DNA, 393 bp, Glycine max
  unsure (1)..(393): unsure at all n locations
caattattaagagagtgagcgaaatgtgtaatgagtttgaggtggntatatagtaggtggcagaacttgggaggcggaagtgtcaaatatggaggtctttaccaacttgctttccaacttggctaccctttcatagtacacattttcacatcttaagtaatgaagttatgcattattattattagatcaaaacgctaggagttcggttttaccaagattaccttaattcttgccgaaggaaaaatgggttcatgcactcttttctgcttctaaagtactcttgccaaaagttgggggtgaagatcatatcataaatgaatcatgatttcacctttaaaggacccttgatacataactccacgcctacaccataaaggtttgttacattatatt

SEQ ID NO: 219919 - DNA, 425 bp, Glycine max
  unsure (1)..(425): unsure at all n locations
acgtgtatatcaccacacgtatattgagattaaatataacaaggacattctaacacattgntctcgaggtagtaattccaaaggttgataagaatgatgacgcaccattgtatgttttagttgtcatataaccttattttcacaaatatgtagtctaatgtttgatatgcacacgacataacatatattgaaagatgttagtttgtgaaataaactttagaacattcaaccatcaaaaggttactctgtaggcttaataagtctgaattcgatctctttgattaacaaagaaatgatctagatttgaatcttgtgtatataaagaatttacttgaaaagaaagatttcatcacaaatattcatccaaatcttccgatcataattactcacagacaacaattaatctataactctccattgaaaat

SEQ ID NO: 219920 - DNA, 443 bp, Glycine max
  unsure (1)..(443): unsure at all n locations
agcttgcttgaaacacaagggatgctgtttatgttggacttaacctctctgggatctagagatcctagtgtcactttgatagaatgcatccaaccagactcattntgagtttggtccatgactctgaactcttaagaaatgaagggtgtggatatagaaataaaatgcaacttggtaaatactcaaaccagtgaaggatagataagggtttgctgaaagcagtcccacactcccacctaaaactaaatttcaaatagggtactctgattgagtgattctgtataaatcataaatagaaaaaagcctgatcagattcttgttgagcttgcttaggcactgcctaatgtctaaagttggatcaccctctaatgtaaaagaattgagcataacgtcatttatctcaacttgaaaggatctangaacagtcagaatatatttctatt

SEQ ID NO: 219921 - DNA, 395 bp, Glycine max
tgtgatgtacctaaacaggcgaactcctggcagtcaacatataatacgaaaacaagaccactaagccaggaggcttgtggtggctggccacctgtgaattttgtgtaatatgtggaattgggcctctggtaatcgattaccaagggggggtaatcgattacaaggcttaaaaatgaagacagggggctaagatggtctctggtaatcgattaccacgggatgtaatcgattaccaggcttgaaaacgaggtcaggaaactaaggaagcctctggtaatcgattaccaaagggtgtaatcgattaccacgcttataaagggaactgggagttgatggacgcctctggtaatcgattaccatcctgtgtaatcgttacacagaggaatggatcactt

SEQ ID NO: 219922 - DNA, 421 bp, Glycine max
  unsure (1)..(421): unsure at all n locations
tttatgttgctaccatatggtcacaaatgctttattttgttgattnttaaccgagtatcacagagatgacaatgcttcaatttgaataatgactgtatcagagggaaagtaagtgtatcatctattcatctattgaggaaaacatggtagaatagcatcttatattatctggtcatgtgagaagaccattgaaagcattggtaagaagagttaattagatggaggataaccccattagttagaggtagtgaaaaaccaagaaaaactgtgagagaaaccattaaaaaggacttgcatttcaatgacttggcttttgacgagacacaatggtgccatttctcatttgatctatgcggctaactgcacttagtagttagtataggaaaagactttcgctcgactatttaactttgttgattca

SEQ ID NO: 219923 - DNA, 271 bp, Glycine max
tcatggggaacataaccttcacttacttggatgtcaaaaaagcaatcgatatttactttttcaacttgtgaggcaaaatacctagcagctacttcatgtgtttgccatgcagtctggctcaaaaatttggtaaaaaagatgggcatgtaaccaaaagagccgaccaagatctttatggataataagtcattcattgctctaacaaagaatccagtgttccatgattgaagcaaacatattaatacccattaccattgcataccggagtaca

SEQ ID NO: 219924 - DNA, 250 bp, Glycine max
tggggatgtcaaatggcgtgctatttgccaaaacacagcttggtcaatacccacccaacccgggcatattcagtcaggagaacctgtgactgtacactaatatggggagcttcttgcttgtcaccactaatagaacacagtccactacactaggaggcttgtgtggcggccggccaactattctatcatgcggtgttattttgagaaatacccctctggtaaataaataacattcttggatgatccatca

SEQ ID NO: 219925 - DNA, 401 bp, Glycine max
  unsure (1)..(401): unsure at all n locations
ngaagagatgaggctcgtattgcgataatcggctaccgatgtcgtataatcgattacactattgcttgagacaatgaatgatatcacgagtctctattccaagttagtaccaagcggattaatcgactacttctctcttggctagatgatcataagtgaacaacaacactntaatcgattgcttacagcatctaagtgattacatcgctcttaagatatttccaaatgttggaaagaagactttaatcgattacttagacaatataatcgattacttctatgaactaatcaattatcttgtctatttaatcgattagaggcggatatgattgttgtatcggtgaataaccaacttgtgttcactccgaaatacatcaagagaataccctcatctgataata

SEQ ID NO: 219926 - DNA, 460 bp, Glycine max
  unsure (1)..(460): unsure at all n locations
ctttactaagaagtcgacataacatatatttattgtgagtgcctattcattcttaattaatctatattgcaagacattaatgtataaaattaaagaaaccataaatgttatcttaaaatggaaaatattaatcaatatcctaatagcattcatttaagaacttacactacaaatatttagaagataaaaacatactgtgctcatttttttacgctctcttacacttaataaaataaatatctttatttttatttttttaatcaatattcacaactattatacaaaccaatctttagtcttaaaaattattggtatattcgaagagtcttacatgaaaattaaaactaatctcgttaaatatacaacattcattttttaaaagcttaataaaaactaattttgacttgttcaaataattgacatngggagaagtgtgtgaatatatagaaatggatatatt

SEQ ID NO: 219927 - DNA, 456 bp, Glycine max
  unsure (1)..(456): unsure at all n locations
taagtgactgggctgcagcttaagagatcngccncttgacaacattattgttgatattctataaggggtaacaactagacattctcttaaagatttatgcaataatatgacttttgtgtctatgattgaacctaaaaatttagatgaagccataatagatgatcattggatagttgctatgcaagaagaactaaatcagtttgagagaaacaatgtgcgggaactagtagagaaacctgaaaactaccccatcatatgaacaaaatgggtatttaggaataaagtagatgaacatggcataatcattaggaacaaggcaagattacttgcaaaaggatataatcaagaagagggaatagatacaaagaaacatatgctccagttgcaagattagaagccattagaatgcttttagcttatgcatccataatgaattntaagctttatcaaatggat

SEQ ID NO: 219928 - DNA, 461 bp, Glycine max
  unsure (1)..(461): unsure at all n locations
cttggaaaatgatntctatactccaaaatatacagttctgcttgtcttgaatcaaagaaagaacaattcacttgtcctcaagtgacaaatacagnggccaatcaaaagaaaatggtgtttgattcatcaaggacatcaaccatatcaactgaataccatggaatgcttaaatcaattacttctcacaagcatgcagttttttcaaagataagagcacaagtattagagtcacaactgaaataagctagtaagcatgacaaaaatcaaggaaggatcatcaaccaaaacctcacagtcattgtttcactcaaactcaagtgtttaggcttattccatcataaataaccaacataagttccaacctttgcatttcatctcctattatacaacaatgaacacacaaaaatgaattcgaaggactttctaggcttgtaatggggttgggctgccaaaaattcatg

SEQ ID NO: 219929 - DNA, 421 bp, Glycine max
  unsure (1)..(421): unsure at all n locations
agcttggctgcattgngcagagataatagaaagcttggctgtatngttctattaataaagataggcttacaagctactaatgaataatacaagctcatggttgatgaagcatgacatgagacagcttcatggcaaagtgaaagctatatgtgctgnttgttgtccaaacagacagcttcatgacatgagacagcttcaagataaaataactagtctacttcccactcagttctactactagtcaacacttactttgtttgcttgccagattcttaggtgattataataataattaccatcttgttgaatgttatgttaataataaatactaattggactgcaatattagagttggacaaatacctcaatgaactttcgaaaaccatggcctagaggagattcatgatacaaatcatgaatg

SEQ ID NO: 219930 - DNA, 473 bp, Glycine max
  unsure (1)..(473): unsure at all n locations
gatgtgaagtgttgacggaatcacagcttattttttttccnctctctcaaaanatagaacatttaaaattgagattgatgtgatagaacagaagtgttttaccactacagtaaacagtgaagagtggttatggcattacagatttggccatttaaattttatagatctgattaagctaaactcaagagaaatggtgctgggtttgcctcagatcaagcctcctagtgaagtatgtaatggttgtttacagtgtaagcaatcaagaagtactttaaaacaaaatgtaccaatcanggcaaaggagaaacttgaggtgatttactctgatgtgtgtggccctatgcaaattgaatctctgggtggaaacagatacttcatatcctttattgatgaattgactacganagtatgggtttacctaataagaaggaagagtgatgtctctgaagtctttgagaagttcaaanatatgg

SEQ ID NO: 219931 - DNA, 118 bp, Glycine max
tacgcgccacaagggaccaggaaaagcgcggggcagcaacccgggaaaaagggggtgcattgccaaaaccaagcttgaccaaccccgacccaacccgggcaaaaacgcgcagagagaa

SEQ ID NO: 219932 - DNA, 477 bp, Glycine max
  unsure (1)..(477): unsure at all n locations
ggacaatgataatcaagatggtcaaacatcaacacatctgtcttaagcaaaacttgaagaacgcatcttgaagtaagtaatttatccttatttcttacatttgctatataaaagaagtaaacataagaatatacacagatataaaaatttgtgtgctataaattctntattatttattttcttaatcaatacaatagtttaaccaatttattcaactacaaaaattgggattaaaatagatcaagacagtttttttctaatttctaatgctttagaaactacaaattataaaccttcaacttaattttgaaaactagaaccactaaatcaatacaactattatcagccttgcaaagttgaacttaaggatgactcaagcttgctagttgcaagctatcaaccactaccagcagcattcacaaaggtacgtaaatcccaaatcgcaataacctctaaaaatagcacacttatgtttat

SEQ ID NO: 219933 - DNA, 469 bp, Glycine max
  unsure (1)..(469): unsure at all n locations
ntatgaataacttttaagcaggtaagtcacatatcatactaaaaatatgctagaatcataggcactatcaagtatttgttttaataataaacttcatgcttcgagaaagaaaataactcaatcaaacatataagcacatactcataatagcaatcaattaagacaaacaaataaaattttgttagtcatcatataaacaagttaattgagaggaaagtttcaaccaacttaatttaaaagagaatggctttgatgttacctttttcatgatttaagtgcttagatcttcaaagatggaagtcagacttttgctttttgcttaatcttcttgagagatgttctcatcactctcatagtccttggatagaaggttgatctccttcttcgaaccatcggatgagtcattgtcatcctaagcaatatacgccttcttggatcttcttccttatgacntttcttctctggccat

SEQ ID NO: 219934 - DNA, 473 bp, Glycine max
  unsure (1)..(473): unsure at all n locations
gtgagacagnaacagaaacatatgataaacgcatgtgcaactttgtctatttataacaaacagtaaatagaataaatntaaataacagtacaaggcagcaccaattccctgcggtaaacttctaaaactaagcttttaccgatgtttcaattccaacattgtattgcacaaattcatgcttcacttcagcatcccaaagctcaggaaatgcctccttgatattatgaatactctctaatgcatgatccactccagtggtacgaacagatgtaccaatctgcatgcacgtcgcatttgtatgaaatcattttattctaattctaatgtatgtatttcaaagggagaaaaaaaaaaagacctcacaatgtcaaactctacaaatatttctgtcctaatgcaagaataagaacacgtgactttaattaacacatgaatatgaactactctaagttcgtccattcaactaactatat

SEQ ID NO: 219935 - DNA, 464 bp, Glycine max
  unsure (1)..(464): unsure at all n locations
tcttaccacttggaactacagacattattagcttcttaattttgtttatacacacactacgcaagggaactagntatattaattctaacgttattaaataatttcaataaatatatttgaaaacggcaataatttcattactagattaanaattaccatattttataaattatatctataaaatttgacattgattgaaaattatttaatttaatatgtcaaaattaaaaccatgtatatttctaaaaaaatgaaaataaaaattatttatattaataccaaaattcgtcaagatttaacataaataattcatataataaatagttataaaaacatctctaataagaatgcagatctgtgtaattntctnttcatttgaacatatgacataatgttacttatataaataagtatttcttaacaaatttatatcataaataacatattctttaattattataaga

SEQ ID NO: 219936 - DNA, 485 bp, Glycine max
  unsure (1)..(485): unsure at all n locations
cgtcgtatattggctccagtgcttggcgatggccacaccaggtagcttatatctgattccaacaagcattaaataacatgatcaatgtgcagatgcaaatataacacaaaaaagtaaagggttaaattttacctcgaggagaacatcctttgactcatccaagacaatttcatcaaaattattcccaactactattttcacatcaccatcattctgttaccaagttagcaaacacgttagacatgaaaaactaaattaatagaacataattatggtggaaaaattaagtaacatacactttcaggaactggatctgacttgtaaaaaggttntagcttgtcttcaaggaaatcgtccncaaatgcctgtggaaaaatgaagattagaatcttagtcaaaatattgctttcaaacattattaagtgatagataaaccatccatgtacttttcctaacattaacatgttagcannaataactgaaca

SEQ ID NO: 219937 - DNA, 377 bp, Glycine max
  unsure (1)..(377): unsure at all n locations
tgctgtatgttatgcccaatgaggagcttcataactttgctatttaaacaacttattgtatcaattcatagtgcgcaaaactgaattataaacttgaaatacatcaaagtagttttgttcctctcttcttcttcatatacgattatgctttatggtttatacttcactacttttatgctgtcttagtttgattgcatagtctaatcagatcattgctcagtttgatagctatttccgcttcagtctggtagagtcatagtttgatagcatcagtctaaaagttgttttcttcagtctgataacattngttaactaaaatcaaagtatgacagaagcatccttttagacatgcatccacacacccatagaactcatag

SEQ ID NO: 219938 - DNA, 408 bp, Glycine max
  unsure (1)..(408): unsure at all n locations
agacgatgaccaaaagccctaagaatgatctcaagatccggtcaaccagttcaagatcaagtttaatttcacgcttcatgagaagattcaagaatcaagagaagtttgatttcttgattcacgagaagaacacaagaagacttcacttgagaagttttgatgagatntttcataacaacaaacatagcatagttttgtntttcaaaagaagttttttgaaattctctaagttctagagtttttactctctggtaatcgattactagtttcctgtaatcgattaccagtggcaaagttcgattctaaaagtttttacttgaatttcaactttccaattgatttcaacatggtgtaatcaatttctagaaattcgttatcgattaccaccgtatctgaacacttgaaatc

SEQ ID NO: 219939 - DNA, 466 bp, Glycine max
  unsure (1)..(466): unsure at all n locations
ntntggagtagaaacatgggaccaactcattntatttganataaagaagtcgtatccagtcaaggtctgagagaccatacaattttcctaacgatttctaattatgtgggccattaagtctatcatatgctgacaatagccgagaagcccatgaatctcttcgggggcggagtaggtgtctgccatcgccttggccttggctaacaatcggggaagttcttgactcccgttcaaggtaagagcaaaccgatccatccacatggttgcctcttggtgtaaagagtcgatcacccttcctctagcctctttttccgcatacacttgagcatactcatccgtgattctatgctcgtgggccgtggctagacctaactcttcttggtacttggcgatgatagctaacatgttggtctctgtctcgcataaacgctgagacaaagcttctttggaccttgaacaagcaatc

SEQ ID NO: 219940 - DNA, 454 bp, Glycine max
  unsure (1)..(454): unsure at all n locations
acctgcggcatgcaagctngctctaaattacattgatgtggtatttattgtatgaggttgtatgccattcccgcnttaagagtagtgtcccactggtaaaactaactttccaaatgtttgccttcgcaggaaatggctcccaggaagcttgcctcgaagaggtccaggaaggacaaggcagccgaaggaactacttccgctccggagtatgatagtcaccgctttatgagtgctgtacaccagcagcgctttcaggccatcaagggatggtcgtttctccgggagcgacgcgtccagctcagggacgacgagtatactgattcccaggatgaaatagggcgccggcgcggggcatcactggttactctcatggccaagtttgatccataaatagaccttgangtttatgccaatgcttggccaacagaggagggcgtgcgtgacatgagatcct

SEQ ID NO: 219941 - DNA, 481 bp, Glycine max
  unsure (1)..(481): unsure at all n locations
actaagctntnggacaaagaagaagaagaagttcanagagattcaaggcttgtaaattattgtaatgaatngattgaattgttagaaagattttttaaaatgcaaaacaaagccttgctgttatagagtcttcctgtctggtcaagaggaccatttagaagagttataacttttagaaaaacttaaaaccaatttgaaaaagtcaaaaaccatttgaagagttacatcttttgatttaattcagaaacaatcactggtaatcgattaccaaattagtgtaattgattacacaaagctttcatgtgaaaggatgtgactcttcacttttgaatttgaatttcaacgtttaaaggcactggtaatcgattaccaaaacattgtaatcgattacagctttttgaaattaattggaacgttgtanattcaattngaaaactctttcaaaacaattntgctactggtaatngattacaacaatctg

SEQ ID NO: 219942 - DNA, 455 bp, Glycine max
  unsure (1)..(455): unsure at all n locations
agcttccacatccgacttggaggagctgatttntgtcttctttgcaatatcgnacaattccgatatggctcccgatcgcactcagctgcagaacatggttaagaaggaaagtgagacctttaaagagtacgctcagcggtggagagacctggcagcacaagtggcccctcccatggtcgaaagggagatgattaccatgatggtagacaccttgccagtgttttactataagaaagtggtaggctacatgccttccagcttcgcggacttggtattcgccggggaaagaatcgaagtagggttgaagagaaggaagttcaattacgtctcctccacaagtaccaatgctaggagaatcggagcaactgtggcaaaaaggaaggaaggagatacccatgccgtcacttcggcgcccacatgggtcaagccaccgcagaactctcatggtacccatc

SEQ ID NO: 219943 - DNA, 446 bp, Glycine max
  unsure (1)..(446): unsure at all n locations
tttagctaacaactttatactatgggatttttatatttncttccatcttattcttttcttgctcgctctctctctgctcctctttttccatgagatattttgctacctaaacatacgtatatttttgtgaggtatcttgctatatacatgcgtgtccaaggtatcttgctacctaaacatacatatatatgttctgtgagatatttttgctatatacatgcatatccaaggtatcttgctacctaaacatacatatatatattttgtgaagtatttttcctacatacatgcatatgcaaggtatctttttacctacacatacatatatattttgtgaggtatgactaccttccgagcttgtgctcgtttattaaaacttctacgatcatgagccactaggtgtgtcctgctatgactctagaaactacagtgatcatataacaagc

SEQ ID NO: 219944 - DNA, 369 bp, Glycine max
  unsure (1)..(369): unsure at all n locations
tgacttatgaatgatccttgcttggccatgaaaaacgtgtacatcactaccaaatatggtgtgcttcacttttgaaattttacttaaaaaggctatagtagagttttgccaaaaatggtgaatttttttttttatactaaaattggtaaatcttatcctaatcttctagattagggtgctaaccaaccttaggatatgtgtactatttaacatcaaatntaccatatatcatatgcagctaaaacatttatntgtactttaggccttattttgaacaaactcgctatgtttaagtttttatatatttagataggaatacgatataaaagttttaatatgatttttgagtacgaaaaaagggcattttac

SEQ ID NO: 219945 - DNA, 339 bp, Glycine max
tttctagcttatttggatgatgccaaacactcacgtcaggaattaatagtcaagccagtttccagaatcatagagtcgttcaatcaagcaagtctcaagaatcaagattaaagtgaagattcaagacaagactcaattaagataagtattaaaagagtttttcaaaatattgaatagcacaattttgttcaagagtaattttcaaataaaaatcttttaccaagatttttactctctggtaatcaattaccagaaggcagtaatcgattactagtagccaatattctctttcaaactgatttacacagttgtaatcgattaccataagcatgtatcaat

SEQ ID NO: 219946 - DNA, 475 bp, Glycine max
  unsure (1)..(475): unsure at all n locations
agcttaaggccatttaagataccacagagctcaattcttattgtcttggtgtagncataactgccaatgaaaccaattagttgtacaccaagagaatttcaaatgagacctccaaacccaacatcaccaagaatgccaagcgagcctccctcaacattgagtttgacaaagttatcaggggggatccatttgatgtagcggcattgcttattgacaacatgcttggaaaagaccttctagatgtcatggaatgttgatttagacttgttgatcaggaaccacaaagaacattgctggtcatttaaaacaacatcatttttggacctccaaagaaaccaacagatggttgaaaagagttggcatctatcacctggtgtgttcgtttcgaaccattgagagttgattttagccttagtttcactttagttattagtcaattcaatcaagaaagagaaatcccatagagaaacgtccg

SEQ ID NO: 219947 - DNA, 478 bp, Glycine max
  unsure (1)..(478): unsure at all n locations
tgccacccagctcgcccaggcgagcaaggttgcttcctctataagcaacagccttctggaggaatcttcaagagggcccaagtgggcctggttgctatttgcacccccattnttactaaatacaccccctggccttttttggtgattcttttttcgtaaagttacggaaacttatgaatttcgtaacgatacttgttttctttctgtaatgttacggaaccttgtggattacataatcatccncttttttgacttacggaatgttacggaacctcactaattgtgcaacgatgcttccatttgatttccggtgtgtcacggaaccttacggattgtgcatcaatattttcttttgatttccggcacgtcacggaatttcacaaattgcctaatgatgggtgccaagcacctcaaaatgaccaaacacaagttgcatgccaccaagcacagggtcctcggaaaaattanggtatgacag

SEQ ID NO: 219948 - DNA, 455 bp, Glycine max
  unsure (1)..(455): unsure at all n locations
cgcggctgcaagctatgaaacaactgcctaatcaagccttattttcttgttaattangaagcatcaacaagaatcaagccaatgctattgtgcaagcaatcattggggcaaaacacaccaaatgattatgatgatggatggctcaacttctcacaaaggtaaactcatcactttcaaattaagctttcacaactatcatgacagtagaagagaatcaaggagttcaagtcaccatatgtcaagaacttttattttcaaaacaattacccatttcttgaacatatcctataattcatagaaaaacatgcaaagtcatacatgcacacagaattgacccaaaatattaaactagaaattcgacgaaactaacaacattagcacatctaacatattaacaaaaccaactaaactagcataaccaaagaacactctccccccctcctctatacttaaac

SEQ ID NO: 219949 - DNA, 427 bp, Glycine max
  unsure (1)..(427): unsure at all n locations
gctttcgtacgtgaaatcaggtgtagccatctcccttagagtcctttttttttggaggttgtgccatgttctcacaatgttcataatcataatgttcaaaattataatgctcaaaatcaagatgctcacaccagaagcttcatgaaatgtcctgtctatcacaagatgcctaactaatctatgaaatttcctatctatctcaggatcaaagggttgtaagtcagatggattgcctctagtcatacactatattcagcatgcacaactagntgccttcttatgcaagtaacagtgtanggttgaactacaactaccctcaaatgatatccaaatgacttagaattttgtgagaaacaccctataatcatgaaaagatggcaccaaaantttcaggcaaaaattcaaagtctaactatggaaactacct

SEQ ID NO: 219950 - DNA, 329 bp, Glycine max
ataagaccgaacagttagaagaatttctccaacagatggtagcaaccatacatgactaggcccatattgagaaggacgaaggatcaggcactcaaaaatcttgattgttgacgcccatatccatatttatattctgcaattgcgattaaataaattggtagctgaatcctatgcctatttagctgcaccaagttcacctaatttagtaatttaatgctacactatatgtattcaactcatgttgaacgacaggaattttcggcattttcagaaaatacccattcatgagaagttctttctgagttacttgtcgaaccaattacgaactt

SEQ ID NO: 219951 - DNA, 314 bp, Glycine max
cctaattcaaaatccccagaaagatggttcctgtacaatggtactccgtgggtaggatctcttttcccattttcactgagccgaactcaagaagttaccccacaatcacaaactacaaccttaacaattacactacgagccggcttttcttataattactgacaaaagaaacccatcaacccgtactctaacattagaacctaagacgggcagattcccaattaataaccaaacttcgcttcctataagagatcataatattgtgaaacagatagaattagtctaaagggacctaaaacaaaacaagtatttgt

SEQ ID NO: 219952 - DNA, 473 bp, Glycine max
  unsure (1)..(473): unsure at all n locations
taagacaacttgtgtaataaattacaagtaaggttgcaatcatttattatagagagttttccttctgaagaatgtttccaactttagaaatcttcttaattcttaataatattactaatgctaatgcaagcaataaagcaataaactagctctttccatatgcttatgcaatgcaagcaaatatgcaattcatacgcaggtcatctccccctttgggcattaacaaggccaaagagtttaaacttatgcacaaaaaagaacacacaaattgaaggaaataaaccatagcatttcattaatcatgaaacattgcaaacaattaatcattaatcattgacctttctaatcaaacacttaattntcttcacacaaacacacacatggaataacataacacaacagactaacaaatagtagaaccaagcactgaaacataattacgcttcatccttaactgagttaagaagttactg

SEQ ID NO: 219953 - DNA, 341 bp, Glycine max
agatctcttatactcttgaccacgcggaccatggctttgatcaaacacagcaagttgctggctctacaacatatcaaaagtctggattggagatggatatatccccatatagaggcccacaaacaagcgagtaactgattcatcccccattgcatgaaggagggatttgagatagagtgaaagttgctgctgccaaaccatatgccataacaaacatgactagagccaaaaacgtcttctctcccatcttatcccgaatatgtatacaactatgttttcagtattatggagtcctgatgaacaactcgcagcacaatattacttaattatagacttgatat

SEQ ID NO: 219954 - DNA, 480 bp, Glycine max
  unsure (1)..(480): unsure at all n locations
tcaagaaaaagatggcctcagcacattccttatgtccataatgtaattctatcaatagacctccaatctttaatggagagggttaccactactggaaaacccgaatgcaaatttntatcgaggcaatagatctaaatatctgggaagccattgaaatagggccttatatacccaccacagtagaaagagtttcaatagatggtagttcatcaagtgaaagcataaccatagaataacctacagatagatggtctgaagaggatagaaaacgagtacaatacaacctaaaagccaaaaacataataacatctgccctacgaatggatgaatatttcagagtttcaaattgcaagagtgctaaggaaatgtgggacactcttcgattaacacatgaaggaactacanatgttaaaagatctaggataaatgcactaactcatgagtatgaattatctagaatcgaatacaatgataatattc

SEQ ID NO: 219955 - DNA, 412 bp, Glycine max
  unsure (1)..(412): unsure at all n locations
tactaagcttaagaaaggccnactccctccaaatcagatttctgcttaaataggtggctttgttcgcgattgtgcgcttagcgcaattctgaaccgctcagcacacattattgaatttcgacttagcgcggcttttctcgctcagcggatggactgaagcggtgcccttagcgggatgacccttcgctcaacgaacatgcacagctcatccttcttccagattcttcctcgcgcttagccaaggattgttgcgcttagcacatatctcgctaagccagcagattggcttagcgagggggtgaaaatcagcacttcaaaaattcaaaacttgctacaccccattgccacatcatatagtcacactttgtgcatgttcttcatactttacatgtctcatgacacctaagcacac

SEQ ID NO: 219956 - DNA, 445 bp, Glycine max
tagaacattcactatcatgtacatataggaatttcacgtttagaaatggaaaattaagaagacaaaaaagtgtgtgtagtatgtatataggcactcatagacgcacgatgctgaaaaatgaaagcagaatagctatatatttaattattatgattttgaaatatcatattcaatttttcaaatctttataacactaataatctctcatgatggtaactatatgtagtaaccatgatcatataaaaagtaaactaaaatgtagtattaattacaagatattgcattaatgataattcatatatggtgatggcatggaagataggagatatgtagtataagagaatgttctcatgggaaaaaaaagagacactagctaaaaatgaataatagtagaatggcaaaataagcttggtttcatacttgatcaagcattaacagagacata

SEQ ID NO: 219957 - DNA, 452 bp, Glycine max
  unsure (1)..(452): unsure at all n locations
cctgangcatgcaagctngtngatcttgngttactaaaggaacaatcttcattattattatgttatgtttgaataataatttataagtaaaatggagaanaacagaagaaggataaatttaacataattagagtaaaaaaaaaaatacattatttaaatagataaaaataagaagaaaagaggtatattttttgcagtacttgtttgtatgcgtggaaaaagagaataaaaataaattgtatatataaaaactattttttcactaattaaaaaattaagttaaacctaaaagttaaatttttttatttcattattttttctttgtaaaaaaaaattatttattattttaatgttatataaatatttaatatttaagtaaacggaaataaaaaatgaaaaaggagatttattctctctatttcaagctcaattgagaagttttttatatatat

SEQ ID NO: 219958 - DNA, 447 bp, Glycine max
  unsure (1)..(447): unsure at all n locations
ntngatttaataaattacataaatctatgtaatcttgtgcatgagtgatatntgtggttggaatgaaacaggcgtgagtagcaatatagcattattcagttgttagaaatggtgtcggatttacatgacaatatggagggcttttctttcagaggagttagcaataccctctctccctaacactttntattgttaattaacattcattaaaaattaaaaaataatgagaaacttataaaataagaagtgatttataaaatttattaactttcagtaaattttagttaatagtaatacttaaagagtgggctagagtgtgttgttaacatttttatttatttnntttctttgagtgtgttgttaacatttctattatttttttcttttgagtaagatnggccatatcctttcctctctttttaaagtgtgatttgtaagtgaataatc

SEQ ID NO: 219959 - DNA, 381 bp, Glycine max
  unsure (1)..(381): unsure at all n locations
tcaccgagaaagccattggtaacactagaaggaagcggcaatgggcacaaacttccaggattacagaaactgagctgaatgctggtgatagtgaaggacattcaaatagtatcacagctggtgggtgcaggaagaaaaggcaaacagttgctccactgacacaagttactgtggagaagcgaatcaatctcaggcggcataagacataagtttagtctcacgcctcatctgggatcaataacagtntacattatatgttatgctaactgcgtttattcttggtgataattctctaggatgagggatgaactgaatatatatgggtattgatgtctggattaatgatatgcttgaaataaattcatggttgatatcacactg

SEQ ID NO: 219960 - DNA, 463 bp, Glycine max
  unsure (1)..(463): unsure at all n locations
tagcccaagaggggatggaccttttaggtgctggagaggatcattatttatgcctatagggtggacctcccaagagagtatggagtcagcaccacttttaatatctctgatttaattccttntgcaggtggagctgatatagaggaggaggaaccaacagatttgaggtcaaatcctcctcaagggggaggggatgatgcaatcctccctaggaaaggaccagttaccagagccatgagcaagaggctccaagaggattgggctaaagttgataaagaaggccttagggttctcatgaaccttatggtagatttttgagcccatgggccaatggtgggtccactcttctttgtaaatagtagaatacgttgctttcttctcttgggccttgtatnttggccattctagtagtataggggtttaagccttgtatttcacgggcattttgagtagtctctgtagt

SEQ ID NO: 219961 - DNA, 426 bp, Glycine max
  unsure (1)..(426): unsure at all n locations
tatatatatttatatatatatacacanatatatatacaagtttatttaataaatatnttaatattaactcaataattatacacaccacaatttaaataaatcgaccattctatatataataggcagagtgcatcatactatcgatagtacaacttttactggaaaagtataatattgcgtccaaagttgctaactctattcagccgcctagagcaatatagctatatatctaaaaatatattattcgtactatcaccggtggtattggtaaggttacgtaagcgacaagcgggtgtttcctgagctctttctaatatctgtcatccttttctgttaggcctctatctttaaagagaaatataaatgattaaacaatatttatcggctccacatagtccaataacaagagtttcagcggacgcccta

SEQ ID NO: 219962 - DNA, 483 bp, Glycine max
  unsure (1)..(483): unsure at all n locations
tttcacccatccttagaatgagctttccttgcctaacctctatgatcatgtcacaatagtattcatgaatggatgccccaatatgatcangacgtccttatcctctttcatgtctagcaccacaaaatcagcaagaaagataaactcgtccaccttaaccaacacatcctcaactacaccattgggatagacaataggtctatcagtaagctatagggtgatgtttatgggttatgtttctctcatgcctattttttttaaaaaaaattgagtaagggaataaattgatgcttgccccatatcacaaagacatttctcanagtatgtgtttcctataatgcaagggagggtaaaaatcctaggatccttaagcttatggggcagctttctcaatacaacaccagaacactccttagtaagacctatngtctcattctattaatntctttttgatggaaataatttcctacaaattttgcatat

SEQ ID NO: 219963 - DNA, 473 bp, Glycine max
  unsure (1)..(473): unsure at all n locations
tcacctgcggcatgcaagctttctttctttnaagtaaggtgaagcagtaccatttttttcttttgcaaccgnctatatatagggtatcgctgtagaccttgaactatatggcttctgagtaataattataatttctatctaaagagtatntgatattgcttgtaggagtactctgcaccgtagagtagtaccctaggtttattttccctttattccccattggtaaacatccaatttgaagacatcaaaattttgcttattcattctgagaagtcattggctgcgattttaatgaattataggagataattgctttggcttcctatctgtcgcagatgtgtgaacaagcaccggaggcacacaagtcaaagggagccggccattcatcaagaagacgtaggatgagttccgactctggtcaacctactaaatcatcagttgatgcaattntgtcaaatatgagctctgcattt

SEQ ID NO: 219964 - DNA, 482 bp, Glycine max
  unsure (1)..(482): unsure at all n locations
ntaccgtgctgctagcaagactttaactttgggaagaggcatgttttctgtgtgttcagccagtgcaacaatgccaattggcaaaactgaatgtggctcatacccaaaaactgcatgttgggcaaactgttgttacaatgaaagagctacgaccaagaagatacaagtaaacagtatttcaatgacttattaagctaaattctgcagacaaattaactccaagactccattcaaaataggaaacacaatttatgtttccatttcaagagaatattcatcttatgcagggaaaggggagctcagacaaaccataagcacgattaggatcaaaggctntcatatcctctacgtgaagtgtgatgggaaagtaattgcaggcgtgcttgcatatgaacctgagaggtaccatacatccacatgagagatntatgacacacagtagacaaagacaatgctcgaatcgtgggcagaaaggtacaact

SEQ ID NO: 219965 - DNA, 324 bp, Glycine max
taaccgatgtgggacatcttaacataaataaaaaacaacagcgtatgaacctgagtattcacccataatggaaggcaaataatggaggaaaagctacataccctcgcttaacatttctttcaaccacctgttttgaggttggtggaggaataccattgatttaattattaggacctggatttcaactgctccagccaaagaagggaaatattgaacagatacctaatgcactgtaacattaaatgtaaagatgcctgataagtgactatatgcccgaaaacatgcgaacatgaacaaacttttataatagcgcctaatgaattt

SEQ ID NO: 219966 - DNA, 432 bp, Glycine max
  unsure (1)..(432): unsure at all n locations
tatttcgaagtgtagcatagatggtgccccgcgttgctaacatagtgttttctgcttcattattcgatgagcccttgagataatcggagataggaggaggaggctttccgtaagtgacctcgtaaggggtgaactcagtgccggagtgctgggacgtgttatacgaccattcagctagggctaggaatttataccaatcagaggggctgtgatgaacgaaagaacgaaggtactggtcaagcgttcggttcattacttcggtttggccatccgtttgaggatggtatgtcgtactcatgcgcaacgacgtgctgcttagccggaaaagctctcgccaaaaggagctaatgaagactggatctcggtcggatataatgctccggngaaacccgtgtagcttgatacaatgttaatgaagaggttggccacttt

SEQ ID NO: 219967 - DNA, 483 bp, Glycine max
  unsure (1)..(483): unsure at all n locations
tcttcagagccatttcctacaaagacacatccataatatattattttgcatganatatgtaaccattactttagttattctaagtatagcaaccaagaagtcaatcaattttatgtggttnttgccaattgcatgtgttaccgtacaactaataaaacaaatcaactcagtgtgtattattttgaaagaatttgatattctacatcaatttaggtgcaatgtacccaccatgctgcagcaagtttaaccaataatttgtccaattcaaatcaacaattttaagcattcatgtgactcatgtatttgcatctaaagcaatgtctaaaattccaagcttagttcatgctcttgacatttaatctatcaacctaagttgatcatacatctgaaatgatggctggacatgcgtaaagctcattacttattcaaaattcanaataacacatggaatagccattgtgacatttcatcaaacagttggtg

SEQ ID NO: 219968 - DNA, 444 bp, Glycine max
cggacctatgaaactcagcttttatccaggctcatcttggtggtgaagctccgtcttctatggtttattccctagtggatggcgccgcctcttacctcttctcctttatcttccgctgcatctacatggcggaaagtcaccattaaaggacctcattgaagctcatagatccagcctccatagaagctccacaagcatgcttccatcaagtggtatcagagcacaagagcttcaagtaagtgctccttaaacctccattaattcttgctttaccttctcttctattggtggttcttcatttttctccatgtatctcctcacatgtcttgtgctaaatgttgttaacatgattctttagagtttccaccgattaaacttgctatagaagctagaattgattttctatggttcaaatttcttggtcttgttcttgaaccatgaatt

SEQ ID NO: 219969 - DNA, 464 bp, Glycine max
tcttcgttgcccttaaggtgggcatagtatagcattattcttgttgtgaacagagagagagaatagggaatggcattataatgttgcttggtttgctcctggaaggtatcatagatggttaccctgcaccaaatgtgttttatatatttatgtgcgaaatccagttaaagcattgaggattaaatgcacagtaacatatatatacagaggtctattataaagagagagattacataggagccagataaataagggagttcacaatgtttcctgtaaagataagaaacaataaatagataaagtaagcaaattggcagagaggatgatgaattgatgatacatataaatctagacgtacatcaataagaacaactaacacaaagtacgtgcatataagtaggtattttatgtaccaagaactccaaatacaagaacaaatacatcatggtgggtttcattacttc

SEQ ID NO: 219970 - DNA, 318 bp, Glycine max
  unsure (1)..(318): unsure at all n locations
tgagatgaggaagtgtagaagggtgaacttcctgcttttattctgtgaccacagagtggtacctggagatatgtcgcggnggtcaggagaccttgtggacgtcatgtggggtgctattgcccaaaaccaagcttgaccaatcccgacccaacccgggcatagtcggtcagtgagaacctgtgatgtacctaaacaggcgagctcctggcagtcaacagctatgaggaacaaagaccacaaagcaaggaggcttgtggtggctggccagctgtgaatcttgtgtgatatgtggattatggcctctggtaatcgattacc

SEQ ID NO: 219971 - DNA, 467 bp, Glycine max
  unsure (1)..(467): unsure at all n locations
ntaactcanaatnncagatcaaacttagaatatctatgttatttattaatcaagcacaaactaccctttgtctccagacagacttgacacaacaagcaataaaagtgaaatcttaaaaatgataccctgaaagctggccangagctgcagctgactttaatatcggtgcatgatttgtgtccaagagctgtgccatgttctcaccaaatctttgctgtataatataccaaaagaaagcaatgaacatatgcatcatataaacagattgtttatcttataattagattagataaccagaacatgctccaaccttcggtgctgcatcatccaaagagtccctttgaaggggaagttttaatcttatctcatacgatcttgttgctagtgcatttgcagatccagggtttgcgactaacccatntgcactaccatttacaagatgacggctatacctactctgctgttgt

SEQ ID NO: 219972 - DNA, 448 bp, Glycine max
  unsure (1)..(448): unsure at all n locations
tgcggcatgcaagctntgatttanaacanaatactcataagcattattaatcattctatggcatgagcaaccaaaacaatgtcatacataaataaaagcacatacaaaattgtcttagaatttgggcttaggacctaactcaatcccacaaaaccagcttgattgatgtggaactaaacaccaagcaattaacacagcccccaaagaggccgcaaataaggtaggttaggggtgaccgcaattaaggtgactttccaacattttctgaaaacagtatctttaatggatttgacactcaatgtactactgccttgatccttaccaccaaattaaataaaccacatagtcatcatttaggttaagaatttaaaatcatatcaaacaggaaatttatttataaaattccacaatgaagctagtcttacacaaaagaaaggaattataaata

SEQ ID NO: 219973 - DNA, 289 bp, Glycine max
  unsure (1)..(289): unsure at all n locations
ggggtgatgttgcgcatactgatgggttccatgagggtgttgctgtggtttgacccacgcgggtgttgaagagacggcatgggcatctccttccttcctttntgcccctgttgccccgattcttttggcgttcacgtttgtggaggaaacgtaatcaaactttcctctcttcaatccaacctcgattctttccccggaacacaccagatccgcaaagttggacggtgtgacccctagcttctcatagtaaacactggcagagggtacccatcagggagaacatctctct

SEQ ID NO: 219974 - DNA, 478 bp, Glycine max
  unsure (1)..(478): unsure at all n locations
gtcacctgcggcatgcaagcttctagcacaatggacttaccttgaataatttctttgatnagccctttgagccttgtttccctttccttggtttgaagctcactataagccttacgtgaaaaaccatgatatcaccatatccttaaggaattntggagctttggaattgttttgggaataagtgtgggggtttttgtttcattggataacatgttttgttggccatgcttcatgatatattttgagccatacttgatatacattgcatattggttaaatgatggacatgctgaatatgatgctgtttctcanaaggctactaaaaaaaattattattatcaaaaacaagattaataacagaaaaagacatacagtaaaggtgagtgaatacaaaaaagaatgattaaactcttggctctactctctatggttaaataatatctttacttctttttattttcttatgtttgcttaatat

SEQ ID NO: 219975 - DNA, 471 bp, Glycine max
  unsure (1)..(471): unsure at all n locations
gcagttaatgagttaaatcatanatggagtctcaagaatggttttacactttttattctataacaatttcacctagaacttttgattaagagaataaaaatgaaacacgtgattaagttaaaaaccattcttgaagccccactaaacaaattaaggttttcggtgttcagcatgatactagagcttttatgtccaagtagtcaagagttcaatccttgtctccccattctttgtaaatatattaaatttaagcacagataaagtgagtctgtgtgcattgtcctcactttaagcccaaaggctctggtgtgaacagctgtattgagacttgagagagacaaacaacattgatacatcataacagcttaagcttttgggagaatagatctatgacacaacattccagacagttgataaatacactcacatgaataatttcacaactggttcttcaaaggcgaagttcttgag

SEQ ID NO: 219976 - DNA, 382 bp, Glycine max
  unsure (1)..(382): unsure at all n locations
aagcttagagagaaactaacctctagacctctttgcttctttatttgatcngagatgggcttgtgccacaaccttcagggtttagatggagccagtagcagcaactctcttgagggttttcattccttcatgataaagcctanagtcaaagaagacaacaagatgccaatatttgcactcaaagcagatggaagggtgatacatacggataaagaatgatgagaatcctaaaactacacaaatacagggacctatgactaggagtaggaccaacagtcagtggatacctccaaanaatggtgcaggcatacttacaatgcccaagtggagaaggatgaaggcccaagtggagaaagacgaaggcccaagtggagaaggatga

SEQ ID NO: 219977 - DNA, 472 bp, Glycine max
  unsure (1)..(472): unsure at all n locations
ttatgaaattntctggttntccaaaccttgaaaacttgtgctattcatctttccattctcttatccctntgccaaaaagaattcgccaaggactaaccgcctgaattctttttgtgtctcttttctcccttttccaaaagaacgaaggactaaccgtctgaattcttttgtgtctcccgtctcccttgtcaaagaattcaaaatgacacagtctgagaattcttttgattcttcccattccctaatacaaaagtattcaaaggactaaccgcctgagaattcttttgtatccccattcacaaagtatcaaaggtttaacagcctgagatctttgtcttaacacattgaagggcacatcctttgtggtacaagtagagggtacatctaattgggtttgactganaacaagagagggtatatctcttgtggatcagttctagtggaggatacatccactatgttcaaagagaac

SEQ ID NO: 219978 - DNA, 409 bp, Glycine max
  unsure (1)..(409): unsure at all n locations
ctggccancggactgaggaggagaccttgtaggtgtggccatgaccttgtcaacacaaaaaaaaattattaatatccaacattaactcaaagtcttaatacataacaataagtatattgacacacaaaacaaaccattactttgaagcaatgcaagtttgtcatgtagaaatgttcacccataaaccttcatcatgatctatacgatttgcatgtccatcatcgacgtcatcaactttattcatacgaagcattttttgtaaaaaaaccagccattctaccaatgtcaagggttgaatcatcattatggtaatngattccacttggtcttccttgcagaaccacagacaatcttgaattacatggatcttcaatgttgaaaacttgtttggcttattctgtcataatga

SEQ ID NO: 219979 - DNA, 495 bp, Glycine max
tacggacctatgatactcagctttagacaatggtttgaaattctcaataacattaattgcttatgttttctctcagtcaaagaatcattattatctctctaccattggcaaaggtgcttccttggttccttgaaatattttctgggtctgggaattgcaaaatccagcaagggcattgtcccgactccgcgaaaatatgctctttctctgttagaagatactggcttccttggctgcaaaccatcttctcttccaatggatccaaatttaaagcttagcatgctcaatggtgaattactacttgatcccttaatgtacaggcgtttacttggtagcctaatgtatctaactatttcaaggccagatattacatttgatgttaacaagctaagccagtacatgcagaatccaaggaaacctcatctatatgttatgcatcatcttctccaatacatcaaaggtactctatgtcaaggtcttcattttccaacaagt

SEQ ID NO: 219980 - DNA, 429 bp, Glycine max
  unsure (1)..(429): unsure at all n locations
ttaagtcacctgctgcatgcaagctttaaaacatgcatgcaagaangtgtgcttatttatcatatataaacaagggacaccaacagtgaggcactgaggccatacaccatatagttcaaagtagagaatagttgtaccataaacatacattctgtaattgattgaataaaatatggtatatacgtaagtactgcctgtatttatagagtgaatgaactaaactaataaacactcatacactaacagaactaactactaactgtaaaccaagataactacctatactaacttgtaaattagctacattcaaactgaattctgtcaaagtcttgttttttatgtataaaatatagctgggttattctttcttctataatcggcctcccacagtgttcactctatagccaaacaatggagtcatttcctttc

SEQ ID NO: 219981 - DNA, 465 bp, Glycine max
  unsure (1)..(465): unsure at all n locations
tcggctgcaaagatcccaggctcataattaaactcttaaatttctcctatgctaaatttttccgaaatctacggtagaagtcagcatactgcggaaatagttttgggatatagctcttgactccaataaccccttgcatattggagatagtggatgcattcaaggaatgaacaaggcttgtaaaggaaccagtagtaatccatacattaccttcccccataantattcattctttttgcagttcaaagaggtttagtgccaaaggaaaggataaatggacaataatgactctacattgtccttctcttagtttctcaaagttgtgggacaatgaagaagacactagaggtgggattgctatagcattgcttaattctgtcccaaattctgtaagagcttcagagagttgagataaaattctagtggatgatgagtctccatcttcatatatcatagtaatattat

SEQ ID NO: 219982 - DNA, 317 bp, Glycine max
  unsure (1)..(317): unsure at all n locations
ttcattaggcaataccaatacaacacggatatggcttctgatcggaaccaacttcagagcatgaccaagcgggaacatgagtgcattaaggaatatgcccaaaggtggagagacctagcaacccaagtgcgtccgcctatgactgaaagggaaatgatcacgattatggtagatacgttgcccacattctactacgagaagctgatangatatatgccggctaactttgcagacctcgtcttcaccggagaaagaatcgacgtcagactgaggagaggcaaagttgaatttgccttcagcggtgcccccaacaacaa

SEQ ID NO: 219983 - DNA, 416 bp, Glycine max
  unsure (1)..(416): unsure at all n locations
acttatagctataacacattcgaagggatgaattatacatcattataggtactagtttaagtaatacttaataaaatataaaatatgaaataagacaggttataatttaagttctccaaattttacgttaccgatggtttttttagcttattgttgaatcttacattagcagctccttgttcacgctatttctaagaagatatactatgcttcatcgtaaataaatatgcatcatatgacgaatgcactttcaattgagggttatgtgatacgcgacttctttatttactatcacaaaaaaagtaacgacttccaanttaattcacgtgccttctatgtgcttgtttactctatgtatttctttttcttattgaaacttccactactttagtaatgttagaaatatgttaccttat

SEQ ID NO: 219984 - DNA, 359 bp, Glycine max
tttttaatgatacaaacaaccgttactattatttatatatctgcctatcttttttcttaatataccaaaacaaatcatgccactgcattagaattaaatccaaaggtttggcttgttgaataaatacaaagttacaaaatattcatgtcatagaattagcatatatagggtaaaagaacaaatgatttttgccaaagttaacttacggacaatacttttatattttatgacttgagaacctttaaacgtgatgttatatgatatgtctgcctgataataaatctatatgatctttattaatacataaataataaatttccatgcttttctggacaggtcaaactcaatatggagataca

SEQ ID NO: 219985 - DNA, 376 bp, Glycine max
atcacacactcagactcaatgttcgaaagtcttttatttcttaaagccttggtgaatacttcatttggaaagaggataacaagctattgtaccaactcttttcacaggatggttatatcagttactatatttggcgttgtcttatgcaccttagcatgtcttaaattctcaaatttaagataacgcgtgtatgaagtactaatggttcaaagctatgtaggttatcccgcctgcgatggactgtaacaatgttgagacacacgacgatggtcctgaagttgacggtgagctcacacagcttactcgcggtgttgatgggtcttcacaaaggctctaccacaatctgttagagtgagaactacatgctactatctga

SEQ ID NO: 219986 - DNA, 334 bp, Glycine max
acagtggccaaaatctgagcattgccaccatcacaagcacttcttcacctccaactcaaggtccttctccttcttctggaaccactcctaccccaccttcttccggcgacgaaacaccgcctccccaatctacctcaacgagcctggtcaactacatctcctccaccgcgaggcgaggctacactccttgacgcacattctatattcttctcagtcaccttttaatcaactcattggtgttctaaagtttggtcctagaagagatttttgcttatttgcgaacaaggaagcgcacgaccatttccacatttcttttagcaacactttatatgat

SEQ ID NO: 219987 - DNA, 479 bp, Glycine max
  unsure (1)..(479): unsure at all n locations
ggcctcanagaggtccaggaaggataaagcggtcgaatgatccagttccgctcccgagtatgacagccaccgatttatgagcgctgaacaccagcagcgcttcgaggccatcaaggggtggtcatttctccgggagcgacgcgtccagctcagggacgatgagtatgccgatttccaggaggagatagttcaccggcggtgggcatcactggttacccccatggccaagttcgacccagacatattcctcgaattttatgccaatgcttggcctacggaggagggcgtgcgagatatgagatcctgngtgaggggtcagtggatcccgttcgatgcggatgctatcagccagttcctaggatatcctttagtgctggaagagggccaggagtgcgagtatggccagaggaggaaccggtccgatggttntgatgaggaggccatcctccagttgctatgtatactcgggcaggactttg

SEQ ID NO: 219988 - DNA, 469 bp, Glycine max
cttggagtttccaagtgccaattcgtcttcttcttttgtcctgtctttttctggcttcaattcattagtgggctttccttctgtgtccagcatcttgggatgttcccagcctttgatgacaactttccaggttctgctatccagtgatttgaggaaggccaccatccttgctttccagtattcatagttggttccatccagaattggtggtctgttcactggtcctccttctttctccatgttcatcagaatttatctccctagatctcactcagtgatttagagtgcccgctctgataccaattgaaattctgataccaatgccagatgtcgtacaggatgtcacgacatcacgcttcagaacatgcagattatatttgagtgtatgaacagattaaacaagtcaataacacaagagaattgttaacccagttcggtgcaacgtcacctacatctgtgggctaccaag

SEQ ID NO: 219989 - DNA, 343 bp, Glycine max
caattatgacactttccagcaacagatacaaccctggatggaggaatcaccctaacctcagatggtccagccctcaacaacaacagcagcctgctccttccttccaaaaagctgctggcccaagcagaccatacattccttcaccaatccaacaacagcaacaaccccagaaacagccaacagttgaggcccctccacaaccttccctcaaagaacttgtgaggctaatgactatgcagaacatgcagtttcagtaagagaccagagcctccattcagagcttaaccaatcagatgggacaattagctactcaattgaatcaacaacagtcccagaattctga

SEQ ID NO: 219990 - DNA, 464 bp, Glycine max
  unsure (1)..(464): unsure at all n locations
tganaagagnaaatgtagaagggtgaaacttcctgcttttattctttgaccacagagtggtacctggagatatgtcgcgggggtcaggagaccttggggacgtcaggtggggtgctattgcccaaaaccaagcttgaccaatctcgacccaacccgggcatagtcagtcagtgagaacctgtgatgtacctaaacaggcgagctcctagcagtcaacagataaaaggaacaaagaccacaaagcaaggaggcttgtgtggtggctggccagctgtgaatcttgtgttatatatgggttatggcctctggtaatcaattaccaaggatgggtaatcgattacaaggcttaaaaatgaagacaggagactaagatggtctctggtaatcgattaccaaggggtgtaatcgattaccaggcttgaaaacgaggtcaggaagctaggagagcttctggtaatcgatta

SEQ ID NO: 219991 - DNA, 358 bp, Glycine max
agcttcttatccaaggctcatcttggtggtgaatctccttcttccatggcttattccttaatggatggcgcctcctctcacctcctttcctttgtcttccgctgcatctccatggtgtaaaatcaccattaaaggaccccattgaagctcaaagatcaagcctccatagaagccccacaagcaagcttccatcagtcgccctccaatattagggggtggcccagaaactgataaaaggaaactactggccccttaaccgggagcgcgagtctcggttaagcatttaagggcagaggaccttaaattatcttaaggtgtggatatggagcccactgaaagtgaggacgcgtagccctct

SEQ ID NO: 219992 - DNA, 447 bp, Glycine max
  unsure (1)..(447): unsure at all n locations
tctaaggaggtgagtntagttattagaggggtatgtgtaattatatctctaacttctcaaggaagttttctcanagaagcttctcaaggaagttttctcaagaaagcttctcaaggaagctacctagtctataaatagaagcatgtgtaacacttgttgtaactttgataaataagagtcttgtgagacaaacttcaaagttcaacttctcttcctcttttcttccttcaatttcgtgctccccccctctctctttctctctctctttcttttcctccattgaagcatcctcttcaagcttcttatccaaggcatattcttggtggtgaagctccttcttccaaggcttattccctagtggttggcgcctcgtctcacctcttctcctttgtcttccgctgcatctacatggtggaaaatcactattgatagacctcattgaagctc

SEQ ID NO: 219993 - DNA, 363 bp, Glycine max
tatggggcaccaaattgtgaatgagaactatctactacccagaattcaatggcttgactgaggtattcaaccgcgtgttggaacaatacttgcatgcttatgatcctagaagaatgggcatataatactgcatatcacgcatgatcatggctcacaccatttgatgtcatttatggcaaaccttctgggaaaagggggatgatctcaatgttatctcattcggtacattaagtaaatgggggagtgcatttaaattagcctagatgatattattctatgcgaataatttaataaagtgtcacttcattgtattctaccactatatatataaaactgggtggttagacattcaactccccttat

SEQ ID NO: 219994 - DNA, 472 bp, Glycine max
  unsure (1)..(472): unsure at all n locations
ntntggagtaganacatgggaccaactcattntatttcanattaagaaatcatatctagtcaaggtctgagagaccatacaagtttcctaacgatttctaattatgtgggccattaagtctatcatatgctgacaatagccgagaagcccatgaatctcttcgggggcggagtaggtgtctgccatcgccttggccttggctaacaatcggggaagttcttgactcccgttcaaggtaagagcaaaccgatccatccacatggttgcctcttggtgtaaagagtcgatcacccttcctctagcctctntttccgcatatacttgggcatactcatccgcgattctatgctcgtgggccgtggctagacccaactcttcttggtacttggcgatgatagctaacatgttggtttctgtctcgcatagacgctgagacaagcttcttttgaccctgaacagcaatcaactcctc

SEQ ID NO: 219995 - DNA, 478 bp, Glycine max
  unsure (1)..(478): unsure at all n locations
tgcggcatgcaagcttattcttcaagttcaaactacgtaacgacatctatgagtttttatatcagaatgggcacatgtcatacagntgaggaaancaaaaagaaagaaaaagattgtcgataacaattcgaaatatgcacaaaaaagaagtttctattagtaccttagaaaccagaaatgcacacaaattatgagaaggtaaacaaaagatgtaactcttcaaaacacattcgaatcttggttctgaataattcacgaggtcaagataagagtcaataagaaaggttagagtcaagaatcaagattcaaggttcaagatctcaagaatcaagatcaagattcaagactcaagattcatgaatcaagagaaggcttaatcaagataagtatgaagagttnttctcaaaaattgagtagcacatgatttttcttataacatgtgtaccaaagaggttttactctctggtaatcgattacc

SEQ ID NO: 219996 - DNA, 333 bp, Glycine max
acttatcaatttatgcagtgcatttagcataagtcatatcttcaccgcgcatctgcgcgtaacatgattcttgtacaccttctattttcatgatcgctcatgcatgatcctagcattatactctgcaaaacagagaaagtcacgataaagctcaaagaatgcctcatatccatacatccgggcggttcatatgttagactcgctcattgcattttttccctgaaagccaaactttaatcattggtatcttatgggagaaacgcactttaatacacccttactgaatgcatgcttaagctggagtaatggtctgagtccacaacgtgcaagagg

SEQ ID NO: 219997 - DNA, 458 bp, Glycine max
  unsure (1)..(458): unsure at all n locations
ctctatacttcgttntgtctgcttgtggatattgtgtcgatttctttagtgcgctactattcaacgtctaagaattctttgctttaacacattggagcgtacatcctttgtggtacaagtagagcgtacatttacttgggttgtgatactgagaacaagagagggtacatctcttgtggatcagttcaagtggagtgtacatccactttgttgttcacagagaacaagggagggtacatcccttgtggatctttgcttgtaaaggattttacaaggctattggaaatctcaagaaccgatggctgcttgtggactggacgtacgcacgcgttgttgccgaaccattataaatcttgagtttggttgctacttcctatactctgtatcgttcgctgtgacttctatntccgctgtactttgctaacgattgttctgacttacttcccaaattatataaa

SEQ ID NO: 219998 - DNA, 463 bp, Glycine max
  unsure (1)..(463): unsure at all n locations
ctgcagctatgcgcatactctttacaacggcacttttcatttaattctcataacnaagaaaaaggcacccatgtacaatcaaggcaccttcgttacctagattatttatatgtacttccaaggtgtatttgttacctacatctcatgcacttccttggctaaatttacatacatgcatactcaaagcatttggggtaccaaaaattgcacatgtgcacattccggtatttctaatacttatgcatatacaaactttgtgatgaatcttggctatctacacaagaaggtgatacatttcatgctntactcaagtgtttttgctacctaaagccgcatgcaaattcaagtatattttcttttgctgactaaaattgtattcaaattaaaaggtattcttgtaagggattctctttacataacatgcaacatatatgtacattctttgtgagacattttgactacc

SEQ ID NO: 219999 - DNA, 486 bp, Glycine max
  unsure (1)..(486): unsure at all n locations
ntcatgcaacattnggagaggttaatgaaacaacgagatgatgctctctatgagaggttggatcaaatggagaatagagatcataatgaagaagaaaggaggagaagagggaatgatggtgttcctagacaaaaccgaattgatggtattaaactcaacattcctccatttaaaggaaagaatgatccggaggcctacttggagtgggagatgaaaatagagcatgttttctcatgccacaactatgaggaggaccagaaggtgaagcttgccgccacggagttttccgactatgctcttgtgtggtggaacaagctacaaaaggagagagcaagacatgaagagccaatggttgatacatggacggagatgaaaaagatcatgaggaagcggtatgtgccggctagttactcaagggacttgaaattcaagctccaaaaactaacccaaggcaacaagggggttgaggagtatctcaaggaaatg

SEQ ID NO: 220000 - DNA, 468 bp, Glycine max
  unsure (1)..(468): unsure at all n locations
ctaagtgacgagctgcagctctattngccgaccatgagcgtaattcatttgtgtntactcaaaattagagctatctctttatcttagtgagagtgattctcctaaattcttgagtgattcaagaacaccctggctgtatcaaaggactttcacaacctttgtgtgttgccctcgctggaaagagtgattctttcctttctatcatctccacccttgatctttcaaaccactattccagaaaatccacctctgcccaaaaatatctcgggaccatacttccatttacacactccaataaaggattcttgatcctaaattgaatttccaacgagatctttcacctcgttttggaatcacctcatttggagccctgtagctaccgttattgccatttatatatttcttgccagccaccacttaacctacgttttaccatcccattcatcctatttatgccacaaaccacct

SEQ ID NO: 220001 - DNA, 358 bp, Glycine max
tcacacatggagacgctcgagattgaacagcggtagctctagataaatgtcaacggtcataacttttaactcggatgtccaattcaagcgatctccatatagagacgcccgaaatttcaatggtcataacttttcacactaaagtccgatacatgcttataatatatcgagatactcgacaattaaccatcggaagctctccagaaattcaatcggtcataattgtgcaaacggatgtcccattcgagcgcataatatgtcgacacaattgaaagatgaacaacgcaagctcttgagataatcatatggacataaccttacacgtgggggtccgattcacgcttataatatattgata

SEQ ID NO: 220002 - DNA, 462 bp, Glycine max
tcaacaacgttcgtcggtaagcgcttatgtgtccgaattcttttctctggctaatcgtatagtgggccttgcagcatcgtttgtgcagagttgcttcattctcgggttgagaccaaccattcgccgggaggtgcaagtcctccagccaatttcgctagcccaggcagtttcgtatgctcgtctctaggaagagaagatcctggatgctcaccggcctttatcagatcactcaccctcgaccactgcatgaaccaccatgaccacacactcatcatcagccaactccacaccacctcttttgtcaacaccagtgcacacatcatcgtccattcccttcaaacgactcacgccagaagagctcgcagttcgccgggaaaagggatcgtgcttccagtgtgacgagaagttttcttggtgtcacaaatatgcatcgtccttgttctactgatcacagaggatatg

SEQ ID NO: 220003 - DNA, 358 bp, Glycine max
acgcaccaacactgaacttgtagtggcgaaccatagctttcacagatagcggaagcacgaaagctgccagcaatagcatgatttgaataccatacgctgccatatgggtacccctttcgagctctctattccaatagcttcatatctccctagctggctagccactcttgaatgcactgcaacacagagcaggaaggactagcttataaagagccactcctgctgtaatgtcctttcaaaagttggcgcaggaatacttaagagtaagacgtaggctcatattataagaaaaatacttaaattaaaggtaaaccagaagactatgtatttgatacgctcatatacaattatttaagag

SEQ ID NO: 220004 - DNA, 478 bp, Glycine max
  unsure (1)..(478): unsure at all n locations
nttaatgaagccatgttgacaaagcagctgtggtgcttgattgattatcgtcactagctattngataaccataatgatgcaaataaaggaacactgaaacaaaacatgaaatgttgagaagtaattccatgtagtagatggctgacctgtgataagacaaaaataaaatccctaatctgattctcccacaaataaatgtctctaaagaaccaatcccaagaaccaaacaagcacatgaagccatagaataatatagcttatccaaaatcttatccaaattcagtaattatcgaagttatttattagtcaaaattctatttttcttatggctagatgcaatctcatccctatggaaaggaaaaaagaatttcatgttcttcggccttttgggaagaaatacttagtaaaatcctattgattgcactttccttccggccctattgcaaagcaagaacagaacaacagactctaataatat

SEQ ID NO: 220005 - DNA, 482 bp, Glycine max
  unsure (1)..(482): unsure at all n locations
agagagacctgcggcatgcagcttctatccaggtcattctgggggtgtagctcnctttttcttggctnataccctagaggatgatgcctaccctctcctcttctcctgtgccttccgctgcatctccatggggaaaaatcaccattgaaggacctcattgaagctcaaagatccagcctccatagaagccccacaagcaagattccatcaagtggtaatcagatcacaagagcttcaagtaggtgctccttaaacctccattaatggttttgctttaccttctcttccatcggtgtatcttcattttttctcaatgtatctcctcacatgtcttgtgataaatgtttttaccatgattctttacagcttccaccgagtaaacttgctatagaagctagatttgaatttctttggttcaaatntcttgttcttgttcttgaaccatgaattgtgtaaagttacgatcctttgacgttttcttg

SEQ ID NO: 220006 - DNA, 88 bp, Glycine max
ctacaagccttacaagaaaaaccatgaaagcaccctatccttaaggaattctggagccctggaaacgaactgggaacaagagcggggg

SEQ ID NO: 220007 - DNA, 395 bp, Glycine max
gagaggggggagcacgaaattgaaggaagaaaaagggagagaagtcgaactttgagttgtgtctcacaagactcttatttatcaaagttaccacgagcgttacacatgcttctatctatagactagctagcttgcttgagaagctttcttgagaaaacttccttgagaagcttctttgagaaaacttccttgagaagctagagcctaactatacacacccctttcataactaagctcacctccttgagaagcttctctaagaagattcctaaagaagctagagcttagctacacatacctctctaatagctaagctcacctccttgagatgagaagctagagcttagctacacacccctataatagctaagctcacctccatgacagaaaaaaac

SEQ ID NO: 220008 - DNA, 259 bp, Glycine max
  unsure (1)..(259): unsure at all n locations
atacttgttttctttccgtaatgtcacggagccttacggattacgtaatcatcccttttttggcttccgaaaagttatggaacctcacaaattgtgcaacaatgcttccttttgacttccggcatgttacggaacttcacggattgtggaacaatgctntcttttgacttctggcatgtcacggacttcacggattgcctaacgatgggtgccaagtatctcgaagcggtcaagcaaagggtgcatgcaatcatacaat

SEQ ID NO: 220009 - DNA, 367 bp, Glycine max
  unsure (1)..(367): unsure at all n locations
agcttggaattgcattcgggcatctatttttaatctcctatgcngcacctacatataagaaacagtcccactctcccaattttacacaatcatattcatacatcattgtggcatttcaccgagcacttggtgagcgtatgtttggacataaattgcatgaggatggggacaatgtggcatgccccattgcttcagaatacagcataggcctaaggccttctcaatcaaatcctcaactcacgagaacaagcatataagcaaacccaaactaccccacacatataagcacattctcacaaattggagcaccaaaagatgaagaaaatataccattgcgaagcttaaatcatcaacgatagaatactta

SEQ ID NO: 220010 - DNA, 470 bp, Glycine max
  unsure (1)..(470): unsure at all n locations
ataaaactcagcttgcgggctataccattctggcaaacccatttaggcttatacttatcccttaacatgactcaggccaccatcatggaggcacctgataaacgtggttgcaccggaggagcctccacataagcattgttcacaatttctagtgcttgaaaatatgtttccaatgactcttccgcaacttccatatagggtgtagaggatggacaactcactagtatatcttcttcacccgacactataaccagttgtccttcccccacaaacttcaatttctagtgcaacattgacgggaccaccccaacaaaatgaatncaatgccggcctagtaggcaactataggcaagggttatgtccattactacgacagttatatggcacgtgtgtggccaatttgaattagagatcgatctctcccttacgtcacgtcgactaccatcaaaagcctttaccaccatggagct

SEQ ID NO: 220011 - DNA, 391 bp, Glycine max
  unsure (1)..(391): unsure at all n locations
acatagactcatgtagttactaacccttatgtaaatgcagccattaacaggatatggggtttctaaagtccttgaatctgaacaccaagattattagagaggtgacttagtatggggaattactanatgggaagaattcagcttcatcccctcatctctaatacacttcaaaattgagcacactgatgggccactgtcatattatactggtcttcttggtatggattcaataaaataaacacaatttatgatcattcttattcaatcatatatgcttctagagaatgagtcttagcaagcatgcaagccagcttatggatgctcgtttcattatttctcacgggtattgcgctttttgatcatttagttttttgacacaggatccagaatg

SEQ ID NO: 220012 - DNA, 475 bp, Glycine max
  unsure (1)..(475): unsure at all n locations
ntatcaaagaataaatatacttctcaaagtgtcacttttatgtttatgaaancagangaaacaagggaaataaagaaaaggacaataagactttatttccttacgttaaaatctaatgaaagtataaggaatgaaagagcagagataacaacatttntcttgtatggttgtattgtaaaaaaggaaagcaaaatttaacatttgaatattgacatattttctaatcacttggcaaaataggtgattngatttacattaaacccaactttctctccattacgttcagaattaactttctcagaatgttttccacaaattcttggagaataaaaatagggggtcagacccacattaattttgcctccactctccactcttcatttcctcctccatatccaaacaataaacagtgacaatcttgttcaattntctttcttaaaattagccatcaaaataaaggcgtaaagctggaaat

SEQ ID NO: 220013 - DNA, 459 bp, Glycine max
  unsure (1)..(459): unsure at all n locations
gcttctcagctttgatgggtctgaagtgaattttttgtaatcctattgggngtngattatgtctacggtcagcatctccttcctcacagccacagttatagtggtgctgagaatttttcaagtacatgctgaggagcttcagcagcatctcctacgaagggaaaccttacagtgacactcgcgaggattctacaaaatttcaaagccatgagatgagttcccctgaagacactgtctttggtggacaaatgagaagggtttgcagcccaagagatttgcatgtcaaattaaaaacacccagaagattcttttctattataaataatactatattctttcataaactatcttggtcgaaagattgccagatattaaatgtgatagttcttctaatgacagatataagccttgattcatncttacgttataagaggaaataactcagctgggaggttgaac

SEQ ID NO: 220014 - DNA, 479 bp, Glycine max
  unsure (1)..(479): unsure at all n locations
aatactcaagccttcgctctcaagcgcanagaattcgtctgccaaggccttctctaacccattctctccaagcaggaccaactccncgtcgccgccgtcgacgagctccaaccggacgagctcggcgacttggaggaaatcgaacgcctccagggactcaccggtgacggtaacggaagctcaaccgattctccgtttgaattcgattttgacagttatggtaaaagtaaggttaggattgtagaagggaaatttaagatgactctggctgagcttcttgacgagagtaaggtcgtgccggtgtcggtttccggcgatttggagaatgaaatcaccggaattcagcacgattcgaggattgttagttctggtgatttgtttgtgtgttgtgtggcgagacaaaccgatgggcatttgtttctgtctgaggctgataagagaggtgccgttgcggntgtggctagtatagagattgatat

SEQ ID NO: 220015 - DNA, 469 bp, Glycine max
agcttattcttcaagttcagactagcggacgacattctttagtttaatactcagcaccgggcacatgtcatacagctatggaaacaaaacacaatgataaagatcgtccatatcaattcgaaatatgcacaaaaaagaaatttctattagtaccttagaaaccagaaatgcacaccaattatgagaaggtaaacaaaagatgtaactcttcaaaacacattcgaatcttgttcctgaaaagtcaagagtcaagaatagagtcaataagaacgttagagtcaagaatcaagattcaaggttcatgatctcaagaatcaagatcaagattctagactcatgattcatgaatcaagagacggcttattcaagataagtatgaagagtcgttctccaaaattgagtagcacatgatgtttcttataacatgtttaccaaagaagctttactctcttgtaatcgaataccaaat

SEQ ID NO: 220016 - DNA, 326 bp, Glycine max
aagcagaaactgttttgtgtctaccaccatcgtaccaccaccgggcccgccatgagggaaccactcaagccgccaggcctctccaccttcgggcatactcatcgaaagaatcacgcccctccgcgcacatgctccgcacctgcatcccatccggcgcccaaccaaaactgcaccccactgcccaacgaaagaaaccattacggccttccaacaacggactccgaaggtgccaagctagcataacaggtgacagctgccccacgaagaccctcttgagaaaaacgtactagcagtatacatccctcgcatatgcacccatcctccga

SEQ ID NO: 220017 - DNA, 471 bp, Glycine max
  unsure (1)..(471): unsure at all n locations
ctgagaagagaacacgggattcgcctaatgcatgaacatattgttatttatgtcaagcatttcgttcttcgagataacgatcctgagaacttgaataaattacagcccaaaaatcaaccaaattagtgcgatccattttgttctttaattaatcatccactgtggcaatatgatccacaattagtggggtaaagnttatacacaagtcaaatcaaaataagaaaattgtaagtttatgcaaaacattggatattattcctcanaatatattaaaatgaatgacatatatgtggcattttcgttgtgaagaataacatttgctccactgacacctcatgtataggttgcacncagcatgcatgcaatgagatatatatggatgaaagcaacaagtacgtgtctgagttgaacttgaactaaggtgtgtattctctcgtcatgcatgcacaagtaaaacagaatatcgcacgt

SEQ ID NO: 220018 - DNA, 482 bp, Glycine max
  unsure (1)..(482): unsure at all n locations
tatgcatggcaaatgtaattatgacattgagatgcccgaatatttttttttcctagttaaccatgcattaggtaccatgttcaattatcttgtctttaagtgaaatgggtttatgatcccaacatggttggctcgtggtgcctaacacatgaaactaagaatgtagtgtgaagtttcacgcttccccctttattgtttttgctttgtagaggaaaacacaaggatgagcaaacatganaacaaatggtatgcaattttgcagatcaaaaagtttgttgaacgcatatgcatgatgatgccatgacttatgcaaaatgtgaggccggaatatgataacggacaaatgcacgatatgtccattatgatgttatgaagagatgcttatgcgatgcatgatatgaatgcattttaccgacacgagagcccggaacattatctcttcttacttgngcatntgggggcgcagtgccccatgttgacaa

SEQ ID NO: 220019 - DNA, 131 bp, Glycine max
tattcacatatgattagagttgaaccgttaccacttcttgaagcaagacttatgagttccgtatacgaacgtgagaaagatcatgctgacagaagatgcttacactcgagggtaggcaaatcatgtattcc

SEQ ID NO: 220020 - DNA, 319 bp, Glycine max
ttaattaacaacacgccgagatcatctaattgtattttatcgctgaacaaggatgatcaaatctatcataatctaacaaatgccacacatctgactctacagtactttttcttctctatatgctttgtccaaatgatcgactgataatgatctatctgataaagtgattccatcttggtcacagatgataaaagtgcaacgcttacaaatcttcgctctatagatgaatttaaaaacggcgttctctccatgaatgacaagggagcacctggctctgcacggtatgagggccacttctgccagccatattatgttgtca

SEQ ID NO: 220021 - DNA, 379 bp, Glycine max
cacacacacagcttttcctagtcgatcattcacataaattctccccctttgtttttgaatttatgcatatcttacaactaaattgattactcatgtgagttcttgattttaatcccatttctctcccccttcggcatcaacacaaagtcaaagtgcataacaaatgtgaaataatcaatcataactcaacattcatataacatacattgagaaactaacaaccaaaccatgaagcaagaatcatgaagcaacaatcatatataaattatctataacacccatatagtcaaataacatactgaatgtttgttcaaaacataccatgcaaatagggaaatagcaaattgttcaaaaaccataataatatagagatttattt

SEQ ID NO: 220022 - DNA, 448 bp, Glycine max
  unsure (1)..(448): unsure at all n locations
ctggacttccttctagtanggaatctatccttcctaagatggttccttacccagtcaccctcattaagaactagctgttttcttcctctattgcctttagttgaatacacctttgcttggctctctatttggttcttaaccctctcatgcaacttctttacaaactatgacctagattccccttctttatgtataaaagaaatgtccaatgggaggggaatgaggtctaactgtgttaggggattgaacccatatacaacctcaaaaggggactgcttagtggttctatgaaccccactgttgtaggcaaattctacatgaggaagatactcatcccaagacttatggttgcatttcagaagagcccataaaagggtggataaagacctattcattacctttgtttgcccatcagtttgtggatgacaagtggtagagaaaagaagtt

SEQ ID NO: 220023 - DNA, 486 bp, Glycine max
  unsure (1)..(486): unsure at all n locations
tgtaggattatgggggacccatcacatgtggtactatgtggttgtcgagcgatggngcacaacaagttttccacatccacaaagcgcgcataaacccaccatcctctgttgcccacctccaactgagctcacgtactcccacgtagcccataacctcgtttctctcaacaccgggtccccatcaatcctcccaagcttccccaacatcaaagtaaatcaacattcaaacagcacagattaccacagccaagaaaacagggcaaaggcagaaaactctgcccaaaacaccaaccaaaatcacagctnttctcacttaaagaccccagtaacaattccttcgatccaattcgttaaccgttggatcgaactccaaaatttactggaagtctatagtacataagcctacattttgaccgttgggatctactagcaaacatccagaactcattctgcactacgtctgtcacagccaaccacacacaagca

SEQ ID NO: 220024 - DNA, 427 bp, Glycine max
  unsure (1)..(427): unsure at all n locations
tttttgcttanatatgcggctntgtatgtgcttgtgcgcttatcgcatttctgaaccgcttagcgcgcattaatgaatttcggcttagcgcggcttttctcactcagcagatggaccgaagattggctaagcgagagggtgaaaatcagcacttcaaaacttgcctaattatcctgaaattgagagaaaatgattattaaatacacaaaatgggagtactacgcgtatttattacctatctttaacaaaaagtaattataacactacaaaataaccataaattggaggagtttcatacaatttacataagttntatacacanaagttagtcgtattcactaactaataactcccccaaatttacagttttgcttgtcctcaagcanataaagaatagttcactgctcctcaagtgacaataacatgc

SEQ ID NO: 220025 - DNA, 466 bp, Glycine max
  unsure (1)..(466): unsure at all n locations
tctacccacatggacttaccttgaattaattcctttgatatttcttttgagccttgnttccctttccttgttttgaagctcactacaagccttaagtgaaaaaccatgatattaccatatccttaaagaattttggagctttggaattgctttgggaataagtgtggggggtttttgtttcattggacaacttgttttgttggctatgcttcatgatgtattctgggccatacttgatgtatattgtatattggttaaatgttggacatgctgaatgaaatgttgtttctcaaaggctaaagagtaaaaaaaaaaaaaaaattcgaaaaaaaaaacattctaataaagacaaagaaaagcaataaagttgagtgaataagatcttatatggcacaagaatgatgacactcttcggtctactctccatggtaacntataatcttacttcttttatttccttattttt

SEQ ID NO: 220026 - DNA, 424 bp, Glycine max
  unsure (1)..(424): unsure at all n locations
ctactttgtttttcanattatcngatcccatggcttcattataatattggaaccttactgtagtatatcgatatcatacattgcctgcatgcatccatcaaatttgtctcgaggcttatagactatagttgttccttatcagttagggcaagatnttttcgttacaaaatagctaatacattaaaagttcataagaattttgttattgaatagggcacatattttcttttagaanaattataattaaaactcatattatgtttttgattgcctaaaaattcataatctttttgtttagatcctcatttttacttttctatagttcgccttcataaaatacatttgtctattaaatgatccctttcatttatgtttttatgttctttcatttggattctttaaatatcaaaagggttctgtacat

SEQ ID NO: 220027 - DNA, 403 bp, Glycine max
taaactcgagtaacacgtttaatagcgagcccatatgttatttttgccatgttgacccgaacaggtgcaactcacatagggccgggtttgggctttaacttaaaagaccgaatcaattttaaagtgtatctggatggagaattttaactaaggaaagtaatttatcagacaatctaaatctttttaatctaaaattcattatttggaatttttttgaagaattcaaatttttggaattttttaaaccagaactttaaacaactaaaaatgtggaattttaatttccgtaaaggtaagaaattaaaattctattattgatagaagaaccttctaaaacgttgacgtatttctttataaccttatcctttctttactcgaatgttctcgaaatacgttctgaact

SEQ ID NO: 220028 - DNA, 370 bp, Glycine max
  unsure (1)..(370): unsure at all n locations
tgaaatggtctctcaaagcataacaccaaaagctaacaagagattaggtccccttgcctactaccttgagaagagacaaaatgatccaacatctctccattaccaacatcttcatcttgggcgaagaaataccatggaaaatatgatcgacaaaacaattggccaattgaatatcctaaaaggtatcactaatgaactcccttttaagaaggttatatngcctttccgaataaatataattgcattccccaactcttcttttatttatatggaatgaatagcttcttgacgatagaatattatacaactatttctgttggatgaaatacttggccaattgctgactaaatttgggaaattatgtggacca

SEQ ID NO: 220029 - DNA, 471 bp, Glycine max
  unsure (1)..(471): unsure at all n locations
tttggngcgattcaagctagttgtactgtgcatgtgcgctcaacgcactctttcaaactaaagggngtaagggctctttgaaaaacacgatagtgtatagtttttaaggttttaaaaagggcattgttccattggacaaaaagaaaccaccttatggcattttctagagtctggaaaccactttgggagctcttgttcttctatgttctccattntctttgttttcatctttctttttgggtctctcatggacgtgaggggctaacttactcattgtttggggcttagataccaaaacattgtgatgtaatgatctttactatccatttaatattattttagtgttattgcttcctttctatgcttattgctttgtttatggcttgatcacccatatgcatgtatgttatggtctcttaattattgggaaatgttttacactaagaatagaagaacttctaagaacctata

SEQ ID NO: 220030 - DNA, 372 bp, Glycine max
  unsure (1)..(372): unsure at all n locations
gagctgcagctgcaacannaagagaggagcctttttttctctttgtgacagaaacacaaaaatactccatggcaggtgaccttgtctcacccaatttatgacaatgataaagttacttctaaggtcactgtaaaaataaaaaaaaaatcacggcctacctaaatattcgcttaaatggttatatacaagaaatgatgtggcagaacctccttcatacttttgatacatgcttctctattttactcactaccagaaactcttgtatcttaaccattttgtaccccccccatatcgatttctttatttgaaatgaaccgaaatccctgttactaataccaatccctcctggattttacaatacaataaccccta

SEQ ID NO: 220031 - DNA, 426 bp, Glycine max
taatactaagcttctatttagctcttatctgtctgggggctttttactttcagtacattatgatgttgaatagcaactctagagcctcaaaacttgtcgctggcccaaaaatttatcattctagttaaattagcaacttacataaaacttatactacatgaaataactgataccaccttcaaaagtcgaatttgatgttggaaagcaattacatccccagtagaatcttcgttcaccgagcctacagaaaatatatggatgtatagtgaaggttgatgagattattcctttaaagaaattatactgatatgaatgacattacatatatgccaaatagttcagataaaaacaaccaataaagctgacttggatgatcattgttccagttcgcagaagtctgctttatgcaatatgagaaaaagacct

SEQ ID NO: 220032 - DNA, 347 bp, Glycine max
atggagatgcagcggaagacaaaggagaagaggtaataagcggcgccatccactaaggaataatccttggaagaaggagcattcccaccaagatgagccttggataataagcttggagaggatgcttctatggagagaaagagaggtgggggagctcgatattgaacgaagaacaagggagagaatttgaactttgagttgtgtttacaaaactctctttcatagagttactacaagtgtacacatgctttatttatcactaggtagcttcctgagaactttctgagaaaattcttgagaagttcttgaaaaacttcttggagctaagctaactccacaccctttat

SEQ ID NO: 220033 - DNA, 476 bp, Glycine max
  unsure (1)..(476): unsure at all n locations
ntgtacagcaattataccaagtcaatgacactatgaaagactatatttcttccaaaaggaaatctgcttaattaaatggcctcgtgaaataataattgaggtattcaaattaattcagtaggctccggaagagtgtcatgggtcaaaaaagttctggctattaaaggattcacggtccaagaaggatgtcttctctagacttggctgtgaacatttttgttttctatccaaaatattttaatgtcatttttaacactgaggagctagggtgacaagaattgtatgagctaagaagagttggatttgtagaaaactgctgattcagcaatgagttgggtccaggactgtgtgggctcctaagaacattagaacacaattttttgtgatataattcaagcaaatcctttggtgttagagtaaaaataagaatatgtcttctatacagacaacagagcttgccattttcctttgtcctc

SEQ ID NO: 220034 - DNA, 359 bp, Glycine max
  unsure (1)..(359): unsure at all n locations
cctgaggctgcaagctttcctcattctctgagggagtggcaaattttgtttatactaccttgctcccatgtccattttcagttgggatgaccttaagagggtgctcttggagaaatnattccctgcatctaggaccactgccatcacataagacatttctcgcatcatgcaacttagtggagaaagcttgtatgattactgcgaaagattcaagaaattgtgtgcaagctgttctcaccaccagatttctgagcaactcattcttcaatacttcttatgaggacctaacaacattgagaggattatgaatgatgctgctagcggtggagctcttggtgatatgacccctgctgaagcta

SEQ ID NO: 220035 - DNA, 473 bp, Glycine max
  unsure (1)..(473): unsure at all n locations
tatatgaacaaaattgcctanatcatttccaaatatgcatgtgaattatgatgcatcaacaagaatcaagccaaggctattgtgcaagcaatcaatagggaaaaacacaccaaaagattatgatgatggatggctcaaattctcacaaaggtaaacttatcactttcaaattgagctttcaaaactatcatgacatgtagaggaaaaacaaggatttcaaatcacaaaatgtcaagagacttttattttcagaacaattacccatttcttgaacatatcctataattcaaagaaaaatatgcaaagttgtacatgcaaacagaattgacctaaaatattaaactagaaacccaacaaaactaacaaaactaanaaatttaacgcaaacaaaactaacagaactagcaaaaccaaaaccaaagaacactccncccatacttaaacaacacattgtcctcaatgtagcacaatta

SEQ ID NO: 220036 - DNA, 455 bp, Glycine max
tgcgggcatgcaagcttgaagaattggtctttgccagtgaaaggatctatttgtttattataaaaggcaacattagtcatcctgcttggacgaatgagaaaactggggcaaacgaagagggtgagaaagagggagaaacccatgctgtgactgccattcctatacggccaagttttccaccaaacccaacaatgtcattactcaatcaataacaaacctcctccttacccaccacccagttatccacaaagggcattcctaaatcaaccacaaagcctgtctaccgcacttccaatgacgaagaccaccttttgcacaaaccaaaaaaaacaccaaccaagaaatgaattttgcagcgaaaagcctgtatgattcaccccacattccggtgtcatatgcttacttgctcccatatctacttgataacgcaatggtagccataacccctgctaggg

SEQ ID NO: 220037 - DNA, 463 bp, Glycine max
  unsure (1)..(463): unsure at all n locations
tggttcgaggtacttacccgttgaagatcgaagaacgatgattatctattgaagaacgtcgaagaacggttgagatctttgcgaaattcctcacggaaaacgttacggaaacgtttcggaagcacctccgcttatattttcttcacggaaaccaattttccaagcaaattcgaaagagagagaagtgccaaaggggctgaacccttttcttcttcactcctccncctatntatagcaaaataggggaggagcttgccacccagctcgcccaggcgagcagggttgcttcctccagaagcaaccgccttctggaggaatattccagagggcccaagtgggcctgggtgctatttgcacccncatttttactaagtacacaccctctgctgtttcttggaattcttttttcgtaaagctacggaaacttacgaatttcgtaacgatacttggtttctttccgtaa

SEQ ID NO: 220038 - DNA, 468 bp, Glycine max
  unsure (1)..(468): unsure at all n locations
tgcagtcttctaaagcanatataggttacaaaatgcattattatattagccgcagnaaaagaagacaaatctcacttcaacaaagtaataaatttactgtttacttaaactttgatataaatatatttcttcctacgtactctgttatgatttaattcatttattcaatgctttatttttctaacatataaaataggaataaaatataatcaatggggataaacatttttaatggaagacaacaacatctaacttatagaatgaataatttatcctaaattatattatccgttcaatcgtttgagagaaattatgatctattataattttattacttttttaattaattgttctaataattttaatagaaatatacttttctcttacctactatcttctatatatctcgaataatttattcattcaacttaattatctcatcaataaattctatgcatcacggatact

SEQ ID NO: 220039 - DNA, 476 bp, Glycine max
gggggaagaatgtgaaaatctctggaatattctggagatgtctgtttccttctgaaaccttatggaagagtatggaaggatatgaaagggaatataagagtgtacagactcctagaatgtgtggagcattctagagaattaatctccaccctaggatacaagtaatctccaccattcattgtggaggtggagtagtataaataagggtaggagccttcattcctaaccatccatgacaagagtgaattcacttcttagagtgagaaagctagaaagttagagagtctctttgagagagaagataaatagcttgtgaagtctctatcctcaagcttgagtaagccaccgtagagtgagttacatttgtaaacacatccttgtaaccctactattcttttgtatagtggaagaatctccatattggagaattataatcgcgtgttcccattactacctttaattactaagtgtctatc

SEQ ID NO: 220040 - DNA, 380 bp, Glycine max
  unsure (1)..(380): unsure at all n locations
ggaacaacacgcggaatgccacacgcacactatcgacacatgaagncgaaaatacatgcacagaaatcaaaactcctaaactccataaatagggctatacataatcgagacaaattaaatcatccctaaatctcataattagggatcatacataagtaggagaaatcaaatcattctcggagaaccataaatctcataacacatgcctctgataccacacgtaaaaactctttatgggtttcctagactatcaacgatagaaaacaacaggacctcgacacctatgagtctcacaaaccattaataaacaacaacaaacaatgatgtgtacctttctccataggaagacctgaacatttcccatacgaacttctctctgg

SEQ ID NO: 220041 - DNA, 478 bp, Glycine max
  unsure (1)..(478): unsure at all n locations
tggaacaattatatagatgttaagaccaagaagggaacttttgtgttatgagctatattttataatcgtgtagtgcatttgcttgcaggtcgcagctngatgacagaactttatgagaaattctttgccacccaattcctatgggatagacttgttttaatggtattttagtggagctcagccaatggtgtgtttntgaatgggtgtcaatgcaatttggcaggtcaaatcaagttgttgtgataggcatactacataaatttcttgatctcactacccattcgtaagcatgtcatgttttctctaccagggcattactcttctattacaggattgaccttgactgttcctgtttaactcttcattaaacagtacaaattcaatatgcccatgccacacttaacctgtttagntactaaaggttgatcctgactaccctgttaatcaatttatcttcaaagaatcagtatttctcata

SEQ ID NO: 220042 - DNA, 391 bp, Glycine max
  unsure (1)..(391): unsure at all n locations
agttcaatattcacttaggatctacatttcagccagcaattcaatcaccaaaactcatattcacaatagacacaatcataaggaaacctacaagttcaagaaaagggtcactatcaaagactctctaagaattttgcatgaacacagtaagggctaattaacatgaaagatttgactcaaatcaactaataggctaaaagaatttcatacactcatgaacaaatgagttagacaaagaaacaagaaaaatataattcagcacaacataagaaatcttatgtgacaagtttcatgactagacatgacttctatgacaaatctacaataggtgaacaagtcactctagatntcttagggtttcctctaatttaatatttttgaaagaaattta

SEQ ID NO: 220043 - DNA, 477 bp, Glycine max
tattattggataaattgtcgccatatttagaggttttattgttatatatacattgaaataagttatgatatatattagattaaactttaaaaatgggcttatatcattatacaaagtaaaacccgactcttataaagtctaacaagcttttttttctcttttgtcatatattttgagtagtttgatgtgattttaatcttcatagtttatagtctattttatgtataaaaaaatatctcattatcctatcaatcgatttagatcaagatgggtcaaatgtatataaaagatttcatgtaaaataaccctttaaataagtttgtagttcaaatcaaacttttaaaaatcatataccaaaccttataaaaatgttatgacgaataacatgtcgatcttaaatatggctatttgtagaaaattaataatgagataactgagtaattataaaagatgttatgacgaataacatgtcaatct

SEQ ID NO: 220044 - DNA, 386 bp, Glycine max
  unsure (1)..(386): unsure at all n locations
gcttacanaaccattcccatatgccattgtngtatttcaccgagcactctgggggcgcatgntttggcatgaatagcaagaatgggggcaatgtggcatgccccattactccagaatgcaacataggcctaaggccatcccttacaaccccctaactcaaaccaatcaagcatgaaaacaaaccaaaattgccccacaaatttgagcacattcccacaatttagagcaccaaaagaagaccaaaatagatcaatggaaagcttgaaagctcaaggatgagatacttacttgttggagtgagtaggagtataaaatatgaaagcaaaatgcaaccaaaggtggcttgggggagcaaaaaccatgagtcccgtaagctttcttttttg

SEQ ID NO: 220045 - DNA, 445 bp, Glycine max
  unsure (1)..(445): unsure at all n locations
ttttngttgagagtatgcccgagtcattcatccgtatgagatgttgttgtattattggcgatcagaattgccattccttggattatagggtngaaccaanctcatgcttttacaaataggttcatcaagtcaagttgaaatatggaantaaccgtcttgcaaaattgtggcaaaagatgaatcgagtcacatcactgcttcgtctactgccaaacatatttaggattattgatgtccttgttgcttccagttgcaccttgacaaagatgtcatggaccatgttgaaaagttaaattgattcaaccccatatcctgcgtaaaaattcgcagtactgcaactgtacatcatttgcatacatccatgcttttcatgtggtgcattgctcattgcattctttccttgaaaanaaaaataacatanaatgagcttaatcattgttatcaa

SEQ ID NO: 220046 - DNA, 427 bp, Glycine max
  unsure (1)..(427): unsure at all n locations
acagggggggaaatccacttgattcacactggacaaagtanataattttcttggtatacatctttatgctcatttatcaacaaccccatgagagaagaatgagctttttctatctcattttggctggaactcatttcatctatgtaacgactcgtcgtttctacatgtcaattagaaaattgatataacaaaaaactctattttagctaatttacaactcttcaatttaatttatttatgaaaacacatatgaaattttcacatgtaaaaaaccatcatctacaaactcacaacttcaaggtaatgcatctatacactaaaatcaactgaataaagccatgtactttgggcactacaacatgttatcataagatacaacatcatagcaactaaacacccaactatttagacgtatatacaactctta

SEQ ID NO: 220047 - DNA, 350 bp, Glycine max
  unsure (1)..(350): unsure at all n locations
cattctcccttttgattttactttctccttgtngncaggagcatcaacaaccagaaaatatccatttgtatatagatttactcccccttcgattggcaatgttggcttatatgacacatttgaagatttcatatataataagctgtctcataaagatttcatatatcttttatctatctctcccctttgtcaacgggaataacaaatcatgaatagagaggataagaaatgttaccacttgttgcaatgtatgagaatcaagtgataccaaaaggcgttaacacaatcattcgatattaatcaagaaacaataagtcaataacactccagtgataccacaatccatcgac

SEQ ID NO: 220048 - DNA, 444 bp, Glycine max
  unsure (1)..(444): unsure at all n locations
ngcgtgnggngcttctatggaggctggatctctgagcaccaatgaggttctttaatggngancctcaccatgcagatgcagcggaagacaaacgagaagaggagagaggaggcgccatccactatggaataagccttggaagaaggagcttcaccaccaagatgagccttggataagaagcttggagaggatgcttcaatggaggaaaagacagagggagagaaagagagaggcgggagcacgaaactgaaggacgataaagggagagatgctgaactttgtattgtgtctcacaagactctcattcatcatagttacaacaagtgttacacatgcttctatttatagactaaggagcttccttgagaagctctcttgagaaaactctcttgagaagcttctttgagatacttncttgagaagctagagctgagctacacacac

SEQ ID NO: 220049 - DNA, 462 bp, Glycine max
  unsure (1)..(462): unsure at all n locations
agcttggaattgaatacatcatttgtgtaatcaattatccttattcttttgaaattcanatttcaagtctgaagagtcacaactctttagaaactaactgtgtaatcaattaccacatttatgtaatcgattaccagtaagatattttcgaagataactcccaagagtcacaactgttcaagaagtttttgagtggccatcaaaggcctataaataggtgacttgggatataaaattccttagagtttttttgaacaacattgtcttattctctcaaaaccaaattgtcttatcactctcanaatattccttggccagaacactttgcaattcaataaggaatcttgatcgatcttcaattgaatatccctctcttaaagagagaaaattcttgttcttcttatcaaagagaattgattaagataccgacggtctcttaagttgtgaggatatctacacaca

SEQ ID NO: 220050 - DNA, 462 bp, Glycine max
gaacactacacctacaagaagagtgttggaaagttgctattataatgaatctttgctaatgcaaaagtcaagagtaagatgggtaaaagaacgggatttcaattcaaagatcttttcctcaatcatgaattggaggataagaaaaaatgtggtgaaaggcacacaattaggaggggaatggatggaatatccaaatagggtcaaagaggaggttaaaagattttttgagacaaggttcaaggaagatgactatgacaggccaaagcttgatggagtttctttttcaaaaaatatccatcctagacaatgatttgttactagatgagtatgaggttaaaagggcaatttgggattgtgaaacgtctaagagaaccagacccgatggcttcaatttcctattcatcaaggaatcttgggagatatcttgtgcttcttgaaggaattccatacgcatggagtgct

SEQ ID NO: 220051 - DNA, 103 bp, Glycine max
aatagcatagaacagcacgctggtaactcaattatgcgctactatagactgcatccgaggactgaaactcagccatgatagagacatttcttactctgcccaa

SEQ ID NO: 220052 - DNA, 458 bp, Glycine max
accaaacccattcatggctaccacattattccacgaaaatctaagagattaggggaagaggatgatagtcacacattcacctcaactcgttggagtgtgtggaaatgttcgaatgcaacaagtctcttatttccttctcttttccttcttttcctatcttttttccctttccccttttacttttagccaaaggggtgtgtgtgtgtttataagtgctgtgggcttcagccctttctggtccctttctggtccctttttgggccttacctcctctcctagcctattcatgacccaaaacttatttttcatataaaattctcatattaaaactcaacttcttcgaactatacaaacacatgttttaaccgttcattatttttcatagtagtctactcttgacccatgactcattcttagtgctacacccttacatataacaccaagtattctataagcaa

SEQ ID NO: 220053 - DNA, 462 bp, Glycine max
agcttgcataatgagaatctgtccttcaaacatgttttgtctattggcatctgaagtctgagagctctaggcagataagtttgctaaatctggaagtggggctgaagtaaaagatgcagggatgccacctattggtgcaaaggatgagggaacatcagttgctctgagcttggtcttcctttcctctggaaaattaactgtttggtcattcgcattccaacagttccttatgatataagttaagtcaatgaccgaccttatgtttcatacgagataagagcatcagatccaactcccctcaatctacacaaggttgtgattaaagctgggaagcctaagcgagaagtgttagactgagccatcatggtcatttgtctagagatcaaactgccattgttatgtccatccttgtgattaagccatagaccaacctagcttagtttgtgttcaaatctgaagtgc

SEQ ID NO: 220054 - DNA, 486 bp, Glycine max
  unsure (1)..(486): unsure at all n locations
tgagatgaggaagtgttgaagggtgaaacttcctgctnttattgttgaccacagagtggtacctggagatatgtcgcgggggtcaagagaccttggggacgtcaggtggggtgctattgcccaaaaccaagcttgaccaatcccgacccaacccgggcatagtcggtcagtgagaacctgcgatgtacctaagcaggcgagctcctggcagtcaacaaataaaaggaaaacaagaccacaaagcaaggaggcttgtggtggctggccagctgtgaattttgtgtaatatgtggattgtggcctctggtaatcgattaccaaaggtgagtaatcgattacaaggcttaaaattgaggacaggaggctaagatggtctctggtaatcgattaccaaggggtgtaatcgattaccaggcttgnaaacgaagtcaggaaacttatggagcctctggtaatcgattaccagcctgtgtaatcgattacaca

SEQ ID NO: 220055 - DNA, 466 bp, Glycine max
  unsure (1)..(466): unsure at all n locations
agctntccctctttgaacaaatacccctcatccaattatatttcatctntgggctttttcccacaactctcgtaaatgggagagaaatgttcatctaaagcatacaagtccctaatattatcaaatcctaaaatttgggctcctagggagcaaaacaatgtgtgtctcctagagagggcatcaactaccacattttttgttccctttttgtatttgataacatatgtaaattgctctaggtactttacccattttgcatgcctctntgttaactngttttgccctctaatgtacttaagtgattgatgatcactatgagtgacaaattccttggaaacaaggtaatgttcccaagtttggagggctcttattaaggcataaagctctntatcatangtggngtagttgagggtggcattngaagttttcactaaaataagcaatagggtacccatcttgtaacaat

SEQ ID NO: 220056 - DNA, 476 bp, Glycine max
  unsure (1)..(476): unsure at all n locations
ccttaacccttanacaaagagataaacagtctcattccttcctaatcaaaccctatcccttgtgttaggagttgtctctttctgtcccatttggggattttgattaattatttcaactatatatattttgtttgttattgttacggaccctttttctaatttctgtaatagggctacccattgtgtgtattgtgaatgttatatgttgaaattgaatattctgccataggcatataactattacaattagtaaagttaaattgcgaaaatcaaccaaaactttagtactaattagatatgcattgtatccacatctcacatgagaagtacattttttttctttctctttgtttatattaatgacaatgttctccacccttggcatctcactcacagtcatatttttcatcttcttcagaacttttaatctctttcacgtgtcagaggaaaaaaaattcgacctaaccaattaagat

SEQ ID NO: 220057 - DNA, 396 bp, Glycine max
gattagtacctgacatctcagacaaacaaatcaaacgtaacaagacaattatagttgttgtttgaatacctcacccactcaagtgtatcacacaattatggcttttctctaatgaaacactcttgccttttaccactctaattccccttgagttcttaggcaattcaagagattatggccaaaacaaagaacaattcaccaatatgtgtaaggtaaggctagagagacaaggaaaaggttaaccaagacaaaggctaacaatgtttttaggcataaatgaaggaaataaaattcagaatttaggaattcaagtaacaatccttcatgcaaccaatatattaccttaaagagattttttgttaaagttcttcaagcatgaaccattcatcccaattt

SEQ ID NO: 220058 - DNA, 475 bp, Glycine max
  unsure (1)..(475): unsure at all n locations
tcttggtgcacaattttttttaaatattcaatttcccaaacaaaactgtgtgttntctaggtctttcatctcaaattatttctttaatcaatctatagcttttggaatctcttcaagaatttcaataatattgacgtcatctacatcaacaacaattatgaaaaaaaaactattttcagattttcatgaaaatacgtagcaagtactcactaagtcgattatacttcatgcaacttgattgctttagtccaaagagagtattcttctagagaatatgcattattgggcaaattatatcctttagggagtttcatgcaaatgttattatcaagagagtcatataacttatataagttgaaacaacatgccttagatgtaaattaagtccttcatgtgctactagagtgattaagtatcanaagtactcacatccactacagatgaggatgtgtcttcaaaattaatgtcaagtcat

SEQ ID NO: 220059 - DNA, 459 bp, Glycine max
acactatgaaactcaagcttgcaagctgtctctctcaacatagcgtatatatatgttatttgaatgaaataaaagctaagctagtgagtcaatagttcttcctcacaaaagtcacagcttcgagttggtatcagagcgggtcgtatccgccgctgtccgcgtagccgtcgcaccatcgcgccgtcgtccgccgtcgaccgtcttcattctggccaccatttcaaccggcgactacagggttttgtgcgcctcgaagagcgcaacccaacccaactaatcgtctggccagaagctcctccacgcgccgcctccgtgctcaccaaacaccggcacttgaccaccacgcgccgccttcctcttgccggaatcgcacgcgtttgctgccggccgtctagtcggactctccggagtccatatcagccattagtttttggtttcggcacttcgttgcgtgatctt

SEQ ID NO: 220060 - DNA, 463 bp, Glycine max
  unsure (1)..(463): unsure at all n locations
agctngtaggattatggggtacccatcacatgttgtactatgtggcggncgggcaatggcgcacaacaagttntccacatccacaaatcccgcataaacccaccatcccctgttgcccacctccaactgagctcacgtactcccacgtagcccatatccttgtttctctcaacaccgggtccccatcaatcctcccaagcttccccaacttccaagtaatacaaaattcaaacaacacaaactatcacaaccaagaaaacagggcaaaggcagaaaaccttgcccaaaacatccaaccaaatcacagctcttctcacttaaagaccccagtaacaattccctcgttccaggtcattaaccggtggatcgactcgaagatttactggaagtctctagtacatatagcctacattttaccattgggatctactagaaaacatccagaactcattctgcactactc

SEQ ID NO: 220061 - DNA, 471 bp, Glycine max
  unsure (1)..(471): unsure at all n locations
tcaaccaaggggagatggaccatntcaagtgcttgaaagaatatatgacaatgcttacaaagttgagctgcccggtgagtataatgttagttccaccttcaatgtctctgatttatctctttttgatgcagatggagaatccgatttgaggacaaatccttctcaagagggagagaatgatgaggacatgaccaagagcaagggcaaggatccacttgaaggacttggaggacctatgacaagggctagagcaaggaaaaccaaggaagctcttcaacaagttctgtccatactatttgaatacaagcccaagtttcaaggagaaaagtccaaggttgtgagttgtatcatggcccaaatggaggaggactaaatgacaccactttgtctcaatntttagagtggttagctcgtctaaataatggcccaatccttgtaaagtggctgaccaaaatatgttttgggtaatca

SEQ ID NO: 220062 - DNA, 320 bp, Glycine max
  unsure (1)..(320): unsure at all n locations
cacttgtaacttcgatgaatgagagacttgtgagacatacttcaaagttccacttctctccctcttntattccttcaatttcgggctccccctctctctttctctccctctttcttttcctccattgaaacatcctctccaagctttttatccaaagcttatcttggtggagaagctcctttttccatggcctaatccctagtggaaggacgcctcctctcacctcttctcctttgtcttccgctgcatctccatggtggaaaatcaccattaaaggacctcattgaagctcaaagatccagccttcatgaaaccccaca

SEQ ID NO: 220063 - DNA, 480 bp, Glycine max
ctggaagaaagtgaggaggtacaagccctaaaggtggttcttgttagagcccgagcagtcaaagagaagttcaagtcaacggccatcaaagtctgaagggagtacgatgaactaagggatgtcaatatggccaccaccgaagccttcgaacgagaaaccaagagggcccgaaaggaggaacatggccgaaacaagttccgaggggctttatggggcagcaatagtgagctcaagctccaaagagacgaaagggatcagtcacgggtcgaaggcatgatcttgaaggacaagttaaaggcttaccttatgtcgaaaagaaatttgtcccaacagttaagtgagattgaagggaatatgtgggccatcatcgatgagtaaaaagagaagctaaacctagcggcgactcatgagcaaaggctagaggatgagtacaccaagatgttagcggaaagggaagcaagggaaaggataatcaactca

SEQ ID NO: 220064 - DNA, 435 bp, Glycine max
  unsure (1)..(435): unsure at all n locations
ncaagcttatggatccaggcattacttaattcctttttaatccgacgtaatgagtttaggcgctcatttggtattttataaggtctgttaaagattccaacaagtggtatcaaagccaccattacttttagattattgggatttaaaaatgtatgatatgcattatatctggaacattttagttatataaaccctaattttattatggggagaaactatttcaatcaatataattgtaaaaccccgtaatttctatggtatggtcgtaatgtttctttttcatatgaataacagacctttgcatttgatttacgagtttatacacagtttatatttgtgtcgcatgtgcgtacatattattctatttacgataaagggtttacgtattcggcattggtttcctgacaataatatttatttcggagcaaaaagttt

SEQ ID NO: 220065 - DNA, 471 bp, Glycine max
  unsure (1)..(471): unsure at all n locations
tatcctgataccttattcctatctattcaagacagatctaactgtaaaaatatgaagatattattttctgtgttaaacatcaaaggcagagaaagacaagagctagagagtaaagactataccttctgttctgatataaagttatataatggactctgagacaagataaaaatggttaatatcataaaggctatgatagcatttcacaaaatgacattgaaaaagcataataaaaaaataaccttgggagtacaattaaaatccccacagataactacaggggtgtcattccagagtttataaacagctntagccttatcaagcagcactcgaacctgcttgaaataaatataaaggaaaaagacattacaagaagaatntgaaagcatattttggcactacagtatcagatgctcagatggcttgatcgaagatgttatgccaagcaggcagtgcatacctgaccaagtt

SEQ ID NO: 220066 - DNA, 351 bp, Glycine max
ggagaatacataaaccaataaaactcatgtcgtgaaggatgacaagaaaaaatcgtcattactcatgaagatgatgccctattattgtagagccttacctgtgtgcttgttgagaagaagtcaatatagttcaaaacagccataattgtcccagcctgttagcaagcaagtggttgctcgcgtgatattttttccaatgcttggagacacttcataaattcaacatcaataagttacattgctttctttctctattaaaaacacaacatattctatggacgagcaaaacaataattacctgttcagctacatcttgaaactcaattgccaattatctttgacataaagtag

SEQ ID NO: 220067 - DNA, 432 bp, Glycine max
  unsure (1)..(432): unsure at all n locations
tgttccaaatggatgatatgaccacacacagcgtgcttctttttatatgtccgccgactncacacgatgtggataggcaggctcagattggaaaccttaccggctgatgatcgactagcgcacgagaaccggctgatgatcggctggtaagcttcactatgttgctgacgaaaacgaattaggagcgttgcggaagcacctatgcttggattctcttcgtggaaatgccttatttcactcgaactgcttgtaatgcataaggttagtggtcatggaccctttggaacagaccttttcccttatatatatgaaatgaggagaggacgctgtcagccagctggcccaaattgatgcactctccatacagattggtccagccctcagttgacgtattgtacgaatgagttgccacagtgttacagaagcctattg

SEQ ID NO: 220068 - DNA, 355 bp, Glycine max
catcgctcaccttaagaaggatagagtctattaagaatactagtggaaactgagactagatgctgaagaaaagaagaatattagatcaaaacaacatgctaaataggatactgttaaaacccaacaagtcattgttgatcttgaactatctggcataaaggaaacaaaaaaggagggtggtgtgtccattcattacattgttgcaaaagaacacctccatgagtccactcaagctgagcagtccgatgaagttacttctatccaacaagaggtaattatttactccactagttccaacaattccaaatacagtcctccaatcaactatgctgcacccactgaggcaatcactaac

SEQ ID NO: 220069 - DNA, 445 bp, Glycine max
  unsure (1)..(445): unsure at all n locations
ctacaaacattatcatagtgaggcaaaattgttcattgctacanatagaggctttagtaaattgtttattcctatcatgtgggttaaaagtggaattgaaatcacctagaactacccaaggtgcaacaacatcctcaacaatactcattaaggaatcccaaaatgttntataggcttgttaataaaggttggcataaaccactgtaaagagccagttcctcgaattacccatattaactctcattggaataaattgagtgtcatgggatagaatcttcactttccaaatgtttgaatcccaaaggattcacaaaccacccgtttgaccctatgaatctttgataaaaaaaattatcaaacccacactctatcattntttatagcggagtctccactagaatgagtttgtagtaagcacatcagagatactctgtactcccttttg

SEQ ID NO: 220070 - DNA, 400 bp, Glycine max
tgcagctgcagcttgcaaggaggctgatgagaaagaatttttgagtttattgaattaccggcctctgtgaagtcaatgtcttcacaagacaaacctctcaaacattcatggacgaaggatgagagaatttggagcacaattgagtcactctgagcatatgctattgatgcatgtcaaaatgcaaaccaaggaaaatggctgggatggtaactttttccctccaagcattgttttgatttaatgtagcattatagcaattggggcttgtcttcaagaatgcaaataatatgaaaagatgctttattcctcatgcggtcatggttaaagcccaaaaacaaaaattcctgtacttttctcacccctggtcgttcaaccttatggaatattatggtaaaatggg

SEQ ID NO: 220071 - DNA, 174 bp, Glycine max
ggctgagtgacgagagacaaaagccttttggctttaaaataataaggttttctctttttttaatagtttattattaactacgccacatgtcttcatttgagtggagaaaaaagggcccacttttccttttgactgtgacccatactcagccacaaaagtgatgaatatctgacc

SEQ ID NO: 220072 - DNA, 337 bp, Glycine max
accagatttcagagtaaccttctttccaatatttttatgaaggactcatcaacatggagagaagtatgatagatgcttccagtgggggagcccttggaaacatgacccctgctgaagctagaaatttaattgagaagatggcttcaaactcccaacaatttattgccagaagtgatgctattgtcattagaggagtgcatgaagtaaccacgaattcatcatgtgagactaagaagcttgaaggtaaactagatgccttggttaacctggtaacccaactgaccatgaatcaaaaatctgcacctgccgccaaactcttgtggttatgctcctctgc

SEQ ID NO: 220073 - DNA, 467 bp, Glycine max
  unsure (1)..(467): unsure at all n locations
actcaagctgaaaggatgctntaatggaggaaaagagagagagaagggtggagcacaaaattgaacgaataaaagagggagagaagtggaactatgaggtgtgtctcataagactttcattcatcaaagttacaacaagtggtacacatgcttctatttatagactatgtagctttcttgagaaaactttcttgagaagcttctttgtaaaaacttcctttagaagctagagcttagctacacacacccctctaaaagctaagctcacctccttgagaagcttccttcaaaagctagagcttagctacacgcacctctctaatagttaagctcgcctcctttagatgagaagctagagcttagctacacacccnctataatagctaagctcacccncaggacaaaatacatgagaatacaaagaaaaagtccctactacaaagactacttcaaatgctctgaaatac

SEQ ID NO: 220074 - DNA, 376 bp, Glycine max
  unsure (1)..(376): unsure at all n locations
agcttcatgaagaatcaagattgagtcagtcaagnttttatgataacaaaggcgatgacaaaaagcttatagatcaagaacaattcatgataacaaagatgatgatatccacaatcaaagaatgaattccagatgttcaagattgaataaataacacttcaaggttcaagaggaaatttgatttcaagaatcaagaatcaagggttaagcttcctaaaatcaagatcaagattcatgactctagattctggaatcaagagaagaattaatcaatataagtatgaaaaagttttttcaaaaaactgagtagcacatggatttttctcataacttgtttaccaaagagtttttactctctggtaatcgattactatat

SEQ ID NO: 220075 - DNA, 449 bp, Glycine max
aactagctgatactttctcgggaacgactagggcgtacattttccaaaaaaattcaagcttttctttcttgtaaaatccaataatcatgacgtgagaccttcttattcccaaatataacccccaaaacccgaaccctatttaccataacttcacacattcactactatctaatggcgcctctcacttatttcttcttcccacattttcattctctttgacttaacacactcccgaagcacaccacactcctccaaaacgacactccttgacgtcggtttcttcctacaaaacgcacacaatgccgttgccttcaccccccatcaccttaaccaacaccaacgacaacgagaagccttgcttctatcgacgtcgtttggtattcacttacgttcccgaggctcaattcagaaacccttccacagagactacaaatcgctaaccttatctc

SEQ ID NO: 220076 - DNA, 390 bp, Glycine max
  unsure (1)..(390): unsure at all n locations
agcttgtaaaagggctagacataatacatggtgaggtttggtttggttcaaggataaaagggatgccccacattatttccatgacacaaatgcaaaaatgatgatttggaaatnttatgcaaaactggtcatgcatgcacctatgcggacactcaagtgtcaaacttttatggtcatgtgatgctagggctcaagattcatttcctctattttagatcaacccaatgtttccaaaatatgttcttttatcaatttgtgcattcatccgagtccattttgggtactcgggaaaattttcacagcattcaccctttaggtgtgcacacattttttttcaacaactagctatgatcagcgaattttttttttttcaaagaagagttggaagtc

SEQ ID NO: 220077 - DNA, 444 bp, Glycine max
tatgtggtactaggtggcgatctggccatggtgcaaatcaactctcccacatccacaaatcaaacatgaacccaccatccccagttgcccaccttcaactgagctcacgtatccccatgtagcctttattctcgttcctctcagcatcgggtccccatcaacccctccaagcttgcacaatatccaagcaattcaatatccaaacatcatgaactattctaaactaagaaaacagggcagaggcaaaaactctgcccaaaacacattccaataccacaactttccctactcaaataccccagtaacattctcttcgttccgattcgttaaccgttggatcgactcgaaagttttactggaggtccctagtatataagtctacatttttaccgttgggatctgctagaaaatgttcagaacccaatatttactaccctttccaca

SEQ ID NO: 220078 - DNA, 398 bp, Glycine max
gctgcagctgagattaaatgtgttgttttttctaagcagaaatcagcaatgcactctcacccatctccattacaagtctttctttcttcctgaaccacacataggtcattaatatcattgatagaccatttatctttatgtgggttgtaggaaatcttaaatggcccatattcatgcggaagggtgttcaaaatgaagtgcactaggaaggactcagacatatcaacctctaatttcttaagttgagctgaaatatctcacatcttcatgatgtactcacgcacacctttcacactggtgagccgaagaaaagaaaactccatgatcaaggtgcttgctaaagtcttgtctgaagggaagaactgttcatcaatggccttaagcaagtcttggacctt

SEQ ID NO: 220079 - DNA, 382 bp, Glycine max
  unsure (1)..(382): unsure at all n locations
acataggacatacaggtcgagttgggaaagacatgaaagctcaagctggctacatttttcctttccttatgcaccaaaagctatgcgctgtacagaacacaatacacatgatctactantataattgatggtaacatattaacaccatatactccataatttgtacatagaaaataactgaccgcttaattctaaatatccttaattaaaattacggtgagcaaaaataatctctgaactaattctgaaaaactaatactctatatatattcacattaccatcatctatatatataagtggcaaactgacttgatagtaaaacaggtggaacggcttgcttatattgctggacaatgcacatgcctccctgcatattcacat

SEQ ID NO: 220080 - DNA, 457 bp, Glycine max
cgccctatatagtattatctgaaggaaaaatgaagagattttgtattaatggtaaagattgccatattatcttttaatttatgtcatgaaaatattatataactacaaagcacattttaataaaaaccgctttcaaagttaccagatatcatcatatctatgatatgatgatccaataacaagcaaaactgaaaggtagtttcaattgtgtataagttgcataaaaaaatatataaacactaagactactcaatacttgactggagcaaggatatcaagttgggaaccgagcttgtcttcagcaaccttctcggctttcacccttaattagttgagctgcttctttctctcataaaccaaatgtgacttttcctttctcttcttttctagctcctatgagcaataaaacaattactcacatcagcaaacacatctattccctttccatttggaaagc

SEQ ID NO: 220081 - DNA, 391 bp, Glycine max
  unsure (1)..(391): unsure at all n locations
agcttatcagatatagtggcgttaattggctccacagcctacaacatttacatttacgagtaacatggccgagaaatttattatcaatttagcatcacttacctcgtaaggtgattaactacaacaataaaagaaatgggcttttcaataaaaaaaatgaacaaatgtttggcccaattcgttttttaagaaaaagaaaaactaaaaataaaagagtgaacaagcattatcacannctaaagtttcaaaggatatttttaaaatattcttaaaatttgagtctgaattancncaatttagtaactagtaattcaaaaagtggtgagaattctcttccacttatataatattattattattattattttaaaaatttcaataagtctcatgc

SEQ ID NO: 220082 - DNA, 432 bp, Glycine max
  unsure (1)..(432): unsure at all n locations
ttgaagaagactacaggtggcggtggatgctcaacacactatcttatataatataactgcacaagtataatcaaacaagcggccccgcctgtcaaataaattcagattacatcaaagcctgcaatcagtgatgcacaacaagaaacatgaccaaaagctttgtatcttacatccagctaaattcagcagtgccttcctttgattcatgagagcaaatgattgaccaaaactcttctggctcatgagctngtatctcccagaatctttccacgacaaatccaagcgtatgaaactattgtcaaaacaagtacaacggagattcataagaactaaataccttntcaaacacaattaaaagcttaacaatacacgatctaattttatagagaagcacacctggcaagggccgtaactaagacacgatttctgtca

SEQ ID NO: 220083 - DNA, 375 bp, Glycine max
tgatgaaccaatacctacacctaatccttcttcacctccatttactcaaacttcaccaccatcattaattctctctttcaaaccatcgactttttgcttatgaacaaaaaggagacgaggagttatgattgtaagagcaaactcttgatagatgaaaaaacgtgccttgagtaatcttgatatttaactaccatatattatcatgttttaattttttgattacacatatatcatcatcatgctatgctaaactcaaggtgagtttaaatgcatacacatcatactgaattatgttatgctactcacagcttataatatttcgcattaataaaaatggggagattgttactgattgatgaccattttcacatatta

SEQ ID NO: 220084 - DNA, 389 bp, Glycine max
agcttgacacaagttactatttctcaaactaagttttagaataccaattactaagtcctctttaactagacaattgaggtggtgcatgtttacatgtgcatccttacaaagcaatagacaaaaatcatctatcttatttttcaagcaactaagctcatgaaatgatgcatgttcaatattaaacatgtagatattacctatttttctacctatgtgaacaacctcactagtttttgcttcacaaatgacacaacaatttcttgttgaatgcaattttgaagcctttgtcacataattgacttatgcctcaaaaattgtgcttaagttcatcaacatataaaacatttttcttattggagaatgcgctaattccaatatttccttctccc

SEQ ID NO: 220085 - DNA, 380 bp, Glycine max
atgccccacttacagtctaatattgaaagcggttcgatgatgggatgatgatccaaggtagtggggggaaggttggctggcccaataagcacgggaccctgatgaattttaaaaaagaaaagtgaaacatccggtgaattcgtaaagagtctaataggtgtaagcaataagccacttgtccaatacagtcttctaccagaaatggaccatagtatctaatggaaccctgatttgcatatccaatttttagcatcaataaattgcggaaccaatttggggctctatgaaatttggggaaaatacaaggaaaaaaatggaattataatagaatatgtatagaacaacaccaaaatcttggaagaattgatagttgaggatga

SEQ ID NO: 220086 - DNA, 378 bp, Glycine max
agcttatagaggaagttttaatggaggaaataaaagagagagggagagagagagagagagagaaaggggggcatgaaattgaaggagaaaaaaagggagaaagtgtacttttagttgtctcaaaggccctcattcatcaaagttacaacaagtgttacacatgcttctatttatagcctaggtagcttccttgaaaagcttccttgagaaacttctttgagaagctagagcttcgctacacacacccctctaatagctaagcttgcctccttgagaaacttccttgaaaagctagagcttagctacacacacccctctaatagctaagctcacctccttgagatgagaagctagagcttatctacacacacctctcta

SEQ ID NO: 220087 - DNA, 428 bp, Glycine max
tatatgtgacatgacatataagttagtccgtttatgctataaaatgggtgaatcaccaaccaacaaatgaatcaacattttcacatctagctttctattctggaccccttcaacttatcatgaggtttgccaaaattttaagctcttttgtccttctgttcattcggtatactttaatgaatggacccacaccaaaggtaaggagcatattcacttgaacttgatgcattctgtctacgtgagttgcatgcatctacaacccgtgagctacattactagcagctcctaactactacttatatagaacaaaactagcaagctcttgttaaatctcaagcgcacaaccccgatccaaccaaataatgtgaactaacgcggttatgcacacaatctcatttgttattaagcaagatacttagttataaatg

SEQ ID NO: 220088 - DNA, 377 bp, Glycine max
agctttataatttgaattataacgttcataaactgttggtaatcgattaccatatgtgcataatcgattacacagggcaaattttgaattcaaattttaatagctgtttgtaaatcagttttggccactggtaatcgatcacatcctctggtaatcgattaccagagagtaaatttcttgtaaaagactttttaacttaaaattcttggccaaaccttttgctacttcaattggaattcccttcctatttaatataccccttctaagactctatagactgtcttgatcatccatcttgaatatctttaattgctttgtcttgaataaaactttgagacgcatgtgatcttttggcatcatcaaaacatcagcttgat

SEQ ID NO: 220089 - DNA, 410 bp, Glycine max
  unsure (1)..(410): unsure at all n locations
acatgcttatggctaggaattcaaaattttgttttaggaatagaaaagcatgaaaatagggacattntttgtaaggattagagctggcccatgattggcactttgcacctaagtaacgggggagatgcttttcaatggtgtgtagatatatgtgaatatatggcataaaaatatgttgcaaagtgtgtgaatatatggcataagaataccttgcaaagtgaatgaatagtaaataatacatttcaaaatatgtatatttatggataagtagcataaggagccttttaaaaaaaaatgtgtacccgtgccaaagatggcacgagaatgcttccaaatgaaatatgatgtggaattcccctcaagagaggtagatacatgaaagttcctttcaatgcagtgtggcgtgatgg

SEQ ID NO: 220090 - DNA, 292 bp, Glycine max
  unsure (1)..(292): unsure at all n locations
agcttgtnctagatggatgtggctacaagttataaccatgagtgcttcaataaagacaagctatataaattctctctctctctctcttctctctatatatatatatatataaactagcgtaccccattgtccagaggctcttcgctatgcgaacgtatgagggagggatattgcacgcccccgcatattctaaaatactgtttccggattcgaacccataaccaacaaatcaccaaggcacaactttaccgctgcaccagggctctctctctctctctctctctatctctct

SEQ ID NO: 220091 - DNA, 345 bp, Glycine max
actaagcttcaggaccacttgaccaccacagcttgcatcttgtttctaccttgctggcctaacactagttgacctacaacggatcaaagataatcctacataaagactctaagcgtaggactaactagacaatttctttttaagcctattcaccatacccaggacatactcttaatattcaaacctatgcccacaatatcactcaatacactgtggacttaatgcactaacttaacataagtgtactttgataaacaagcggataaatggatactagataaaaatcacaaactaaccaatcggtacaaatgggaaaatattatcaccaactcagcctatcatgat

SEQ ID NO: 220092 - DNA, 462 bp, Glycine max
  unsure (1)..(462): unsure at all n locations
ctttcgattcattctatgcacccatggtggtccacattgtgtttcgtgcatttttactctcgntttggttactttttataccccctcttgacgtgcttaagcccgtttacttaagtcatttctcgcttaacttaaaaataaaataaatttccaccgaacgtttgaattatattatccgttaacttcggttaaaatcaattccgaccgttcggtcgtgccgtaaccacgttggaaatcaaaaagaggtaaaaaacaatataataatcaaaaaacgtcttttagtaaaataaagcggaaaatcaatcggacgttttctctttgggatttctcattcttaaccgacttgattaataactaaagtgaaactaaggctaaaatcaactcgcctagtcaagctcgtccacaaaaataggctnttgaagttcgtcatttcaattcctcactaagtaaaatggatcattt

SEQ ID NO: 220093 - DNA, 396 bp, Glycine max
  unsure (1)..(396): unsure at all n locations
gctttgcagtctggcccaatcttaagtttatgtatttttatggccaaacagccttttatagttctagaatttactaataagattgaggatgtacatattctggaatacataattgatgcttttgctcccgaaagaaattgttcgagtattagaaactcttttttaagtaaaatgagcatacttgatatctaatactattttttaaaattctttaaaatagtattggtacttttttttaacatatgaaaataaataaaatatccaccttaatcacaaaacaaataattgatcgnaaattatttaatacttattaattatcatgacaaaaatgatgtattacaatcttattttaaaaaaaactacactataaatacatactacaatcataaaaaaatt

SEQ ID NO: 220094 - DNA, 271 bp, Glycine max
atctatcaatcctacttttaagctccacccatttgacctataccaagtgaaacttctttccaccaaagacatatctttcaaccgcatgtccgccaagaaaatgtttaattcctccctttctcccacattttcggtctccctaccaacacctacccttttacaagatcctctaacgcaattaaactcgatagtccacaccaagtagctatgttactacttacctttcttgcctttaattcctcccacaccctcctcctagccatcctatcgc

SEQ ID NO: 220095 - DNA, 387 bp, Glycine max
  unsure (1)..(387): unsure at all n locations
nagcttaaccttttaccagcagaagaggttgtttcctatatttatccatcaaaagaactcccaaagctgtcattgggatctatanagacagaaatgactgaatagaagtgaagagaagactcgccaaaaaaagtggcatctatctcattttatacaacattaagaagacggaagcaaattaaatgtatgaagaacctgaacagcaaccattgctatcattccaatacttcccgaaaaccctgtgatggataaaaaatttttgcctctaagacaatcgggttataaatttaacattcaggtagtcatcttccttatgggccatatgttaaaagcataaaaaaatctgcctgtcccagcagagatgaattttnaacttgcataaaaagc

SEQ ID NO: 220096 - DNA, 382 bp, Glycine max
  unsure (1)..(382): unsure at all n locations
ccatactatcatgttatactaaacaattcaacagcattcccaatatacactacaaaaatttcattcatacccgaagcaccggataattctttgcgttcaagtttaatagctgtgtcgccaaaattcattacatctggcaccagtggatatgtccatcgatgaattatatccttgctgacagtgtcgtagcttcggaaattatcaatccttgcagcatagtctgagtggatttcatgaacaaaaattntgtaccccattatctgaaagaaacatatggtcaacattgatgtggtgtatacataatgcaataaattaaagaatatgtccaatataaaaatattaaagcaacacagatgatgagcttgtataccaaaacatttga

SEQ ID NO: 220097 - DNA, 372 bp, Glycine max
  unsure (1)..(372): unsure at all n locations
acacacacaattgtgctttttggcctttccttttgttcatangtcaactaatttaaccatgtcaccacagaaggcgtaacagaaaatattctacaaacttacacatatgttgcgacttctaagcacttacacaatttgccacatgatgaaggcatccgcctctggggtccacatggacaacatattcgctacattatagaccgaaagagatatttgttaaacctgaatcaccagtgaaaggtgaaaatgccaaaaaatattttaaggatgtgggatcaaacactaatcgccttttcttattcttccctttgaataatttcttttaaaattacgagttagaacgccacctgagtgtactccatattatgaccc

SEQ ID NO: 220098 - DNA, 456 bp, Glycine max
  unsure (1)..(456): unsure at all n locations
actcagcttgtaatgtatagaactnatagaattaaaaacacattcttgagtggaatccctctatgaggtgaagatcaatattatgtgcagcaaaaaacatagataccctttactattataagtcaaacagtggttgacaaagcttaaatccaatggtttaactggtctagtcgagtcaagtgggagtgttgacaatttgttgaaatccaatggttgttggtcaagcagtagttggttatgttaatgaaatctcatattgaagggtgaggaccggatatagcccatggttggggtgaaccaacataaaaatcattgggcattcttcttcttctctctctttaacttgantatgaacaaanttgttaactgttttgattaaacatgaaaacatacaatcttttcttgttaacacctaaaactaaacttaactttatcaaaggtttttatataaataac

SEQ ID NO: 220099 - DNA, 259 bp, Glycine max
tggaattcatcgcctcgagctcaagtgaaatactttaggcacaaaagacagtgaaagttaccaaaactgtcgcaactggacccatgaaatctggatttgaacccgcagtggttcttaatatatccttctgcagagaaaattttgagtagtactcccaggcacaaagagggggtcctctatatctctatattgagagacaattcaattcatacactgctcatgcccctggacaaactccgtaataccacacccaccattt

SEQ ID NO: 220100 - DNA, 317 bp, Glycine max
aacactatgctgctcctaacactatgtaccccctcacgacggtcttaattgaataaacacaacacatcacgactctaacgtcgcaagactaagatcatacacactactttctcaaaagactattccaacccttacgccagagcattaccctaacactctgtcaaaacctatcgccacacgataatccaacgcggataacaactgtgggactctaagatgcgcttcaagcttaacaataagcgtcatactattgatcaatacagagctggtataaataagcgatactacgactcaaatatgccacaaacgctacacct

SEQ ID NO: 220101 - DNA, 320 bp, Glycine max
caacccgcctcatcgctacgatatcaacactctaatatccgataattttaatatttataaaaagaactcccttaatttgcttatgaaaatagaagtgattttgtcacaacataaatttacccaacaacacgccattacttaagtgaatatgcataattacatagaaacaataattcggtacatgtcatacatataacgaaaattaaatctgttcatagatataattaaaatcccagttttacatctttaactcaacaaaataaaacttaaaaaccaactatggaggagttgattacaaaacacaactctctcccaaaata

SEQ ID NO: 220102 - DNA, 380 bp, Glycine max
  unsure (1)..(380): unsure at all n locations
agctttataagtgcgggtgtgttatatattgtcaagngtncgcgaaatgtgaagatgatgttccaagtacttcggatttggtccgaccatgccctcctgatttccagctgggaaattggcgagtggaggaacgccccggcatttacgcaacaagcataatgtaaacctttacggttttaaaagctctatagttgggcctaggctttagagttttcattttgttaaggctctgcgtcttttgtttttgaatttataatacaaggatctttcttcatcttgttcctagtctctacccattctcattcatttgcatgtttacttctttttctaaaacggcagattcgatgacgagtcccccgaaggtactattacctgggacc

SEQ ID NO: 220103 - DNA, 215 bp, Glycine max
tggttggtccaccaagaagccccctgatgtccaggaagaacaaatcttatgaaaaagaagaggagataagtgcacataagaaaaagcctcctaacaaaaacattcatgtaagtggagcctcctctagaaaatctgacctaccacagccggctatctctcttccattcccacctagagcaatcccaaacaaaaaaatggaagcagcggaaaagggg

SEQ ID NO: 220104 - DNA, 356 bp, Glycine max
agcttaacacaggacgaggattgattatttttacgacctaaagaagcacacaacatcgaaaccacaacaaaacgaatatgaatgaggttgtacttacccaatcacacgatggagataatttccgaaaaaaaaggcgctgatctatgatggaactcgcaaaacaagttacctaacgataaaaggaaacgcgttttgatcataaaagccatacgcacagtccaaactcataaaccctcagaaaatgacagtatcgcgtcggttgctaaaaaaatgtatcgggaaattaggaaaatacaatgcgtgactgcgcggctatatgaagcggaagccgaatactcgccgaccctaatgggggc

SEQ ID NO: 220105 - DNA, 393 bp, Glycine max
  unsure (1)..(393): unsure at all n locations
agcttgacagatnttgttccacatattctgattaatatattaagattgtatatcataatcatataatatcataatttcaaggtcaagttgcatagtaaggtcatagataacacaggaagtacggcattcatattgtttgatcgggttgctaatttctttattggaaaatcggcaaggatgtacttgaagagaatgaaagggtacatttaaaataattcccaacccatatatattgtttatacagattatattataagttttctgatttattatataaattatataataaactccacaagggaattaaaggtcatcagtttccaactctcttcaattcatttaaggacaaataattnttgttcaaaattgaagtcaatgatggtaacatctatc

SEQ ID NO: 220106 - DNA, 463 bp, Glycine max
  unsure (1)..(463): unsure at all n locations
tcagaccaaagcaactcagaatctaggtatctaatacctcttcatttagtggattntcaaggtttgagaagtgaaaatgagaatggggtaattttggagcaaactcttatctcaaacaagtctataacatcaatctaaactcgctcaaactggttttatgacgaaaactctaccgaatcaaaatttgactcctcaacacccaatttaccctagaaatggctcttgccttcactttggtcactcattttcctcatttgctcagcccaagctttcccataagtcctaaatgacatttcaaactaggattaactcactttaatctccaattaccactaaatccagaattagcttttcaaaccctcaaagcatcacacttttccactcatatcactacattctcacttttcaaccctanggtaactctacccttcatctctattaagttttccatcaacaatttcaa

SEQ ID NO: 220107 - DNA, 366 bp, Glycine max
gaaagtccttttaactctacaaattttggatcacatcgaacatttctaacataattcttaaaattgatgtcggaccaccacttctggcacatctacaaaatcatttggataaagttcaaccatcctcaacaattttttcacatcaaaagcttcaaatgatgatgagggactcaaacttgaaacacattgtaaaagttcagtattatcttcatcaaacctatcattgagctcctgcaactacaaatctaaaacactaaataaataatcatgcttataatgatgcaaatcagaaacactagaagtgatagcatgtcatctaggtttcttcccttgcacattcagggcatccaaatcaggcacatcaat

SEQ ID NO: 220108 - DNA, 336 bp, Glycine max
taagatgatcataaacacacaatctactcataatttgagtgatcaatttcaatatttaagtgaaagggacatcaagatacagttaattgaataacatccgagaactttattataaagaggaactagaggacatgggttcatctatatcacaatccaagttctaacgggcgtagctaatcatgggcatagaataactaaataaccatgcctattgctctagagaataaagagatgaaaaacccttacaagttcagaccccaattggtctaggagtaggactcatctcaaagaacattgatggttgttaacttataatgaattacaaaatccaaggca

SEQ ID NO: 220109 - DNA, 376 bp, Glycine max
  unsure (1)..(376): unsure at all n locations
agcttttggttatgtgcttttcnagcgtggtaagaagtctcgcgcgtgccggtggttctcgcagagtctatcgccagtctcaggccaacgcgccgctatccagtgcgccggtgaaacagattgccaacgttgttgctcccgtcgccgcgttcttcgccctcacttttggtatccaatgcttaattttcattttttttatattttcgctattttaaatagatttctctttagttgtttgttcgtatcggtgcctgcattttagtctactctatgatgcatggatactggtacgtcccagttatgtacgaacccttgaaggatgtttttttttttttttttactctctacaccactttcagcatcaatgattgagaat

SEQ ID NO: 220110 - DNA, 440 bp, Glycine max
atgcaatgaccttcacatgcatattttgttcaaaagaatatactgaacttgtatgaggcaagcacttgtaaaaaaccctgcacaatgttgggtacttgactgttcctaaaacacctaaggcatctgcttttgcccctaagttcctcctcccttacatgccaatttcatgggggtctcagatatttagattcactgaactgttatataataaattcattatgaattgaagtactttttggatggatgatttttgttattatcatgggggaggaatgtggagaaagcaacccttggctcatgttcttcacagcaacaaaagaaacaaataatagtccccaccaataaaagccctttgagagtccaatgtttggtagcaagttttaaataaaagagagaatgttgaaaagccacagtacatgccatacaaaacctgatgaata

SEQ ID NO: 220111 - DNA, 404 bp, Glycine max
  unsure (1)..(404): unsure at all n locations
agcttaaaanaacgtaaaaccctaaaccctatgctctgaataatagnctaacagaatcgccttttatgaatcccaaggctgctatttataagggtcactcaaagtcactgggccctattacattattctggcccaaaatgaaataaacactgaacaacataaaataaaattgcaaactcctaattaaaaattaactaaggtaaacgttactttattttccctctttaagtccacgaccaaaatgtggattaagcccaatgcttcattaattcctgaaatttgattgaaaacatcaattgaactaaatgagcccaagtaataaaactgcctaattaatttggcaattaagactaattagtaattaaaatggtgcaaaaaggttttaagaaataggagaaaataat

SEQ ID NO: 220112 - DNA, 409 bp, Glycine max
  unsure (1)..(409): unsure at all n locations
tatgtgcccatggcatgaatttaaaaaatgatctatcatctatctttcaatctatctgtcaatcttctctcaacatcattcaatatctcttaattctttctatagaatctttctgatttatttctcttcatctttctaaaagattttgttcaaacactttctcttccaagaaaagttctttgttcaaaaacttgtgcaattcaactttttcattctcttctccttttgccaaaagaacgaaggactaaccgcctgaattctttngtatctctctttccccttacaaaagattcaaaggactaaccgcctgagaattcttttgattcttcccttccccttaagcaaaagaattcaaaggactaaccgcctgagatatattttgtttccccttacaaagattcaaaggact

SEQ ID NO: 220113 - DNA, 360 bp, Glycine max
  unsure (1)..(360): unsure at all n locations
acagaactttgngaaccccagcttacatttcgacatttggaacattgcacaactacacgccctgacacaggggttatacagagctcatctccacccgcagcacaaaagaaattacgtggaaaaatgaagataaactgtgttaagctagatctaaaaacatacaagaagatactgtcagtttgtttcactaattaaatcaaataacaggtttttgtagcttatatatatcattaagaaactagtacggcagtacctgaaggaagtgaattgtcttttaatctagtcagaaaccagtatatatcatttaagatatgtaagtgagtgttgtcttttcagacaaatgaagcattagcgaagcga

SEQ ID NO: 220114 - DNA, 406 bp, Glycine max
  unsure (1)..(406): unsure at all n locations
tgaacgaatataagaaacatcttcttagacttggtgattcttgacttcatcatcatgaagcgcctgtacacttgttacttcaaagtatcataccctttcaccaacaaaggctcgaagaccatcgaacctatcccaatcttttgaagaagaaaagaatcttctccaccatgttcttcttcatcaacatgttgagtacccctttttacccaagagccatcatgctctttttgataccacaagatgcaatgctctgaagcgcctattataaaggatctctttattggaacataacgttcagaatcaagaggcatgttaaagtgttgaaggaagagggtgactanatgtggatatgccaatggagcattttatcacaatttcttatgcatgcgatattgtattgagtgtg

SEQ ID NO: 220115 - DNA, 305 bp, Glycine max
aatacgtgaaaatataaaaaaagtcccttctacaaagacaactcaaaatgtcctgaaatactaggcttacactctattctactagaatgaccgaaatacaaggcctcaaagaatgaagaacctattctaatatttacaaagaagagtggaccctatcttggcccatgggctcagagatctaccttgagtgtcatgagaaccccatggccatctttatgaactctagaccaattctcttggagatttctatcaaatacccttgggggtaggaatgtatatccctctcccctttgaaaggatttcac

SEQ ID NO: 220116 - DNA, 413 bp, Glycine max
atagagctttatggctctttcgtatcaattccatgattgattaacaaaacaaagggttagagaaagagagaatcacactcagaaatttatactggttcaatccttaagaggacctacatctatgatttctaagaacccttagaactttcactaatagagaaccaagtacaaacactatgcacatggcatttcctaaaaatctatttttcccttaaaccctacaagagaaggatccgtagttaaaaccctatcaactcacaccaacccctgataacactaatcaaggtcaaaatctagaaagaaatcaaaattagatagaatataccttgatgtgcatatcacaacatcttcaagctcttcctttgattattaaaccatgatgaagaaataatgaatcttgatcaacatgaatc

SEQ ID NO: 220117 - DNA, 211 bp, Glycine max
tccatttaattccaactattataaacatatgaacatgaaccttatcgatagtgacatggggagaaacccatacaaacaaattttgtggttcaaaattctatctttgggagattgatatggtctcaaaaaaggatctccagcactacaaatttctcttatgatttggcatcaggcgttatctagagcataaaatgatgtggagtctcaaatt

SEQ ID NO: 220118 - DNA, 383 bp, Glycine max
  unsure (1)..(383): unsure at all n locations
agctgtgaaacttgaaggataaaagttatgtngctaaaagaaaaatgccaaaattgtttggagaactttcaagagttggaaaacaaactcaaatgtctacaaaaggatttgagggaactaaatgaacttcacaaccattaaagtgaggaaagaaattatctatggagagaatatgcacaagcacacaaagattatgaggatcttaaaataagtaaacataatctttgggtggaatgtgaagaacataaaagatctatgaaattcttgaatgaaaagcttttgaaaatgaagaacttaaaagtcaacatcaggatgttataaaacttcatgaggaaattggaatcttaaaatctatgtttagtgggatagaaaatcttgaaaaa

SEQ ID NO: 220119 - DNA, 176 bp, Glycine max
  unsure (1)..(176): unsure at all n locations
atcaaagaacttatcttctccattactactggttggcccaaacatatgccatacattgctaacggaacaactactttatttggtagagccataaggtagtgggcgaacgccacccacttcatgttctaaaccatctccttccactcacctattgcatacatgattgngaaaactat

SEQ ID NO: 220120 - DNA, 399 bp, Glycine max
ggcactgcaagcttttgacagaggaagattattattttttgatgtccaaagagattcaaaggttgtaaaagattgtaatgatttgattgtaaaggttttaagtgttaataattgttcttaaaatgcaagttaaggtcttgcttttatagaatcttcatatctggtcaagaaaaccatttgaagagttattacctttataaaaatctgaaaaccattggaagagttacatcttttgatttttattcacaacttatcactggtaatcgattaccaaatccttgtaatcgattacaccaagcatttttgggaaaggatatgattctttacaattgaatttgaatttcaacgttcaaacatactggtagtcgattaccaaatcattgtattcgattacaccat

SEQ ID NO: 220121 - DNA, 381 bp, Glycine max
atctatagcccttatatctgtcagtaaaccctgattataagtggtagcaataaaatcattattcgctcgaagtaattacacgttattcataaggggatcgtggattagaagcttttcatcatctattatccacaatattggtggttccaaactgaaattgaattgtctcttctctggacattattgaagcatgtaatcttctcttcacgcaagggaaaaaactaataggcatatatgctttgtccattatcttgagtatacaatagtataacatgcaaattcatttgcattctgcacgtaggaaatcaccgagacatttcaaaagctagtactgtggcagaattgaatcatgtctgatgagtatgcctgatgttaatggat

SEQ ID NO: 220122 - DNA, 392 bp, Glycine max
agcttgaatataatctacactgctcgcattctcaaagtgaagcacccagatcatgctagcaaatttcacccaataattttgtgcaatgtagtctttaagaatataacaaagacaattgccaacaaattgaaagttattcttctagagttggtctatggctcctagagtgttcttgtcctggggcatttaatcacaaatagtgaccttgttgctttcaatattttccattattaaagcacaaggggaagaagaggtacataacatttcctgctcactggataaatttggtggctatacgcatctttttttgatccttttcggttgttattaaaggttgtcctggaagaaaattcaagcctcataaggggttgaggtagagggatcccctctcc

SEQ ID NO: 220123 - DNA, 418 bp, Glycine max
  unsure (1)..(418): unsure at all n locations
gtctggccatggtgcacaacaagtttttttccacattcacaatgcgcgcataaacccaccattccctgtgtgccacctccaactgagctcacgtactcccacgtagcccatatcctcgtttttcttaacaccgggtgcccatcaaatctctcaagctttcacaacatccaagcaaaacaacattcaaacagcacaagctatcacagccaagctaaacagagcaaaggcagaaaactctgctcaacacatcaaccaaaatcacagcttttctcacttaaagaccacagtaacaataccttcgatccaattcgttaaccgttggatcgactccaaacttttactggaaggctatagtgcataagcctacattgtgaccgttgggatctactagcanacatccagaactcattctatacta

SEQ ID NO: 220124 - DNA, 132 bp, Glycine max
ccgctcctcaatcgaagaatacagaagagacgggtggttcttatagaagtgatgagactggcttcagtgctgcaatgtaaatttgattttacggaataatgtctgaattttacaatacactttgagtgtgct

SEQ ID NO: 220125 - DNA, 399 bp, Glycine max
  unsure (1)..(399): unsure at all n locations
atggggtntctcctcatcaccatgtcagtatgtttcatggaattgaaattaaaagtctcttaagtagagaatttgatgtaaaaggtttcatataattgatttttatcataaacaaatcatcaagtcaatggttagacacctaatcataatcattcaattgggtagaaattatcttgatcagcgggctaagtttgaaaatgttgtatgttggcaatagacaaaatgccagactagttcgttaatttttcttaacttttgatgtgtaattaacacttgaattactttacatgttagcatgtatatcatcacattttaatcttatatgagccntctatacttggccaatcagatcaaataactcctgtgccagtagaagttactgtcgatgaagaaatcctg

SEQ ID NO: 220126 - DNA, 126 bp, Glycine max
gttcgaagcaaaatctaaatcccttaatttcaaacgggatgtcagcaaaccattatacaactggccgaactacttaatatctagatttggagcatcctccatgtgcgcttgcatgctcttgagctc

SEQ ID NO: 220127 - DNA, 351 bp, Glycine max
agcttggttatcttcttcttcactacatcttataatcaccgggtgagtcttctttgtggctgtcttactggtttagctccatcctctaaatttattcgatgcattcatgtggatgggctaataccaggaatgtccgccagggtccagcctataaccttcttatgcttcttgagaactgacaacaacttctcctcttgctcatcagcaagggaggcagatataatcactggaaaactcttgctatcatccaagtaagcgtattttaaatttgatggcagaagcttcaattctggtgtggtcggctggacagtggaaaaggggatggtttctcagcctttacctcataaaaaa

SEQ ID NO: 220128 - DNA, 438 bp, Glycine max
  unsure (1)..(438): unsure at all n locations
tgtgggggcctcctttggatgggggcgggcactctatgcttgtccaatgctgaattggaggaggtcccgatgcgagttgagaagctcggatgatgttgcgcgtactgatgggtaccatgagaggtctgcgggggctttacccatgtgggcgctgaagtgacagcataagtatctccttccttcctttttgccctaattgctccgattctcctaacattggtacttgtggaggggacgtaatcgaacttccctctcttcaaccctacttcaattctttccccggcgaataccaagtcccgaaagctgtgaggcatgtagcctaccaacttcttatagtaaaacactggcaaggtgtctacatcatggcaatcatctccctttcgaccatgggaggggccacttgtgctgncaggtctcttcactactgagcatactctt

SEQ ID NO: 220129 - DNA, 418 bp, Glycine max
  unsure (1)..(418): unsure at all n locations
agttacctgcggcatgcaagcttcctaacaaaaattgtcatgcaggtggaccttcttctagtaattccgacttacagcagcctcctatccctcttccatccccacctagagcaattccaaacaaaaagatggaagaagtggaaaaggagatcttggagaccttcagaaaagtcagattccaagatatgccanatttctaaaggagttgtgcacccacaaatggaagctcaaaggcaatgaaaggattagcatgggcagaaatgtgtcagcattgataggtaaatttgttcctcacattcctgagaaatgtaaggacccaggtactttctgtataccttgcattattgggaacaaataaattgagaatgccatgctagatctaggagcatcagttggtgtcatgcctctgtccattttc

SEQ ID NO: 220130 - DNA, 409 bp, Glycine max
cagcatgcaagctgaaataaacagcggacggccgattttggttcattacatattgaggcgctctaaatcgaaaaccggaagcttttgcaaaattcaagtggtcataacatgtcacacagaagtccgattcaggcgcataatataacaagatgctcgaaattgaacaacgaatgctctcgagaaattcaaatgatcataacttgtcacacggaagtccaattctggcgcatcacatatcgagacgctctaaattgaaaaccggaagcacttgcgaaattcaagtggtcataacttgtcacacgaaagtccgattcagacgcataatatatcgagatgctcgaaattgaaaacgaatgctctcaagaaattcaaatggtcataacttgtcacacggaagtccgattctggc

SEQ ID NO: 220131 - DNA, 381 bp, Glycine max
tcagcacgatttcctctgttttgacggaagacttgttagctccatattctttcaattagaaccttcgattgctcatgccactttttcacatactcagctttagcctgtgcgttcttatgcataaacataccaaggtgaagcatacgcaacatatcaagaggagtcaaaggattaaatgcatacactatctcaaatggtgaacgatcagttgtgctatggacagcccgattataagcaaactcaacatgaggcaaacaggcttcccacgatttaagaatattctttaaaacagtcctaagcagtgtgcctaaagtcctattgactacctcagttcgaccatcagtttgtgggtgacaagtagtagaaaacaacaatatatta

SEQ ID NO: 220132 - DNA, 414 bp, Glycine max
gattttaagctactgagctgcagcttgttcttttataaatgagagagtctggactcattacgttatctaaaaatcttggggtggatccaagtgctccgatcatccatttgcatactcatgttttggtggcatactcaccgttgtttatttctttaggaatttcatcataactaagaaaacaccaaggcacccctataacactcgatccagaaaaatggataatgaagagggcgtgcaggaacagatgaaggccgatctatcggccttaaaagatcaaatggcttccatctcggaggtcatgttaaaactccagaaaaccatagaggataaagccaccgcaaccgcctccagtacagttagggaagcggagccggtgctgcagcccgccttgaatccgggcctagacagaaacac

SEQ ID NO: 220133 - DNA, 441 bp, Glycine max
  unsure (1)..(441): unsure at all n locations
tttatagctatcatgaaggttccacttattgaaccatcctaagattccattctgaggaacctttctgaagaatcattaaaatcgtcattctgatggttgctgagaatgaattcatactaaatgaatttctttgatgaaattcatatagatcttttattctgaagtaacatagcttcatcactcttaacacttcttcacaactttaagtattttgaagttgattacttcagaaagacttaatagaagtttaggtggtggtgtgttagtgttctgtntgaggtcagactgagaagtattttgtagtcctttgttttgatgcttctcatctgtgcttctcatggacaacttcattattcatcaatcttgcatcttcttatgtagttagttcttactttctgatgtgcccttagtgcttgtggtagtatgtggaaagtaaaaact

SEQ ID NO: 220134 - DNA, 400 bp, Glycine max
  unsure (1)..(400): unsure at all n locations
agcttgaacgcaaactggatgcgctcggcttctnggttacccagctcgcctngaataacaaatctgaccctgtcgcgaggcgtaggggttcgcgcttctatgctgaccaccatacagacctttgcccttccatgcatcactctggagcaatagatcaccctgaagcttatgctgtaaatatttacaatagacctcttctacctggaaccaaaatcaaccacaacactacatttatgaccttttccgcagcatatactaccctggatggaggaatcacctctttcttagatggtcctaccctctgcaacaacaacaacaatttgctgcttactttctaaatgctgctggcccaagcaaaccgtacatttctccaccaatccaacaacaggaacaaccccac

SEQ ID NO: 220135 - DNA, 354 bp, Glycine max
aataagaccagccgtttaggggcctcacctttggtgactttcatttatcacccatggaggaataatttgtagagatcctatgatgccctttatggggaaggtaatgaaccactcagagccagtctaaaatggggtggttggaatatcgacaaaatgtttggaggcaaaagcatgaatcttggcaagtagaggtcaatgggctccattcttagacgtcctcgcacttttgatctatccaggagtcctcttttcccatgtcgatcggtttggtggacctattaacgatctacacttttgtctcctattatgacctggaggaaagctcgcgtatcgctattatagccgatctatatg

SEQ ID NO: 220136 - DNA, 392 bp, Glycine max
  unsure (1)..(392): unsure at all n locations
gcaagaagaaagcgtaagtactttgatatgtcctcaattntgttcccttttttttgtctctgggtttttgcacgtatagcagctgaattggtcataagttgctatgtaaattctgcattgttttgtatttagtctctaatgtttggtgactttaaagtgcattgcaaaactgtcttttatctgactttnttctttaatattgctgcttctgtttgggcactgctaaaaggaatcttaatagttttgaatctagattcatatatggtattgaagcgtctaatgttcatgacaaggaaaatggtgaaaaatttaaggttggaattgcaataagagaaccatgatatcacaatctttaaaaattaagatcaattgaagccttgatctttgttaat

SEQ ID NO: 220137 - DNA, 412 bp, Glycine max
  unsure (1)..(412): unsure at all n locations
aattcacatgaagattaaatcatgaattattagaacaattgaaagtctaagtgcgtaaatgtattgaaagtccgcagtgtatagtgtgtcccgtttgttccttggcgtatggacgggggtaggaacacaacatgctcgctttcttatttccatttctaggctcatttntattcaacggacaccaaaaaataaatagtaatcattttttaatgttttattttaccaaacacttaattatcactcactattttatttggctttattattcttcctattatattatgtcatctatcataattatatatatgactgctgaagtcaagtgatgacaaatactattttcttatatataaaaagtataatctagtatcaagttaatttctcaatatattatggtgctacttttctcatt

SEQ ID NO: 220138 - DNA, 388 bp, Glycine max
  unsure (1)..(388): unsure at all n locations
agctntacagcagattgtagttatgacctcctaacctagaattaaaataacttaatgccattaacctagggagttaaaaaaaacttaatggctgagtgtaactgaaattgtggcaaccaaaagtcacccccaacagccaacaagtcagccaccatttggtctcccaaaaggctgatgcctaggttgccaattgggcccttattacaacttgaactaaacctaactaaagcccttttagttgattaacccaaaacatatttttggtcagccaactttacaaggattgggccattatttagacaaactaaacactctaaaattgagacaaagtggtgtcatttagtcctcctccatttgggccatgatacaactcacaaccttggacttt

SEQ ID NO: 220139 - DNA, 441 bp, Glycine max
tcaaaacacagcaacacagaatctaggtgtccaacacccctcaattcaatgggttttctaggtttgagaagtgaaatttagaatgaggtaaatttggagcaaactctcacctcacacaagtctataacatcaatctaaacttgctcaaactggatttacacctaaaattccaccgaatcaaaatttgactcttcaacacccaaatttgccctagaaatggctctttgttcactttggtcatttgtttttccctctatcacagcctaacctttctcataagtcctaaatggcatttcaagctaagattaactcgctctaacctctaaatactaccaaatccagatttggccttccagccctcaaaaattcacttctttttcactcataacaccacattttcactttctaaccctaggttaattctaccattcatctctaaca

SEQ ID NO: 220140 - DNA, 281 bp, Glycine max
ctgtttttcttcatccccgcaagtattgaggaggctacattcactcgagagacaaaacagctcctcttcttcttgaacagcgaccgatctaatggggactagtatggactttagccccctcgcccttcgcccttcgccctttcctaaccaatttcttcatacataatagaggtaatgagagtgcgcgaactagtgatctatttccctctgcctgattctcttattataatgctgcacatcatgtctttcaacccaaatagtaatgaaaatacatattctca

SEQ ID NO: 220141 - DNA, 437 bp, Glycine max
  unsure (1)..(437): unsure at all n locations
tttggtcttcaccggccaaaggatcaaaatgggtctggaaaaagacaaatttgattgtcataccctaatttcgtccgggaccattgtttgatggcatgcaacctttgcttgaccacttcgaggtacttggcacccattgttgcacaatacttaaagttccataacgtgcccgaagtcaaaagagagcattgttgcacgatccgtgaaattccgtaacatgccggaaatcaaaaggaagcattgttacgcaatccgtgaggttccataacattccgaaagccaaaaaagggatgattacgttatctgtgaggttccgtaacattacagaaggaaaacaagtatcgttacggaattcataaatttccgtaacgttacggaaaaagaatcagcaaaaaaagcagggggtgtatntagtaaatagggggtgaaaatagcaa

SEQ ID NO: 220142 - DNA, 400 bp, Glycine max
gaccttagagcgactgcagctgcagccaaaggagagaattctaattttgataatattaagatttccattcaatcatatattttaaaatgctcaacccaccataaagtaatacccaataaattaataactctcaaaatgtttttttctagacaaattaatatgagtataattagtttagtaaggtatatatatatatatatatatatatataaagagatatcaaattatactattgtaatttcgataattattatattattcttataacttgatatataatgtgatacttattgatataatcattgaattattttacatattatcaaaattatctgcggtaaattttgttaaaataaccacaaaaaattaatcatatgatccctataatattttaaaacat

SEQ ID NO: 220143 - DNA, 427 bp, Glycine max
gctttaaaagtaatctataggtggttgtacttgcttttatctaataacacgaagtaagaagcctgctagttagccaaagcagtattcaaattcttctgaacaacgatctgttccaacaacttctgaattaaatgttcccaaattcatcttcagtaaccttaagtccttcagcttgaaagatctaaaagaggcaactaagaacttccggctagataatttaatcggagagggaggatttgggcgtgtcttcaaaggatggattgatgagaacacatacggtcctacaaaaccaggcactggaattgtagtggccattaaaaatcttaagccagaaagcttccaatgccacaaggaatggcttgtatgtgtaacaagaaccataagccaacgcagcttaattattggtcttgcttgctactgatgacta

SEQ ID NO: 220144 - DNA, 392 bp, Glycine max
agcacgtttgatactactgtgtcatcatttttatcatgtattcatacattcacattctccccctttttgatgatgacaatcattatcaactgaattcttttggacattatcaaaacctgcatgattcatattctccccctttttggtgatgacactcattatcaagccatattatttttgacatcatcaaaacctgcatgatttacaacatagaagtgttgtcaacacttgcatcaaaaaattattatctattttgccttctaaaatatacaacactaataaatacagaaaattaggcttgtgtactcggatgtgcgttcttgaaacaacaaaattgtttctcaatagtgtgaaaattctacgtgtattcacaccaagaacaatctttaata

SEQ ID NO: 220145 - DNA, 460 bp, Glycine max
  unsure (1)..(460): unsure at all n locations
cttctaatacacacgcaaactaggaatggtgcgtctagaatctctatctttataatcattaatccacatgcacaaattaaaatgcatatgcatgactagtttaatttcacaaccattcagaaaatattgcatttgttggctcgaattataagagaccaactttttcatgaaaatacacctctaaagttagtgaaagaccaaatttaaactaacacctatctctaaggtagtaaaaatccataaaagtataaagtgactataaaatatcatagatgttatttttgcaacactttgcttaaaatgggtaattattgatgagttgtgacatcttagatntaaacaacgtcgactaattgaatcttcattctatattctaatgtgatggagagataaactaaaactcttgaaatgatagtagactctttgtctcatcacaaattatggacatnctttctatcat

SEQ ID NO: 220146 - DNA, 394 bp, Glycine max
  unsure (1)..(394): unsure at all n locations
tgagtgtatactattatcactatcacctaactattgctctaggagcgggtcgtatctacattaatttgggcttaaggcacattctattaaaataaatagtacaatataaatctcacaactttaaattaattattcagctattttagcggcaaaaatatttatcaatattntataatccaacaattctaatatttcactctcaatagataaaatagttaattcattcgacttatcttataacattattgatcttaaataagatctcaagtatttataattcttgaaaacttctttcgggtgtggctaccattattcggattataataagaatctattagcactgcatgactatggaaaagactctaaacctttatataaattaatattatcattg

SEQ ID NO: 220147 - DNA, 374 bp, Glycine max
agcttgatgactcaaactatctccactgttaacttgagaaccggttatcaagtcgcataaattgtagtgtttcatcgtcaatcccgtccgtctgccttgttatctcacgaaggatgatcgccttgttgattgcatgaatcttgattatgaagcttgggaagtttaggaccaaacgctccttgttttgctttaatctactctctcgaaacccgctctatcgcgcattcttgactcgaatcactcctatcaagtttgggagatgattcatgagtacttcaatcttcataagaaatctcatgctccacagcttcgaattgcgatgcgcgcggttttgcttgacgggaaatcaatctatgagtatttgcgtaaaatta

SEQ ID NO: 220148 - DNA, 361 bp, Glycine max
  unsure (1)..(361): unsure at all n locations
aaacattctctttatttttagaattntattagctataatccctatttcacgtagctaatggaaccactatttgaagtactaatgaaaaatctgaggaactgtgcaactcaagctcacaatgcattcaaacacacccaaaagtacaccatttacggggcggcgaattatacagaacaaaaagattctgaataatgaataagaacctcatgttcatccctcacattctattttacgctattaattagcagctatgtatcattctctagaaaggcggggaaattcaagagtggtctatatgtttgctacaaatacgccttgcttgctggataacaacagctacttcttcctaaaccttataaaa

SEQ ID NO: 220149 - DNA, 349 bp, Glycine max
agcttggtatgaagacatttcttttagtggctataatatgacgtctcaaatgtagtgattagttttgtgaatactagtataatatgatagagcaaagccccattgtctaaaagttttctttttggctaaatcaagatccattgccaaagatatggggcgagattgtctttggtggcattgactgaccacgcttatgttccactttctcacaatgttcattggaaggtctattatattttcaactttatttgcttcattttggctcttcttatcaaccttggtggtgtaattggctttggccaaatcttcctccctagttcatttttattcctttttattcaaatgcttg

SEQ ID NO: 220150 - DNA, 418 bp, Glycine max
  unsure (1)..(418): unsure at all n locations
ctactgtttactctttctacacataaaaaatatcaaactatttttttttaaacatgttatactaattaatttggtagaatattaagtttgttatgagagggagggaaggaactcatgaccttttttctttttctttctctcttaatcatgttattgatagagagtattcatcatctattttattaatgattaatctccattagaaatctaactatctgaattttctttttcaatcatatttttttcatccacaaaattcaaaatcaaaattttacttaatggaccgagtctaatatcactcgagccaactacttattaattttaaacttatgtttaactaaactagcaaattgcaatgttgntcaaaattcctacaaattatctatcattatggaaaaatggctcattaaaaataaaa

SEQ ID NO: 220151 - DNA, 396 bp, Glycine max
agcttagcggaaaaaaaatgataaaacacgggaaacaacaaagtttgtctagttcctgggttgagaaatagatgctaatttcatttgtttgtccatgaattatgaatttataaggctgaatttgggattgaaacaaacatattgtgagatgatttctagctgtcaacaaacataacaggcaaatgtggatcttgcttcagagttctgattttccccaatttctaacttcacaattagattttaatggctgaaataatccatatggatatccaatttgttttattgtctatcaaagatatatagacctgagtttcattcaggatcaaaggtagcttgttgcgtctaagtttgcaatatacttaagtaggggctccttgtttgattctcatgattacc

SEQ ID NO: 220152 - DNA, 444 bp, Glycine max
  unsure (1)..(444): unsure at all n locations
ctagctttaaaattacagaacttttgtgttctctacatactcctttatatagaagaaatatacactggatttttttatattaaaaatactatattgacatttcctcatatgttgcacttacccctctacgtaagaataggaataggcccagttttttaatattatgatctaacctatattaaattcaggcttgactagacttttttcaaaaatagaccaagttatattttgtaaaagcctattcaattaaaaacgtcacttgttctttaaaaagtctttgcctaacaggctgacctatttaagtacatatatattataatcatttttagtattattattatatttaaattgttgtaatgtattaaattcatatatctttttatctttcanaaatattacaaatattgaactacataaagaattaaacttgtaagtatattgagg

SEQ ID NO: 220153 - DNA, 400 bp, Glycine max
tgcttatcaagaaatatagaataattacgtattaggaatatacgcacagtggtttgggttgggtttgaaaaaaccataactcaactcaaccacatttgaacatgttgataattaaaactcaaaccaaacaaatctaatattgtaaatgaggtgaattggatttaattgggtgaacgagtcaaaacatttaaatttatatgctattttttaaaatttaatattttatataagttaaattttttattaaatggaatactaaatatattatttataattgtcacatgtgatcaaatagtggaagaaaagatgaggaatcatattatcattatcatcaaacatacccacaaatataataaactaaaaaaacaaaactattaaaacataatttgaaaattcaaat

SEQ ID NO: 220154 - DNA, 325 bp, Glycine max
aagaatttgaagagatcctaggattgccctttatggggaaggagaccatacctcttctcagggttctatccctcattagctagaatttctaagatagtccaaatctcggcgcaggaatttgaccacagaaagcaagtcgaaaatggggtggttggaataccgagaaaatatttggaggcaaaaccaagaatcttggcaggtaaaggcgaatgggccccgttcatagacattctctcactgttgatcttcggaggagttctctatccgaatgtggatggtttggtggacctagcagcgatcgacgcttttctcgcctatcataacc

SEQ ID NO: 220155 - DNA, 388 bp, Glycine max
  unsure (1)..(388): unsure at all n locations
agcttctaaactctatacacgattaagctttgatactctcttgntanacaagtggcctcgtagatattaagagggggggtgtggagcgctggacatcatactgcttgcttaggataccacaacctagtggccattctttctgtgagagcccatactgtttgctcctataatgagcagcactatcaactgtggatgaggctttacaggacctatggcattccaaatatttctttaaaaccaacaatcattttgcttggttgattgatcaattattgaattccacctttagggaatttgcggataacaactcatgagataggctttgcccaacccctacaacttaggtctataatttatcaacaacatttttttattaaggtaccctttc

SEQ ID NO: 220156 - DNA, 94 bp, Glycine max
tgagattcaaacagcacaagctatcacagccggacggaacagagcataggcggaaaactctgctcaacacatcaaccaaaatcacagcttttct

SEQ ID NO: 220157 - DNA, 380 bp, Glycine max
  unsure (1)..(380): unsure at all n locations
agcttgtggagcggcacaggcccagaaactggtcncttatcancagggccattccgggccggtctgggaagacatgcaggcttcggtggtgcaaccagctgtcgccccaggtcgagcaccgggccttcacaccggaagaggacgagaccattattcgggcccatgcccggtttggtaacaagtgggccaccattgcgcgcctcctctcgggccgcaccgataacgccatcaagaatcactggaactcaaccctaaaacgcaagtgcgcgtccttcatgatggcgggtgatgaaaccgtcgccgtgagtccgaggccgctcaagcgatcctttagcgccggcgcgggggggccttctcccggaagccccttcggatccgat

SEQ ID NO: 220158 - DNA, 480 bp, Glycine max
  unsure (1)..(480): unsure at all n locations
tataaaactcagcttaattatggatatttgctctggattctgcagatgccaaaatggattattatgatgtcaagaataatggtattcattaaattctatgtttcactttcctttctgcatatacatctttatatatctatatctatgtagatatagtcatatcttgtggatacagatatngaaccttttttttcattatcactaggattgagttcctattgtcttanatattcgtatattaaattccacatgtaagaattgtttcaagaagtaaatttataacattttgggtaacagaggctttaaagttttcaggtttttcttttttgtagatctaatatcccgctgaaaaggttatgcactttgctgcttattatatactacctgattcttgaattaagattgtaatcttgcacacaatatatatccatgataacagccaataatctgtatgtaataagagggggcctatgacaattt

SEQ ID NO: 220159 - DNA, 382 bp, Glycine max
cacctgagctgcagctgacagttatacagagaatttttttgcttctttccaagaaaaaaaagtgtttatttgattcaaatcagagcattcataagagaatccctttcatcgaccacaagtgctaactcatttataaatcaatcacaatccataaactgaaagaatagggacacaattataaaaatatacattacattatcaattttcaaaagatgcaaaggttttaaaaaggttttaacgacaaaaatcaaaaattttgggtttttatgaccgcaaagcacccgcatttgtcagcaatttcctacaataaatttaaactcttgatgcaagcaatcaggatccttttcattccaagggggaaattccactcaactaatgaatg

SEQ ID NO: 220160 - DNA, 429 bp, Glycine max
ctgcaacgggattgttattgttttccttcactctaagatacaatttcgtgaagaaactgtttggtggagattgtctccatggcggaacgagttcgttaagaagaagaaacacatcttatataagaagcatgtgcttaataataaaacattattatccatcatcaatcactcatataaaaaagagaaacaataacgggaagaagaatagtcaacacatctcatctcagaatggaataaaaaaaattaaaaaccaacatcatagaaggttaacattaatctagatttacaacaacaaaagataatcccatctcagatcttgaataaaaaccaacaaaacacaatcgtcccaaatgatctataataaaaaccaacaaaacaaaaccatcttatgttacaaaccagattcaccatatcaccgagtgacgatgg

SEQ ID NO: 220161 - DNA, 393 bp, Glycine max
agctggtagcagatgcaaaccacaataactctaaactccgatatccgattgagtcccgtaatatatcaagacgctttaaattgaaaacagaagctctgagcaagttcaaacgacaatagttttttactcggatgtccaattgcgtcccgcagtatatcgagacgctcgtaattgaaaacggaagctcgtagcaaattcaaaaggcaataaatttttactctgacggccgattgagtcccataatatatctagatgctcgtaattgtaaacggaagctcgttggaaattcaaaccataataactttttactcggatgtccgattgagtcccgtagtatatcgagacgctcaaaatttagaacagaggctcttagcaaattcaaacgacaataac

SEQ ID NO: 220162 - DNA, 333 bp, Glycine max
tgtattccaatctcgagcatctcgatatattacgagacttaatcggacatcggagttaaaagttattgcggtttgcaattgctacgagcttctgttttcaatttcgagcatctcgatatattacgggattcattcggacatccgagtaaaaagtaattgtcgtttgaatttgctcagagcttttgttttcaatatcgagcgtctcgatatattacgggacttaatcgtacatccgagctaaaagttattgtggtttgcaattgctacaagcgttctgttttaatttcacgcatctcgatatattacgggtgttatgtacacctgcgcgttaaa

SEQ ID NO: 220163 - DNA, 389 bp, Glycine max
agcttgccacccagctcgcccaggcgagcatgggtgcttcctccagaagcaacagccttctggaggaatcttctggagggcccaagtgggcctggttgctatttgcacccccatttttgctaagtacaccccctgccttttttttggtgattcttttttcggaaagttacggaaacttacgaatttcgtaacgatacttgttttctttccgtaatgttacggaaccttgcggattacataatcatcccctttttgacttacggaatgttacggaacctcactaattgtgcaacgatgcttccatttgatttccggtgtgtcacggaaccttacggattgtgcatcaatattttcttttgttttccggcatgtcccggaatttcacaaat

SEQ ID NO: 220164 - DNA, 406 bp, Glycine max
  unsure (1)..(406): unsure at all n locations
tttcacaaataactatcatgaagcagaaacctagccaaactacccattatatctcccaaaacccaatacccacgaaaatcaagtgagatagaagtctacccaaacctgatatttcgtggtcccacacgtagagatgcgcttcacgactccgaaaatgccttcctttcgcgaattggagcagaaatgatgaccaaaggttggagctttgttggagcttcaatggtggaggaagaagaagagaatggaaacgtgagagagagaggcgaaaggcttctgaaattttggggctgagtaaggagagagaatacagctttttagtttaaaagacaggctnttctcttttcttattattntattttaagctatgccacatgtctccatttgagtggagaccaaaagggcccac

SEQ ID NO: 220165 - DNA, 391 bp, Glycine max
agcttgtgttaagatacttatgtcgggtgtttgacacacagagaacttgatcttgcacactaaatctcaaaccagcagaagacccctctgtggccaaggtacattgaggcaagttaattctagatgccaattcttgcagctttttgtccaacaggacacttaaagcatcactatctatcataggttgccctgtcggagataatgataattgtttgggatatagattatcactatgcccaagagagttgacatcaattctatttttggttcccatcacttgctcggtaaaggaatgatgactcacgcctacttctcctcaagggagatgtatatgtaaatgaaataacatcctcgctctctatcatgttaaatgcatcctggtcaaaacttc

SEQ ID NO: 220166 - DNA, 390 bp, Glycine max
cgggaacaatcggatacaagctgaaaatacatggcttattaattagtatcaattgaattgggtcgaaaatacatgactcgttgataccaatctgttttacaacttatataacgaccaaatattataataattaggttcctaaacacacagttataccttgatattgatggattggcgtgcaccaaatttgtccaagtaataaaagtaaaacgaatgttcgaatatccgatctacaaagattttatttgtatttatgtagatgaatcattgataagaaaaagatttgaataaatcgtagaaaaacactaatataaattgatagaaaatttaaaaaaaattaaacatgaattaattaacggcagataagatgagaaaatccaatattattac

SEQ ID NO: 220167 - DNA, 394 bp, Glycine max
agcttgcatgcatttgcatcctgttatcttgtgaatcaaaggataaaggaagattcattttgagtagtgatcaatatcacaccgaaatcaggacaaaggtaagcgaaaggtgataccggtatttcatggtgttttacatcttactgcgtgatgccattttcctttattcaaaagcttaggggcaggaacgagcaggtgctatgcccatgatcaatcaaccatcatctcacgtccgactcaagatgtgttaaagaagcgttactaggaggcaacctagtacctttaaaattcccatttttacttatttgtctattatatttgaatacgccctattttatttgcgaccttaccagtttaatatataaatgaaaaaaaagggaggataattaacttt

SEQ ID NO: 220168 - DNA, 462 bp, Glycine max
tggtgggaatatttgttctaacttacacaacaacacaggcatgttattttccataattcttagttgttcaacatttaaagttgttgaagttagttctctgaaaaattggctaagttcaacaagtggcttccaaataggttctggtaatgagtcaaatgcaattggaagcaaccgttgcatgaaaaatggacaatcatgacttttcatttcatgaattttcccttgttaagattcatacaccgacctaaattggaggcatagccatctggtaactttagttctttgacccatttaagaacatcgagtctctcggatttggtcattgcataagctgcctttggtttaaagaacttgccacgaccaacatctaccagctcaagctccttccgattacatatttctgctaaatccatttaagcattgtgtgtatccttacttttgccattgatgtccatcacaatg

SEQ ID NO: 220169 - DNA, 389 bp, Glycine max
agcttgtcgtgccatcactgttccagcccatacctattccaggctcataatcatctttcagcataactcgagataccatcaaagaggcaccaaacaaatgtggttgtactgaaggagactcgacataagcattattcacaatttccaatgcttgaaaggatgtttctagcgactcctccgcaacttcaacataaggcataaaagacagataactcactagtatgtcctcttagcccgacactataactagctgacccccaccacaaacttcaatttttggtgcaatgtcaacagaatggatccaaatctgacctaacaagcaactataggcggggtttatgtccatcacttggaattttatctggcatgtgtgtggcccaatctgattc

SEQ ID NO: 220170 - DNA, 420 bp, Glycine max
  unsure (1)..(420): unsure at all n locations
cttggagtttccaagtgccaattcgncttcttctttagtcctgtcttcttctggcttcaattcatcagtgggctttccttctgtgtccagcatcttgggatgttcccagcctttgatgacagctttccacgttctgctatccagtgatttgaggaaagccaccattcttgctttccagtattcatagttgcttccatcaagaattggtggtctgttcactggtcctccttctttctccatgttcatcagaatttatctccctagatctcactcagtgatttcgagtgcctgctctgataccaattganattctgatactggggacagatgtcgtaccggatgtcacgacatcacgcttcagaacatgcagatcgtatgtgttcgtatgaacagatttaagcacgttaataacacaagaga

SEQ ID NO: 220171 - DNA, 378 bp, Glycine max
agcattgagcaaattcatacgacaataccttttgactcggatgtcggattgagtcacgttatatctcgagacactcggaattgaataccgaagttatgagcaaattcaatcgacaataaatttttactcggatgccggattgagtcacgtaatatatcgagacgctcgaaattgaataccgaagctctgagcaaattcaaacgacaataactttttactcggatgtccgattgagtcccgtaatatatcgagacgctcgaaattgaataccgaagctctgagcaaattgaaacgacaataaatttttacacggatgtcggattgagtcacgtaatatgtcgagacgcttcaaatagaataccgaagctctgagcaaat

SEQ ID NO: 220172 - DNA, 290 bp, Glycine max
atataactctccaacatctggatttgtcacacgactcaatgcgacatcccagtgacaagttattgacgggtgactgcgctcatagctttcacatccatatccaggcgcattatatattactgtgcgtaatcgcacattcgaactaaaagttattgacgttttactttcctcacacactttacatagcatggacagcgtctcgatatattactgcactcaaacacacatcgcagacgacagttattgtcgctagccattgttcacaccttatgtgatcaatttccagtttc

SEQ ID NO: 220173 - DNA, 304 bp, Glycine max
ggggattttttttctctcggcgggcaattaatacaacaccaatcatcttctttggtattaaaccattaaattgatctcctgtgagagtctctggtaatcaataccaacccaagattttcttaaccgaatctaagtgagcgagtggtgaaaaaaagtttcgaattatatttgaattaattgttattattatgcgggagggatgggagacgaaaagcatggggcacgtgagaacgtgatatcgaaaactatagatgtgtgtgtgcgatatggaaacaatgaaaaccaaggaggtgtagggaacatt

SEQ ID NO: 220174 - DNA, 401 bp, Glycine max
agcttgcttgtgaagattctatggaggctggatctttgagctccaatgaggtccttcaatggtgatttttcaccatggagatgcagcggaaggcaaaggagaagaggagaggggaggcaccatccactagggaataagccaaggaagaaggagcttcaccaccaagaattgccttggataagaagcttgaagaggatgctttaatggaggaaaagaaagagagaaggggggagcacgaaattgaaggaataaaagagggaaagaagtggaactttgaagtgtatctcataagactttcattcatcaaagttacaacaagtgttacacatgcttctatttatagactaggtagcttccttgagaagctttcttaagaaaacttccttgagaagtttctttga

SEQ ID NO: 220175 - DNA, 401 bp, Glycine max
catgctatgggctcgcgaccggtctctttctttctttcgcaacttgagttcattattgctaccccatagagcttcgtgaaatttggtctggccacacttttccttgcgagccctcttggtctcttgttcaaaggctcttgcggtaattgcattctcctcccgtaacccggcacactccttccgaatgtgtgttgcggccaacttgaacttctccttggcgaatttcgcctttcctaactcgcttttgagagcttggacttcttcgtcctcttccggtgcttcaaaactctcttcgctgacgacttttaacttggcgagccaatctaaacctcgtatatgaaccttcagccattcgtggtacccaccaatgatgccattacgaatgcctctaagttcttggt

SEQ ID NO: 220176 - DNA, 393 bp, Glycine max
agcagcagcttgtcccaaacgggagtggaatcatagctttatccctgcaaccctttatgaaacacgatagcctcgacattcccttcctgaaaacccaaaaaaactggctaaccgcccctgtagcacaccataacatattcggccataactgcttaaagcaaatatctatggtccaaaatcactacaaaggcagttacgacgaaccctctgggcctaactagggtttctaaacatcacatgagagacagaccatggaacaacggattcgcatcattaacatacaacacagacataccttcgatggaagcacaaacacgaactccacaaacacgaactcgacaatgtggttgcatccactggaacgtagtccagggggcgacaaacacgaactca

SEQ ID NO: 220177 - DNA, 268 bp, Glycine max
tttatgcttatagaaggtgacaaccatacaatggtctaattcgaagagcgatacttacaatgtattgctccagtcttgaaaaaagaaaaacgcaatatctaacttggtattacttctgctacagcagcgacttctttttgttcatcatacaatgttctggacatatatttttcccatgttgtggacttgatgctcgctgtggatctaagaactgcagcttgactatggaaagcatctttgaattgtcaatgcaccgagggatattgtt

SEQ ID NO: 220178 - DNA, 402 bp, Glycine max
  unsure (1)..(402): unsure at all n locations
cgcaagctttggagaagaaacatgggaccaactcattntatttcaacaaaggaagtcgtatctattcaaggtctgagagaccatacaagtttcctaacgatttctaattatgtgggccattaagtctatcatatgctgacaatagccgagaagcccatgaatctcttcgggggcggagtaggtgtctgccatcgccttggccttggctaacaatcggggaagttcttgactcccgttcaaggtaagagcaaaccgatccatccacatggttgcctcttggtgtaaagagtcgatcacccttcctctagcctctttttccgcatatacttgagcatactcatccgcgattctatgctcgtgggccgtggctagacctaactcttcttcgaacttggcgatgat

SEQ ID NO: 220179 - DNA, 454 bp, Glycine max
  unsure (1)..(454): unsure at all n locations
ctaagttagggagaatgaaaaatagagcaatgtgatagagagtttttatgtggaattggaggtccaatttaataggtggaaatattactctaaaatcaggttgagccagtctaattcaatgttatagacttaatgaagatgagagcttaccccaaaatcacccaattctaattttcaccttcaaaccttgaaaactcactaaattttgttggttttggatgcctatattttgatttacctttgtttgaggtttgtaattagtttgaacatgatttatacatggtttatgacttgtacaatcaaatttgagtggaattggatgtatataagttagattttaaaaatctgcaaaattatgcagaanagctgtcaaattatgcagaaaattcgattgtgcagtaccagttttcactgtcgcggtaaacaaattatatctcgcgttctagaatatttt

SEQ ID NO: 220180 - DNA, 408 bp, Glycine max
tagctggtccacaaaaaaaaggcactaaaaaaggtttgatagtttatcatctcagttttccttatcaagtaaatggatcatttttaaggtccaacgccttaaaatgatcacctttcaagtaaaaagaatcgcttgattcacgcttaagaaagaactacgtaggtttgatttcctcatcgatggagggtacgtaggagcaaaagccccgcttttgtcgacctcaaaaaataaaaagaaataaaagttaaggtaatacaatttccacaattctaaaaaataggttgttgtcctttgagacaaacgtgagaggtgctaataccttcctcaaacgtaaatacaactcccgaacttagaattttcattttgatcggttcccttcggtttttctgatgttttccacaaataaac

SEQ ID NO: 220181 - DNA, 451 bp, Glycine max
  unsure (1)..(451): unsure at all n locations
tttataatacaaggatctttcttcatctgttcctggtctctacccattctcattcatttgcatgtttacttcttttcctaaaacggcagattcaatgacaagtcccccgaaggtactaatacctgggacccgtctatcaacttcgagcaagaaatgaatcaaacggaagatgaaggagatgaggatgtgggacttccttcggaactagaaagaatggtcgcccatgaggaccaagaaatggggcctcatcaagaagaaacagagctagtagacttagggattggcagtggaaagagggaagtaaagataggtacaggcattaccgcacctatccgtgaagaattaataaccctgctaanagactaccaagacatctttgcttggtcataccaagatatgcccggtttgagttctgacattgtgcagcacccgatacctctaaatcccgggt

SEQ ID NO: 220182 - DNA, 392 bp, Glycine max
  unsure (1)..(392): unsure at all n locations
agcttatctcatacgtagaagactaaatatatatatgaatctaattcatgagatggtgatagtatgaagacaaaaaaattagttaaatctatattaaagtaagtctaaaattcacataaaacagtgaattcaggaattaagaactttgactattcaaaacttagattaaggaataaaaatcctgaaaaagttaacgaaccttattactttctaaaataacttatttgttgtgtagatcatctaactaacttggccttttgaatttaatgagtcttgtcgtttataaacttctcttatgattgaatgcttcatatntatgatcaaataacaagtacaactaaagcgcttaaatagaagtgtttatttaaaacaccctcattatttatttaact

SEQ ID NO: 220183 - DNA, 359 bp, Glycine max
accaccaacaataaagtactttctgcacctactatatgtttgacttgaccaacgctgatatttgaatgctgctacaatctttcaacaccttatttgcacattctgataggttggttgtcatgtgaccatatcatcgtccagatgtattgtaagccatgctccattattcctttgaaatgcgatcaatccatcttgctatggctggactcagatgacgaaacttttctaagttatgatcaaacacatgtatgcaaggagtgtacgctgcattaaatatgttattatcgaaagtagttcttagacattcaactcaaattaacatagtgtataaaatataccatacctcatgtctcgaacat

SEQ ID NO: 220184 - DNA, 402 bp, Glycine max
taagtcacctgcggcatgcaagctgggagaggatgcttcaatggaggatattaaagagggagataaatagagaggggggagcacgaaattgaaggaagaaaaagggagagaagttgaactttgagttgtgtctcacaagactctcattcatcaaagttaccacaagtgttacacatgcttctatttatagactaggtagctcccttgagaagctttcttgagaaaacttccttgagaagcttctttgagaaaacttccttgagaagctagagcttagctacacacacccctctcataacaaagctcacctccttgagaagcttccttaagaagattcctaaagaagctagagcttagctacacatacctctctaatagctaagctcacctccttgagatgag

SEQ ID NO: 220185 - DNA, 453 bp, Glycine max
tgatgatatggtattcaccgatgaaaggatcaatgtgggtctattagaggcaaatctgatcatcatgctttgataaatgccaaaaaaaatagggcaaatgaagagggtgaagatgaacgagaagcccgtgctgtgactgtcattcttatacgaccaagttttccaccaacccaacaatgtcattactcggccaataacaacccttctcattacccaccacccagtcatccacaaaggccgtccctaaaaacaaccccaaagcctacctaccgcacttccaatgacaaacaccacctttagcataaaccaaaacaccaaccaagaaatgaattttgcagcgagaaagcctgtagaattcaccccaattccaatgtcctatgctgacttgctcccatatctacttgataattcaatggtagccataaccctaaccaaggttcatcaacctccatt

SEQ ID NO: 220186 - DNA, 391 bp, Glycine max
cagcctgctaagctacttgccagctaaggtttccagagagagtaactctcacttactaacgatggctgcttgcggacattgctccacactactccatacatacatacatcacaaaaaccattgtctctttactttattaatactgctactcatactaatcgaaaattaattaattaaacattttatttgtcatgtccctacttagagaattataaaaatttttaaataaacatttatgatacgaaacataccttagtataaataatataatatttcatcagcgtgggtgtgttcaaatacaaatactgccactcgcacaaaatgctttaaagctgtgctttttcaattttcacccgacatttttatttctattatatacaacctctcctat

SEQ ID NO: 220187 - DNA, 418 bp, Glycine max
ttatatccggcaaatacaacacacaccaacactccttaatgacggttagttctttttactgcagaaatcaaaacaaatttaaaaatgtattgagactaaagccaataacaaaagaaaaatgaagtgtaggaattaaatttatgcacttataagaaactaaataaataagttaacctagctattatataaaaaagtatatgtaaagtcacacccacacgcatctatatatacgccatcaatataactgttaagtatattcttgataaatttaaaaatgtcgtttattttaaaaataagcacacgcttttaacaataaacgcaagtgacagaatagtatatcataaaatttggcgatgcatatataaagcaaaaggttgaagaaaagagatagtgaataccaatagagaaagagagggga

SEQ ID NO: 220188 - DNA, 285 bp, Glycine max
ttcttggaccaaatatggcaagctgggggctagtaaattttattcccaatataccttggatgcaactgtgatcggttacccatatcagctacatcttgacaggtatttaagccatgctttgtcttgccttgaatgttaacgagcgtcccaatcacactgtcacaaacatttttctccacatgcataacatcaatacaatgtctaaccgtcagatcacaccagtacggaagatcaaagaaaatggacctctttcttcatatgcaaactctgactttatgcttcatt

SEQ ID NO: 220189 - DNA, 391 bp, Glycine max
agcttcatatgagaattgggtatccaaaatataaatgaatcagtgttcaaacccttttgttgtgtctgtgaccattgtttttttactttgaaggcaaacatgtaacaacttttctttcacataaatgattaaacatgatcgtgctaaaaattacgttaagttacataaattttagatcagtaataaaaacaaatatttaaccatgtttaaacttaaaaagaagacacacacaactagaataaacataaaataaaagttatcaccaaaataatgtaacaaatacaaagtgttaggccaaacaaaaaatggtttccaatacaagacaattataaacatcatctatgaccgatccgtgcgccgctttatcacgcccaacatataattcccattt

SEQ ID NO: 220190 - DNA, 448 bp, Glycine max
  unsure (1)..(448): unsure at all n locations
tccatcaagtggtnatcagagcacaagagcttcaagtntgtgcttcttaaacctccattatttgttttgctttaccttctcttccattgttgtttcttcattattctccatgtatctcctcacatgtcttgtgctaaatgttgttaacatgattctttatagtttccaccaattaaacttgctatagaagctagatttgattttctattggtcaaatttcttgttcttgttcttgaaccatgaatttgtgtgagtttacgttcctttgagttttgtcctgttatatttttgtggctgagaactaaaccataaaatttttacacatatattaaagtggaagaaaacctcaaaaatctagagtgacttgtcacctattgtagttttgcatagaagcatgtctagtcatgaaactgtcacatagattcttatgtgtgctgattttatttct

SEQ ID NO: 220191 - DNA, 372 bp, Glycine max
agcttgaagaggatgctttaatggaggataataatgagagaagggaggagcactaaattgaaggaataaaagagggagagaagtgaaactctgaagtgtatctcataagactttcattcatcaaagttacaacaagtgttacacatgcttctatttatagactaggtagcttccttgagaagctttcttaagaaaacttccttgagaagcttctttgagaaaacttccttgagaagctagagtttagctacacacacccatctaaaaactaagctcacctccttgaaaagcttccttgagaagctagagcttagctacacacacccctctaataactaagctcacctccttgagaagagaagctagagctta

SEQ ID NO: 220192 - DNA, 385 bp, Glycine max
ctaactgcttgtgtggatgacatccaccttagtattttgaagaaaatattgtcaatagacacacacttattcaaataatcgggtccagatttctaaagatgtagaaaaaagtattaaaaataatacaaaaaacattgtttagaatttttaatgtgaatattattttatatatcatttgtgtaaaaagctttatatttgtattatctgggtagtttttttgtattaaataggtaaaaaaattctactcatgtaaaacacacacttttgtaagatttgttagttgaaatcaaaaaatttgttgggtcccatttctcatttaatgtttgactcttgatattgtagttttcacaaaaaacaatcatcgatttttggataattacttgac

SEQ ID NO: 220193 - DNA, 361 bp, Glycine max
agcttataatatatctatacgctcgaaatttaacatcggaaactctcgggaaattcaaatagtcataacttttcacacggatgtccgattcgggcgcataatattgtgagaggctcgaaattgaacaacgcaagctcttgagaaattagactggtataacttttcacacgggagctctcgtgaaattcatatggtcataacttttcacactgaggtccgatttaggtttataatatatcgatacactctaaattaaacatcggaaactctctaaaaattcaaatggtcataacgtttcccacggatgtccgatttcggcccataatatgtgcaaagggctctaatttaacaatggaagctc

SEQ ID NO: 220194 - DNA, 284 bp, Glycine max
tccagagcattcgctggagaatttccaacgtctcaacataatatgcacccgaaattgacatccgtgtgaagagatatgagcgtttggatttgtccagagttatcgatggagaacttccagcgtatcgatatatgcttaccctgaatcggacctccgtatgagaagttatgagcatttggatatgaccagagcttccgctgtagaacttccgatgtcactgtatgtgatgcgcctaaattgaacctccgaaatagaagttacgaccgttaggatatgtccatagc

SEQ ID NO: 220195 - DNA, 400 bp, Glycine max
agctttacaaaagtttgtatggctggaaacaagcaccgaggcagtggtacaagaagtttaatgagtttatgagcaactcaagattcaaaagatgtgacatggaccattgctgctatgttaaaaaatatactaatagttatgttatccttgttgtgtatgttgatgacatgttgattgcaggatccagtatggcagaaattaacaggttgaagcagcagttggcagaaaactttgaaatgaaggatcttggtccagctaaacaaatcctcggtatgagaattcttagaaacagatcagaaggaattttgaagctgtctcaggagaaatatatacacaagttgcttgacaggttttaccttggagattctaagaccaggaatacccctttgggatctcattt

SEQ ID NO: 220196 - DNA, 393 bp, Glycine max
  unsure (1)..(393): unsure at all n locations
tgtgatttgaccaaactggtcttatgttcaattctatgtttgtattataccctgccccttcctacaaaatagttgtattggaatgggcttgtggtatagtactgctacactagtaccttaattgttggtggtataaatttggaaatggtaccagtgctgtgtattatattgcttttcatgttaatctaatcccatattattcaaaatatagtatcaacataagtgatatgtacnagtttagttcgtttttactgggatcttcttagntatttgttttcttttgctcaacttttttggcatgtatttttcagagtcagaagaaatatgaagagtcttcagtattacggagaaagagtcaagtgacacagaagatgagtcttaggaagacgagaa

SEQ ID NO: 220197 - DNA, 385 bp, Glycine max
  unsure (1)..(385): unsure at all n locations
agctnntagtggcaattacgagcgtcgcgattattatccgattcattcggacaatccgagaaaaaagttattgtcgtttgattctggccctaacttctgtactgaatttcgagcatctcgatatactacgagaatcaatcagacatccgagtaaaaagttattgtcgttagaatttgctcacagcttctgtttccaattacgagcgtctcgatatattacgagactcatacggacatccgagtaaaagttattgtagttttgattttgctcagagcttctgtcctgaatttcgagcgcctcgatatattaccggacattatcggacatccgagtaaaaagttatggtcgcttgaattttcttagacctttggtttcaatttgagc

SEQ ID NO: 220198 - DNA, 442 bp, Glycine max
cgacaataactttgatctcaggatttcgaatgtaatccgcagtatatctagacgctcgaaattcagaacaaaagctctgagcaaaatcaaacgaaaataactttttactcgtatgttcgattgtttcccgtagtatatcgagaccctcgtaattgaaaccagaagcccgtagcaaaactcaacggcaataaatgttaactcggatgtccgaatgaatcccatgatatatcgaggcgatcgtaattgaaaacagaagctatgagcaaattcaaatgacaataactttttactcggatgtcggattgagtcccgtaatatatcgagacgctcgtaattgaaaacagaagctctaagcatattctaacgacaataactttttactcggatgtcggattggttttcgttgtatatcaagacgcttcgtattgaaatcggaagctcg

SEQ ID NO: 220199 - DNA, 399 bp, Glycine max
agcttgacaatattatgagaaatggaaaatctcttttataattgtaaactacagctggaaatgaatttatactttttataaatgtcctaattctctgcactacccacaaaataggaagttaaattaaaattcttaaccgtaattccccatttttccatccaaattgagtcttaaggaattatgcccgacttgtgtgacaatggcatcatgctcgatcttgtaatatggtcaaagaatgatgtactattttgtttgtgaattttagctgtctatatttcactattaaaaaatgagattgcatggtttctttatctgccttaaatggatcccctacggtaatgaaaaaaacactgttttcttttacttcttcaaaaaattttagggctacttgacttgtga

SEQ ID NO: 220200 - DNA, 392 bp, Glycine max
acgcagttccagacctggatataaagaacacaattaccacagacatcatcataacccaagaaataaaaggtcatttgttaccggaaaagaaatatgcaaaagaaatatggaaagccaaaagattttagacctcaaaacgaacagaaacgcataacgatagaggaggccagataaatagtagcaaactaaatcagaatcaaacaaaggccacaccctttttcagtttcccaattcacagcaatatacataaaaaaaatacataggtgaaagcttttaacacatgaaaaccaacataaaggccaataggaaccaaatacaaacctggaaataaagaacaaaatcgtagttccaaaccttgatatagaagaacaaaatagcaacagacgtcaaca

SEQ ID NO: 220201 - DNA, 189 bp, Glycine max
atggaagccccaaggccccatactctggaccccatcttacaaagccccccctctattttggaaatcttttccgacgtacccaaccttccaaattccaacaaacctttttgctcacaggtaaaaaacttaccggatgaataaccttttgaacttccaaaaaataccgaacccacggaggcgcaaaacccc

SEQ ID NO: 220202 - DNA, 285 bp, Glycine max
ccatgtggatggatcggtttgctcttaccttgaacgggagtcaagaacttccccgaatgttagccaaagccaaggcgatggcagaacacctactccacccccgaagagattcatgggcttctcggctattgtcagcatatgatagacttaatggcccacataattagaaatcgttaggaaacttgtatggtctcttagaccttgactagatatgacttcctttttgaaaaaaatgagtggtcccatgttctactcaaaaaaaacttgtcaaataaatcctcctac

SEQ ID NO: 220203 - DNA, 391 bp, Glycine max
  unsure (1)..(391): unsure at all n locations
ngcttggtctctactgattcataattcgtaagccatgcgtccaatagcttgtctgataattctttgtggcatctccatcggggccacataagtgaaaaaggtttgaataaggtctgaatattctaaccaagcaaggcttacctggaaatcacaatgtggaacctcttcagttttgtgagcactatgtctttaggaaacaacatcatacaaagtttccaaaggttatgcacataacaaagaccatgttggactatgttcattttgaccactgggggccttcaagagttcaatcgttgggaggggcaaggtattttctctccatcactgatgattactctaggatgacatgggtattcatgaaaaaaaaaaaatctaaagctttcaatttttt

SEQ ID NO: 220204 - DNA, 445 bp, Glycine max
gaccttaaatctcagctataaaaaaaattcatgttcccggatgataatcctgattctctccttatcaagtatattcaaagtccaaggatgtgtctatatcataatttctcttttcatataaatcagttgctcatttttcactgtaatttatcacaaactatgaaattatatatactacatacatcgatgtatgtatgtatctgcaatttttgtgtgcatgaagtaggcctcttgtttatatgatgttatatgattcatgcacactactccaaaaaaaaaggaatcaagacaaccttcatattagaatttaaggtgatagggatctatctgtcaccaactcttagaatacaaaatttgggatgcatgggatacaacttgtggacgacgagaaattttgcgaaagctttcatcgtgcactactcctctttaggcatatcaaatttta

SEQ ID NO: 220205 - DNA, 326 bp, Glycine max
agctcagctaagagaagagggcgtatttctatcaccttttacaaagccataagtttcaaccaccccgcaccatgcatacgccacccctaactcagaaccgaactacatcctgaaagagaaatagcctgatgtaaggctatgcaattccaactgaagcattcggcgaatggtctattgaaaagcgggtagatactcccacatgtttggcagcagaaaagaatgccgttttgaccacaaaggcccaaggccccaaagccagaaataatctggcatcctgcgttccccagcggcaactaaacatggcccggcgttacaagagacccatg

SEQ ID NO: 220206 - DNA, 224 bp, Glycine max
ccaaaaattaggaggaagggacaagataaaacttgacgctcagaaatctagtcaccacatgcctcaacctaacactgccacaaacgaccgctgggagcatcaaaaacgactacacaatgttcttacccagcatccagttagccaaacatacagacccctgctctgacctagtgccttactgtcgcacataagaagatgttattctagaaatcaaccgtactaac

SEQ ID NO: 220207 - DNA, 379 bp, Glycine max
  unsure (1)..(379): unsure at all n locations
agctggatgaatagttagtcttaattggttttaaaacgcatacntcttattcatttaacttcttaattatttgattattgtctataggaaattatttaatacgtgatattcctaaattttaagaatttaatgaaaagggatttatttctataaaatgtaaatgtaaaactctcaataaaaactcatagccttgcaaaacaaaagagcctagccttgtgttagttgctattcataagttagtttggtattgaaaatttgcaaggaaatagcaatgtgcctccaatttatggttctttttatataaattgtagatattttccatattgtaaggttttatagggtaaaaactccaatttttgtgacctaatgttgaaatcca

SEQ ID NO: 220208 - DNA, 449 bp, Glycine max
  unsure (1)..(449): unsure at all n locations
tgggctaagcgattcaatctcgcttagcccaatgctatttattgttctaaaaatttattcatgcgctgagtgagtctgattcgctaagcacaatctcttctctgttttgaataaggcttaacgagccagtctcactaagccaattatattacagttgtcaagttgggctaagcgcctgctggcactaagcctgcgaactgagtcgcgcgaagcaagcctgcctcgctaaacgcaattagctctctgttagagaataaggcatagcgagccatgctcgcttagccattatgttgtgtcagctaagcgagggtgtctcgcttagccaaagtctttatatttatgttgtcgctctaagcgcgccctgtgcgcttaacgtaccctggtattttctgaaggtgcactaagcgagtcaatctcgctaacncctaacctattttctgttttagttt

SEQ ID NO: 220209 - DNA, 377 bp, Glycine max
  unsure (1)..(377): unsure at all n locations
agctntattgtgtgaatgtatgagtatatttgttttgataatgccaagatgtaagcaacacaagattacttcaagtcaaaattcaagatcaagaaaaagacaagacttagtttatttgttaaaagaatctcatattggttaaagaaggtttggcctcaaaacttgatttccaaataattttataaaaagccttgaaatagtttttaagtacaaataaatattttttccactggtaattgattaccagaaacaaattactataaaggcttttcaaaaagaagtttgaaatttgaattttataatgttgtaaaagaagttgtaaaagaattttacaaagatagtgaaaatctcaagtgagttacttgaggattagacgt

SEQ ID NO: 220210 - DNA, 460 bp, Glycine max
  unsure (1)..(460): unsure at all n locations
ctatagaaactcaactttgctgcanaatctacacagaccttcttatctctttttaaaatcagccaccacagaataactatgacctcttcagcaacaggttcaattctggatggaggaatcatcccaaccttagatggtcgaattcttcacaacagtagcaataacaacagccttaatttcaaaatgttgctggcccaagcagaccatacgttcctccaacaatccaacaacaacaacaatagccccagaaacaacaaacagttgaggcccctccgcaaccttcccttgaagaacttgtgaggaatatgactatgcaaaacatgcagtttcaacaagagaccacggccctcattcagagcttaactaatcagatgggacagttggctacacagttaaatcaacaacagtcccagaattctgatagaataccttctcaatctgtccagaatacccaaaatat

SEQ ID NO: 220211 - DNA, 392 bp, Glycine max
gcaagcttataatatattattacgctcgaaattaaacattttatgctctcgagaaattcaaatggtcataacttttcacccggatgtccgattatggcgaatcacatatcgagacgctcaaaattgaacaacggaagctcttgagaaattctaatggtcataattttaactcggatgttcgattcaagcgcatcacatttaaaggcgctccaaaaggaacaaccgaagctctcgacaaattcaaatgggcataactttccacactgaggtccgattacgggttattatatatcaagacgctcgaaattaaacatcgaaagctctcgagaaattcaattgggcatcacttttcacacggatgtccaatttcggcgcataatatgttcgacacg

SEQ ID NO: 220212 - DNA, 372 bp, Glycine max
  unsure (1)..(372): unsure at all n locations
ggctgttttgaatcaaaacaaaaggcctatagcttatttctcggagaaattgggaggagcccgattgaactattgcacctatgacaaagagttctatgccatngtgagagctcttgatcattggaatcattatttgcgttctaatcactttatattgcattcagatcatgagtcattgaagtatatcaatgggcagcataagttgagtccaaggcatgctaaatgggttgaatttcttcaatcttttaatttctcttcaaaatacaaggatggtaagagtaatgtggtggctgatgcactctcaaggaggtatgctntaatttcaattcttgaaactcgtttacttggttttgagactntgaaagatattat

SEQ ID NO: 220213 - DNA, 396 bp, Glycine max
  unsure (1)..(396): unsure at all n locations
agcttgaggggagacttaaacaagagcacttttgggcctatatggaactccttcctaagattcctagagtcatgaaacctcttcactntttccatgtaaatcttggagttctcataggcttctaagcaaatctcctcaagttcttgcaattgaagattcctttccatacccgcttcattaaactccatgttacaactcttcaccgcccaataagcatggtgcttaatctccactggaaggtggtttgccttaccaaaaaccactccatatggagacatccccaaagctgctcggtaagcggtcttgagggcccatagagcatcctcaagtagcttgctccaatccttcctgttgagatgcactaacctttgcaacacttgcttgatctctccatta

SEQ ID NO: 220214 - DNA, 422 bp, Glycine max
  unsure (1)..(422): unsure at all n locations
taggtggaagtaccactttctttttaattgnggcnggataatattcataaaaatgggttcgtctggcaactctataacataacctccgtgtccggcttttattcatgatcgaaactatagcaccaatagcactttcttggactgcatttacacagacctaaccaatagagcataacaataagttttaaatttatttagttgcattaagcaaagaagaaagccatgcactgctgaatttaaacaacctagaaaaagtataaacaaaaaagaaaaatatgcaaagctaaacaatttacaggatatgtgagcatacccccaatcttcgatgaaattaggttgtaactcttcatcaccaagcgacttgctatgcatatgcatcaacgttaagagctatagttcaaatganggaaaaacgaagagaa

SEQ ID NO: 220215 - DNA, 336 bp, Glycine max
  unsure (1)..(336): unsure at all n locations
cggctatttggatatgtccccaccattcctctccagactacggattcaatagttgtcttggaaaatatttacgacgagcggatgcatttctctgactatcttgcaccaaatgggacataattcttgttgtgccagaacaaggtgcgtctaattgaatccattggttcttcannanngcccatccatatatgacttcgtcataaacagcggtccgggcaaacatgcacctgtgacacaagaagacacatatgnngagccatatattcctgatggtccagtggcaagaacaacacctacacatgcaccttgtgatgcggaggagactagacatgcact

SEQ ID NO: 220216 - DNA, 402 bp, Glycine max
agcttcaccttttggtcctcctcatagttgttgcatgataaaacatgctctattttcatctcccactccaagtaggcctccagatcattctttcctttaaagggaggaatgttgagtttaataccatcaattcggttttgtctgggaacaccatcattccctcttctcctcctttcttcttcattatgatctctgttctccatttgatccaacctctcatggagcgcatcatctcgttgtttcattaacctctccaaatgttgcatcaaatcttgcatttggaattgtgaaagcccccctccatcattaggatttgttcctgccatctcaaacaaacaaatcaaatgtaacaagataattatagttgttgtttgaatacctcacccactcaagtgtatcaca

SEQ ID NO: 220217 - DNA, 349 bp, Glycine max
  unsure (1)..(349): unsure at all n locations
caccacttttaacatttcttgattaattccttttgcatgtggagctgatattgaggagtaggaattaacaaatttgaggtcaaatcctcttcaggggaaagggatgatacaatcctctctaggaagggaccagtcactagagccatgagtaagaggctccaagaggattgggctagagctgctgaagaacgccctatggttctcatgaacctcaggatagatttctgagcccatgggccaaggttgggtccaattatctatgtacatattagactaggatgtcattatatttggtccttgtatttagggctccataatgtangtagggtaccctagaaatatacgattt

SEQ ID NO: 220218 - DNA, 337 bp, Glycine max
  unsure (1)..(337): unsure at all n locations
taaaagtaaactcttaaaaaacgcgccctctctctggtaacccatatactgctcctgttggatatgccatctgcttggataaggtcatggattgtgctgtgcaagaagactgttaggtaccactcatatttacagtaattttttgtagggatatatagaccgttntgttatgaggtctactccgaatatatgccaccggacaatcttttatcataaaaacaaaaaactgaatctatgtagcgtgagcttaatcaactttattggctagatttttaaaataacatgcatttagtatagatggaactgttggttttaattaattttaaaaacaagttac

SEQ ID NO: 220219 - DNA, 422 bp, Glycine max
gttataatcaggcgaagtaacgatcactatcgattactctctttacttacactatgagaactaacacacaggcgctgttgctacattcatgaacatataaacgttgagggagttgtctaaacatatccacaaaaggatttgattgatgaactatttgttgtactcgctaactattgtttcatgaaggtcaaggtatttcagcattctattttataactcgtgctctgtgtcatagatggatagtagcaagtatacgtgatttgtgttactcattggcaaacgcaccaactttctcaagtggtatgttaaacggtaagacccagttcacttttaaaagaatttgttgtactcatatgatatatatcaatcttatacaataatgaaaaaattataaatgcattcgatctttttgtaatgaatat

SEQ ID NO: 220220 - DNA, 390 bp, Glycine max
agcttgatttaagctgaccccagaccacttatgtaattcaattgtaacagtatagtctagcaccattatatataatagctcttcgtaaaatataagtatactaagtacacagatacctaaattttttccccgaagtttaaaaaatatggggcagaatcgaacagctacaacagctttgcttgcacagggaagttgtatagtaggcctgtataaaaggtcaaataataaagtaacacatcacaaacacatacttttgtaacttgatacattaacttaacacaaataattgcacataaatgcaaaagattagaagtttgttttggttttgcataaaatagctgaaattttacctagaaagatcttttctataaaatatgtaagtcgcattca

SEQ ID NO: 220221 - DNA, 451 bp, Glycine max
  unsure (1)..(451): unsure at all n locations
tagtagttgccgacagacaaagaaaacaagctcttttatatttgttcccatgtcacacatatgctaaaacatagtcagcttatgctccaggaacaaatggaacctaaaacacaaaagatcaaaaagacacaataatgaatgaaccttttcttaatctccctcatatattgatgatgatatgctgatgattttgtgtgcttgattacatgtgattttcaacaacaaagaactctcaaatatagagatgtgacagcccattctaagcttttaggccttcaaatccataatgggattggaactgaacttagcatactaactctctgcattaagactcgagagttttctcaacccatcttnttactctgatactacccatgttgtcgagatttcacatccactatagatatgaccaatgtagtccttataaggtttggacaatttttacctttca

SEQ ID NO: 220222 - DNA, 388 bp, Glycine max
agcttctataattcaaagtaagggtagatgcactcttaggttgaggaaccaaatcccattgaatgcacattaacgttccagtgtagcctcatgctcatttacgttctatgctccataaatgcaaaggaaaagggacggagagataggtacatacataattaatccttacataatccacatgaagagaacatatttctatgatatacaattcacaaactcctggatgctggaactaccatgtcagctgcatttatgaaatgtttcatcgtaagaggcgatctgcgaagagtaaagataagtttttttggatgtgaagttaggatattcctttgacataaggtaattcgacacaaaagtggcttggaacgaatggtgggatacgtggctg

SEQ ID NO: 220223 - DNA, 452 bp, Glycine max
tgaactctggaggcagacattggaagcaaagggtttacacttacgtatgagtaactcagagtatatatacatagcaattttagcaagagaagagacacgacatgagaagagacaattttggatcaaaagtaaaattatgagaagacgtctaccgcggtcgtaccacagagtactaagttaaatatttgggatcaatcatacgagataatggagaatttaatgaggatgtcacatatagaatacaagtgggatgacttaaatgaagaaaggcgttaagggttatttcacttatttgtgatcacaaagtacctactaaactcaaaggtgggttttatcgtacagttatacatccaactatatgatagtatatgttgaactttaaagggacaacatgacagaaaagagggagtagcataaatgagaatgttaaaatggatgtatggtcatacaat

SEQ ID NO: 220224 - DNA, 340 bp, Glycine max
  unsure (1)..(340): unsure at all n locations
ccccactaaatataactcttctactcctactaacatcccagcncagggccttgcctgtactccaacggacataaactcacttggaccccgagggggggcttacaattacccccgcacaggcaggttaatccaagaaggaggtggatccccgcatggtttgttccttttctataaaatataaggaactgttgccgaaccacgacgcagataaaaataacgagatcaatataaccaggaacaagtccgatagtaaaagacatgtgaaaacagagatgtattaataattaacacttagcaaacataagcaagagtaggaacacagaaatgtggctttacaaca

SEQ ID NO: 220225 - DNA, 397 bp, Glycine max
agcttaggcatgggcaaaataggattttcattggactactcttttattataactatattagatatatagagactaagagtgattcaaaatgatatgtgtatatattaaaatgaaatgtttttatgtataaagatcaaaatgtaaagccttttttaacagtagcgatcaaatgaataattaaaaaattaaatatgaataataatatattttataatttttttagtttgaaagaaagtaaatgaaatacagaaaaattgacttctattagaaaattttaaattttcttttaattttttttcatttctcactttcttttcattgtttttttgttaatttgttccatttgtttgcacaccattagtaaagaatcctgaacatccttaacactaaacaatgg

SEQ ID NO: 220226 - DNA, 438 bp, Glycine max
  unsure (1)..(438): unsure at all n locations
tgtctcagcgtttatgcgagacggagaccaacatgctatctatcatcgccaagtaccaagaagagttatgtctagccacggcccacgagcataggatcgcagacgagtatgctcaagtatacgcggaaaaagaggctagaggaagggtgatagactctttacaccaagaggcaaccatgtggatggatcgatttgctcttaccttgaacgggagtcaagaacttccccgcttggtagccaaggccaaggcgatggcagacacctactccgcccccgaagagattcatgggcttctcggctattgtcagcatatgatagacttaatggcccacataattagaaatcgttaggaaacttgtatggtctctcagaccttgactagatatgactntctttttgaaataaaatgagttggtcccatgtntctacttcaaaagc

SEQ ID NO: 220227 - DNA, 360 bp, Glycine max
  unsure (1)..(360): unsure at all n locations
agctttgtcaatgattatccaaacccggctttgaactaatgcctttngcagtggactctatatgatttaacccaagataattgcatccctagaactaagttaatgcagcaacaaaaactggcgttcttggtggggcataacttggcactctgcatatgcatgcttcgttgaattattgctactggcgcgatagataattcttgaaatgatccgttgtttaactggggtttgtggacattatggaaacaggggcatccagtggtattggcactgagactacgcgtgttcttgctttgcgtggtgtccatgtgattatgggtggtgagaaatatgcttgctgctataaatgccaaaaaaaac

SEQ ID NO: 220228 - DNA, 435 bp, Glycine max
taattacaacgcgaaccttaaaacgcgaaattataaatgggcttttggaatataatttgtaagatgatgaggtggcaaaaggggattggtggttgcaaagtactaagtgaaaagcataatgtattgggtaacaacctcttataaatactttgtggctcagtatcagttttaactaacagccgcatctctctctgtctaaacataacaccaaccttatagcttgaaactttcactaagcagagaagcatggtgtcaaaaaatccgaacccctctgaggctgtttacttggacccctccggcatgtcgctccccggaatacttcccttcgccgccgcagccaccgccaccgcagattcctttgaggaccctgctaagaagactcgcaagccttacactattaccaagtctagggagagttggaccgaacctgagcac

SEQ ID NO: 220229 - DNA, 375 bp, Glycine max
  unsure (1)..(375): unsure at all n locations
agctnttggcaccccacatagattaggggtgtgggaataaactttatctttcatattcaattcttgatgctttgcattatccttaactcctcacccttgttgttcccaccctttgttagttttatctcgttataatctatgttttatgtaaaagaaatgttatatgaagcatttgcagtagttcttatgcaagattaatgaatagaatcataaattcaacagtaatttatttggtggtattgcaatacatacattataaaatattcaatatttagaattgttcatatatgaaatgacattgatcatatgttttccgtattgagaatttcataggttgctattaaaaatctttgcacttaacaggcagaaaaggag

SEQ ID NO: 220230 - DNA, 434 bp, Glycine max
tctggtgggacatcttgacttgctttgcaatctgacattctccacagattctgccctcttctattttcagaatgggaatgcctctaactgcacctttgtcaatgattttcttcatgcctcttaagtgcagatgtccaaatctttgatgccatattcttgcttcatcttctttggaggatagacatgtggaggaatagctggtttcttggggtgtccatatgtaacaattgtcctttgatctgcttgccttcattagaacttcactcttctcatttgtcaccaagcattctgactctgtgaagtttacattgaatccttcatacacagctgactgatgctgatcaagtatgcagtcagatccttcaccagcagtactttggtcagactatgaagtccatcatgaactaactttcccattcccatgatctttcctt

SEQ ID NO: 220231 - DNA, 378 bp, Glycine max
  unsure (1)..(378): unsure at all n locations
agctttattacatctgttgtttntataactgacttaaattcaaagatgttgaatcacgcttttgtagtattgtcaacatgagctcgtcgttccttatccttcaatgtgacttgtatagcaaggatagtcataagcgtaggtctggttatctgaacatgggaaccatccttataagatgtagggggaggattgtttgtgaaatgaggtgcgatttggacagttggggttggttttttttcttggccattgttagggttaggagctttctgggtctttgataggaaaaagaggttagtttacaaagagatttatgggagagaggagagagaattttaagagttcgataaggttttgatagtgaaagaccatatgatgggt

SEQ ID NO: 220232 - DNA, 426 bp, Glycine max
  unsure (1)..(426): unsure at all n locations
tacggacctttaaactcagctctagagcaattcccttcttttcgtagtattttcttcgtgttgattcaaccccaacagtccattttgtgtctctgtactnttcaaatagtgctgccagagacatgttatataaatcttgtgactcagtaatggttgttaccttatgctttcaattctctgccttacaagaatctcactatctttattatatgagatctatcattgtggaaaatatcttccctacaagatgcaagatgatttattatatgtgtaaacctttattgcatgtcatgcatactttcaattgaattcattctaaataattcatactcatgagttaatgtatttatcctggaccttttcacatctcttgtgccctcatgtgttacttgtacggtattccacatttcttttgccctgttacaa

SEQ ID NO: 220233 - DNA, 420 bp, Glycine max
gcttagttctagaccttatcattgaactcttcaacttatgaagtgtttctaggtccttatgctctttggataaccctctatcatcccctctttcttgaaaagaatccatcctcgaatgtgcatccaaaacacctatatcaaaagaagaaagatcaatgacattaaaagtagaactcaccccatactcacttggcatgtcaatcttgtaagcattgtcattaatcctctcaaggaccttgaaaggtccttcacccctaggttggagtttagatttcctttgtgaaggaaacctatcctttcttagatgtacccaaacccaatctttgggttcaaataccatggacattttccctttgttgcttgatgacatattgctcatcttttctcaattgatttctacctttcatgaagaccttaaca

SEQ ID NO: 220234 - DNA, 442 bp, Glycine max
  unsure (1)..(442): unsure at all n locations
gttaaacataagctagaagcggtctaaatggaatcttgctaaattggcttcaacacaaattgagcttgataaattgaagcaagaaaatgaaaaacttgcttcaagttataaagccaccaattatgtttgtgcttctacatctcttaatatggataattacaaatctttgctagatgagtctgaaaagtttaaaaaggattaatatgaagaacgtacaaagttgcaaactgaactttcatgtcttaaagatgtttttagaacaatgaataaacaaaagagtgatcttaatcacttacttagtgtgcanaggcatactaccgataagaccagtttggggtataacaagaaaattgaccttcctaagaaaaccaagttcgcacccctcaaaagggtgaaacaaagtcttcaaaaagaaaaacatagtacattctaagcctaaatc

SEQ ID NO: 220235 - DNA, 424 bp, Glycine max
  unsure (1)..(424): unsure at all n locations
acttaccttgaattatattctttgataacccttttgagctttgtttccctttccttggtttgaagctcactacaagccttaaatgaaaaaccatgatatcaccatatccttaaggaattntggagctttggaattgttttgggaataagtgtggggggtttttgtttcattggataactngttttgttggctatgcttcatgatgtattttgggccatacttgatgtacattgtatattggttaaatgttggacatgctgaatgaaatattgtttctcaaaggctatagagtaaaaaaaaatcgaaaagaaaagaanaagaaaagcaataaagttgagtgaataagaatttaaatggcacaagaatgatgaaactctnggctctactctttatgttaaattttaatcttacttcttttatttct

SEQ ID NO: 220236 - DNA, 434 bp, Glycine max
  unsure (1)..(434): unsure at all n locations
acagtaggacaaagaagagaattcttcacattgtcggctataggtggaggcagnttaaatcagacttgaccaagaaatgggcccttgtagccgaccaggacggtgtcgatgacactgtctgtgaaaaatacngcattagcaaggagaaatgagcccagttttgtcagacacgcagagacccttcttgggaggtatgtactttgtcattttagttggtttccacaaaagattcactcgttataattcacttagccacaatttcattaatttttgatttttgcaggatgtgaggaaaaaggcacaagccatctagaagcaaaacacttgcctncatgtgttgtctcgtgggggttatgaatatttagaacaaaaactcatggctgagaagacacaaaagaaatagaaggaagctgcccagtctggaggcactgatg

SEQ ID NO: 220237 - DNA, 369 bp, Glycine max
tatgtgggccatcatcgatgagtgcaaagagaagctaaatctagcaacgactcacgagcaaaggctagaggatgagtacgccaagatatcaccagaaagggaagcaagggaaagggtaattgattcattgcaccaagaggcaacaatatggatggaccgatttgctcttactttgaacaggagtcaagaacttccccgattgctagccaaggccaaagcaatggcggacacctactccgcccccgaggagatccacggacttctcagctattgtcagcatatgatagacctaatggaccatatgattaaaaactactacgaagtttgtttgtcgctcagatcttgataggtataactttttgaataaaa

SEQ ID NO: 220238 - DNA, 329 bp, Glycine max
ctctgatttttattttatccgattttataagaattgggagtactggcttcaactcattctactgttttgctgacacgaatgctggttttggatcattaacatggaactggctattctaaactgattgacaggtagttacgatatccgaggacaggtccgaatcactgtgatgttgcttggccgtctgcaattatccacagagaacttggtatgttgacagatagttacttataggacgggttacatttagaaccctaaacactgacatgtagtaaaaatctttacacagcccatagagaccacggacacttgtttccaattactcggat

SEQ ID NO: 220239 - DNA, 359 bp, Glycine max
agcttcatgatgatgaatcaaggtgattcttgtgttttgttgataacaaagatgatgacaaaaagcccaagagaatgatttcaagattgagtcaacaagtttcaagaatcaagagaagtttgattttaagattcaagagaagatgaattctagattcaagagaagaaatcaagaagacttcacaagggaagtattgaaaagatttttcaaaaaacaaacatagcacagttttgtttttcaaaagagtttttctcaaaattttctaagttaccagagtttttactctctagtaatcaattaccagtttcctgtaatcgattaccagtggccaagtttgatttcacaagctttcaactaaa

SEQ ID NO: 220240 - DNA, 271 bp, Glycine max
cacaccaaaagattatgatgatggatggctcgaattctcacaaaggtaaacttatcactttctaattgagctttcaaaactatcatgacatgtaaaggaaaaacaagggtttcaattcacaaaatgccaagaaactcctatttcaaaaacaattacccattacctggtcataaccctaaattcaaagaggaacacgcaatggttgtcacatacttataacaaaataaccaaaataacctagaacctaacaaacctaaactagaaaacctat

SEQ ID NO: 220241 - DNA, 402 bp, Glycine max
  unsure (1)..(402): unsure at all n locations
ccttggatcttcttcatcaatggagtttcttgcttcttgaagatcatggcagcataatagagaaggaacaaagatgattggagacgccacttcaaggagaagatgagtgaagaagaagctcaccaccataggaagccatggaaaagaacttgaaggtaagagaaaatgagtggagggagagggagagaaggggcacgaaattttgtgcctcaaatgaggtctgaactttgaagtgtgattctcaaatgatcaaagttgaaaaatgcacacacatggcctctatntatagcctaagtgtcacacgaaattggagggaaatttgaatttctattcaaatntcactttgaatntgaaatttgaattatggagccaaaanttcactaattatgattagtgaattta

SEQ ID NO: 220242 - DNA, 370 bp, Glycine max
  unsure (1)..(370): unsure at all n locations
caggcagggccaagcagaaaatgtgaatgacgaaatagctgtctctagagatgtatcagcacatggtattgcacccaaaaggacgtacgcgaaaatactgaatacaagcacagcgaagataggacagaggaggtttttaaccaggaatcaacacagtcagggggggtctcattcttcggtccaactacaggtggnggagaaaggatggtacacagacgcttgggtgggaaggctgaagaaaatagagctatgtgaaagggctgaagacgaaatcttctggaccttatggtcagatgtcacgcccaaatatttaggtgacgatatgattattctaatgggcctatcggacatgatagctgaagcgctgatc

SEQ ID NO: 220243 - DNA, 374 bp, Glycine max
  unsure (1)..(374): unsure at all n locations
agcttgttagtctcagaagtttcttctgtatttgtagctacctcatgcactcctctaatgactatggcatcatttctggcgctcaactgctgaaagttggaagccatcttctcaattaaatatctggcttcagcaagagtcatgtctccaagggctccaccactggcagcatctatcatacttctctccatattactgagtccttcataaaaatattggagaagaagttgttctgaaatctgatggtgggggcaactagcacatcagttcttaaatctcgtccagtactcattcaagctctctccattgagttgtctaatacctgagatatccttcctgatggctgtggtcctggaacanagaaaatttttcta

SEQ ID NO: 220244 - DNA, 378 bp, Glycine max
  unsure (1)..(378): unsure at all n locations
ctgcaacttagctgtaattgtttagtttttgcacagaaaggcttatgtctgtatggtgatctgcanaagaacatataccacagactcttgcaacaggtgtagaattctgatacatggcaagttgggttactaggttgaccaaagcatcaagttttccttcaagctttttattttcagtaggtgaagatgaatttgtggccacctcatggactcctctaaggacaatagcatcatttcttacactgaattgttgggagttggaagccatcttctcaatcaaattcctagcctcagcaggggtcatatcaccaagagctccaccactggcagcnatcaatatactcctctccatgctgctaagtccctcatagaaatatt

SEQ ID NO: 220245 - DNA, 445 bp, Glycine max
agtttccaagtgccaattcgtcttcttctttagaccagtcttcttctggcttcaatccatcagtgggctttccttctgagtccagcatcttgggatgttcccagcctttgatgacagctttccaggttctgctatccagtgatttgaggaaggccaccatccttgctttccagtattcatagctggttccatccagaattggtggtctgttcactggtcctccttctttctccatgttcatcagaatgtatctccctaggtctcactcagtgatatcgagtgcccgctctgataccaattgaaattctgataccaatgccagatgtcgtacaggatgtcacgacatcacgcttcagaacatgcagattatctctgagtgtttgaacagattaaacacagtaataacacaagagaattgttacccagtttggtggacctcacctac

SEQ ID NO: 220246 - DNA, 399 bp, Glycine max
  unsure (1)..(399): unsure at all n locations
agcttacatcaacagaaagcttataanatttagtttaacacacaangcgcatccatgtcataacatgacagaaacacatgacatcaactaaaataatccaaacaagcctaaaaagttgataacaatctgtcaaaacaagtcaaatatcaatgaaacaatgaaagacgaatcactagacaattggtgtgcaactttctgaaatattgcaagacttcaaataatagacaatatcttccaaatccttagaagcattaatcaaacaccttgtagcaaaaactgcgcaatgcttttgtggcccccacaccaaatccacattgccttgggtaccaaagataatctcataaattaagctccataagtgcaccaccctcaaaaggttggctcaaacaaatgcttcat

SEQ ID NO: 220247 - DNA, 341 bp, Glycine max
agcttgagaggatagaaggatttctcgtgtttatagaaacgacgatatgggctacgtgagctcaattggaggtgggcaacacgggatggtgggtctatgcgcgctttgtggatgtggaaaactagatgtgcaccatcgcccgaccgccacctagtaccacatgtgatgggtaccccataatcctacaagcttgagatgaggaagtgtagaagggtgaaacttcctgcttttattgttgaccacacagtggtacctgaagaattgtcgcgggggtcaagagaccttaaggacgccaggtggggtgctattggcccaaaccaatcttgaccaattccaaccca

SEQ ID NO: 220248 - DNA, 342 bp, Glycine max
agcttgccacccagctcgcccaggcgagtttagctcgcccaggcgagcaaggttgcttcctccagaagcaacagccttctggaggaatcttctggagggcccaagtgggcctggtttctatttgcacctccctgtttactaaatgcaccccctttctattttttttgtaattctttttccgtaacattacgaaactttacaaatttcgtaacaatacatattttccttccgcaaggttacgaatccttacagattatgtatttactcttttttagctttcgaagaagttacggaaactcacggattgcgcaaaaacacctcttttcgatttccgccacatta

SEQ ID NO: 220249 - DNA, 381 bp, Glycine max
  unsure (1)..(381): unsure at all n locations
cttctttgngggttgatgaacctctgtgtgcataatggcatgatttcttgctgacatattctcaattagctcagttgcctcttcaggggtcttcaactttattttcccccctgctgaagcatctagcagttgcttggtttgtggtctcagtcaatctataaacatattcaattgaattggctgaaaaaacccatgggtgggagtctttctcaataaacctctaaacctctccaacgcttcactcaaggactcgtcagggaactgatgatatgacgagattgcagctttcccttccgcaatcttcgactttgggaaatatntcttgagaaacttttcaacaacttcttccctggttttcaaattgttacccttaaatgagtg

SEQ ID NO: 220250 - DNA, 312 bp, Glycine max
  unsure (1)..(312): unsure at all n locations
agctttggaaaatgatttctatacaaaagttagtcgtataaagcgactaacataaatctaagagaaagatctatattnttcatgaagactaagccttgtaacttgaaagagcttaaagaagttttatctttttacatgcccaactctttgagtggcatttctatttattgttgtattgtttgttgtgtcttaatctcaatcttttcatatgtacatcatgcatcatcatgtagaagtaagaagaatgtttctaagttagaaacttctcagcagtgcataaaactctatttaattgttacacgaaaatttaat

SEQ ID NO: 220251 - DNA, 214 bp, Glycine max
tatgatttttgtttataagagtttgtaataattaaagcatcaagggttttggactcaacaaatttcccataaaataagatgtgaaaacaattatcaaagagacattggagaacattcaccataaaaggatagagagcacatatgaactaatcaaactgaatggtacacatattgaaataataatggacttaacaataaatatctaaacttcata

SEQ ID NO: 220252 - DNA, 241 bp, Glycine max
atgaaaaataggccactcccccacatattaaagctttaaacacacatgggcccagcgagaaatggaaaaacaaccgaagctagcgaaaggacacagctgctttaaaaatgatgagggcaaaggcatttaaatgtgatgcccacatgtgtggggccctacagtctataaaaagactaaaaagctttgacacttttaactttcctgaacgacaaccacttgatcactccactatttactttaa

SEQ ID NO: 220253 - DNA, 424 bp, Glycine max
  unsure (1)..(424): unsure at all n locations
aaaacacatgaaaacttgtgtgttaccatcgttactaactcatatgttatgggttattttgctatcacaancagntaaaaactaaaactaattaccataatgggattggtcaataaagtattttgagtatttatcaaaatgaataatttttattatgtgaaaatataagagacattaccttacgcgacactttatgtgttttgtttgttctttaacagcatatgtcaccttgatatgtttcatcatgacacgtacttatggcatattttcactcaatttagcgctggtcaagccgatcctaagacacctgttttagattataatacagaacaatagaacaatgcttatttaatttaaaaaacactctttaaacaatatatcaggttaagaagacccactcataattcggtttcattcctatata

SEQ ID NO: 220254 - DNA, 243 bp, Glycine max
tcaacatattatgcgcctgaaatggacatccgagtgaagggttatgaccctttcaatttctcgagagctttcgttgccaatatctaacgcctcgatttgtgaagtccctgaatcggacctccgcgtgataacttatgaccatttgagattcttgagagcttccgctgatctaatatcgaacgactcattatgtgaagatgctgaatcggaccatcctgtgaaaccttatgaccatttgaattt

SEQ ID NO: 220255 - DNA, 391 bp, Glycine max
  unsure (1)..(391): unsure at all n locations
acttttcattatatctnccacaaccccatacccacgaaattaagagagaaagatgtccacccacacctgaaatttcgaagtcccactcgttaccacgcacttcacgactccgaaaatgccctccttgtgcgatttggggcataaatgatggccaaagggtgaagctctgcttggagcttcaatggagaatgaataagaagataatggctacgtgagggagagagagagctgtctgaaaagtgcggtggctgagtgaagagagagaacagctatttggttctaattaaaaggcgtttctccttttctatcattcaatttaagctatgccacatgtctccgtttgagtggacatgaatggcccactttcctcttgactgtgagccatactcat

SEQ ID NO: 220256 - DNA, 345 bp, Glycine max
ctgcagcctatcttagggctgctcggacttattcctttgccaccccggaagatttaagcccagcccctacttttgaggggccactctcaccttatgaagactatcccgggcaagacgatggggaaggagatacccatcttggccccttgctccacctcaaagatccgcccccgcatgaactaccccaaccaaacatagtccgtcatgccccggcctcacccacacccgtaaaagaatctgttccctttgcggaagataaaggaaagattgaggcgcttgaagaaaggttgagggcagtcgagggcctcggcaattacccattctcggaattggcagaattgtgtc

SEQ ID NO: 220257 - DNA, 475 bp, Glycine max
  unsure (1)..(475): unsure at all n locations
agtaattaatatcatgttggcaagtaagtgtaatctanactctttattctaattattctttctaaaagttgccttttccgaatttgatagttgatttggttctatgccttgatgcctaaaagataaatatgcaaggaatatgtatcggaagctcgaaaatatattatatatgctacattctagtcactactatgataaagcaattttctctcttcataaataatagctattaattgatatgattaaatgagtagtttatgatatacttgctaaatgttcttgtaaaataaatatctatctatctgtagtatataaagttagcaaatgtagtacaatgagacatatcaacaacatanaaaaattccattattgtatcattgatattggtaatttgctaagatcttcacaaacatctttttttctcatccactctatcaaatgtttaatgcatatttgagagagctcttatgaatat

SEQ ID NO: 220258 - DNA, 383 bp, Glycine max
tatttcagtagatgaagatgattctgtggttatctcatggactcctttaagaacaatagcatcatttcttgcactgaattgttgggagttggaaaacatcttctcaatcaaattcctagcttcagcaggggtcatatcaccaagagctccaccactggctagcatcaatcatacttctctccatgttgctaagtccctcatagaaatattgaagaaggagttgcttataaatctggtggtgaggacaacttgcacacaatttcttgaatctttcccagtactcatacaagctttctccactaagttgcctggtgccttaaatgtctttttctgatggcagttgtcctagatgcatggaagaaattctccaagaacaccctctt

SEQ ID NO: 220259 - DNA, 394 bp, Glycine max
  unsure (1)..(394): unsure at all n locations
ttaaagatacaatctttgtagatgacaatgcttcataaacattaagaaagctagcagatatgcctaaaagaaatgttataacttggcaaggatacgacataaacaagtattcattttacacaaaagctccagatgacaaaagtacaatgcagaacaacggggtcaccctaagggctgaatctcaacactttgcaagtgtgaatgacgccaatccctgtgtagcatccatcccttactttgngttcattgatgaaatttgggagcttaactatgtgaaatttactgtatgtgtttttaaatgtaaatgggttgacagcaacagcggtgtgtcaccgatgatataggattacgctggtagacctaagaaacttgttaccacaatgacccttcatca

SEQ ID NO: 220260 - DNA, 437 bp, Glycine max
  unsure (1)..(437): unsure at all n locations
agcttacacattgatagtttccttttatatttcatttgaatgatntatttggaagcaattatcttaatatatcaattcattggagtctttaattgctctttttgatagtttagttgtaaataaataagtttttcttaggataattttttttaatcaagtttctactaattaaggttaaatttggattataagatcatggtgaagtgatgatggatgaaggagcatgaagcaaaagaggcaaaaaggacaagattttagcaagtggttgcaaagaagcaaatggcactaaagcttgaagttgttcatgcttaagcgccaaaagaaagaatgcggtaaatagaaataacaattggtcaggaggcattcaacatttttgttgtgcgcttaagcccactctangtgctcttaagcatcagtctgcatgtgatgaccttttt

SEQ ID NO: 220261 - DNA, 444 bp, Glycine max
tttctccctctctctctcacgttgctattcctttcttcttcctcatcattgaagctctttcaaagcttttactctttgctcatcatttctgctccaaatcgcgaaaggaagccattttcggagttgtgaagcgcacctctacattgcgggacttcaaatttcaggtttgggtagacttcttctcacataaattttcgtgggtattgggttttgggagatatgatgggtagttttactatgtttatgccttatgatagttatttgtgaagaaatttgatgaaagcatgctaaatgtgtcatgtttaggatgagtcaagcttacccattctgttttaaggtttttatgatgatgcttgtgtgctgaaatggctgatggaaaactgatatagatgaacggtagaggtgacctatggttaataagtgagaatgtagcgatatgagtgg

SEQ ID NO: 220262 - DNA, 417 bp, Glycine max
agcttgcattggatcatcatatattattttgtgtaaacttcaatttagattggaaaataacatagaaaccaaattatatatttactcatatattcattgttggagcacttcaacatagattactgtggtaaagctttgcatgggatcaacatatattactgtggcgaaacttcaatttagattggaaaataacaaatttgatgtttgctacggttttttaaggtgagtagtggaggggttaccttttattttattttattatttttaattctcccgacactcaatctcataatattttatcagtactgggagaaagctgaattcctcatttatgttatcccacagtttgctggcctgcgtattgttgtggcacaactaaagtctctattacatatattgcttcttaaagctaattag

SEQ ID NO: 220263 - DNA, 398 bp, Glycine max
  unsure (1)..(398): unsure at all n locations
ctcaagcttgaaccatctttagatggcgctgcacccggtgcctgagattgttctgttcaaattaaacacgccaccaattgcggcaaataaaaaatattctgtgagaaacacaaaaataatgggaaatgagcagcaccaccaaaccaaaaaaaataaccanaacaccttcattggtatcagtttctgttgctctaattgatagtctcctccctgcaatgtccataanaacaccaagaattcaaatccactgaaacaagccacatcaaaaaagcataaaaactgcaactttgaccatcttggtcgctaagaaactattagaacatgattgtgtatcacattgaagatggggaaataaaagaaaggcccaaagggtattcatacacacaagagttgactga

SEQ ID NO: 220264 - DNA, 392 bp, Glycine max
  unsure (1)..(392): unsure at all n locations
acctcagagncacctgcggcatgcaagcttctcatgaaaaccattttttantctatatagncattgaagatattgattgctccatcaacctcaccggtagaaagaacaataacggttctgtttctgtttctgcttcgaggagttactatgattccgagataccatcacgtggtggttgtggtgaggagggtgggaataatattactctgtctgggttgctgaattttactgatggcttgtggtcttgttgtggaagtgagagganttttgtgtttaccaccaaccacattgagaagcttgacccggctctgctgcggagtgggagaatggatatgcatattntcatgaagtactgttcgttcccggcgctgaagaatctgctgaagaattac

SEQ ID NO: 220265 - DNA, 394 bp, Glycine max
acgctcaccatccttgccaattcctgttccatcatgttttattgcacactctaaggggcatgacaagccacaagaaacaccaggaaatggattctcagaactacatattaaccacaagctatggtctttgttgtcatcatattgatgacaaatgcagcatgaacatcttttgcaaaatgcatctgattgattcagggtagctttgcaagctgaagttttgcagaatgtggtattaatagaatcaccaccattattgactggaacgctggtcgcaagaacagggatgtgtgaaggattctcaaactttctctgccttttggcaggcttctgaccaagtgcacgagaagatagtggttcagggtctgtcgcaagtcattcccgcctgattcttttc

SEQ ID NO: 220266 - DNA, 367 bp, Glycine max
agcttataaatctgtaagtctctgcccatatataaaataaaattcggacaagataagataagatttgataaaataaaatctagatgaaataaagtctagataagataagataagattggatgaaataatatctagatgagataaaatctggataagataagatttgataaaataaaattgtctgctctcttcatgtccaagcccaattctggattcaagtccaattgcttataattctcctgaaattaaattaaaaatacaaaattagtccaataggcccaaatgataaaattgcatatttaatttgataattaaggctaatcagtaattaaaatggtgacaaaaagggttaagaaataagagaaaa

SEQ ID NO: 220267 - DNA, 376 bp, Glycine max
  unsure (1)..(376): unsure at all n locations
agctttggaagaaagtgatgatgtacaagttctaaaggcaaagctggaaagagcccgggtagtcaaagagaagttcaagtccatagccatcaaagtctgaaaagagtatgatgaactaagggatgtcaatatggccaccgatgaagccttggaatgagaaaccaagaaggcccgaaaggaagaacacgaccaaagcaaagttttgaggggctttatagggcaacaatagtgagctcaagctctgaagaggtgaaaggaatcatcacgggtcaaaggcatgatcttgaaggacgagctaaaggtttgccttangtcgaaaagaaaattgtcccaacagttaagcgaaactgaagggaatatgtgggccatcatcgat

SEQ ID NO: 220268 - DNA, 403 bp, Glycine max
  unsure (1)..(403): unsure at all n locations
cagccgaattcagatctatgtgaagntggcttttctcatccttgttcagcttagcgaaccacatcagcctcagatgcaagggttgggcactaaacgcttgagactcgcggcttatcgcatgaccaaagatgcgcttagcacgaggctcgtgcttagcgaatggactatttttcagaanaatgtattctaagttatttttcagtccttttctaaacaaattgaaacccttatatctgacattcaaagataggctgatatactcctatgtacagattgtgcagcacgttcccaatgatctaatgcatgaaaacaaaaattacagaaactaatattgggttgcctcccaggaagcgcttctttaacgtcattatgcttaacactttacctcactaggagatcttat

SEQ ID NO: 220269 - DNA, 330 bp, Glycine max
aatatcttgacacttatggtagagctttcaggcaaatgatcaatttccaaaaatcagaaatattcttcagttcaagcactcctcaaagctctatacaaaccatcttctctcgttgggtgttattgagacgctggcactaggaaatatcttggcctaccttaaataattggcagaaaaaaaagtttttggattcatcaaagaaagactttggaagcgcatcaaccattggacatccaaataattgtcaaaggccggtaaataaatcttaattaaatatgtggctcaatccattcctacttaatatatgagtttttctccttccttccattc

SEQ ID NO: 220270 - DNA, 382 bp, Glycine max
  unsure (1)..(382): unsure at all n locations
ctgcaaccaaaagaattggtttcagagtgcaatgtatacagggtttctctgtccaaaagctggtctcattgttttaaaaactgaaacttacccattgccagattgatctgttgaactgtgaactatcttggctatcagtcttatgcccctgaagattgagaacagtgaataatttgtcaacactgcatttaaacaatcaaaatacagtcatatattttattctatcagtacgaattctaatccataagttcatgtatctaatatcaatcccttcttttgatctaataatatatgagcgttacaattacatccataatttactcgattangaaaagctatggccattttgtttgagaaaatgttctctattttcattttatgt

SEQ ID NO: 220271 - DNA, 396 bp, Glycine max
  unsure (1)..(396): unsure at all n locations
agcttttgcagtctggtccaatcttaatttatatgtagtttctatggccaaacagccttttatagttctagacattactaataagattgaggatgtacatattctggaatacataattgatgcttttgctcccgaaagaaattgttcgagtattagaaactcttctttaagtaaaatgagcatacttgatatctaatactattttttaaaattttttaaaatagtattggtacttttttctaacatatgaaaataaataaaatatccaccttaatcacaaaacaaataatagatcgaaattaattaatacttattaatatcatgacaaaaatgatggattacaatcttatttttaaaaaaacctacnctatgaatacatactacaatcataaaaaa

SEQ ID NO: 220272 - DNA, 268 bp, Glycine max
tctctccatggtggctccacgaacttgctaaaccttgtattctagaacccacaattaaagactttggaaggttttcgtcctcaatccgccacattaaagatgaattgtttgttgcctcggccaatattgagccaatcatctagaatctatcaatcctacttttagctccaccatttgacctataccaagtgaactttctttccatccaagacatattcttcaaccgcatgtccgccaagagatagtttaattcctccctttctcccac

SEQ ID NO: 220273 - DNA, 392 bp, Glycine max
  unsure (1)..(392): unsure at all n locations
atttggcagacatgacttaagtgtaccttcattatctgggtggagaaacactacttatgattcctgctacagggatgccattctctttcggaatttaattaagtagatgcgtgatgttaattattaatggtttaaggtatataaatgttatgttattaggctgcagttgttgctataggacccatcgagggatatgaattgtttcttagaattttggatgttggacgactataaaaatcgggataggacatagcaggtgttgaacctggaataacaaacctaagatatcatttttcttgagacaaacaccggttaagagcatcttatattctagacaagccttaagaaaataanaacctgacacctatangaaggacaaaagacatgatctg

SEQ ID NO: 220274 - DNA, 420 bp, Glycine max
  unsure (1)..(420): unsure at all n locations
gacctcatgtattcaacttcattcttnttttttgaacgtgaatagtagcaattgaaagcaattgaaacaagcatcaagcatggccaaaatatgtatatacatcaagcatggccaaaatacatcatcaagcatgaccaacaaaaaacatatcatccaatgaaacatacccccccacacttattcccaaaacaattccaaagctccaaaattccttaagggtagggtgagatcatggttttcacttaaggctgtaatgagcttaaaacaaagaaagggaacataggctaaagggatataaaggaataattcaggaggctatttactagagcttataaaaaaaatgctaaatattccacaacatgtaagaagaagataatagactagccaggctatggcagcataatgggaaaaacccgataa

SEQ ID NO: 220275 - DNA, 350 bp, Glycine max
  unsure (1)..(350): unsure at all n locations
gaaattaagcacgtgataaaattagttagtcgtaacaaaattagttgggcaattatcttggcatgtatcattagctataaatactgataagcattgtaataaagggcatcagaaatgtaagtcattactggaaggagtttccctccctttctcgaataagggtgtattctctctctcttcacgtccagattcatcccatgagcacgtaaccccttccccgcctagtctctctaccgcgagccaccgtgcttccttttcctgctccncgtgcaacctctaacaactggtccgacctccgtccgtctcatctncatggctgaccacggaaccagaaagaacaccactgatcg

SEQ ID NO: 220276 - DNA, 349 bp, Glycine max
  unsure (1)..(349): unsure at all n locations
atgatctgcagcattcactaagtgccccttctgttctctaaacccagctntaaaaaaaatcagattttgaatntcaaacttgggctaagcgcgcagctccgctaagtgaacctctttgagaaaccaaacgtctctctggctcacttagcgcggtggttcgctaagaaagagggtcgaaaattgcttaagcaagtgtaacatcagttacacttacctttaccaaaaaaatttctgaacattgcctgcatcttctctctcacacccaaactcgcgcatgcttactttctttgtgcatcttcgcgcattttcagcaatcaacaatccaagtaagtttctcatttcctttgct

SEQ ID NO: 220277 - DNA, 431 bp, Glycine max
  unsure (1)..(431): unsure at all n locations
agcttgtggatggtgagcaatcccagaagactnttgtttatattaaggatgctatcgaagccgtcttattgatgattgtacgctcccatatgaaactttatatattttaagtactgatctgactgtaaaagctcatcttttgactattattcttgtttcatggttcaactaaatgtgaacgataatttttaacaggaaaatcctgccagggccaatggacatatttttaatggtggaaacccaaacaatgaggttacagttaggcagcttgctgaaatgatgacacaggttagaggattaagtttgattgtttgacccttctagaatttcaacatggtacttgggaccggtcaaccattatttttggtccattatgcacgtttattcaaaggtagcggagaagcacctctggaaaacctactattggtgtg

SEQ ID NO: 220278 - DNA, 409 bp, Glycine max
  unsure (1)..(409): unsure at all n locations
gcttgtaagcctaggatcttcttcattatgngttttctttgcttcttggaagatgaatggcagcggaatggagaatgaagagagagaggagacgccacttcaaggagaagatgagtttagaaaaagctcaccaccataggaggtcatggataagagcctggaggaagaagatgaatgaagggagagggagagaagagcaggaaattttgtgctctaaaagagctctaaaatctgaagtttaatattcaaatgatcaaagttgaaaaaaatgaacacacatgacctttatttatagcctaagtgtcacacaaaattggagggaaatttgaatttcaattcaaatttcactagaatttgaaattgaatttgtggatccaaaatttcactaattatgattagtgaattttag

SEQ ID NO: 220279 - DNA, 151 bp, Glycine max
tccatccagattcagattaagagagaaatttgaagcacaagtcagacttctatagaaaatattaaatattttcaaaacaaatagcaaggtttggtttacaaaagaaatttctcatattttctaaagtacccgagtgattactctctggtat

SEQ ID NO: 220280 - DNA, 345 bp, Glycine max
agcttctgacaataagacaatataaaatgttcttcagacggccagcgagcaatggacgcagtttaaatctaatttgccgaggaaatgggaacttgcagccggcaacgacggtgtggacgacactgtccatgaaaaatactacattagcaaggagaaatgggctcagttttgtctgacccacagagacccctcctgggaggtatgtactttctcattttagttggtttccacaaaaaattcacttcttataattcattgcactaatcattttcattaatgttcggtttttgcaagatgtgcggaaaaaggcacaggccattcagaacaaaatacccgcccccacgt

SEQ ID NO: 220281 - DNA, 401 bp, Glycine max
  unsure (1)..(401): unsure at all n locations
agctnggatttcttttagtagggaatctatccttcctaagatggagccaaacccaatcaccctcattaagaactagctcttctctccctctcccttcattcatctccttcttcctccaagctcttatccatggactcctatggtggtgagcttcttctagactcatcttctccttgaagnggcgtctcctctctctcttccttctccattccgctgccatttatcttccaagaagcaaaggaatccattgatgaagaagatcctaggcctacaagctccaatggagcttgcatcatagcaaccccaaactgatcatgcacatgtctcttaaaccgtgggggagacacatganattccccatcacaatctagccgacttcgagccttgatcggatatgccac

SEQ ID NO: 220282 - DNA, 344 bp, Glycine max
  unsure (1)..(344): unsure at all n locations
tgaagcttgttaagaaccctgttttatttttctcttataagggattgacactgctttcttcttcagacccccaacatctggggaccccacttgcctaatctccaccagtgcccttatatcaagcaactgagcattcccatcagcaccaaagtttgcataagcattcttggcagactcaacaccccaagccttaagcttcttgaaaagaacctgagacaaaaccaatggcactgtcaaaacagctacttccccagcaagaatagcaagagtttcagctgctaagccagngacactctccacacaaccgtgcacatcaaaatccccagcaccaaggaggctcaaag

SEQ ID NO: 220283 - DNA, 394 bp, Glycine max
agcttctttatcttcagcgtggcccttactaccttaatcgctaaggtaatatatatacagatcgagagacgcgcatacctacacatacacacgaggcctacacgctaccttttaaaaacattaataatttaaataaattattcctgctcaatctcaatggatttggaatcatgtattgacgcggataatataatcttctgactttaaccaagattgagataatcatttttttgtaagacgaaacatatgcctgggtctgataaacacttggctctttatacatattcatctaggcggtaaccgagagcacataatgctagggtacagttaacaacataactaatcataatgaaactttaaaggtacttgcttcttttatttataaggggggggg

SEQ ID NO: 220284 - DNA, 424 bp, Glycine max
  unsure (1)..(424): unsure at all n locations
agcttngttgttttaaaaataagcttatttttgatctaaaatggcatctcaataaattggcttcaacacaaagtgagcttgataaattgaagcaagaaaatgaaagacttgtttcaagttataaagccaccggttgtgtttgtgtttctacatctcttaatattcattattacaaatctttgcaagatgagtttgaaaagtttaaaaaggatcactataaagaactacgaaactgcaaactgagctttcctatcttaaagatcattttaaaaaaatgaataaaggaaagagtgatcttaatcacttactttgtgtgcaaaagaaaattgacctttctaagaaaaccaacgttgcatcctccgaaaaggtgaactcaaatagaagcttcaaaaaagaaaaacatagtgcattataagcctaaagc

SEQ ID NO: 220285 - DNA, 423 bp, Glycine max
  unsure (1)..(423): unsure at all n locations
tctcataggccacttggaccccatttctaccaactacaaaccctaagataactatattttctacacaaaaagtacacttctctatatttgcatagagggtgtttttcctaaagactgaaagaacttgtctgagatttcataagtgatcatctangcttctactgtacactaaaatatcatcaaaataaacaactacaaatctacctatgaaatcccttaagacatgatgcataagcctcataaaggtgcttggtgcattagtgagcccaaaaggcatcactagccattcatacaaaccaaactttggattgaaaagcggtttccactcatcaccctttctcatcctgatttggtgatacctacttttaagatcaatttttgtaaagatatggcaccattgcactcatcaagcatatcatcaag

SEQ ID NO: 220286 - DNA, 371 bp, Glycine max
  unsure (1)..(371): unsure at all n locations
gcttctggggagacccttcgtgcagaagtgaaaacctttttcgattctgctcctcctttgcagaacagtgatgagataactcagaagttgaatcagttcattcaacgcaattcttcaggtaattttcctcctacaacattcaattttgcttttcactttttataaatgatgttggttggttggttntggtttcccagctaggagaattgtttgtgtgacttctggtggcaccaccgcgccattggaacaacgatgcgttcgctatgttgacaatttcagttcaagtcacagaggggccacatccaccgagtatgttgcacttgcctttgtaatgttgaataaaacttctgcaaatctttaatttaattctc

SEQ ID NO: 220287 - DNA, 368 bp, Glycine max
  unsure (1)..(368): unsure at all n locations
taaatatacgtcatgttcatttacgaaattatggtagtggcaacatttgaagagcaatattgctgtatggaaccatcaacaatcaaaagaaaattctgattcaccactgtccaggaaccaggaaccaggatccgttgtagcttctactcagaatccggcacattctggaaacaaaagcaagaaatacgttaattatgttccaatccaattctttatatacatattttgccagcaaaactaacaaactggtgcccaacctcttggccggngaatctccgattacatgcaagaacacactcaactattttatttcactggccgtatgccaaccgcaattatgttcctattaattaccatcacaaaagata

SEQ ID NO: 220288 - DNA, 332 bp, Glycine max
  unsure (1)..(332): unsure at all n locations
tgggtcgagtactcacccgaagaatatccaatatcgatgaagaacgccgaacaacggctgaaacccttgcgagattcctcaccggaaacgttacggaaacgtttcggaagcgcctcggcttagattttcttcacggaaacaanttttccaagccaattcgaaagagagagaagtgcctaaggggctgaaccccttccttcttcacttcctcccctatttatagcaaaataggggaggcggttgccgcccagctcgcccaggcgagctcagctcgcccaggcgagctaggttgcttcctccagaagcaaccgccttctggaggaatattctgg

SEQ ID NO: 220289 - DNA, 344 bp, Glycine max
acttaatggctgagtgtaactgatatagtggcacccaaaagatacccccaacagccaacaaggcacccaccatgtggactcccaataggctgaagcctacgtgcccattgggcccttattacaacttgaactaaagcccctttagatgattaacgcataacatatttctggtcagccaacttatcaagattgtgccattatttagacaaactaaacactctataattgataacaagtggtggcacttagatctccttcatttgggccatgatacaactcacaatcttggacttttctccttgacacttgggcttcgattccaatactatggacagcacctgttg

SEQ ID NO: 220290 - DNA, 224 bp, Glycine max
cagctttgtatgtccagagaaagcgaagttttggactcttcacgttatcttattattgggggtgtgaccttaagcgcccatggttgcttcgcacacttatgttttggaggcatactcacaagagtccgcttgattaagaatttcctcgaaactaagaagactgcatggtcggcttaaatcacacgatgcggaatattggacaatgcggagggccggcacgatca

SEQ ID NO: 220291 - DNA, 391 bp, Glycine max
  unsure (1)..(391): unsure at all n locations
taaggatgctattgaagccgtcttattgatgatagtaggttcccatatgaaactttatatantttaagtactgatctgattgtagaagttcatcttttgactattattcttgtttcatggttcaactaaatgtgaacgataatttttaacaggaaaatcctgccagggccaatggacatatttttaatgttggaaacccaaacaatgaggttacagttaggcagcttgctgaaatgatgacacaggttagaggattaagtttgattgtttgacccttttagaatttcaacatggtatttgggaccgttcaacatttattnttgttcaattatgcagggttattcaaaaggtagcggagaaacacctcttgaaaaacctactattgatgtga

SEQ ID NO: 220292 - DNA, 277 bp, Glycine max
  unsure (1)..(277): unsure at all n locations
aattatgatctaatcatgatttacatgtgaacattngagcctttaatccatttgaatgaggtttgtcttgatcaaatctttcctctacaggcaaacaactttattatgagcttaaggccataatatgatctctcctagtcttggaaactcgggcttggttcaagttctcttatagtgatgccctccatctaaaagatcccacctaagcatgtgtgatccattggcagcagcacattcatcattcacatcaaacttatgagtttgctaaagatttagt

SEQ ID NO: 220293 - DNA, 353 bp, Glycine max
  unsure (1)..(353): unsure at all n locations
agctntatatagacttaaggctattgtcttatagcttggacactctacatgaggtcgttactatgcagagagagtacggggaccacaaacactttctgcagcatatctttagagaagtacaatttgccagtgtcgccttatgctcagagctgaatttcaacgtacaaatcaaatataacattagcaacataaaagaaaaggaattaagaatgtcaagacaagacaatttagatcttcccttgtgtgcactatgacacaaattccttactgaacctatgtatgttactntttgatgattactttcagtacctgaagatcgagtaactattccatagtctntgtactatgagcca

SEQ ID NO: 220294 - DNA, 364 bp, Glycine max
  unsure (1)..(364): unsure at all n locations
agcttaccctctcagatggatgcctgattttgttgaagnctccctatacacaccacaagccctcattctgagggtttttcaactgcctgatagagtcccacaaagctcgcttgccatctatgtcacacggagcatatacattgacgataaacatttcctgcatgtcttgatgccaaacacccttcagcaaaataaggcctctgccattgaccctcctttccactntaaagaccttgtcatctcaatacaaagcaatccaccagctgtatttgacgccggctgagtctcccaatcaaatctgtgcccccacaagcttgacaacaccctggctattgctctttttgtctctgatacataacaatca

SEQ ID NO: 220295 - DNA, 237 bp, Glycine max
aaagagcatctgacatacctggcttaagaaaaaaatgaaactgtgacaggcttaaattttacaattaaatgctacccactcttaatcacccttggtctgttataaaatcagtttatgatgaatcattgttgcatttagaatatgatctcatgtttcagcattttaatttgtccatacagtgacggatgcattaaaagtgatattggaaaccaaaccttcactcttaccccgtatgat

SEQ ID NO: 220296 - DNA, 342 bp, Glycine max
  unsure (1)..(342): unsure at all n locations
tatatatataatagatgctattgaacgaaataaaaccaatcnagtgagtgaaaattcctttttacatatttcaagtttaagtagcataataaaaaggttctgttactgacttagattagtgtttaatataataataaatttaagaggggcagggggcgcctgtggagggatacttaacaacattctttgtatcatgcgaatattttttttgctctagatgtgtgcacaggtgtggggttatatatattatatatatatattattatatatatattaaggggccgggtaagttaaacactattgctactcccaatttaaatcattaaaatattgtccaaaaaa

SEQ ID NO: 220297 - DNA, 286 bp, Glycine max
agcttattaaattttaataaatcggtatttattttaaatcaaataaaacttgaaaatcaattaggaacatatcgtagttttttaggttaattaagaacacagctacataaattaatctattaaaattaaaacatgtattagttaagtaccccaacaaaaatacagtttattatttaatataataaagtaatcgaatattcctcttcattttttgggaggaaaaaaataaataaaacaggaatgttaaatagagtgattgctgtgaattgtgatggagtgagagttt

SEQ ID NO: 220298 - DNA, 288 bp, Glycine max
tcaaaccacaattgacctcatataagcaaaagttttctgagacacaatgcctattacttgaagacagataggggataaaaaagatggttttaaaaccctggcagataaagtttttttatatcagcctgataaattaaaataacactatgggtaaaatgtcctttaaaagtctaaccagaaaaaaaatataagagtaagataaatcctatattctaaactaatctgagctaataaaatgaccgatagttacctatatttggacaccagctgaccatctatttaatgaca

SEQ ID NO: 220299 - DNA, 361 bp, Glycine max
  unsure (1)..(361): unsure at all n locations
accccaccattnntttcatagatttcacttggaatgtgtctactattattgagatcatctctttctccgtcattggaggtgccacttgagctgccaagtctctccacctttaggcgtattctttgaaagattcatgcccctttttgcacatgttttgtagttgcatcctatctggagccatatcagaattgtactaatactgcctaacaaaggcaaccattaggttcttccaagaatggactcgggaaggttccaagttagtgtaccaggtaacagctaccccaataagactttcttggaagaaatgtatcagtagttcctcatcttttgtgtatgcccccatctttcgacaatacatctt

SEQ ID NO: 220300 - DNA, 460 bp, Glycine max
  unsure (1)..(460): unsure at all n locations
ttgacgttctcctaggacagtatatgatgacagccatgtgaccatctttatatatatcttgaatataacataataaatgactcttctctagtaaaaaaaaatgacatttcttgatgtaatcctattcctaaaagattcagaggattgagctaaaactcttaaagaagatcctagaattctcatgaaccttacgataaatttctgaattcatgggtcaagggtggatccattctttcttataaatattagaataaattttctttcttttgggtttcgattttgaccattctaataatataaagttttagtcttgtatttcaagacatcttaagtagtctttgtagtacgaacttctttgatattcatgattttggctangactaagcttagctattgatgggtgcgtgagctccccttatctctcaagaatagcaagatgcttgcatattctgaaattctt

SEQ ID NO: 220301 - DNA, 338 bp, Glycine max
taagaaggatgcaaccgtttcagtattaacattcatagcctacataaaaaaattgtacaactataccaccacctattgaaaagcttggctagcaaaaaaatgggtgatcgaataggcgtatggcaactaggagtaatcctatgaggatttactcaaatatctcttgccactttaaacatttgtgtctaaaaccatggttgagaaatagttgaagccaacttataatgaacaacaagagctaattcctagttgtgcgatgaatcattgacttttttggacatttaagatacttactgatggctttgcatactgcaaaccaagaatttaggtcaatgtac

SEQ ID NO: 220302 - DNA, 176 bp, Glycine max
atcaccagcgctcggactttgggggattcaaattcccgctcgggcttctgctcgctaccggagtctaacgacttcttttttgcccttggctatgttcgcttattcttttattcccccttgagcttggcattttagatttccttaactaatatattccctctctttgacatcttttt

SEQ ID NO: 220303 - DNA, 337 bp, Glycine max
agcttgtggagcggcacgggcccagaaactggtcgcttatcatcaggtccattccgggccggtctgggaagtcatgcaggcttcggtggtgcaaccagctgtcgccccaggtcgagcaccgggccttcacaccggaagaggacgagaccattattcgggcccatgcccggtttggtaacaagtgggccaccattgcgcgcctcctctcgggccgcaccgataacgccatcaagaatcactggaactcaaccctaaaacgcaagtgcgcgtccttcatgatggcgggtgatgaagccgtcgccgtgagtcccaagccgctcaagcgatcctttagcgc

SEQ ID NO: 220304 - DNA, 168 bp, Glycine max
tggacttctttctatcactttaattaatttgagaatagaattgggatcaattgaccttttttcatttcactagatggtccatgcttaaatcgatattaatcctgaaatgttcaaagaatatacattggtacaagttaagttcagtttttttggataaaccctgaagtt

SEQ ID NO: 220305 - DNA, 303 bp, Glycine max
atccgagtaaaaagttattgtcgtttgaatttgctcaaaacatcaagattctatttcgagcgtgtcgatatattctgggactcaatcagacatccgagtaaaaagttattgtcgtttaaatatcctcaaagctttgggaatcaattttgagcgtctcgatatattacaggactcaatcagacatccgagtaaaaagtcattgtcggttgaatttgctcagagcatcaagagtctattccgagcctgtcgatatattatgggattcaatcagaccatccagcaaaaagtattggtcgttgaatt

SEQ ID NO: 220306 - DNA, 385 bp, Glycine max
  unsure (1)..(385): unsure at all n locations
agcttcgacaccgcgaccctatatttctgttgcacgggncacttttttccaccctctctagccacacgcacatcttttcctccccggagacgcacatgaccatgcttcccaatggccttcgcattgccactgagtccaccctcagtgcccgcaccgccaccgtcggcgtttggaatcgatgccgggtcattgttcgagactaaggagaccaatgacaccacacacttcttcgaacacgtaataagaataagatacttcatacttggccctcttttttacgcctnttggatactataggttggtcgattatttattttctcattaggcgttgaattttgtgcgtttatgtgtgaagggaaacattccccgtggagcaagaagatct

SEQ ID NO: 220307 - DNA, 334 bp, Glycine max
agcttaggaatcttgaagattgatagctttttaatgggtaaggctgttaagactgaattaatgagggttattctaccccccattgatagatttctttgcttccattttgtaagtttagcctcgcatttgctaataatgggctgccacacagacctatttttagagctgacccctacaggaattccaaggtaagagaatggaatatccatttgactacaattgagagaagatgctgccttcctacaccagtcctcggatttgcccaaacacccaaaatttctcttattgtagtttatcttaagaccagagaccaattcaaagcttttcaagatac

SEQ ID NO: 220308 - DNA, 359 bp, Glycine max
  unsure (1)..(359): unsure at all n locations
agcttataaccgtaaacattgtatcatgtatttattacgactacatgcaagtgcaatggcatcaccaacatgcattattagtaatttccaattaaaatttacaacaaataacagtgaaccaaaatttctaaattttagaaatgtgagaaccaaatgtgcaacaaaattttattaagcacccacaattgtacaattgggaaactatagagataaaaaatgaatttaagaaaaaaaaagatcaaggtttcagggacactctctntatagtatgataagtaaataatttttaaaacctcttcaatattcttaataaaaaataatctaatattaacgaaacatttttatatttacatttgact

SEQ ID NO: 220309 - DNA, 339 bp, Glycine max
aagaagaaaagggttcagcctctaaagcacttctctctctctcgaaattgctgaggaaaattatttccgtgaagaaaatccaagccgaggcgcttccgtaacgtttccgtgagtaattacgcgaagattctcgaccgttcttcaagattcatcgttagttcttcgttttcttcagtcttcaacgggtaagtacctcaaaccaagcttttcaattcattctatgtacccgtggtggtccacatttttgttcatgtatttttattctcgttctcatttactttttatacccccttttgacgtgttaaaccatttattaaggcaattctcgttaatctaaaa

SEQ ID NO: 220310 - DNA, 287 bp, Glycine max
tctgagagaccatacaagtttcctaacgatttctaattatgtgggccattaagtctatcatatgctgacaatagccgagaagcccatgaatctcttcgggggcggagtaggtgtctgccatcgccttggccttggctaacaatcggggaagttcttgactcccgttcaaggtaagagcaaaccgatccatccacatggttgcctcttggtgaaagagtcgatcacccttcctctagcctctttttccgcatatacttgagcatactcatccgcgattctttgctcgt

SEQ ID NO: 220311 - DNA, 361 bp, Glycine max
  unsure (1)..(361): unsure at all n locations
tttactctataatcagtctgagcaagtctaattcaatgttatagacttaatgaagatgagagcttaccccacaatcacccaattctaattttcaccttcaaaccttgaaaactcactaaattntgttgggtttggatgcctatatttcgatttacctttgtttgaggtttgtaattagtttgaacatcgattatacatggnttaggacttgtacaatcaaatttgagtggaattggatgtatataagttagattttaaaaatctggcaaattatgcagaacagctgtcaaattatgcagaaaattcgattgtgcagtaccagttttcactgtcgcggtaaacaaaatatatctcgcgttct

SEQ ID NO: 220312 - DNA, 382 bp, Glycine max
  unsure (1)..(382): unsure at all n locations
tagataataggttttacttangccttagttttataaataggccagacctatttattcaaagcctagcttgacctgcccaattctcatccctagttaaaagggatacattgcaacaaatcaaatacgatgaatacgtggattgcagtgatgtgatcctttgacctaaccttatgtagaatcaccttgtttaggatctattggtacaccttcacctctttggtcaagttaacataagttaaccccaaatcaactttgtctcccaacaacaccttatctactatgatatcctcagcacagggaactcctcagtctttctctcaatgtttgaaatttattatgtccattgtagacaattgtcctatgttgatttcacacctcctaa

SEQ ID NO: 220313 - DNA, 263 bp, Glycine max
tatttgcacccccatttttactaagtacacccctcttgcttgtttgtggtgattcttttttcgtgaagctaccgatacttacgaatttcgtaacgatatttgttttctttctgtaatgttacggaaccttggggattacataatcataccctctttgacttacggaatggtacggaacctcactaattgagcaacgatgctctcatttgattttccgtgtgtgacggaaccatacagagtgcgcatcaatattttcttttgtt

SEQ ID NO: 220314 - DNA, 374 bp, Glycine max
  unsure (1)..(374): unsure at all n locations
agctntgcgagagccactgcttgcggcaatgacatatgtctgaagcgcctaaacctctcaccggagctctgggtataaccttgaaataaaacaactcaacaaagaaggcgaagacagtccaatgatacgattaactaagcgttcaaattctgctaagtaatcattaacaaaaccgtattgttgtaatttaaaaagagccccctgtggatcttcataaaatgtaggagcaaatctggattccaaagcttggagtagcgccaaccaggaggaaatgaacccgttgcgggtcatccattggtaccatgaaagcgctggaccatccatatagaaagaggctatggtgatcctctcgtggtcaggccagccttggtagt

SEQ ID NO: 220315 - DNA, 327 bp, Glycine max
ccaaatgaactcccactaaaatctttcaatggtaaacatgaacattgaattaaaaatgcatctaaaggacatatatcaacaatcaaactcattaaacataagagcaaagttggtttaagctttccttacctatcctaatataatgaacttgctttgagatgaaagaaagaagaaaggattgggttcaagatgcaagctttctttcactcacacaacaactttaaatcatccacaccacccaataccataaaaccaacagaaattacatctaaacccttgaaaacgaacactcttattaaactccaaaagtgctcatgggagaaaaat

SEQ ID NO: 220316 - DNA, 387 bp, Glycine max
  unsure (1)..(387): unsure at all n locations
agctntgaatctctntgaactttatcttcttctttgtactaaaagctttctgaagttttctggttttctaaaccttgaaaacttgtgctattcatcctcttcattctcttctccctttgccgaaaagaattcgccaaggactaaccgcctgaattctttttgtgtctctcttctcccttttccaaaagaacaaaggactaaccgcctgaattcttttgtgtctcccttctcccttgtcaaagaattcaaaacaacacagtctgagaattcttttgattcttccatttccctaatacaaaagtgttcaaaggactaaccgtctgagaattatttgtatcccattcacaaatatcaaagattaacagcctaagactttgtcttacacat

SEQ ID NO: 220317 - DNA, 238 bp, Glycine max
gccttctgataaacattcctaactttataaacattctgctcactcacacatgatgatgcagatgtccaatgattgttaaactatatgcacattcatataataaccatacaaatgcccccaacagagtatgatgtaaagaaaaacttttctagctttttctaagcttctacttaagcttatgttgaagttaaatccgacccacacctttcccttttgtacgcctatctgggttgtcacc

SEQ ID NO: 220318 - DNA, 385 bp, Glycine max
  unsure (1)..(385): unsure at all n locations
agcttgatcttgatagttatcgtctgtttaattgacgttgattggccatacatttgcctctgttctgcttctggtcttccctgacctatgaccattttctagcaaacttgccgctctgtctggccctccatgacttttgctgccatgctccgttctttccctgacttcctgcattggtcttgtgaaatatacgtttaggatatgattgatatgctttacttttatagctganattagagatttccttatttattattcattattaggtttccctatttatgtgtccattcttgctataaataaaggcattgtgtgtggtaataacacaacacaataaattactcttttaaaagtctgtttttaatctctctaaacaagtctttca

SEQ ID NO: 220319 - DNA, 421 bp, Glycine max
agcttgatgttccttgtttctacaacatttatgtctcaagttggtatcttaaaatttcccagttcttcgactaccacactacttcggaagaggaatgcctgtcaatagcgtcattctaccttgatggtccaacgttaagccgatatcaatggatgttccaaaatgagtagatctcttcttggcacgattttcttgaagccctcaaatcacgttttgcgttgtcgttttacgacgaccccaaaggcaccttattcaagctcactcaacaaaggtccatgaattcatatctcacagagtttaagagcctcccaaaccatatcatcgaccttcttcatacttttttcttagttgtttcatctcaaggtcatccctcgagatttgtcggaggttcaagcgtacaacccttccccgaatcacgcca

SEQ ID NO: 220320 - DNA, 444 bp, Glycine max
  unsure (1)..(444): unsure at all n locations
agcttccagcaccatcgatttcagactttgaattntattttttttagcatggaatattgattgcctttggcttactttcaaccttcctatgtatgttgaactcactaggcttttttgccacatttttaggagttcaatattcacttagaatcaaaatttcagccaacaattcattcaccaaaactcaaattcacaatagacacaatcataaggaaacctaaacgttcaagaaaaggatcacaatcaaagactctccaagaattttgcatgaacatgttaaggactaattaacatgcaaagatttgactcaaataaaataataggctaaaagaaattcatacactcatgaacaaatgagttagacaaagaaacaagaaaaataaaattcagcccaacataagaaatcttatgtgacaagtgtcatgtagacatgacttctatgac

SEQ ID NO: 220321 - DNA, 392 bp, Glycine max
agcttgtataatggtcagacatgatacatttttatgtttggtctggttcaaaggtaaaagggatgccccacattatttccatgacacaaatgcaaaaatgatgatttggaaactttatgcaaaactggtcatgcatgcacctatgcggacactcaagtgtcaaatttttatggtcatgtgatgctaaggctcaagattcatttcctccattttagtcaacccaatattttcaaaatatgttcttttatcaatttggcattcattccgattcaatttcggcgtccgggaaaattttcacagcaatcaaccttcacgggtacacaattttttttaaaaactagttatgatcacggatcttttaaaaaaaaagtaaaagctttcttttaaaaaca

SEQ ID NO: 220322 - DNA, 335 bp, Glycine max
  unsure (1)..(335): unsure at all n locations
agcttcaacatcataccacttccagggttttggaactacttcacatggacttgatggggcctatgcaagttgaaagccttggaggaaagaggtatgcctatgttgttgtggatgatttctccagatttacctgngtcaactttatcagagagaaatcagacacctttgaagtattcaaggagttgagtctaagacttcaaagagaaaaagactgtgtcatcaagagaatcaagagtgaccatggcagagagtttgaaaacagcaagtttactgaattctgcacatctgaaggcatcactcatgagttctctgcagtcattacaccacaacaaaat

SEQ ID NO: 220323 - DNA, 385 bp, Glycine max
tggtaatcgattacaatcctgatgtaattgattacacagttatctttcttgaaaagttgtgactcttcatttaaaatttgaatttccaacgttcaaagccactggtaatcgattacatgttttgtgtaatcgattacaaggtttatcaaaatatttttgaatgttataagcactagtaaccgattacaaagctaagtcatggtaattgattacacctttgaaaaaccattttcagaaatgttgggcttctagtaatcgattacaatcttctggtaatcgattaccagagagtaacaagctttggaaaattattcttaagataaaaactctcttggccatcattgtgcttttcaaatctttctaatagctatctaaatctatcttg

SEQ ID NO: 220324 - DNA, 445 bp, Glycine max
  unsure (1)..(445): unsure at all n locations
cttaacagagcttgaacaatatacttggacttcatttaactgtctttatgcttggcggccacgctcaacaaagtactttcgacacctactgtacgttgatttgaccaatgctgttatgggaatgttgcgacaatccttcaaaaccttattgatacattctgagaggttggttgtcatgtggccatatcgacgtccttctctatcataagccatcgtccatttttcctttgaaattcgatcaatcatgtggctatggctggactcagttcacgaaatttttctaaattttgatcaaaaatgtgcttgcaggagtgtagactgcataaaaatagttatgaataacaattntaagtatatatgatacttanataaacgtcaccatcaaatatgaaatcttacccacatttttcaacatttcttttttgttgcattattgaatttcgat

SEQ ID NO: 220325 - DNA, 331 bp, Glycine max
  unsure (1)..(331): unsure at all n locations
catatcccatgaggtgttaaacttttatgggaagctattangtgaaactcatgagaagttaaaaagtgtggatatagttgctatcaaaaatggtaaacaattagacagaatccagagagctgaattggtgaaaatggtggaaataaaggaaataaaagcagccctaanaagcattggtgatctgaaggcaccaggtgtcgatggatatggcgcacaattttttaaagcaacgtggtgcactgtcaaaaatgatgttacgaggactgtgttagacttcttcanggatggtgggtttgatgccaagttcaacagaactctggtgactttgata

SEQ ID NO: 220326 - DNA, 497 bp, Glycine max
  unsure (1)..(497): unsure at all n locations
tactaagcttctaaacttncgtttgtaatactctcgtatcgttcgctaattccgcactcatgttctttcgctacggcttctcgctctttaagatgcagaacttcgttgaggtatctcgtcaactatttaatgaattactatccgttgtttacgggtatgtagaaataaaaaaaaaataaggttagtaattgacaaaggaataattaatgtgatctttaaaaggaacagagggagtagtaattatctgagtaacttgctgataaaaaataacaaaaattatttgagtaacttactatttaattactcacacgactctctttttctatcgataagaattgaaaaaaaaaaagaatgattaccaactgattctgtttctctatttacagaaaacagatatgattacaacttagacacgtaactaaaccaaagttagttaatgcgagataacaacttctaacaaaataacagaaataacacaaccatagttgtcctaattg

SEQ ID NO: 220327 - DNA, 289 bp, Glycine max
gcaagctttatgatgaatcagaggtgagtcatttgttgttttgtgatcacaaaagattatgacccaggtgatggacaaaagctcaaaaatcaatccaagaacaactcacgtgaatcaaaaatcaatcaaagaacaactcaagtgaatcaagaacaatccgagagttcaggataagaatcaagaagaattctagactcccgaagaaagtttagagtcaagaatcaagattaaggttcaagatctcaagaatcaagatcaagattcaagactcaagaatcaagaatcaaga

SEQ ID NO: 220328 - DNA, 436 bp, Glycine max
  unsure (1)..(436): unsure at all n locations
ctagccttgcatcatctgacgtattaatatatcatcaacttattgagaaactatgagagagttatttccgcttattctcacataaagagtggactcacataagcatcttgcaaagcctatgctcaataggcgatcatttatcttgctatactatgcccttgcttcaccttgcttcacaaatacctttggctgctgtacatatatttcttcttgtagntctccgctaaaaaagttgattcgacatctagttggaatattttcaagccattttgcgcagccactgttagtagcaaccttaatgtatcttatctggacacaagagcaaaagtgtcacaataatcaacaccaaaaaatggtcatacctttctactacgagtctcgcctttgtgttgtggactgacgaatctacattaaagcttgttctgaaaactcattt

SEQ ID NO: 220329 - DNA, 322 bp, Glycine max
  unsure (1)..(322): unsure at all n locations
gcttctgaagcactgtgacaacaacgatgtttgtaattctctatgcgccgaanctggttggatcgtggaagaggatggcaccacttatcaaaaggttcagcttcctctcaatttctcagatctactttcagtcacggtcagtgtttgcttttggagtcctgatctaagtttgaataattattgatgtacagggatgcaagagacccaccgcgagtgagattgaatgaacaacaacaaacataagctgtttgctttcctttgtgtcaactttcctttgtgtgcctgttatgttggaatataaaataatgtcatcttacataag

SEQ ID NO: 220330 - DNA, 251 bp, Glycine max
taatgcccgcacaataacaagaaacacagaggaatcagactaaatccctcaacacgaaaagaaaagaaagagattgtcgattgcaaagaccgatttataaaaactgtgaatctaattatgacaggcttttagcattgtgaatctgaatcgacgatgagcggcacgacattatttggcacagtgctccaatagctagcactggactctagtgaccatgaccgtggcagtgatgttcacaatacacacgatcg

SEQ ID NO: 220331 - DNA, 325 bp, Glycine max
  unsure (1)..(325): unsure at all n locations
agctntacatatgtcctaactcagtagttttatactagaagcagaagagcaatcatgttttctatgtcaaaatgtatatattaaaagttttatatgactaaaaacatgattcttgaggtagcctttatcaaggagtaggtatcagaagcctataatatcatagaatagaaaactaaaaatagagtaggctacactattcagaagcactcaccaaaagcaacaaaagaagatattatgcaatagtgtattaaagcattgcatctgaagcaacaagctctttagaagacacaacgtgaattggagaaaaaactttgtatcatctaca

SEQ ID NO: 220332 - DNA, 455 bp, Glycine max
  unsure (1)..(455): unsure at all n locations
ctcagctaatatgaaagataaaaggtttttataaactgagnagcttatgtgattttctcacaacatgtttaccacagaagttttactctttggtaatcaattaccagattattgtaatcgattaccagtagcaaaatggatctgaaaaagtattcaaactgaatttacaacgttccaattaatttcaaaaagctgtaatcgattacaatgtntttgtaatcgattaccagtgcctctgaacattgaaattcaaactcaaatgtgaagagtcacatcctttcacataaaaagcctgtgtaatccattacactgatttggtaatcgattaccagtgattggtttctgactaaattcaaaagatgtaactattcaaaacggttttgactgtttcaaattagttttacgtttgtctacaatgtaatactccttctaatagtccttcttgaccagacatg

SEQ ID NO: 220333 - DNA, 377 bp, Glycine max
  unsure (1)..(377): unsure at all n locations
agcttggtcttnttataatatgagaagttctgaactcatcacgttatctaaaaaaccttggggtggatccaagtgctccgatcattcatttgcatattcatgtgttggtggcatactcaccgttgtatgtttctttatggagttcaccataactaaaaaagcacataggcacctctataacactcgatccaaaaaaatggataatgaagagggcgtgcaatagcacatgaaagccgatctatcgcctttaaagatcaaatggcttctatcatagaagccatgcttaaactccaaaaacttttaaagattatgccccggcaccccctctatgcatttaggaaccggaccaggtttagccccgataaacttgggtggat

SEQ ID NO: 220334 - DNA, 404 bp, Glycine max
taacactcaggctgaatgcatcggcaccattagatatcctagccgctttacaataatttatatccaccatccaatttccaaaaacatattatatatcactggggcatttcaccgagcacttggggggcgcacgtttggacacatattgcaagagaatggtgacaatgtggcatgacccatagcttcagaatacaacatatgcctaatgccttctcacacaaacccacaactcatcacaacaagcatggattcagatgcgaattgcttcacgaattttgcaaaaatgagcaactaaggcaccataacacatcattggagaagccaaaaaccaagggaaattgcacttacttgtgtggagcgaattaaagcgtgaaatggaagcaaaaactcaacaatggaagctt

SEQ ID NO: 220335 - DNA, 359 bp, Glycine max
agcttagtaaagctaagcactatcttatcttcccctttggcaaattttgtctaaaacatacttagacacttcctgagcaggtacgagcagttatgcaagtgggatcagcaactttcattatcagagtaatcaagcacagcggtatctgtagtggcgacagcaaaattctgcaggttgcaagtcgtttccaggatgtcaagacatctcatgtgacatcagctttctgctccccctgtctccatgctcctactgctgagaagcagttcactgcagcatcttctatcagctactaggcttttccaggatgtcaagacatctcacgtgacattagctttttgctccccctgtcttcatgctcg

SEQ ID NO: 220336 - DNA, 368 bp, Glycine max
  unsure (1)..(368): unsure at all n locations
agctagcctcanagaggtctatgtaagttttgcggccgaaagattcttttccgctccggagtatgacagtcaccgctttaagagcgctgtacaccagcagcgcttcgaggccatcaagggatggtcatttcttccggagcgacgcgttcagcttacggacgaccagtatactgatttccaagaggaaatagggcgccggcggtggacatcactggttactcccatggccaagttctatccagaaatagtccttgaattttatgccaatgcttggccaatagaggagggcgtgcgtgacatgagatcttgggtaaagtgtcagaggatccgtttgatgccacgctatggccaactctgaatatctgttg

SEQ ID NO: 220337 - DNA, 291 bp, Glycine max
attcttttacttaaagaaataactttcattaaatgatttccactcaaacttaacagaggaaatatcttctgcatacaacttaaagaatttaaggagttaaatctacaagcacaatgataaacagaatgtaatacctgcaatgctgcctcataaattagtctctcatcactgtcatcagccctttcatcacctgctccagaacgatacgcagattcactataagtagccaacctgtgagatataaccttttcgagcatcaaaggtgaaggaagaatcctatttccaccattt

SEQ ID NO: 220338 - DNA, 164 bp, Glycine max
  unsure (1)..(164): unsure at all n locations
tcttgaactganagcaaacatgtcttgattatataaacgtacataataaaattgaattaagaattccaataccagacagcaatttacggattagcattgtcaaaaaatgtcacagcactaagttctatcattcattgaataaaaaaggcttaaatgcaattttg

SEQ ID NO: 220339 - DNA, 374 bp, Glycine max
  unsure (1)..(374): unsure at all n locations
agcttataagaacaaaattgcctaaatcatttccaaatatgcatgtgaattaagaagcatcaacaagaatcaagccaaggctattgtgcaagcaatcaatggggcaaaacacaccaaaagattatgatgatggatggctcaaattctcacanaggtaaacttatcactttcaaattgagctttcaaaactatcatgacatgtagaggaaaaacaaggatttcgaatcacaaaatgtcaagagacttttatnttcagaacaattacccattttttgaacataatctataattcaaaaaaaaatatgcaaagttgacatacaaacaaactgacctaaatattaactaaaacccaacaaactaccaaatttacaaac

SEQ ID NO: 220340 - DNA, 479 bp, Glycine max
  unsure (1)..(479): unsure at all n locations
tctaaagtagtataatgaagtcggctatgatgaggagttaatatcttgatctncaatactaaatgccaattcagaagctacagtggagatcggaatagctaacacatcccttgcaattgcttgtagtgttggatactntaactcattcaatttccaccacattaagatatcaaaatctgaacttcttggcaaaacttcttcctctaagtaatgatctaactctattttcatagttgaggttcttgcccttttctttctttcaatgtatctatcataatcacacaatttactctttccatcactaaccacatcttgtgattcaaaagaactagtagaatcttgatgctttttggcttgatattccgaaaccaaatcataatacaagtttcggatcctattaacttgagaaataaaatcaatgggataaattgattcaaagtanaactcaagcaacttccatttgtatcttggatctaaaa

SEQ ID NO: 220341 - DNA, 348 bp, Glycine max
  unsure (1)..(348): unsure at all n locations
agcttggaacatataaactgaatcctagtttctcttaaagacttagncaaaatgtttgctggctgatcattagaattgatgaactcagtggtaatctccttgaacaatattttttctcaaatgaagtgacaatcaatctctatgtgcttggtcctctcatgaaagactggattggatgcaatgtggagggctgcctgattgtcacaaaataacttcattcgtgtaacttcacaaaacttcaattcttggagaagttgcttaatccacataagttcacatgtgaccaaagccatagatcggcactcagcctttgcgctggatcgagcaacaacttgttgttttttcttt

SEQ ID NO: 220342 - DNA, 418 bp, Glycine max
  unsure (1)..(418): unsure at all n locations
ctagtcacacagaataatccaaanattcaaatatgtgngtgttgtataagcataacaagactntctgcgattnggttaaagatacaatctttgcagatgataatgctctataaacattaagaaagctagcaaatgggcctaaaagaaatgttataacttggcaaggatacgacatatacaagtgttcaatttacacaaaagcacaagatgacaaaagtacaatgcagaacaacggggtcaccctatgggctgaatctcaacacttcgcaagtgtgaatgacaccaatctctgtgtatgcttcatcccttacttngngttcattgatgaaatttgggagcttaactatgtgaaaattacttgatgtgctttcaaaatatatgtggtgacagcaacaccagtgtgcgcaccgatgatata

SEQ ID NO: 220343 - DNA, 386 bp, Glycine max
  unsure (1)..(386): unsure at all n locations
aaaatgtttaaaaatacttttaatttatattntgaatgttattcctttattaatatatatgtgaggggtagagggtgtcacagtccaggccacccagtcgtgcaccataacttccccccagtgatcagcctaagccacaagggagttccctactaagtgacgcaccccctagtacaaagtacatactgtctactatttcccgtgtcatatgaggcatgaaacatgggcaccatcaagtacaatgaccatggatgagttaaagatcctaagccatcccctcagagatgcttaaactctttaaccactctattttccccaccagggacattcgacaaggtcaatgcactctcccatgaacattcacaacatacaacgtatgaacgtga

SEQ ID NO: 220344 - DNA, 426 bp, Glycine max
  unsure (1)..(426): unsure at all n locations
gctttgatttttgtctgantgcatgatgctangatatttgatagntaaaatattgttaggaattatattttcatacaatgtatgttgttctggttaggatttgatggcctaattgtaaaagccagcttcatgatgatgaacctagcaattttgacgatgccaaaagaccaagtgattgattcaagactttaagatcaagcatcaagaatctaatccaagattcaagattcaagagaagaaatcaagaagcaataagtcaagacttcatataggataagtattaaaagaatttttcaaaaacaaaatagcacagttttggtatacaaaagaattttctaaattttttaagtaccagagtgatactctctgtaatcgatacctgttatcaatatcgataccagttgcatacctaattcgttcgggact

SEQ ID NO: 220345 - DNA, 346 bp, Glycine max
  unsure (1)..(346): unsure at all n locations
gcttactcggtggtgaccctcttccacatttcctttttccaaaatttgtaattactctttttatgcggaagcggtttaccgganagtgcctcggatcgccaagtaaataatnaaaacggaatgatccgagtgtcaaacacagggaacttattcctttggccaagctttgttcaacaatcatgcatnttgttgacagaaaataataattgtgaattgaagtaaaagtatgatatatcctaattgaaaagcagtaaacgtgagcaaataagtgtgaagacagtgatctaaaagcattgggtcttcctattgaacaaggtgatgcacttaaagatgtgtctctaattaa

SEQ ID NO: 220346 - DNA, 455 bp, Glycine max
agcttcctctggggagaattcatagactataaccctgtgttcttctccacagcagcatcctatcagcttcacgagatgtggatgccttcattgccccagaagaacaacttcagtctgtcgtcagcacaagttagaaaaccaaagggtcagaactgatcaaagacgcgtaatcttaaagaccttattatttaaatttataaaataattcgtgacattcatgtaaaacatttttttaacttacttaaatgatttagtgtttgttaaatatataaatttatttctatacattataccttccagtcaataaagagactttcatttaataattactcattaagtaaatacttaattgaagtatttatttaaacatgacacattaattatcttgataaacaacttacttaaagtgttccacaaatataacttggatgacgactaatggaattcagtacttt

SEQ ID NO: 220347 - DNA, 377 bp, Glycine max
catcacctgagagacaagtggtgaactggtatcccatcatttatattactgtcaacttaaacaatgatagctggagggaaaatatatgggagagggagaaattctaagaaccagctcgatcactcttgccatttaaggttaaaaaaaatatgaacattgcctataaaagatttggttgtacgatgccattatggccatttctacaagtgagcccaagttccacaggctaaatttaccccacttcaattctacaacaatttgatcatctttagttctgtagtgtgcgctgcctcaagctaaactggtcttacagttacactaaacaaacccttcatcaaccatcagcattgattttaaactcgatgaagttttgggct

SEQ ID NO: 220348 - DNA, 359 bp, Glycine max
aagaatgctataagcaatgcgaccaatgaacaacatggatgtatgcgaatgatgcacagttgaagtattgcgaatttttacacacgatatggggttgaatcacattaaattttcaacatggtccatgacatctttctcaaggtgaaaccggaagtaagagggacatctacagtcctaaatatgtttggcagtagacgaagcacggatgtgactcgatccatcttttgccccaattttttgcaagatggttacttccatacttcaacctgacttgatgaaccttttcgtaacagcacgagcctggttcaccctataacccaggaaagaaaattagatcgccatactttacaacattcata

SEQ ID NO: 220349 - DNA, 269 bp, Glycine max
  unsure (1)..(269): unsure at all n locations
ttttaaatcaaattatttgcatatctatcctaataataaaagaaatactcccatatgatgtacatatttcactacatcgttntatcctttggtagttttaaattattgttatttctcctactaattatccactgctctcatgtttttaagttttttttaacctccacttttttttctttctctttcttaatcttaatcaaaataggtagaaacaccgactccactggtttaataaaacccaatactaactaataaggtcataaagcata

SEQ ID NO: 220350 - DNA, 349 bp, Glycine max
  unsure (1)..(349): unsure at all n locations
agctnttcgaaagtatctggttttccaaattcttgaaacttgtgctattcatctttccattcttttctccctttgccaaaaagaattctccaaggactaaccacctgatttttttgtgtctctctcttcttccttttccanaagaacaaaggactaaccgcctgaattcttttgtgtctcccttctcccttgtcaaagaattcaaaacaacacagtctgagaattcttttgattcttccctttcccttatacaaaagtattcaaaggactcactgcttaagaattcttttgtatccccattcacaaagtatcaaaggtttaaccgcctggaaactttggcttacacatt

SEQ ID NO: 220351 - DNA, 428 bp, Glycine max
  unsure (1)..(428): unsure at all n locations
acttcctcgctgacatcttttgtcttgaatgaaattgccatgacaggtttattgttactgtctttgatatttggtagttgatattgtgttgcgggagggaattccgattggattaactcaccatcattcacttgccaatttgttgacatttgttgttggatcacctatgatgtcttgtttccaagggtaatctatatcctttctgatggcataagcatgaaaccaatcaaagaaaaggacatttaatttgactctttcgacaaattcatagaacttgtcttggaattgttttctgcttgtcncctttaatgttgtaaaaacatctcctttgacgctcattctccggagaataaaaatctttcctaaggggttccttatcaatgctaaagttgtcaaatacatcattatttccataaagaagtatgtgg

SEQ ID NO: 220352 - DNA, 310 bp, Glycine max
  unsure (1)..(310): unsure at all n locations
agcttgaagatnttcaaacgacaataactttttactcggatgtctgattgagccccctaatatatcgagacgctctanattgaatgctgaagctctcagcaaattcaaacgacaataactttttactcgaatgtctgattgagttccgtaatagatcgagacgctcgaaattgaatgttgaagctttcagcaaattcaaacgacaataactttttactcagatgtctgattgagtcccganatatatcgacacgatcgaaattgaattttgaagttttgagctaattcaaacgacaataactttttactc

SEQ ID NO: 220353 - DNA, 323 bp, Glycine max
  unsure (1)..(323): unsure at all n locations
tttcgagggtctcgatatattatcgggactcaagtagttcatccgattattaaagtnattggcatttgtattggctcagagcatcaacattcaatttcgagcgtggcgatatattacgggactcaatcagacatccgagtaaacagtcattgccgtttgaatttgctcagagcttccggattcaatttcgagcggctcgaaatattacatgactcaatcagacatccgagttaaaaatatttgtcgcttgaagtttctcaaagcttcaacatataattttcgagggtcttgatatattacgggactcaatcggacatccgatt

SEQ ID NO: 220354 - DNA, 316 bp, Glycine max
  unsure (1)..(316): unsure at all n locations
agcttggccggagcagcggtattgtggtttattaatnnggaagcttcccgtatccgtacttggaaagatctgattaccgccttcctaaggcagtattagtacaattctgatatggctcctgaccgtactcaactgcagaatatgttcaagaaagagggtgaaacctttaaagaatatgcgcagcgatggagggatttggcggcacaagtatctccttccatggttgagagagagatgatcaccatgatggtagacactctgccagtgttctactatgagaagctagtgtgttacatgccngccaactttgcggatc

SEQ ID NO: 220355 - DNA, 364 bp, Glycine max
  unsure (1)..(364): unsure at all n locations
tcaatactatatttggaaagacccatcaaaagctcacaagtaatacttgcatatggaagaaaagggccatcttgtttgatctttcatactggntcgatctaaatgttagatattgtatcaatactatgcatgtggagaaaaatgtgcgtgatagtgtcatcgacatgcttcttaacattcaaggcaagataaagatggttaaaatactgggccagatttagctgagatgggtatacgtgaccaattacatctcacgtcttatggtgagaaaatatacttgcctcctgcatgtcatactttgtcaagaaaggaaaagacaagtttgtgtcatggttgagtcatgccaaatgtgccccagataatt

SEQ ID NO: 220356 - DNA, 425 bp, Glycine max
agcttgtaagagtgaggggtacccatcttatgtggtactacgtggcggtcgggcgaaggtgcacaacaacgtttccacatccacaaagcgcgcatatactcatcatcctctggtgcccaccttcaactgagctcacgtactcccatgtaacccatatcctcgttgctctcaacaccaggtccctatcaatccttccaagcttccccaacattcaagtaattcaacaaatcaaacaccacatactatcacaaccaagataacagggcaaaagcagaaaactccttccaaaacaccaaccaaaataacagtctttctcacttatagaacccagtaacaaatccttcgttcccattcgttacacgttgatcgactccaaatttactggaagttctattcataacctacattttaccgtgggatctact

SEQ ID NO: 220357 - DNA, 434 bp, Glycine max
  unsure (1)..(434): unsure at all n locations
cagctntagtgagattactatgtatgttaaaggttactatgatcattnttttgtggtattcttatatgtggatgagcacttagtcatgggagcaacattgagcttattcaacaattcatagaagacatgattcgagtctttgagatgaccgatcttggacaaatgtcttatattcttggaataacaatcaagcacagacaaaatgaaatattcacttgtcaacaaaagtatgcagaggagattctaaagaagttttgcatgggtcactgtaagagtatgaccactcatatgtgtcaaacagagaagttgtgcacgatgatggaacaactaagcggatgagttcaatttagaagatcggttggctgcctgatgtatctaacaactaccaggcccgatattatgtatgctggtagtgttccttcaagatttatgaa

SEQ ID NO: 220358 - DNA, 439 bp, Glycine max
agtttgtatgtttgttctatagcatcagccgtgatccctatggtctcagtaaagtttacgagggatttttgtaccttcttgttccttggtcttgaacaagatagtagctcactctctttacataccaagtatctatttttttgccaaacattcgctatattccctttgcataactatcttgcttgtaagaatttttcatctgtgataagtttttaacgtataatctttgacactcggcaggaatatgacaaaaacattttatgctgctagcatcctttttgagaatcttaatcaaattggagcagtttagccttatgtgtgtatttcatgcattgaattgaacctttctttcttatgcatgactcattgcatttgcatgttttccacaaagcctctcttatttggaaacaatttgaacaagactcaactttctgaattg

SEQ ID NO: 220359 - DNA, 472 bp, Glycine max
  unsure (1)..(472): unsure at all n locations
ggtaattngagaggacanaactctcaagaccatttctagcatagtatatagatngtcctctaagcatgaagaagagtattagctagctagaaaaatttacaaagaaatactatataagcagcacattgtccactccagatccaaggccaagcaatctaacaggtcttattaccttaagaactttagaatccactgtcttaactgcaggtggcacggngaacgctaaagcacaatttggaagagggtgaattagcaccaccaccacatccttcacaatctcccttgaaatcattacatgatccatagcttaagagcttcttcttgccaaacttggccatagggacaactttggaggagcttgaagaagatgagggccacgaagaagggtatgatgatggngatgagagaatcattttcttgatgaggttcatctntggtagcattgtgagcaagagactggactntgatgagt

SEQ ID NO: 220360 - DNA, 259 bp, Glycine max
agcttctacttatgtggcagggcgggctttcttcactttcttgtctccaacgcgagctttgaccactgttcttccttcccgcgatgctttttttcatgtccgcctgagtgggcttatagcctaaaccatacttcccacgatttccttgggtatttatcacgctatgtatggcgccgttgtctttgcctaaacccatcccgggttcataaccgttccccaacataactcgggccatcattaccggcgcatcggacagaca

SEQ ID NO: 220361 - DNA, 196 bp, Glycine max
aagcctgaaacaagtaaccctattaaagcaataaagcaacaagaaactataaatacaaaacgactatctactctggcaaaataccaagtataaccaggctactgatttacaatatgagcttacaagcttggggaatgttatctccctgaaagaatactaatccaggagtaaaacattactaacgtaaaaaaaacta

SEQ ID NO: 220362 - DNA, 388 bp, Glycine max
gcttataagaacaaaagagtctaaatcatttccaaatatgcatgtgaattaggaagcatcaacaagaatcaagccaaggctattgtgcaagcaatcaatagggcaaaacacaccaaaagattatgatgatggatggctcaaattctcacaaaggtaaacttatcactttcaaattgagctttcaaaactatcatgacatgtagaggaaaaacaaggatttcaaatcacaaaatgtcaagagacttttattttcagaacaattacccatttcttgaacatatcctataattcaaagaaaaatatgcaaagttgtacatgcaaacagaattgacctaaaatattaaactagaaacccaacaaaactaacaaatttaacacaaacaaaact

SEQ ID NO: 220363 - DNA, 435 bp, Glycine max
  unsure (1)..(435): unsure at all n locations
tctttaaaactagtcacttaataagttatgactttngaaagaatcttcagaaacaagccacttgaagaattgtgactcttggaaatgtatatttcaaaaacagtcactggtaatcgattaccattaaggtgtaatcgattacacatcaacagatgtaactcttcatttgaaatttgaaaatcttaacattttaaaaacactggtaatcgattacatgattatggtaatcgattacaactttgtaaattagtttgaaaaacaatgttggctactggtaatcgattaccagagagtaaaactctntggtaatgaatttgtgaaaacttcttgtgctactcaatggttttgaacaacttttaatacttatcttgattgagtcttctcttgattcttgattcttgggtcttgaatcttgatcttgcatattcttgaatc

SEQ ID NO: 220364 - DNA, 159 bp, Glycine max
tcttgttctctatacgaaatgatgaggaaccttcgcgggaacatatgcatgctctttcatgactcacagattgctccggaacctcactaaaagagaacgatgctaactttcgatgtaccggagtcacggatctctgctgattgtgcatgctggcatcac

SEQ ID NO: 220365 - DNA, 310 bp, Glycine max
tcttaatccttaacttcccctagaccctatccttctgcagcacatgaagccattgaacaaaagaaatgcacaatgacaccaagtatagctcatgctgagatagatatcagattacattacttggattcaggaacgtccatgtacggatatttagatatgggcacggcaagctagtaacatacaaaagcaattcttttcgttatgggtggcctatacataagatatagatcaataagtgatgtgagaacattgagtacaaaatttgaaagttgaaaatcttggtgtctatcaactaaagaaagcaatacct

SEQ ID NO: 220366 - DNA, 458 bp, Glycine max
  unsure (1)..(458): unsure at all n locations
ntcataggtaaaatcaggggcagccatttcccttagagtcctctcacggtgtggaggttgngtcatgttcttagaatgttcaaaactataatgctcaaaatcaccaataacagaatgctcaggatgcttacaaggtactaaatgatgtctaactaatctatgaaatttcctatctatctcaagatcaaagggttgtaagtcagatggattgcctctagtcatacactatattcagcatgcacaactagttgtcttcttatgcaagtaacagtgtaagtttcaactacagctaccattaaataatatccaaatgacttgaaactctgtgagaaaccttataaaatgatgagaagataccacaaaaaatttcaaacaaaaattcaaagtctaactatagaagctaaaaatgataagttaagaaaaataagagaataatacttggaaaataaaaaaacttt

SEQ ID NO: 220367 - DNA, 319 bp, Glycine max
ttgaatttataattgttaacatagtagattttcttaaataaaattcatctataaataacaccttagaaaattattatttaacgaaagcacccacctttattaagtgagaaaaatattacttatgtagcactaaataaaatcttataattctaagatatagatattgaacgatcaattatgaatatataataaatctaaatttattactattattgatattcttatgtcattacattgctggggaaaaatatttataaactttgttggtaataatgtatgttgagagcaagctagctaccttaattagtggatttctacc

SEQ ID NO: 220368 - DNA, 411 bp, Glycine max
  unsure (1)..(411): unsure at all n locations
acttactatcctaagggaaaattgcttggaattattacacacaaatggaagtatggtgacctattggaggctcccaacttacttccaaggaaaggcctttttgtacaaaatttgaaagcaaagtaaattcccaattacaaaattacaaaaaaaaagtcctcaattgtggtggctattctctctttggtgtttcactcaatttggagtgcttcttagtccaatagctcttaaggtggttggccccttggttcttgactcaaattcttcaaggtatggcaccaatcctccttttcaattccctatatggcaactcacaagcaaggaaacaaagagacaagcaataaccanagacaaaaaaaatgaaatgaaagctaaaccaatagagtttaaagaagacatattttcaaggat

SEQ ID NO: 220369 - DNA, 284 bp, Glycine max
acatacacccatttgccaaaaagatgaaagtgtttcactgcataatcatcaaaatcaagtcaaactgttccatatgcttcaaaatgagcaaaccaactacccatatgccaaactagcagtgtatatataaacataaaagaaataatgtactgaaactataatcataataataataataacagaaaaatcatcaagaatttagaattcctgtgactggtcctgtgtatcctatgtctgaacatcctcctcatcggtcaaatgatatactggagaagctggacgag

SEQ ID NO: 220370 - DNA, 452 bp, Glycine max
  unsure (1)..(452): unsure at all n locations
tactaattagacaggttatacagcatccatctactcttattcaattattctaaggaaactagaagaaaaagaatagaatacatatgagtgtgtgacatgcgcagaacacgcatttctcaaaacatacactatcacataaaatgaaataatatatatatataatcaatgagatagtatattgatgataacaaaggacaaaaatatagtcactgatttcaccccacatcccaaaacccactctgaaaacctatgtatgagcattgactctgagaagtacaaatgaatcaggctaaattaaaaattgcgataatgggtacaagctaaaaacttataatttgaaaatatatttgatcttaaatagaaccagcctaaaaagtttcaagatcaaccaaatcatgttattatcaaactgcaaanataaatttgcagaatttctaaagttttgacatcaa

SEQ ID NO: 220371 - DNA, 454 bp, Glycine max
  unsure (1)..(454): unsure at all n locations
ctcagcttctccctattntctatcaaagggggagaagtgaatggggaaaatgctcaacctttctggtatctcgagaacacttgaaattattgaaagaaattggtttcgtgaagaaaatccaagtcgaggcgcttccgtaatgtttccgtaacgtttccgtgggtgatttcgcaaagattttcaaccgttcttcgacgttcttcattcgttcttcgtcgttcttcagtcttcaaccggtaagttcccgaaatcgaacttttcaattcattctatgtacccttagtggtcctcatttgttttcacgtgcttttattttcattccatttactttccgaacccccttttgacgtgctttagtcatttacttaagtcattttctcccctaatcaaaaataaaataaatttccaccgatcattngaattgtaatatccgttaatttctgttaaaatgaaa

SEQ ID NO: 220372 - DNA, 447 bp, Glycine max
  unsure (1)..(447): unsure at all n locations
gggtgccacattaacattgatgttggaaacattgttctggctntggttttggtcaggctgagagtcttggcaaaagaccttagcgggggagtttgagtagcaacccaaaaagtcttcaagctttggaccttcttcattggaattccctccacctattgcactatcatatctccattctgcaatcagccacacaaatttcatttgctaatccataaagaagaagaaaaccaatcaagtgaaagtactgatttcacagaaaaataacaatctttattcaataatcatgagaaagagcagaaaaggaatcgctttgggcaacatgcaaagggttggaagaaacacacagaacactctccacccatccaataacaaaatccactcaacatgatagagaatcataaaaacttttaggaaagaatagttacttggttttttnttttcaaaaag

SEQ ID NO: 220373 - DNA, 335 bp, Glycine max
gaacgaagaagatgatcttatcctttttgcaaaaacgttccaccagctccagagaattagaggaaatctaaggagaccatatcctatacctaacagaaggatataagaatcatcctctacttcaaaatgctttgaatgcaatcaacctgcacatctgagggttgattgccccactttcagaaaagaatggataaatttgaaaagaaaaattttaatgaaaagaagatgaagaaggcctacatcacatgggacgacaatgatatggaatcatctgaggattcagaaaatgaagaaataaacttgtggttaatggctaaaagttatgaaagtgatga

SEQ ID NO: 220374 - DNA, 435 bp, Glycine max
  unsure (1)..(435): unsure at all n locations
tttttaagatcctcaaagctagangtaggaaacataaacttcctcttcaatgtatccatttaagaaagcactttttacatccatttggtttaacttggaatccataacatgagcatagaaagtagcaatcttacgtcctctattgctactagtgcatatgtttcaccaaagtctacaccctctttttgattatagcccttggctattagcctttctttattcctagtgatcaaaccatggttcatccaatttttttaaacacccatttatttccagcgatgttcatatttttagaataaggtatcaattcccatacatcattcctttntaattggtgcaactctntatgcatgaacattaaccaaaactcgtctttgaagacaagggttctacttaagacacaaatgcaatatgctcacaaaacanaattaaagg

SEQ ID NO: 220375 - DNA, 413 bp, Glycine max
  unsure (1)..(413): unsure at all n locations
gcttttattgttgaccacagagtggtacctggagatatgtcgcgggggtcaagagaaccttgggacgtcangtggggtgctattgcccaaaaccaagcttgaccaatcccgacccaacccgggcatagtcggtcagtgagaacctgtgatgtacctaagcaggcgagctcctggcagtcaacagataaaaggaaaacaagaccacaaagcaaggaggcttgtggtggctggccagctgtgaattttgtgtaatatgtggattgtggtctctggtaatcgattaccaaaggtgagtaatcgattacaaggcttaaaatngaggacaggaggctaagatggtctctggtaatcgattaccaaggggtgtaatcgattaccaggcttgaaaacgaagtcaggaaacttatggagcc

SEQ ID NO: 220376 - DNA, 392 bp, Glycine max
gccactctatattcttggttcttctataattttctttcggattcttcatcatgaatatcaattcatcttttgcagatcaatctttgaatatacacaacccatactatcttcatcaaggagaaaatccagcgactacactagtttctccagttcttgattcaacaaattacaattcatggagtcgatcaatgcttattgtattaagtgtgaaaaataaagttgaatttgtcgatggatccattcaaggatatgcattgaaccatacacttcatacaacttggaagaggtgcaataatatggtggtttcttgacttgtttactcaatctcacattcaaatagacagagtattctttggatgaatgatgcacgagacaaggtgatcaatctataa

SEQ ID NO: 220377 - DNA, 453 bp, Glycine max
  unsure (1)..(453): unsure at all n locations
tctcagcttaaacaagcctagcgagtaactnttcatggtattaaaattttgtaaccatcgngcatataatgtgtgatttagtattgaccttctaagaatataatgttatatttgtcagatgtgttctgacgccaagagatccatacatgcccttaccaaatgacgaaattattgcaagggtagcaaaacaggttggttaacgaattccatttatcttattctgtttttgatatttttaccattgatttagtagtgacatgaaacgtttgcttccaaagtaggatgcttatgcacacccttagtagctagagtgtgtttaccgtgtgttgagttattttaatatttcagcattcaacgtcatatgatgttaatggtgaatgcaagataaatatttttaatgaaataccaatatgggatcagtttatggatcactagagacagttactggttgga

SEQ ID NO: 220378 - DNA, 356 bp, Glycine max
tgcgacgcttgccacgcgccgacagggaaggaagacagcttcttcttaattatctccgtaacgtaatatttctgttcatctttacatgtacataggttgtgacatcttatcagatgctttagaaaactggaagcaggtgttgtcgtatcaatgggtgggtcaacagactatcgtatccataggattgggagagaacttaccaaaatgttgcgccacccaactctctcaaggagccccatgctctaagcgaaacacaccctaagaccttatcatgaagcgtgagtcgcttagcgcagctactcccatccactgggtgttggagccaatctaacatagacactcctcttaggcaaaaa

SEQ ID NO: 220379 - DNA, 457 bp, Glycine max
  unsure (1)..(457): unsure at all n locations
ctcacgctctggcgggaacggaggcctcaccgacgactgagtgttattatgcacgatgaagctgcctttggacaccgaccttcagaattcgatccttgctctttcaggtagttaaccaaacaacacatgtgattccattctttttcaataatgtaaaatataattgaatgttaattaaggtttaaatatgtttttatcgcatgtaaaatatgatcaattatttgtcttaatccttcaatttttctttatttgttttagttttgataaatttattatttttttaaaatgattcctgtatctaaatatgcttattataaaataagaatatttatcacgtcattaatagatagtattgtagactattttcagttttaaattntaagtgtgaaaattaataatcttttttttcaaaactaaaatgaaaatctgtaacaaggatttataaagatattaaacc

SEQ ID NO: 220380 - DNA, 423 bp, Glycine max
  unsure (1)..(423): unsure at all n locations
tgatatctaaagggcaagcatgtatatcgtgtagaggaagctaattattgcttttaaaataattaaaggaagcacagatcatggaagcgaagaaaaataanaataaaaatcgtacgtcaaatttttggtcttgaggctttaattttccataatagtggctaattatgagtcaaggagagatatttgtgtcaagtttatatgttactacttgcaagttgcaatgacaattcaatattgatttatgggtaggtggaatggatgatggattaaatgactgatgatatttcaattataatgtttttgtatcatttacaccttgtcttttggtgtcgtttgaaaggtcaaacggtgccatcgtattcaatttgaagataaaggaatccatatcgttctctcccactcttatgccactttcttagaatt

SEQ ID NO: 220381 - DNA, 444 bp, Glycine max
  unsure (1)..(444): unsure at all n locations
tctacgcttacgacataccacctatgatcactcggaattctattatttataacacgatgctctctgcttgtgacattcgtgtatgcgccaccaagcatgggacatctacaacagcactgtgtataaanttgatgattcatgactattacttgatattttgaatagggttaaggatatagcaccctgtgtatgaaactagcatacattttcattgaacttggaaggatacgtcacaggaacgtgtatgtgcgcgagtgtgatagagacatgagagagaaagatccgtgacttaatataaaaaatctacgtgaagaaaaggggtgaacatggtatatacagcgtatctgtcggatggtgcaaatatgtatacataattataaacgtattgtttatgtgacattctttgtcgggccgtatgtacatctctgcgaattcttacatggc

SEQ ID NO: 220382 - DNA, 289 bp, Glycine max
ggaatttcccattgaacccgaaacaactctggagccaaagatggccgccaataacctccatacagtgcattaggacctccccaagggtgatagtcctacggccacataagaagcctttaatattctcctggagcctaaccagatataatacatgaacatgtcgttgtgaacatcgctgtcttcacaacttcattgtgtcactcatgcagatggaactattgccataatgggcattcaaagggaaatcagcgtattatgcgtcgccacggaaactatgctctagctggaa

SEQ ID NO: 220383 - DNA, 455 bp, Glycine max
  unsure (1)..(455): unsure at all n locations
ntgcttccacaatgacctcatttaaggttcccaacanaacactcactatcctaagggaaaattgcttgaaattattacacacaaatggaattagggtgacctattggaggctcccaacttacttccaaggaaaggcctttttgttacaaaatttgaaagcaaagtaaattcccaattacaaaattacaaaaaaaaagtcctcaattgtggtggctattctctctttggtgtttcactcaatttggagtgcttcttagtccaatagctcttaaggtggttggccccttggttcttgactcaaattcttcaaggtatggcaccaatcctccttttcaattccctatatggcaactcacaagcaaggaaacaaagagacaagcaataaccaaagacaaaaaaaatgaaatgaaagctaaaccaatagagtttaaagaagacaatntttcaaggattat

SEQ ID NO: 220384 - DNA, 442 bp, Glycine max
  unsure (1)..(442): unsure at all n locations
gatgcagcagtaatgatggcccgagttatgttggggaacagntacaaacccagaatgggtttaggcaaagacaatggcggcataactagcctgataaatgccaaaggaaatcgtgggaagtatgggttaggctataagcccactcaggtagatataaagggaaacatcgtgggaaggaagagcggtagtcaaagctcgcggttgagacaagaaggtgaaggaagcccgccctgccacataagtaggagctttataagcgcgggtctgggggacgaaggtcaagtggtcgcgatatacgaagatggtgttccgagtacattggatttggtacgaccatgcgctcctgatttccagctgggaaattggcgagtggaggaacgccccagcatttacgcaacaagcataatgtaaacctttacggtttgaaaagctctatagttgg

SEQ ID NO: 220385 - DNA, 432 bp, Glycine max
tgtctttccttgaaaatgttgtgccacatgatcttagctatttatccttaccacagtgtttttcatgagttttaaggtctgccatgactgataacttcttggtgttgcatctgctgcaagtgtagctcttgtcacagtgtgttctcttgtagtggtttttgacacacaaaatggtctttagtggttggaatttcttgtgatccttgttacgcttgcagccggcataggggcaggaatacctcttgataagctttggttcagacccggtttctttgtgtggttttgcaagagctgcaggagttttgtacttgtcaccatggccacgcatgtgcattcggagatttgcatccctcttgaatcctttcccacatattgtacagaaatgtgtatgaggagcgaggatttcttctttttctaattgcaaaatctcgt

SEQ ID NO: 220386 - DNA, 382 bp, Glycine max
  unsure (1)..(382): unsure at all n locations
tatgatgacgagagacaaaacgaccgcacgtcaaatattttttaacacgtaaaactaccgtacaaagaatcccatgactntttctaaaaaaaatggggaataactaacttcttaattttcagaagaaaaaaatcctcaattggtccttgcaaagttgcaatacggagatatttacgttttttttctcagatcaaatgtaacagaagttcaactcatatggattgaatggaaaaaaaagactagaatagaatgaagaaaaatgtataaacaaaaatgagaggagtcactcgaatactaaaagaagaaactttgatgactaagatcataatagtcgtatgttatgcaaataatgtgtagaatattgctaatgtttaaacgagag

SEQ ID NO: 220387 - DNA, 371 bp, Glycine max
  unsure (1)..(371): unsure at all n locations
acgtagtctctgtggtagatatgaatcaatataaatttctttgcatcttatatctctatctctatgngnttaattaccatggagtttgaatttgattttgttgtgaaaagaaacatttttacaaaaattgttattatcatctgataacgtctgtttatgaaaatcgttatatgctttcaaagctatatcaaacgatagctttgtctttcaaaaaaaggtttagaaaatttctaaaatcttaatttgcttttgattgaccaagtttatgtgctctttaatcaagcctcaataagtaggaaacatacttgtctttaacgtataactttttttaggtctgtacttatagccataatgaattgaatattctaact

SEQ ID NO: 220388 - DNA, 375 bp, Glycine max
tccgaatggtaccggaccttacagaatacgtaatcatcccttttttggcttttggaatgttacgaaacctcatggattgtgtaacaatgcttcctttttatttccggcatgttagggaacttcacggttcgtgcaacaatgctttcttttgacttctgacacgttatggaacttcacgtattgtgcaacaatgggtgccaagtacctcaaagcggtcaagcaaaggttgtatgccatcaaacaatggtccccggacgaaattagggtatgacaaacataaactaataatgttgtaaaggaagaaggagtttgcttgacaaacaaggaataatctgaagtgctttgaacatagccaagttaaagaagtgcaaaagc

SEQ ID NO: 220389 - DNA, 428 bp, Glycine max
cccctcttttgtaggaacttttcttccaactacttttggggtaatttctcttcctatctatttattattattacttttgcattatcctttcttatgcttaatattattatttgtgacatgatcacccatttgcatggtaatttttagggatagtgttgggaaactataatttctaatagaactggcaagggtatctaaataaagtcatcactagggatatgttgattttgtttagcctataatacatctctatttttaatgcaatttaactatttgctctttgcaaagggatttgggagaaaagatagagaaattaggttatttcactcgatggatcttggttagagtacattagtagatataagtgtaaattagaataattataaatagagaaaaatcatcaatattacattaagagtggctctggg

SEQ ID NO: 220390 - DNA, 456 bp, Glycine max
  unsure (1)..(456): unsure at all n locations
tcttagtttcagatgatgcagctgagnttgtagctacctcatgctctcctctaatgactataacatcatttctggcgctaaactgctgggagttggaagccatcttctcaattaaatttctggcttcagcaggagtcatgtctccaagggctccaccactggcagcatctatcatacttctctccatattactgagtccttcataaaaatattggagaagcaactgctctgaaatctgatggtgagggaaactgacacatagttttttaaatctctcccagtattcatacaggatctctccactgagttgtctaatacctgagatatccttcctgatggctatggtcttggaagcagggaaattnttttctaagaatactctcttcaagtcatcccagctcgtgatggaccttggagcaaggtaatacaattagtcctttgccactccttctaaag

SEQ ID NO: 220391 - DNA, 455 bp, Glycine max
  unsure (1)..(455): unsure at all n locations
tataagaacannaattccttaatcatttccaaatatgcattttaattangacgcatcaacaagaatcaagccaaggctattgtgcaagcaatcaatggggcaaaacacaccaaatgattataatgatggatggctcanattctcacaaaggtaaaatcatcactttcaaattgagctttcaaaactatcatgacatgtagagaagaatcaaggatttcaagtcacaaaatgtcaagaacttttattttcaaaacaattacccatttcttgaacatatcctataattcaaagaaaaacatgcaaagtcgtacgtgcacatgaaattgacccaaactattaaactgaaaatccgacgaaactaacaacattaacaaattaacacaactaacaaattaacaaaaccaacaaaactagcaaaaccaaagaacactccccccccacatacttaaacaaca

SEQ ID NO: 220392 - DNA, 439 bp, Glycine max
  unsure (1)..(439): unsure at all n locations
atgagtactcagatatctgatctagcttagtacctgagtaactntgtagaaaagcctcttaaacatgcaaaaaagtttaagtactcaagtattgagtctagccgagtacctaagtacatttgtcggatggacatcttaaacatgccaaaaagttgtgagtattcaggtattgaacttatttgagtacctgaatactttagcagaaaagggttatacttcaatctcttaaaggtgttaaaggaccgaatacccgtatagtatatttgattataaaaataaaaattgatgaattacttggattagatcactatgtctatttgttattggacatccaaacacatttataatctattagattaagtagatcaactatagtacacatttataatccattaaattaagtaggtcaaccaaaatttcttggttggatataagtcta

SEQ ID NO: 220393 - DNA, 396 bp, Glycine max
  unsure (1)..(396): unsure at all n locations
agttaaacattattcaagtatttatcctgagcgatgtatgacttcgagctttttttcttttttttttcaaattttcatccacattctcctttctaacaataatgatgggaaaagggtaaaaatagaggattgagatgagttgtcccatttatgtctctntttcgtttctaaatataattaaataccatatcattaataaaaaaaaatctctttaaataatattaataatacattttccaattattgattcttttgttgaagaagtgcaaactattaataaaaagaataaaagaatagtttatttgattccaaaaatgagaattttttttgacaaatgtgggaatgaacatccaaaaacgcggtgcaaatttcagagcgaattaaacaacaatacaa

SEQ ID NO: 220394 - DNA, 403 bp, Glycine max
  unsure (1)..(403): unsure at all n locations
ctatcgggagcagcttcaaacacaacacgtgaatcgcatttaccaagatatgaagaatacaaagccgaatattatgaacgctagatctacgggaacagccaccacagtgattaaaatcgtagatgccacaaaacagagtaacatctcccataataataattaaagagaaagagagattgaattatacaaaaattgatttgaaaataaagatattgaaaaaataataataattgaagaaaatgatttcaccaaccaatgcaattaagaatagcagcaaacatcacgcaactcgggtttatgaatagggcctagtacaaaacggttcgatctcgactgtccatgtgtatgatatttaatttaataataataatatattgtatatttttnttatgaagggagagag

SEQ ID NO: 220395 - DNA, 405 bp, Glycine max
  unsure (1)..(405): unsure at all n locations
catcatgttctatatgctcaagggtagaaattttgcattgttatgataataacatcgtaccctattattaatgcatttgttntatgaatccttcagctgtagaaggtgagaaaaaatggctttcattcaaggatgcatggataatgaccgaatggaattgttggaggaataaatgtgtatgtccaatatctattttattatgttattaattttaataaagaattattctttattttattatcatatttattattttattaaattattaatttgataagttcttccttataatctaacaatcaattttaaacatagtgacacatctttaatataaaatttgtagttgagattaatttgaaaatatatcccaattgcattaaataaaaattaatcaattatattaaa

SEQ ID NO: 220396 - DNA, 445 bp, Glycine max
  unsure (1)..(445): unsure at all n locations
tagttcatgctnnttgacatttagtctatcaacctaagttgctcatacatttaaaatgatggctggacatgcgtaaagctcattaatgattcaaaattataaccaacacatggaatagtcattatggcattttatcgaacagttggtgggcgcatgttaaagcatgtaaaaatgagggataaggggcaacatgacatgcaaatttacaacaaaatcaaggataggcctagagccatccatttcagcccttaaccaaagcattcagaccatggatttacacataatttatctctcaaatattgccaagaaaacaacaaataaagcaccaaataccacaaggaaaaagtaaaaatagatagagatgacacttactcgagtgggatgaatggaaagcaagaataattgagacaaatgcacaaaaagcatgaaatttggtgcaaaaatg

SEQ ID NO: 220397 - DNA, 430 bp, Glycine max
  unsure (1)..(430): unsure at all n locations
ttacattgagtgtcctcattgatatggtctacatttgaattttcatgaatttctaattgtcataacataagattcatggatatgatttacgcattatttctttttgtacattntaagccattggccaaaaagctatcccaatgtatattattttaccatttaaaagccctttgagccaaacacttgatattttgttggaacactaacctaggataaaagtttccaaccataccttatgttaggagagtgaaggtgttttgttggggattgctatcatttggtggataatgtgatgcaaatactctgtttctaaatgtgggtattaaggtaaattaaatatttaatagaaaataaaagaaaagaaagaatagaaaagaaggaaaagaanaagaaaaggaaaaaagttctttgtgaataaatagaacgtctg

SEQ ID NO: 220398 - DNA, 435 bp, Glycine max
  unsure (1)..(435): unsure at all n locations
ggcatttggaattgcgaaagccncactccatcattaggattagtacctgacatctcaaacaaacaaatcaaacgcaacaagacaattatagttgctgtttgaatacctcacccactcaagtgtatcacacaattatggcttttctctaatgaaacactcttgccttttaccactctaattccccttgagttcttaggcaattcaagagattatggccacaacaaagaacaattcaccaatatgtgtaaggtaaggctagagagacaaggaaaaggttaaccaagaaaaaggctaacaatgtttttaggcacaaatgaaggaaataaaattcagaatttaggaattcaagtaacaatccttcatgcaaccaatatattaccttaaagagatttttttaaagtcttcaacatgaccattcacccgattggttttttt

SEQ ID NO: 220399 - DNA, 391 bp, Glycine max
  unsure (1)..(391): unsure at all n locations
aatgcacccatatacaatcaaggcagctttgttacctatattatttacacgtacttccaaggtgtatttgttacttacatcacacacatctccttggctaaattcacatacatgcatactccaagcattntggggtaccaaaaattgcacatgtgcacatcttggtatttctaatacctatacatacacaaacttcatgatgaatcttgactatctacacaataaggtgctacatttcatgccctttttcaagtttttgctacctaaagccgcatgcaaattcaagcatattttcctttgctgactaaaattgtattcaaattatatatatatttttttggaatatgtttttttttcatacaacattcaacatatttatatatantttttt

SEQ ID NO: 220400 - DNA, 456 bp, Glycine max
  unsure (1)..(456): unsure at all n locations
ntagttatgattcagacctcaatcgacaattagtcgcatattcaacccaatgggttgaagtttgtggagatactatatggggcatcaaatgtcttaattatggtgattaccaatttaagggggaaaaaaatctaataacaatataatgccaaaagaaaaaatataaaaaaaataaaaaataacaaagaaaagaaagtaaaaaaaaaaaagaaaggaaaagataaaaaggaaaaaataataaataaatgttaaaagaaaaaataatgtaaaaagtataaaaaaacatgtatttataatagaaaacatatgagctattagattagttgcacatatttgttttaatgttgaaagttatatttttaaaattgaaagtgggatatattttttaaaattgaaagttaaaatgcctttnttagttaaatggttgactaattatatttaataatattttaattg

SEQ ID NO: 220401 - DNA, 454 bp, Glycine max
  unsure (1)..(454): unsure at all n locations
tnctcggggccattcctgcgaaggcaaacatttggaaagttagtttttaccaagaaatgctacccttaaaacaaaaatggcatacaaccccctccaataaatacaaacatcaatgtaaatntagagcaagcttatgcgcatacttcttcacgaacgttcacttgcacaagacattcttataactaagaaaaatgcacccatatacaatcaaggcaccttcgttacctagattatttacatgtacttccaaggtgtatttgttacctacatcacacacatttcctttgctaaattcacatacatgcatactctaagcactttggctatcaaaaattgcatacgtgcacatcttggtatttctaatacctatacatacacaaacttcatgatgaatcttgactatctacacaataaggtgctacatttcatgcttttttttttcaagtggttttac

SEQ ID NO: 220402 - DNA, 379 bp, Glycine max
  unsure (1)..(379): unsure at all n locations
ggtcttcgtcattggaagtgcggtagacaggctttgtggttgatttatggatggcctttgtggataactgggtggtgggtaaggaggaggtttgttattggctgagtaatgacattgttgggttggtgggaaacttggccgtataggaatggcagtcacagcatgggtttctccctctttctcaccctcttcatttgccccagttttctcagtcgtcctagtgggatgatcaaatttgcccttttttcagactcacatcgatcctttcactggcgaagaccaaatctgcaaagcttttgagggtgcgcagcccaccatcntttatagtggagtaccgataatgtgtctaccatcacgaatatcggcttcctttccatta

SEQ ID NO: 220403 - DNA, 206 bp, Glycine max
gaagaaagagggaggaaagaaaaggggaagaaagaagggagagagagaggaagaaaagaagaaaggaaggaaaaaagaaaagacaggggtggggaaaggaaaaggaagggaagaggggggggagggggagaaaagaaggaaggaaaaggaaggagaaaggcaaaggaaagggaagagaaagagaaagaaagaagaggggaaagaaa

SEQ ID NO: 220404 - DNA, 449 bp, Glycine max
  unsure (1)..(449): unsure at all n locations
taatgctgataaatatgagatggatacctttattatgcctagatatcattagccattgaatacggaatctttattgctaaatcacgaaagatctggagaccggttctgcatattatgttttaactagtgaactaactgggctaccagctgcgacataattgtttcagggctgttgctatacacactcatcacaattgattggtggtacacccagcaaactagtgccataagtggtccaaacaattttttttcaagaatatgtggcttaagtagggattgaacgttcacgatattagcaagcatgacgttctaaatagatcaataaataattaatgtcgtgtatatttaatatgcatataaatttaaataataaattntataataattaattttaatttaataattgactttnttttacaaattgttcaatttgtatcagttttacggaa

SEQ ID NO: 220405 - DNA, 446 bp, Glycine max
tatatgagtttgttgaaaattaccaacaacctcctttgaacgaaaattgcaacatcctcctccattgtttcccatgttatcactaccacctctatcattgaacgaaaattctgaaattccttctcatttcatttcctattagccactaccaccaccgctgccaccggtaacttataatgaatccccttcaactaaaaattctcaaagttttcaaacctttccttcaatgccacaaaacaccttcaccacgttccgtaagtctcccaatagttataatcgtgcacaaactccttcaaatgaagaagttgatacacaattttctacccaaattgggttagaaaatattacaacagaggaaagaggagggagatctacaaagaagaaaaaggacacacgagtattcttttcaattgaagaggagaaaattctcattagttcatgactta

SEQ ID NO: 220406 - DNA, 472 bp, Glycine max
  unsure (1)..(472): unsure at all n locations
ctattacgtgacctataaaactcagcttatgctgcnatattacaatagacctcctcatctctcattatcaaaatcaaccacagcagaacaattatgacctttccagcaacagatacaaccctggatggaggaatcaccctaacctcagatggtctagccctcagcaacaacagcagcctgctccttccttccaaaatgctgctggcccaagcagaccatacattcctccaccaatccaacaacagcaacaaccccagaaacaaccaacagttgaggcccctccacaaccttccctcgaagaacttgtgaggcaaatgactatgcagaacatgcagtttcagcaagagaccagagcctccattcagagcttaaccaatcagatgggacaattggctacccaattgaatcaacaacagtcccagaattctgacaagctgccttctcaagctgtccaaaatcccaaaaatgtcag

SEQ ID NO: 220407 - DNA, 448 bp, Glycine max
  unsure (1)..(448): unsure at all n locations
ntggctngcaaatcagaaactctgggaggagggacactctttgccaaaagaatcctgctatgcaaataacttttgcagtcttcaaggccttctctgtattcctctttcggtattgcaataacaaccacataacccttcaaagcttataaatatgtttacatatggcaaatatatataacagatcactatacatatatagaataaaagtaatacacaagcaagatactcaaactcatgaatttccaaattggttcctaaagtatacttaagcaaatacatatattttatatatgaaattgaaatctaaaacaaaatcactacatatgtatccttatatatatatatatatatatatatatatatatatatataacacattagaatcttatatacatataatcatataattntatatatggaaaacaaatatacatatatcactaagcat

SEQ ID NO: 220408 - DNA, 445 bp, Glycine max
ggtaaggcgtaattgtttaagtccttattatagtccttctatgggacctatctcgatgggtcgatccacaaccccacaagcattgagcttgtaaggcgtaagtgcttaagtgtattgatagagttgaacctatgaatttatcttggttagatggtacaatttcctaccaagaacttagcatgtaggagtaagtgcttaagtactgtcataagctaggtctcaaagacttacctcggtcaaataatccatagtacaacaagtacttatctagataggcataagtgcttaagctttcttgatcaattgttccttagtaacatgagatttactttgatgagtttgacaccctaccccaacatgcatataaatgaaaaaaaaacataaaatgcggaatctaattaaagtcaatttcatttcaataaaatggtagtaaatccacatggat

SEQ ID NO: 220409 - DNA, 369 bp, Glycine max
ttaaactaatgtattacagattaatggtgctttattaaacattcttggtcacctggtggatgggtttggtactatgtaagtaagcttaatccagagagaatatgcctcgtaaaattgcgaaccacagattctgtcatagctccacaatgttcacgcaaaaatttacttattgatcccgggtagacatactccatatatatgtacaaatgattgccaacctgaaatacatatgcttaaaaatgttgtcatctattttactatcacaaatatccttaatttttcattaggttgtatcgattatacttggaacaagaacttaacaaccaacaattaactcactgtttcacttccataatactgcactatgtt

SEQ ID NO: 220410 - DNA, 440 bp, Glycine max
  unsure (1)..(440): unsure at all n locations
ttctcctctttggtggagtctatatgtatgattaatatgtctcaccatgctggggattttttgaggctttactaatgatttcctggtcttaattatagataattaaattgttaagacctttattatagtgaatttcaatgactatatagagagtgtcaagtgagaattcttcactattttcataaataaaaataatgaatatagagtactcgatgatatttgagggggacaattagattcacttacctttatttagtttaggaagtcttcataaattctacttaggatatcgatctccattgtacaagtggaattccttttgctctaacacacganaaagattagaagttctgacaaagatgaagaatgtgactatgagtgagatgtcaaggtggagaacattctcatatatatagataaaanaaaaaagaagtttcata

SEQ ID NO: 220411 - DNA, 433 bp, Glycine max
  unsure (1)..(433): unsure at all n locations
ctcagcttctcatccactgatgctagnggggattaagcctgatattctgttacctgacacatctatatattgaagatttgttgagtgagtgattccttgtggaatggccccagttgaaaatntagtgacatggtcagtcttgctagttttcttagtttggcaatggtttctgggattggaccccgaaatttgttgttgttgaggctgagtactgatagctctgtgaggttccctatggctggtgttaagaaaccttcacgaccaatgccatcgagatcaacttcagttactctactagaggagttatctaagggcaagttgcacaatattcctaagaattgtgagcctgtgatttcacatggatccactgtgaagtcccagctattgagatatgaagatggggtgactgagttgggatcaatggcacgtttta

SEQ ID NO: 220412 - DNA, 434 bp, Glycine max
  unsure (1)..(434): unsure at all n locations
actggcagtggggatgattctgcaccatttttacctgatcgagagccccaaaaggcacctaatgggcatgctggtatgcatgttaaggatatactgcctcgaggccttatcaactctgggaatctatgttttcttaatgcaaccatgcaggctctcttgtcatgctcacccttcgttcatcttttacagcaattaagaacttgcaaccttcctaaggttagtttttctgctgctgcatttcaactattaactaatactgccatctactggttttagcttaacttatatatggcttaataacattaaaggaataaagacctanaagctgtattatgcattcagatttcccttgtgctagaaaagtattgaactgatattattgcatgtttattattctatattatattangttggatatcccacattgacggcat

SEQ ID NO: 220413 - DNA, 456 bp, Glycine max
tattaccatcccacccacaattctccacatctatcagcttttcatgtcaaatctggattagcattattgactcaaatgcaggtattttgaatcctagcccattatgaatccatctgtcattgtagactttgatatcccttccatttcccacccttcaggagcttcctgtttctataatgcatttcgtagcatccatgcttctccaagccaaactcggttggtggccttttagtgcaataaaaggtgtacctcggcggaagtaattagctttgtacacccttgtcatttgaaatgagtctccaccattgtttggctaagaggcccacattgaaagctttaacgtaccaaaagcctaaagcacctttttttactatgactaagtttgctccaactcacccaatggattttcagcctttcaacatcaccacccagtaaaatatggccgtaagtctctta

SEQ ID NO: 220414 - DNA, 442 bp, Glycine max
  unsure (1)..(442): unsure at all n locations
tatgcgcatannnccttacagacgatctcttgttattttattctattaaccgaanaaaatgcacccatatacaatcnatgcagcttcgttacctagaatatttacacgtacttccaaggtgtatttgttacttacatcacacacatctccttggctaaattcacatacatgcatactcaaagcattntgggggaccaaaaattgcacatgtgcacatcttggtatttctaatacctatacatacacaaacctcatgatgaatcttgactatctacacaataatgtgctacatttcatgctcttttcaagtttttgctacctaaggccgcatgcaaattcaagtatattttccttcgctggctaaaattgtattcaaattaaaaggtatacatttttctggtaatgtatcttctctacatagcatgcaacatatttatgtata

SEQ ID NO: 220415 - DNA, 442 bp, Glycine max
tctccatgactctggaaatggtcatgtaactactacttattgactggacaattctatttaaaatcaatattgtcaacgctcatccacacacattctatatgacatcacaaaacaatgtttgcttggtactactagaaagatattatgccttctgaaaaactattgggataaagctaacactatttttcaatgttgctggcagctcatatctttgtctgagaagaaatggtggcagtagattcatctatttactgtgatgagttggctggatgggaagagactcaaagcacagtccaatgcgctattgtttccggaggtggcgctttttaaggatgctttacgttgatggagcgtgtgttaatagtaaaatattactattattactataactataatgtatatcaacttatctttcatccttagcttacaaatttctagcatt

SEQ ID NO: 220416 - DNA, 446 bp, Glycine max
  unsure (1)..(446): unsure at all n locations
tgcacactcaacaatctcataaacaagatggactgcccagtancctaatcttacaagctagaaacaacacaatgacgacacagcggcaacttgcaatcattcatagccaaaataagcacatatgcaaatcagaacaagagagtctcattgatgtttcacagaaatataataacactgtgaacttagagtctacttcaaacttagaatctgcttataatctggaaaggaaaattaggcttaaatatgtttttagtccctcaaatttaggggtctgacttttttagtcccttaaattaaaatttgcatttttcttagtccctcacattcacgaaatgttttttttagtccttactgtaataaaaaaacccgccacaaattgtattgtgcatcaaaaccgccaaaaattattcagagatgactgaagaaatattttggaaattctgaga

SEQ ID NO: 220417 - DNA, 455 bp, Glycine max
  unsure (1)..(455): unsure at all n locations
tgcggaagcatgttgtcaacactcatggtagcgtctctattaaggtacgtcgnttgttctcaactagtaatcctcttgtttatcgtttaagaatggcacgtgagataaaaggcatcaagaacaggttagagaaggttgcagctgataggcacatgtttggccttcaaattaatgacatggatactcgtgtcgtgcataggagggaaatgactcattcccatgtaaatgcctcaaatgtcataggaagggaagatgataaaaagaaaataatagagcttttgctgcaagatggtaatgacacgagtccctctgttatttctatcgagggattcggaggcatgggaaagaccacgcttgcaaagttggtgttcaatgacttgatcattgatgaatgtttcccgttgaagatgtgggtgtgtgtctctaatgatnttgaacttangaacgtgcttatt

SEQ ID NO: 220418 - DNA, 409 bp, Glycine max
tgtgaagggtgaaacttcctgcttttattgttgaccacagagtggtacctggagatatgttgcgggggtcaagagaccttggggacgtcaggtggggtgctattgcccaaaaccaagcttgaccaatcccgacccaacctgggcatagtcggtcagtgagaacctgtgatgtacctaagcaggcgagctcctggcagtcaacagataaaaggaaaacaagaccacaaagcaaggaggcttgtggtggctggccagctgtgaaacttgattgatatgtgagatatggtctctggtaatcgattaccaagggtgggtaatcgattacaaggcttaaaaatgaagacagggggctaagatggtctctggtaatcgattaccaggggatgtaatcgattaccaggcttgaaaa

SEQ ID NO: 220419 - DNA, 443 bp, Glycine max
tgccgcccagctcgcccaggcgagcaaggttgcttccttcagaagcaacagccttctggaggaatcttctggagggcccaagtgggcctggttgctatttgcacccccctttttactaaatgcacaccccttctatttttttggtgattctttttccgtaatgttacgaaactttacgaatttcgtaacgatacttatttttcttccgcaaggttacgaatccttacggattatgtatttactcgtttttagctttcgaagaagttatggaaacttacggattgcgcaaaaacacctcttttcgacttccgccacattacggaatttcacggatcgcgcaagcctgcttcctttagatttctgagacgtctcgggacttcatttattgtgcaacaaaggacgccaagtatctcaaagcggctaaccaaaggttgcatgtcatc

SEQ ID NO: 220420 - DNA, 280 bp, Glycine max
  unsure (1)..(280): unsure at all n locations
cactcaacattgggaaatggtttggtccttaattgtcaaattaattatgcaattttatcatttgggcctactagactaattttgtgtttttaatttaatttcaggagaattataagcaattgggcttgaatccagaattgggcttagacttgaagagagcagacaattttattttatcaaatcttatcttatccagattntatctcatctagatattatttcatccaatcttatcttttcttatctagattttatttcatccaatcttatcttatcttgt

SEQ ID NO: 220421 - DNA, 291 bp, Glycine max
  unsure (1)..(291): unsure at all n locations
tgagccttggagagaatgcttcaatggaggaaaagaaagagggagagaaagagagaggggggagcacgaaattgaaggaagaaaaagggagagaagttgaactttaagttgtgtctcacaagactctcattcatcaaggttacaacaagtgttacacatgtttctatttatagactangtagcttccttgagaagctttcttgagaaaacttccttgagaagcttctttgagaaaacttccttgacaagctagagcttagctacacacacccctctaataactaagctcac

SEQ ID NO: 220422 - DNA, 248 bp, Glycine max
  unsure (1)..(248): unsure at all n locations
attcatcgntcgttcttcggtttcttcagtcttcaacgggtaagtacctcaaaccaagcttttcaattcattctatgtaccccgggtggtccacattttgtttcatgtatttttattcctcgtttcatttgctttttatacccctttttgatgtgcttaagccatttatntaagtcatttctcgcttaatctaaaaataaaataaatttccactgatcgtttgaattgtatcatcccgtaattttggg

SEQ ID NO: 220423 - DNA, 319 bp, Glycine max
  unsure (1)..(319): unsure at all n locations
ggatggtccgttcttccggagcgacgcgtccagctcanggacgacgagtatactgattttcangaggaaatagggcgccggcggtgggcaccactggttactcctatggccaagtttgatccagaaatagtccttgaattttatgccaatgcttggccaacagaggagggcgtgcgtgacatgagatcctgggttaggggtcagtggatcccgttcgatgccgacgctatcagccagctcctgngatatccgatggtgttggaagagggccaggaatgcgagtatggccagaggaggaaccggtctgatgggttcgatg

SEQ ID NO: 220424 - DNA, 285 bp, Glycine max
tggaaaccagtttcagttggttattgctaatcgcttctttcagcgctgcgcctaaaaccaaacgctcttttaccatttcgttcatcgccgggctgaaaaactgccagccgttaccgccattcttgcgaatataatccattgcattgtgagcagtggagagcaagtaatcgcggtttttacccaggtcgtaactgatgccaatactcaaggtaagcgggaagggtttatcgtcaatcattatcggcttgctgaccacattccgtagctcatcggcgatttgggtaa

SEQ ID NO: 220425 - DNA, 446 bp, Glycine max
  unsure (1)..(446): unsure at all n locations
tctganaacgaaacgttacgtaccgcagaacgtattcgcagtctggtggagaaaaccaaactgaaagccgcaaacggcgaagatattgccctctcactttccatcggtgccgccatgtttaatggtcatcctgactatgagcgcctcattcaaatagccgatgaagctctgtatatcgccaaaagacgaggtagaaaccgtgttgaactctggaaagccagtctttagatgcgccaggatgcagaggtaatcatgaagctaaccgatgcggataatgccgccgatggcatttttttccccgcccttgagcaaaatatgatgggtgcggtgttaattaacgaaaatgatgaagtgatgtttttcaaccccgccgcagagaagctctggggatacaaacgtgaagaagtcattggcaataacattgatatgctgattccgcgggattt

SEQ ID NO: 220426 - DNA, 427 bp, Glycine max
tatgctaaaaattattttttctacttactctggatataataaggatattaaagtaatttaatatggtagagaaaatatttatttattttactcacagctaaccattaaattattcatttttaatttgtagcaagttttacttgcaagtatagtttttttttttgagcatccctttattcaagagtcttgtctgttgctacttcactgactcaacaaaaaaaaaagtatttcttaatacttcaagcgataggtgataagcttttcgtataaagagtggaggtatgatgcaaaataaaacaattaaatcaatgtgaatgggagttccttgcataactttgggtttggttgagtttcatagttctatagagagttactaatattttgtagtgaaaaattaagaattattttacattacaaaatatataat

SEQ ID NO: 220427 - DNA, 452 bp, Glycine max
  unsure (1)..(452): unsure at all n locations
ngaagaatgtacatacaactggcagtggggatgattctgcaccatagttacctgatcgagagccccaaaaggcacctaatgggcatgctgttatgcatgttaaggatatactgcctcgaggccttatcaactctgggaatctatgttttcttaatgcaaccatgcaggctctcttgtcatgctcacccttcgttcatcttttacagcaattaagaacttgcaaccttcctaaggttagtttttctgctgctgcatttcaactattaactaatactgccatctactggttttagcttaacttatatatggcttaataacattaaaggaataaagacctaaaagctgtattatgcattcagatttcccttgtgctagaaaagtattgaactgatattattgcatgtttattattctatattatattagggtggatatcccacattgacggcatt

SEQ ID NO: 220428 - DNA, 364 bp, Glycine max
aattttcttcatatgaccattactggatgctaatggcttacggatctcacaaagcccttcattagtaccaatactgccattactgtttgatcttgccgatgacaaatctgaaaagctttggctcattcttgaattttggcccagacattcctcaaaataaacattaacttgggtatacatggtgataaacaagctcacctgtttattcatgaaagctttactaagctgtctctatagagaaataaattttccatcgatgagaattattaacaaacttgatctatattcaccaattattaggattcacatacacttcaacataccaagtcaaactgataattaaaaaaggaaaaacattttaaga

SEQ ID NO: 220429 - DNA, 376 bp, Glycine max
accagggcaacttgctgaaaacatcacagatgagagaaaactattataacggaatctaaatcgtgaccaagcatcttcgtaatcgctccactctagcatcgaacatgaaagaatgaatattagttaaaacatatatcaaactaacaccggacctgcctagagatcttggcacatacaccgggagtgctccctttggcaatggtgttctcgaagacgcactcctgcgcctgcgctagcatgagcatttacatcattccggggcactccacggacatatttatagtggtggaactcccaacagacgccttcatggaggcgttagaccggaggtacgcgaaggatccggcactccctatgaatgcgtgggatgcctgac

SEQ ID NO: 220430 - DNA, 424 bp, Glycine max
  unsure (1)..(424): unsure at all n locations
gctggtacctccttcttcactacattttaaattaccgggnngagtcttctcttgggctgtcttactggtttaaccccatcctctaaatntatccgatgcatacatgtggatgggctaataccaggaatgtccgccaggttctagcctatagccttcttatgcttcttgagaactaataatagcttctcctcttgctcatcagcgagggaggcagatatgattattggaaaacttttgctctcatctaagtaagcatattttaaatttgatggcagaggcttcaattctagtgtgggaggttggataatggtagaaagagatggtttctcagcctgtacctcataaagaaagtcaaaggtatgtgtacttcctaaaacatggttagttctatctgactctagaaaatcaatggcagacgcgtact

SEQ ID NO: 220431 - DNA, 444 bp, Glycine max
  unsure (1)..(444): unsure at all n locations
tctagccaaatggacttaccttgaattaattcctttgatattcctnttgagccttgtttccctttccttgttttgaagctcactacaagccttaagtgaaaaaccatgatattaccatatccttaaggaattttggagctttggaattgttttgggaataagtgtggggggtttttgtttcattggacaacttgtttttttggctatgcttcatgatgtattttggtccatacttgatgtacattgtatattggttaaatgttggacatgctgaatgaaatgttgtttctcaaagactaaagattaaaaaaaaaaaaattcgaaaaaaaaaattcgaaaaaagaaaaagaaaagcaataaagttgagtgaataagatcttaaatggcacaagaatgatgaaactcttggttctactcttcatgtntaatttttatctttacttc

SEQ ID NO: 220432 - DNA, 236 bp, Glycine max
tctatcaaacaatgtgccatcttactgaggagctatcctaaccacaacggaaggaactgaccgagggctggcaaaaacggattttaagggaacataatccttgcataccctgaatgataacagacgaacgacagtcaaaaaaaccaggatggcagcaactagacaaaacataaaatacgcaggacgctttaatggcccacgagggcgactcacagcacaccggacaacaaaacaca

SEQ ID NO: 220433 - DNA, 447 bp, Glycine max
  unsure (1)..(447): unsure at all n locations
tgaagagaatgaaaagggaggataagagaacctgagattcttcatggaaagaaatgaaggagtttatgaggaagacattcttaccaccttcttatgagagaaatgcttatggctagctacaaaacctcacacaaggtagcaagagtcttgaaaaataccataaagcgatgataatgactatgaggagagccaatttacaagagcctaaaactttcatggcaaggttcctacgtgggcataatagagacattcaaagcatttggaggatatgatgcatcaagccaagaaagtggagaaacaacttgagatgaagcattcctacaagaagacctatcactatgactcttctagtggtaaggacaagtctgagaaggagggatcttccccacctaagcagcaaggttcanaatttccaagtggtaaacatgttcctaaccctagcacttc

SEQ ID NO: 220434 - DNA, 363 bp, Glycine max
tctaaagcgcccgagagctataggtgtaatggctcaatgtggatgaacaacgtcgggtccaatgaaggatatggccatatagttcggggagacgaagcacaatccatatctcacttcaatagcaccaatcttagcttgagtgatcacatcctgcattaagcatgaatgagaagagaaaataagctgacgactattggtagagacaagatcatatatggaactcatattataggaaaaggaagggacctataacactgttgacgggatgagggcatctgaaatgcatatgtcaccagagtaagcctcagcgacaagaaggccgttcgtgagtctaactacagtaagatgatccagctgagtgaa

SEQ ID NO: 220435 - DNA, 444 bp, Glycine max
  unsure (1)..(444): unsure at all n locations
agcttcatgaagaagaancaagttgattctttgttgcnnntgttganaacaaagaggatgacaaaaagcccaagataatgatttcaagattgagtcaacaagattcaagaatcaagagaattttgatttcaagaagacttcacaagggaagtattgaaaagatttttcaaaaaacaaacatagcatagttttgtttttcaaaagagtttttctcaaaattttctaatttactagagtttttactctctggtaatcgattaccaattacctgtaattgattaccagtagcaaagtttgatttcaaaagcttttaattgaatttacaacgttccaattgatttcaaaatggtgtaatcaattacaagatattagtaatcaattaccaatgtatctgaacgttcaaattgaaattcaattgtgaagagtcacgtcttttcataaaat

SEQ ID NO: 220436 - DNA, 357 bp, Glycine max
  unsure (1)..(357): unsure at all n locations
actatgctcttgtgtggtttatctangctacaaaggagagagcaagagatgaagagccactggttgatacatggaccgagatgaaanagatcatgaggaagcggtttgtgccggctaattactctatggacttgaaattcaagctccaaaaactaacccaaggcaacaagggggttgaggagtatntcaaagaaatggatgtgctcatgattcatgccaatattgaagaagatgaggaggtaactatggctcgattcttaatggttggactaatgatatccgcgatattgttgagctgcatgaggttgttgaaatggatgatttgcttccaaagcaatctcagtggagcaacaatta

SEQ ID NO: 220437 - DNA, 426 bp, Glycine max
  unsure (1)..(426): unsure at all n locations
agcttcttgcgtagccgctcttgttgcttattatattcaaaaaacaaatccctcttattactagctattttgaattctttagttcctgaatgtacaaccttcaaattggtgctcgttcccctctttattttctgcaaaaaataaaatcaatatcaaagaaaacagagaattgtcatggttattattactcgaaccagaaggaataacatctaaacaagtcattttattcttagaatgtgaaaactctgcatatttatggagaacatggggtatggaggcacgtaagtatgtgaataccacaagtcattttctccaattcaagggattgattaattgctctaggaaaaaaacatacatctggtatattgtttggtttgcagctgtttggagcatttggaagaacagnaaatttttggtgctcacagc

SEQ ID NO: 220438 - DNA, 431 bp, Glycine max
  unsure (1)..(431): unsure at all n locations
taatcggtggaaacttctaaagaatcatgttattttcttttataacaagacatgtgaggagatacatggagaanaatgaagaaacatctatggaagagaaggtaaagaaaaaaaattaatggaggtttaaggagcaccaacttgaagctcttgtgctctgattaccacttgatggaagcttgcttgtggggcttctatggaggctggatctttgagcttcaatgaggtcctttaatggtgactttccaccatggagatgcagtggaagaaaaaggagaagaggtgagaggaggcgccatccactatggaataagccatagaagaaggagcttcaccaccaagatgagccttggataaaaaacttggagaggatgcttcaatggaggaaaagaaagatggggagaaagagagagggggggagcacgacattg

SEQ ID NO: 220439 - DNA, 269 bp, Glycine max
aataatcaaggaaaaaagagaattaatttctcattctctttaattatgctcatttgagactaaaataagagattaataaatgaacttatcactctagaatagtaaaagaaaaataataaggacaatgaagctaagcctaaggagtagttgaaagaaaaaaaaaaaccagggacccaaggccctcccaactaccctcctcaaaaaaacaaccaccctatgtgacgcaccaaaaaaaagacctttgtctctctcctccccatgaccaagac

SEQ ID NO: 220440 - DNA, 428 bp, Glycine max
  unsure (1)..(428): unsure at all n locations
ttctcattgctggaaaaacttctttagtatagtgaacaacataacaattnttaagatacaattgaacaccataagatgtcacatcattgagaaaaatagtttgggcaatgtgaaaattatatgtcggagtatactagggatatgctcgctctgtaaaaaatttgtaaaattcggagttgatttggtactttaataaaatccaaagcagtgaattttgacatttttcacagccactgtttttaatactaaattatgaaatgtgggtgtggggatttttcttgatgaaatgtatgttctgaggagtgttactgtgaagttcgataaaatttgaagttagtttgctatcttaaagaatttgaggtatagtccgaattcagcatgtacgtaaaaagggattttaatttgattaattcccttactagtgatag

SEQ ID NO: 220441 - DNA, 381 bp, Glycine max
  unsure (1)..(381): unsure at all n locations
atcttnaggaacctttactcgccaagacactgaaaaaacttatctttttcttcttggacaaagtatggcaggctgggggcaaataaattttcttcccattagaccttggatgcaactgtgatcgtatacccatatcaccttgatcttgacgggtattcaagccatcattcgtcttgccttgaatgttaaggagcgtcccaatcacactgtcacaaacatttttctccacatgcataacatcaatacaatgtctaacgtcaagatcacaccagtacgaaagatcaaagaaaatggacctcttcttccatatgcaactctgacttgtatccttcttttgggtcttcccaaatacagtattcaggtgttgaactcgctgatata

SEQ ID NO: 220442 - DNA, 378 bp, Glycine max
catgctgatcactttgtccacgtctagctagtttatcgacatctaacattacctgtatatcgagtgtcacgtaatcatctttcgctagcatgaccggatccttaatgccagagtgatgattcatcacacatagccttgctagcatcacaacgaggtcgataatgatggaaccgttaataaacaacaagccactactattagtgcagttacccttagcgaggatgaaggacacctttgcaatgttaataacaccatcattaactctacctgaagattccatagcgtctagcatgatgaggaaaatgacaattacttcgacttttggacatgaccttatatttgtcgataaatactctctattatctgacatctttggcc

SEQ ID NO: 220443 - DNA, 374 bp, Glycine max
tttcttgaaaattatattaacctgaaacataattatctctctttgagctcaatttaattgaaaactcatttctcctttggttgaacaatacaaaatgcatttgaaattgttggaaaatatttcgattataatttaaaatttaaaataaaaatatattttcttttcagaatcagatttttaaagtatgatattcacacactatatcttttaactttgttagttcctaaattttaggaaatatattgattgaccaagtattgttttgttggtgcacttcattatatttgggctgcatatttggtgcctagtggctatctttgcttataaatagctccctcttgataaaataaaataaaaggcacatgagacagtac

SEQ ID NO: 220444 - DNA, 367 bp, Glycine max
aaacagagaaaagggtaaaggcattgttatacagaacttagaaggtaatatggtaaatgattgttccaacttctaacaaaaccaaattttatgcgagaatgcaagaaattggtggaatggaataaaataattattctcttgtttagatattgcgtgaaagagtggaaagttatgagcaaaaccaaaaggcagaaaaaacttcccatctcatactccaaattggagaaagagaaaacggcgttttggatgaaatggaatagaaagcattctatgatggaacttagtaatattccattccattcatttctatcactcccaacataacataatatatttctgtaatatcagacttataatgcatgcgata

SEQ ID NO: 220445 - DNA, 453 bp, Glycine max
tctttataattactaatacaagaagaaaataagaaacaattatttattaagattcttcaataaactaaaattagcttttcggataagctaaaaattatttagcttctccaaaatgcagattttaatttgcgtataacctaattttagcttatgggggaagcttattttatttttctttcttttcttatattactctattagtacatatagaaaagtttatccaaatagggtttggatcaagttataataaaatcaagtgtggctacagtacaatgataaaaatacctggatgatgaataggaaaaggcatgcaaggcctatccatgaatgcaggcagtagaaattgtcaatgcccttgtcaatgtgaaacatccgagcagcccaaacaccaatcaagctcaaaatgagagcaacaaactgtaacgcaagatgaattgcttttttgaagttttt

SEQ ID NO: 220446 - DNA, 470 bp, Glycine max
  unsure (1)..(470): unsure at all n locations
aggacctatgaatctcagcttgaactgccctagtttcctgaaatatgtatgtttcttgtcctatatttacattntgctttatatgcaggtagatccattggagaagttggagcctgaagttgcagacattcttgtagatattgcagaaaattttctagagtctgtgagtattttcattttgttttattttgttcactgggctgatgggattgttcactttttgcatgtcgataaaatttatcttttattttgtgttgatatatatgttttttgtaatcaaagttgtttttactatctcatttattattttgaaccatgagctactgtatttaatgatttctaagcataatattttggttttcaatatacctccctaatttgtgtaatgcctttttgttttgtttattattatgcttttttgtttagcgtgtcttctaagttggatctgaaagtagagaacatatattgag

SEQ ID NO: 220447 - DNA, 325 bp, Glycine max
ctcttacgctggcaatcatgttatctgagaccccttgttaacgagcctagaggatacactgccacgcctgttatgacaaaatgtgatgctctacttgtccagacagatccactctttcttgtgggcactccagcacagcatatatctctggtcactattacccgctggggataaacccttaatccaccttactgacaggggttaattgtatcccctacaagggtggctgtatctactacctagatagcttccttaattataatgattgagttcaatttcataccttcttcactatgagacgtgcaatgtatggataggcatacac

SEQ ID NO: 220448 - DNA, 437 bp, Glycine max
  unsure (1)..(437): unsure at all n locations
ttacttgatacctgtgtggttatgcaatttaaaattctggtataacaacttagcaaaatatcttgtatgaaatggctataaaaaggggtaatgatgaaataaaaagatatgagaattattccctgcaatttagcttttcttttattctagttagctatcaactgttccgaccttagcttttcttttattctagttatctatcaatagactaataggaaagaacaaaatactaaacatttatttaattaaatctaataaaaaatttacttcaatcacattatttaacaaaatacttgcaaggtctgtaacttcatgaactaaagagcaaatacaaacgaacaaaatacaaatacatccagcaacatcaaatgactcanatccattacttcaaaatacaaatacccaaaggaactgcaacacaacatattttaattatt

SEQ ID NO: 220449 - DNA, 445 bp, Glycine max
  unsure (1)..(445): unsure at all n locations
nttcctcttatcttctcgagcaatagcctctatttttctttatctcgatagctactgcacctaatgtgcagaattgtgcgtggtgattctctagttcaagcttgatttgtgacaacatcaacatcgattacagagtctttggcatccgaaggcggttcaacttttgaagaagaggaagggtccaacaacttcttggcctttctaaaccaactttcggaaggagtggtcaataacatggagagggtagcgaatatagatgttgctcaggtggagaaggttttgaggcctccttttcttgcaaccgaaaggcgcaagtcgggttctccctagcatttggttaaagtggtcaaaagaagatgcatgatcatgctaacggagaagaaaacgcctcctcccattaccttttcatacataggtggacagcgcgggcacatggttacttttt

SEQ ID NO: 220450 - DNA, 341 bp, Glycine max
  unsure (1)..(341): unsure at all n locations
ttcaatccctacaaaatgtggaatcaacaacaaaaatatgtttacatcagaaaactttgaagaacctttcttaggggtaatcaaacttttaaagaanaaatctatcttcataaaaaccatggcttatcagttcttaataaagttgttgtaatactgaagccccttgggattcacttgccctcttccatctggtaatacatgataacaagatggtcagaacagtatgaaaataacagcttgatataagcaactatattcagttggagtccaagattcattgcgaataaatcaaaccaagtgtgtgtgtccaatacaagttactcttgacattaatttaagaa

SEQ ID NO: 220451 - DNA, 445 bp, Glycine max
  unsure (1)..(445): unsure at all n locations
tctggtgactgggaagcacgttattctgttgttttccatatcggntccttcgccaagtatgtgtatatgtgtattatattcgttgttctggttgttgtttgtattttgttttgtgcagaagaaaaaagaagaagtagagatgagagtcgtcatcacgaaaagggaaagacggacgaaatcagtgtcctatctttgctttcctcttatctccgatgagaggtaagtaaagaggggcaactgtcataccctaatttcgtccggggattattacttgatgacatgcaacctttggttagccgctttgagatacttgacgtcctttgttgcacaataaatgaagtcttgagacgtctcagaaatctaaaggaagcaagcttgcgcgatccgtgaaattccgtaatgtggcggaagtcgaanagaggtgtttttgcgcaatccgtaagtt

SEQ ID NO: 220452 - DNA, 446 bp, Glycine max
  unsure (1)..(446): unsure at all n locations
tanacaaaattaagtgggaagaacttgaccctnggaatgatgaatttgcctctaattgaagtcatattctgatgcatatatatgcatcaaatgatgaaattcgaagaagaaacaaaacaattgtgtatatggtgcccaaaaacgtcgagcttctaagcttctatgctaaagtgtcgagcttctaagttttattaacttgtcactagtgaaggtacttaatataggcattatgttaacttgcttgttatgaattttcacatattgttctcaactctttgagatctaagacctataaatcccatgaacaagtaaaaaagttaaaggcacttatctatcatgccattntatatcatggctttcgtatttacctgtgtctcacttttttttcagtgcttcataatgcatgataaaagatctaaagttgtgagataggtattagtttcttt

SEQ ID NO: 220453 - DNA, 389 bp, Glycine max
aatttaggggattttcaaggtttgccacccgacaacgagaatggggtaattttggagcaaactctcatctcaaacaagtctataaaattaatctaaacttgctcaaactggttttacgacgaaaactccaccgaatcaaaatttgactcctcaacacccaatttaccctagaaatggctcttgctttcacttttgtcactcattttcctcatttgctcagcccatgctttcccacaagccctaaatggcactttaaactaggattaactcactttaaactccaatttacactaaccccaaatttagcttctctaaccctcaaaatctcacacttttttacctacaacattgtcattctcacatttaaccctaagttaacttcccccttc

SEQ ID NO: 220454 - DNA, 450 bp, Glycine max
  unsure (1)..(450): unsure at all n locations
cgaatctggtagtaaatatttgttctatagtttataatttctaataatatattacttatattaattatgttacgtgtttgttatgtttgtttttgttctacacgttggtttccaacatttagtaagtgtggtactttgagttttttgcattgttacataagggggtctatgcctatatatatctctctcctcctttagccacaaacacaagcagaaaaaacaattttcattttcctctaaatttaaaattagaatatattttctttatcaattatgttttttaaagataaaatgtttttagaattagtttctgtgaaaaactgcaagcatcccattacttatcattntgttacttgagtgatttggtactcttggcaaaatcataacatatatccacaataacaaatttaaccaataataaaaaggttatcaaattattcatattttggt

SEQ ID NO: 220455 - DNA, 373 bp, Glycine max
  unsure (1)..(373): unsure at all n locations
tggggcccnctgagagcgaggatgcgtaatcctctaacacgcgagggcgtgtatgccctctgaagttcaagacgtgtcgccttttgaaggcgagggagtgtagtcctatgatggcaaggacgtgcaatcctctaaaggtgagggcatgtccccctttgaaaatggggaacatgtagtcctctgatggcgaggacgtgtagtcctctaaaggtgaggacgtgtattcctacaaaggtgaaggcacatgaccctttgacggcgaggacgtgtagtcctctgaagttgaaggtacatgaccctttgaaggcgaggacgtgtattcctctgaaggtgaaggtaactagtacccaaggtgagggcgtgtagccctctc

SEQ ID NO: 220456 - DNA, 445 bp, Glycine max
tgtaaggcgtaattgtttaagtccttattatagttcttctatgggacctatctcgatgggtcgatccacaaccccacaagcattgagcttgtaaggcgtaagtgcttaagtgtattgatagagttgaacctatgaatttatcttggttagatggtacaatttcctaccaagaacttagcatgtaggagtaagtgcttaagtactgtcataagctaggtctcaaagacttacctcggtcaaataatccatagtacaacaagtacttatctagataggcataagtgcttaagctttcttgatcaattgttccttagtaacatgagatttactttgatgagtttgacaccctaccccaacatgcatataaatgaaaaaaaaacataaaatgcggaatctaattaaagtcaatttcattcaataaaattgtaagtaaatccacatggat

SEQ ID NO: 220457 - DNA, 193 bp, Glycine max
  unsure (1)..(193): unsure at all n locations
taacacatccttaataagtgatgcaagctccattggagcttgtnngcctcngatctttttaataatggattcctttgcttcttggaagataatggcccggatggaaaaggagaagagagaaccccttcggaaaatagttaaaaactacactagagctggtaactggaaaaagaaatgagaaggaaaaccaatt

SEQ ID NO: 220458 - DNA, 445 bp, Glycine max
  unsure (1)..(445): unsure at all n locations
taacctagtggggttaaagtctcatgattgtcacatgttgatgcaacaattgttagccgtggccatacgagacattttgcctaacaaagtcaggttagccataactcgcctgtgctttttcttcaatgccatgtgtagcaaagtccttgatcctgtcaagtttgatgacctggaaaacaaggctacaattatactgtgccagttggagatgtattttcctcctgctttctttgacatcatggtccacttaattgtttaactggtcagagaaatcaaatgttgtggtcctgtttatctgtgctagatgtacccggttgagcactacatgaagatcttaaaagggtataccaagaatctacatcgtccggaagcatctattgttgaaaggtacatcatagaagaagccattngaatttgttcagagtacattgaaaaggccaaagct

SEQ ID NO: 220459 - DNA, 360 bp, Glycine max
  unsure (1)..(360): unsure at all n locations
tcttttcaatacaattagcttactcactagcctttcactttaattttcttttgaccttattacaacagcacacattttctttgattgctcttttttttcaacatacaacttatttattgtgtgtgctgatgctctacattntactttacatcctaatcaactccactcccctaaatttggggtaaattttccttgaaccatatgctttcctagaatctaagcaaggtatttggagatattcattcaagttcagggttcaatttttaacaatatcatttagcacacaaagggtgcaaaggatacaattataattcaaggtaagctttttggtcaattggcttgtatatacacaatcatggg

SEQ ID NO: 220460 - DNA, 312 bp, Glycine max
gttgggactctaaaatcatttttagacatgccttttactgccatcttttaacttgcatttaaggtataatatgggttatttaaattggatttgattgactgactctgatatataaatacatgtgatgcttgatcatctattattacataataaaaattacgtgtcttatgatcacggcgcatctgaaatgaatccaaatagaaaataggcttaaataacttttagcttattgaaatatacctaaactaattttcgttttaagtttgtgataaaaaatttattgttatgagcggttgatatatcaaaagtttt

SEQ ID NO: 220461 - DNA, 416 bp, Glycine max
  unsure (1)..(416): unsure at all n locations
ctaccccatttctattntgcttcaaccggtctaattcctggtctaggatcttgaccactttttctatttttgccataaaaggatagaactcagaaaaaaggtatggattccggcaacagcgccaaaaaacttgttcacttatggcaagtgcatcggatcgcgcaagtagtataatacggtaagaacagagtatcgaactctcggggaacttgcgttacttggtaaagctatttcagtaaatagtgtctagtgtgaaaagagatgtgtttattatgaacaggtgtgtaaactaactattaaaaggaaaaatcacgtgagaaattatgcgtaaaaacaagtagatgacatgttggtcttcctaatacgtgcttgatgttagaaggatagtctctacttaacaatgctcatgcgctcta

SEQ ID NO: 220462 - DNA, 236 bp, Glycine max
tgcttaagaagcttctatggaggttggatctttgagcttcatataagaaccttcaatggtgattttcagccatggagttgaagcagaagataaaggagaaaaggtgagaggaggcgccatccactagagaataagccgtggaagaagaagcttcaccaccaagagagtgtcttggataagaagcttagagaggaagctttaatggaggaagagaatgagagaggggggggaggggg

SEQ ID NO: 220463 - DNA, 455 bp, Glycine max
tataagaaacaaaatgccttaatcatttccaaatatgcatgtgaattatgacgcatcaacaagaatcaagccaagactattgtgcaagcaatcaatcgggcaaaacacaccaaatgattataatgatggatggctcaaattctcacaaaggtaaaatcatcactttcaaattgagctttcaaaactatcatgacatgtagagaagaatcaaggatttcaagtcacaaaatgtcaagaacttttattttcaaaacaattacccatttcttgaacatatcctataattcaaagaaaaacatgcaaagtcgtacatgcacatgaaattgacccaaaatattaaactgaaaatctgacgaaactaacaacattaacaaattaacacaactaacaaattaacaaaaccaacaaaactagcaaaaccaaagaacactcccccccatacttaaacaacacat

SEQ ID NO: 220464 - DNA, 434 bp, Glycine max
  unsure (1)..(434): unsure at all n locations
ngcctcanagagatctatgaaggataaagcggctgaaggaaccagttccgctcccgaatatgacagccaccgttttatgagtgctgagcaccagcagcgcttcgaggccatcaagggatggtcgtttctccgggagcgacgcgtccagctcagggacgacgagtataccgacttccaggaggagatagttcgccggcggtgggcatcactagttacccccatggccaagttcgacccagacatagtcctcgaattttatgctaatgcttggcctacagaggagggcgtgcgagatatgcgatcctgggtgaggggtcagtggatcccgttcgatgcggatgctctcagccagttcctgggataccctttagtgctggaggagggccaggaatgcgagtatggccagaggaggaaccggaccgatggattcgatg

SEQ ID NO: 220465 - DNA, 434 bp, Glycine max
gagaggttaatgaaacatctatattatgcgctccatgagaggttggatcaaatggagaatagagatcataatgaacaacaaaggaggagaagagggaatgatggtgttcctagacaaaaccgaattgatggtattaaactcaacattcctccatttaaaggaaagaatgattcggaggcctacttggagtgggagatgaaaatagagcatgttttctcatgcaacaactatgaggaggaccagaaggtgaagcttgccgccacggagttttccgactatgctcttgtgtggtggaacaagctacaaaaggagagagcaagaaatgaagagccaatggttgatacatggacagagatgaaaaagatcatgaggaagcggtatgtgccggctagttactcaagggacttgaaattcaagctccacaaactaaccca

SEQ ID NO: 220466 - DNA, 390 bp, Glycine max
caaacacttgggtaatcaattatagcctataattgatccaacagagagttttaaatttaaaaagaaatttctaactttaaaagcttttctttttactccttcatgatgatgcatgatgcacatatgaaatgatggatactaagatgcaacacacaattcaacaatcaatacaaatgccactcaaaagagttgggcatgtaaaagacaaaacttcttgaagctcttcttcaagctttaaggctaagtctttatgttgctccccctatttctaacgagagggacgtcattgcatgaatatgagctcatagaccatttgaagaatctgagatccacactggttctaggaaccaaagagtttagtccagttgtacataccaaaatctagagctg

SEQ ID NO: 220467 - DNA, 451 bp, Glycine max
tcaagaaaaagatggcctcagcaaactccttatttccagaagggaattctatcaatagacctccaatctttaatggagagggttaccactactggaaaacccgaatgcaaatttttatagaggcaatagacctaaatatttgggaagccatagaaatagggccttatatacccaccacagtagaaagagttacaatagatggtagttcatcaagttaaagcattacaatagaaaaacctagagatagatggtctgaagaggatagaaaacgagtacaatacaatttaaaagccaaaaacataataacatctgccctaggaatggatgaatatttcagggtttcaaattgtaagagtgctaaggaaatgtgggacactcttcgattaacacatgaaggaactacaaatgttaaaagatctaggataaatgcactaattcatgagtatgaact

SEQ ID NO: 220468 - DNA, 374 bp, Glycine max
  unsure (1)..(374): unsure at all n locations
ggatgtnccacattattttccatgacacacatgcaacaatgatgattaggaaattttatgcaaaactggtcatgcatgcacccatgtggacactcaagcatcaaagttttatggtcatgtgacactaaggctcaggattcatttttcctatttaagtcaacccagtgtttccaaaacatgttcttttatcaattcatgcattcatccgagtccattttggctgttcgggaaaaatttcacagcattcacccttcaggtgtatacacattttttcaacaaaaccctttgttttgatcggtgaatctctttcaaagaanagctggaagttaattcttttcaaaagcatgctggcttttcaccgaaagaatattttt

SEQ ID NO: 220469 - DNA, 411 bp, Glycine max
ggcctaattaacctgaaattgagagaaaatgattattatacacacaaaatggaagtactaagtatttattacctatacttaacaaaaaatacttataacactacaaaataaccataaattggaagagtttgatacaatttacataagctttatacacaaaagaccccgagggcatacgcctcatactcggccatgttgttggtgcactcgaaacccaatctggccataaagggtacgcactgatgtcaggagagaccaaggttgcccccaccctatgatttaaagcgtttgatgccccgtcgaactatacggcctatttgtccttgtcttcgtcttccagcttttccatgaatagggccatgatgtcctcatctggaaacttaagatgcatgggctgataatcattgaggg

SEQ ID NO: 220470 - DNA, 388 bp, Glycine max
  unsure (1)..(388): unsure at all n locations
aacgaggatatgggctacgngggagtacgtgagctcaaatggaggtgggcaacaggggatggtgggtttatgcgcgcattgtggatgtggaaaacttgttgtgcaccatcgcccgaccgccacctagtaccacatgtgatgggtaccccataatcctacaggcttgagatgaggaagtgttgaagggtgaaacttcctgcttttattgttgaccacagagtggtacctggagatatgtcgcgggggtcaggagaccttggggacgtcaggtggggtgctattgcccaaaaccaagcttgaccaatcccgacccaacccgggcatagtcggtcagtgagaacctgtgatgtacctaagcaggcgagctcctggcagtcaacagataaaa

SEQ ID NO: 220471 - DNA, 173 bp, Glycine max
  unsure (1)..(173): unsure at all n locations
cgaatcanaataataaataaagcaatagaacataatacccgatacgggttggatgccacaatatgaggaaccatcggaaaggatgaccttctttagtatatatggctctgtcgtgctggcgaaggtgtgttgatttggcaacactgtcgcatcgtgcttcaccccagggaaga

SEQ ID NO: 220472 - DNA, 373 bp, Glycine max
tctcaatacaactgtgttttgccgactcacaactgtggatgactttgggcgacgttgcttgagcatatctgggttattggagaagatgggcctatttctgtgtacttatgttggtgcaaacgcaaaagcatggtgactgaacactctgatgggagcgatatacttgcttgatccacgctgattctaagttggattccttatgtacagagacaaggcccattaatttttcccccactttggccccacggagagatgttatgattattatagacggagtctccaaagaataattgggaattaagaaaatacagttcatgttaccgacgatatgtactcaactaagtcatgtctatttctgtgttgtgaagcattt

SEQ ID NO: 220473 - DNA, 443 bp, Glycine max
  unsure (1)..(443): unsure at all n locations
ntaagggggnncaccacagtgtttgtcattacattgttatctacattacacatagatataggacaaaactgactaacaaattctagttgttccaccttgggaatcagacaaatgtttgtggcattaacttccataatctccttcggtctatcccaccactcttgaattaaattgcaaagatcctcacaacaatagaccaagcattttggaaaaaacccactggaaagccatcaagaccaggggttttccacggtttcatgtcaaacaaagcctttttaatttcctcatgttgcaaaggggccgcaagcatagtcaaatcttcaagctcaataaagggaaaggaataaggggtatccctgcaccaaccttaaggcatgtcttcaacaaataagttttgataagaaatattcactagctccttaaaacgatcctcctcattcacc

SEQ ID NO: 220474 - DNA, 307 bp, Glycine max
ctaattgtaaatggattgattgagaaaatatatcaaaggcaaaaactatgagtctatgacaatcatcaaaacaagaaaggcaaatgtttagataaaatgagttacgtagaataataaagcaaactttcttgtttacaggtgatcatgaagcaaaaaaatccccatctatattataaatcaaggagcactcaccgttgttttctataagctttgatgtatttaatctacgagagggcatggaactcaatagtcgttggtaatctggaagcagagactagaaaaaaaaaagtaacatatagagatgaaa

SEQ ID NO: 220475 - DNA, 446 bp, Glycine max
  unsure (1)..(446): unsure at all n locations
tcaatggagcttacatcacanagtgatgtctctctttgcagattntntaatggatgcaaaacatgatcaatgggagcaatggaaaaaagaaacaaaggaaggcataagtcacatcttcgacctcactcccaaaggagagaaaatgaaagaaagcctcaagaggctaacattaacctcccatactttcatgggaaggacaatgtagaggcttacttagattgggaaataaggatagagcaaaaacttaaaagaaagtctactttaaaatcttatggatctcattcttatccaaagaaagaccaaggtctaggcatcttaggggcagcaccttctaagcccaaagatgataaggggaagacaatagaaaaacaaccccctaaagctagtatgcaagaaaagactagctctataaagtgctttaaatgtctgggaagaagacacattac

SEQ ID NO: 220476 - DNA, 417 bp, Glycine max
  unsure (1)..(417): unsure at all n locations
agcttcggncttcaattttaagcttctctacatattacgggactcaatcagacatccgagtaaaaaagtgattgccgtttgaattttctcatagcttcaacattcaattttgagcgttttgatatattacgatactcaatcggacatccgagtaaaaagttattgtcgtttgaatttgttcagagcttcggcattcaagtccgagcctctcgatatactacgggactcaatcagacctccgagtaaagggttattgtcgtttgaatttgctcagagcttcgacattcaagtccgagcgtctcgatatattacgggactcaatcagacatccgagtaaaaagttattgtcgcttgaatatgctcagagcttccgtattccatttcgagcgtctcgatatattacggcgactaatcaga

SEQ ID NO: 220477 - DNA, 418 bp, Glycine max
  unsure (1)..(418): unsure at all n locations
ntgagcaaattcaaacgacaataacattntacttggatgtccgattgagtcccgtaatatatcgagacgctcgaaatggaatactgtagctctgagctaattcaaacgataagaactttttactctgttgtctgattgagtccagtaatatattgagatgctcgaaattgaatgttgaagctctaagcaaattcaaacgagaataactttttagtcggatatccgattgagtcccgtgataaatcgaaacgctcgaaattgaatgttgaagctctaaacaaattcaaacgacaataactttttattcggatagctgattgagtcccgtaatatgttgagatcgctcgaaatgaataacgaagctctgaacaaattcaaacgacaacaactttttactcagttgtgtgattgaatcccg

SEQ ID NO: 220478 - DNA, 144 bp, Glycine max
tcctctttctcaattctcacctccattgaagcatcatcaccaagcttcttacccaaggctcatattggcggcgaacctcacttcttccatggctcattccctagtggatggcaccttccctcaccccttgttcctactacttcc

SEQ ID NO: 220479 - DNA, 406 bp, Glycine max
  unsure (1)..(406): unsure at all n locations
agcttcacaaagntcttattcaatgcaattccttccactgtataaaaaatacttgatttggaacaatgatttaaaaaaaaaagttaacaggtaaatgaataatgttaggtcgtcaacataaaaagggtagggaatataccttgtgttcacaaaaaaaaaataccttgtgtaggacattattttatagatgattttgtgtttctatgaatttaaaagggtcaattgcttctgctatgtggtaagcaatctgatatagcactgtgtcaaaagccacacctagagtgtcagcctattagttactaatttactgtaaacccatctgttacatacatgagtactacaccattcatgcattcaattcttgaatcacgtacattaaaaacaccaaaagctatctcaatattca

SEQ ID NO: 220480 - DNA, 460 bp, Glycine max
  unsure (1)..(460): unsure at all n locations
tatgctgcanatatntacaatagacctcctcaacctcaacagcttaatcaaccacagcagaacaattatgacctctccagcaacagatacaaccctagatggaggaatcaccctaatctcagatggtccagcccttagcaacaacaacagcagcctgctccttccttccaaaatgctactggcccaagcagaccatacattcctccaccaatccaacaacagaaacaaccccagaaacaactaacagttgagacccctccacaaccttccctcgaagaacttatgaggcaaatgactatgcagaacatgcagtttcaacaagagaccagagcctccattcaaagcttaaccaatcagatgggacaatnggctacccaattgaaccaacaacagtcccagaattctgacaagctgccttctcaagctgtccaaaatcccaaaaatgtcagtgccatttcat

SEQ ID NO: 220481 - DNA, 407 bp, Glycine max
  unsure (1)..(407): unsure at all n locations
tgcaagcttacacaatnnaattgtttgtatcaaacttgtgtttttggaaaccaaatactaagactttcctaactagatgatttaaatgatgcatgttaatatgtgcagccctatgatgccacaatcatgaatcatctatcttactcaccaagcaacttagctcatgaaaagatacatgttcaacattcaacatatagatattacctattctcttactgatctggacaactttaccggatatggcttcacttataagacatcaatttctattgaactctattttgaaccctttatcacaaagttgactaatgcttagaaggttatgctttagtccatccacatataacacattcttaatctgagttttatgttgattccctatatcatgagaatcattatttttcctt

SEQ ID NO: 220482 - DNA, 421 bp, Glycine max
  unsure (1)..(421): unsure at all n locations
gttcttccaggactgtccagagcaacattgtgtacacttattgtagccattcttganaatcatcatgtataggattctaattcctttctcttaatttgtccacatttttaagtatttggttntgtttccttgaatgctttaactatttgataaattagtcttgcatcgacaggacataaacaaagtgttactgcaccaaagtccattttcctcttgtgaagtggaatagttgtacgatgaacaagtatttcacctatattagatggatggcaaagagaattanggattctgccaaagtaggctctaggttatatgcaaggcctaataaattagaagctagattaattctatactttgagcatgtattaaatatggaaaaataaatataataggacattggaatgctgcttacttgtatctt

SEQ ID NO: 220483 - DNA, 346 bp, Glycine max
ttatgcctttactctaattatattttttaaatggaatacttatggtattattctgtaacttatgctattattctaatttaatttatctttaaaattatattaatattatgcatagaaatatttgacatggcttatgctatttatgttgtaatttgttctctttttgatacacttctatttgctttttttatcagttcgtggcctacacacaatatttggccaattggtcactaacttgatatggttgggatagttcacaaagtcaaaatgatgaaattaaatgaaactacaatgcctaactaattgcttaaagacttaaagtgcattgaagttgcaattaccattt

SEQ ID NO: 220484 - DNA, 379 bp, Glycine max
  unsure (1)..(379): unsure at all n locations
gtgggagttcgtgagctcagttggaggtgggcaacacgngatggtgggtttatgcgcgcattgtggatgtggaaaaacttgtgtgcaccatcgcctgaccgccacctagtaccacatgtgatgggtaccccataatcttacaagcttgagatgaggaatgtgtgaagggtgaaacttcctgcttttattgttgaccacagagtggtacctgtagatatgtcgtcggggtcaggagaccttgtggacgtcatgtggggtgctattgcccaaaaccaagcttgaccaatctcgacccaacccgggcatattcggtcagtgagaacctgtgatgtacctaagcaggcgagctcctggcagtcaacagattaaaggaacaaag

SEQ ID NO: 220485 - DNA, 407 bp, Glycine max
  unsure (1)..(407): unsure at all n locations
gctttcattgggggggcataagtattgtgttatattatttggngggcaggaacttgcgggtatcaaatatgtttcactatcaagtaatatatatattacataaccgtgagaaagagcatgttacagtacttgatattaaattattcatgatggactaagacttcgtaactaagaatatgccttatactcttacataaattaaaatgctttttgccttaaaaaaaagagagaagaaaacacacgctcaatccataaaaccacgtcatgaaaaacatagttggattcaggagatgccagggacatatcagcatcgaaagattgttagtcacaaaatcagaatatttatttggtatactttcatagcaaaacaggtgtagaagcatttccatcgaggcacaaataaaact

SEQ ID NO: 220486 - DNA, 379 bp, Glycine max
  unsure (1)..(379): unsure at all n locations
ttattaagccacatatggagtaaatgggacttaacttctctctctacagctcggcaataaagcagccctaaagaggccgcaactaatgcggtcaattaaagcagccctaaagaggccgcaactaaagcgggctatggcatatccgaattaatgtagattttcaacactccccgtcatgcctatggcgacaagcctgaagtgtgtgcaatgtagttgcccaacaatggatgtatgataggttcttataccatctntggatttgggcttatggtctaattggctaactcaacacaaaatcgacttgtaaggtaaggactgtctaagctctataagctcaattgaagccatatctctagatgtgggactaaaccaccaccct

SEQ ID NO: 220487 - DNA, 396 bp, Glycine max
  unsure (1)..(396): unsure at all n locations
agctnttcagatccggtcatggaatgacttgttatctgccttcattaggcagnaccaatacaacacggatatggctcccgatcggaaccaacttcagagcataagcaaacgggaacttgagtccattaaggaatatgctcaaaggtggagagacctagaagcccaagtcatcccacctatgaatgagagggaaatgatcgcggaaaaaggaaggggatacccacgcggtcaccaccgccccaacatggatgaaaacgccccaaaatgcccaaagctcctaccaacccaaccacctgaacttttcgatccgagtcggaagttccctcccaactcaagtggaagggcctcccgcaacagaaaaaacgcctgcacaacacacaacttcagccattcccc

SEQ ID NO: 220488 - DNA, 458 bp, Glycine max
  unsure (1)..(458): unsure at all n locations
cttctatggaggctggatcttggagctttatttgtcattnnaagggggatttccaccatggagatgcagcggaagacaaaggagaagaggtgagaggaggcgccatccactatggaataagccatggaataaggagcttcaccaccaagatgagccttggataagaagcttggaaggatgcttcaatggaggaaaagatagagggagagaaagagagaggcgggagcacaaaattgaacgaatataacagggagagaagttgaacttggagttgtgtctcacaagactcttattcatcaaagttacaacaagtgttacacatgcttctattatagactaggtagctttcttgagaaaactttcttgagaagcttctttgagaaaacttccttgagaagctagagcttagctacacacacgcctctcatgactatactcaccttcttgagaagcttcct

SEQ ID NO: 220489 - DNA, 386 bp, Glycine max
  unsure (1)..(386): unsure at all n locations
agcttgtgcctcttcacgtctggaatatgaattgtttatataaatccaaagacccttaggtgcgttgctgatggcttcttcccgttccaagcttcaattggagtcttgtcttttacagacttagttggacatctattgagtatataaatagcagtgtagactgcttcagcccagaatatgttaggtagtcccttctccttgagtatcgatctagccatttccataactgtgtgattctttctctcggacactccattttgttgaggagaatatgcgactgtaagttgtcgttcaatgccttcatcgtcacaaaatctttcaaactcgtgagaggtgtatactctttgccacaatcactccctagtacttttatccattntccactt

SEQ ID NO: 220490 - DNA, 324 bp, Glycine max
attgtgagagatgcattgactgtatccgagtgagagtgtgatcttataagtttgagagaaacgattatcatttactactgattcttgcatgaatctctgaagtatggactggatgcatgaaattgaggatgatgaaagccatgtttgattgtgatatgcacttatccaataagcttaccacgtgcttgaatgacttatccctcgctcccagtgtggctgaatgaatattgatgattgaccttgacctatcagtgtatctcttgctccttgatttgctgtggagacatcatcccagaacatgggcaggtaattgttcaattaggg

SEQ ID NO: 220491 - DNA, 402 bp, Glycine max
  unsure (1)..(402): unsure at all n locations
agcttctccgaagggcagtggngtattttcagtttctctgaagataactaagaatctcgccaaatggcggtccttcttcttcttggaaggtaccacaggatatggtacttccgcaccttcattcacagctttttctcttttcttctctctagcttgttcacttatactctcttcattcttattttttttcatctttttctttttcaacttatttttctttttcttggtcatttaattcttttttcttgaccattatttgtttttctttttcctgattgctttcacctgtctcatcatctttcttttcatcaatacctttcttttcagcagctttcttcttggatacaacactatcctcatcctctgcctccacaaacctcatactccttgtcatcacaactt

SEQ ID NO: 220492 - DNA, 348 bp, Glycine max
  unsure (1)..(348): unsure at all n locations
gaagttcatatgggtgctgagagatgctgattaaggagacatctttgatggaaatgaaacaaaaaggtatgagcttccaaatgggtctgaggagaggattaaaggcatagggctaattgtgagagattgggcaccccaattggaaattctgagccacacttcaacaggggggtttatgagtcattgtggatggaactcctgcttagagagcataaccatggnggtgccaataacatcatggcctatgcactctgaccagccaagagacactgntnttgatacacacgtgctcanggntggtttggntgtgaaggattgngcacaaaggaatgcattggtgactgcgtc

SEQ ID NO: 220493 - DNA, 337 bp, Glycine max
  unsure (1)..(337): unsure at all n locations
cttgaatcaactggcttaagtcaacactgtttcttccgaagctaagctctttggcatcaactgcaacaaggtatatccaaaatggtcttggctcaaacttaagctgctttccactaccatggttgcagtaaacatggcaccttacgaaaagggtctcttcaaaatctgcaccaccttgatcaaccctngatggcattgtctgaacactcccatctttggtctctttctttctaacacaaacagaaagccttaatccattcatggatgaaggaaagccttgagcagtgaccacttcgacagaaacaaacagcttaagttattcattccaatatgagaa

SEQ ID NO: 220494 - DNA, 309 bp, Glycine max
  unsure (1)..(309): unsure at all n locations
tatgtncttaagctgtaagtttcaaactagactaatttttcctatgacaaaacctctttgaaatgaaaaaaaaaaaaaaaaaacccaccagtgaacactaaaagtcctaagtgacaaaattaagaaaaataagggtaaagccaatccatataggacattgaagtgcaatgcattatagacaagcattattagtttctaaaaagagaaaatatttgatatttcctggagagtataaattccaaatctatgttcatgtaaatgtcattcaacatgcacataatatttntaaggagttgagaatgaactcga

SEQ ID NO: 220495 - DNA, 398 bp, Glycine max
gcttcatgatgaatcaacaatgattcaaatgttttttgatgataacaatgatgacagcaaaagatgatgacaaaagtgatgaacaaaaagctcaagtgaatcaaagaacatccatctcaagagaatcaagaacaagtcaagagttcaagaatcaagaagaattcaagactcaagaagaaagcctacaatcaagaatcaagataagtattaaaaagttttttcaaaactttgaatagcacatgagtttttgacaaaacctttaccaaagagtttttactctctggtaatcgattaccatattgttgtaatcaattaccagtagcaaaataagtttgaaaatgttttcaaactgaatttacaacgtttcaaatattttcaaaaggttggaatcgattaca

SEQ ID NO: 220496 - DNA, 419 bp, Glycine max
  unsure (1)..(419): unsure at all n locations
gtcttcttacagatggggcatgcatgatgaccctngactctgcaaccactcagatttccatacgatggagagtcattaatggtacanaaaagcattgcacacatttcanaagtctcattgcgaaatccatcaaacactataacccnctcgtcccacaactttgttaggcctttaatcaacagacttagatagacatcaatgtcatttcctggttgtcttgttcccgatatcattatagacaacatcatgtattttcgcttcatgcacaaccaaggaggagaatngtataatactagtaaaactggccatgaactgtgttgagtgcttaaattgccatacggattcattccatcactggctagttcaagcctaagaattcttgcctctttgccgaaatctggatacaaaccatcaatctt

SEQ ID NO: 220497 - DNA, 393 bp, Glycine max
  unsure (1)..(393): unsure at all n locations
tatggctcggaacagggtaattgattacaattttatcataancgattacacagttatttttgagacaatgactgatttattttggagtctctgctttaatcgattaccgtgtgatataatcaattacttctctttctataagtgtttcagaagtgaacaagaacactttaatctattactttgagtatctaattgattacattgttcttgagttgtttctaggttttgggaagaacactttaatcgattaaaaagataatctaatcatttattcattgaattaatcgattaccttgaagatttaatcgattacaggcggttataactgttttctctataaataaccacactgtgttctcttcataacataacanaataagcttctaagtgagc

SEQ ID NO: 220498 - DNA, 266 bp, Glycine max
actgatacacgaaccgctgcccgttttttggcggtctaaatctccaatattgccaaagtaaaggtctacccggcaagaaacattatagcaaaaaactatgtagcttccgatctcttaccacaaaatatgtggttcaagtacccaacatgaacagtaagtgcgaggttggtacaaatctcataggcgttatgaaaacacattattgttgttgcgctgttactttatggataaagccccagaaaaaataattcgtctatgacattcga

SEQ ID NO: 220499 - DNA, 247 bp, Glycine max
atccaaagaggcattgcagcttctgttcgcttctgagaaacggcacgtgacataacggagaatcactttatggtccatgttggacgcatgtctctattatgcatacgttaattacgtaaaaatgtctttgttcgcatggtattgatacacaacatatctatcgtccattgccatactcattagccatatcatacgacacgcgtaaactcttacacattcacaatatcatgtccatcgccacattaat

SEQ ID NO: 220500 - DNA, 407 bp, Glycine max
  unsure (1)..(407): unsure at all n locations
agcttctctcacattattgaatttgctttaactatttttttagctcttcaaacagacatccaaagataatacgcgtaaattcctttgaacttagtgtgtcagtgaagaaatgactcaaaatctaaattctaacggtctaatggtggttaaaataataataattaaatagtattatttntaattttaatataatatatcaaacaaaaaaatatataacatgacactcataagtttaaaatattaaaaattaaaattcatttataaatttcgttttaagtgaggatttcagcctttgagataagaaaaaataatagtaacccaacgttcagaaataaccagctaaattatactatatatgatttactaatatatatatatataacatttttttatcctacatataaatt

SEQ ID NO: 220501 - DNA, 484 bp, Glycine max
  unsure (1)..(484): unsure at all n locations
aattattaatactgtattattaattatgaagtgttttgtctaattcgtgagcattattggctttggaaaattaattatctgttgtcattaatccagctctcgccgcagcttcagattgatcgggcagttgtttccatgccattatttttcggacatcgaatggattcttctgtttattattcttgggtcaatatgtatagatcgatgaacaactntattactaacaaatcatattaggtttcacactttacaatggatttcagtttgaacgtcacattcacaactaggggctctcattttctagaagaacatatatcacgattgatttgttgaaggaaatcaaaccttttattcaaaaaaatccaacaacgtacttgcaagcactgtgacaaattttaaactataacaaatttcgcgatccttctttgttgaagtagtctgaggtgcgtatcacaactcaatcattcctaaccaacgcaacgac

SEQ ID NO: 220502 - DNA, 412 bp, Glycine max
  unsure (1)..(412): unsure at all n locations
agcgactgagctgcaagctttactggcagtgaattattattatgttttattatgttaacttgataggggtaccaaagatcacatgatccctgaagtgcatttattaaacaggcctagtgatatattgttagaattgaaggaaatgaagggaaaatgtctcaattaagtcaaattgttaaagttccaaacagaacgacaaggacaacagtctgacagtcttcttatttaatcttcaaaaacttaccaacaacacatttcaataaattcatattgaagtctcttcaagaaatatatttgtatggcaaaagttatttttccaataaaaaagcaggggacataaacaagttttgaaatgcatgagaaaactcanacatgccaaagcacgcttggaaagctagacaacatgcacact

SEQ ID NO: 220503 - DNA, 163 bp, Glycine max
cgacaacaacacgtgaagcataaaatgtcaagcgtgatagaaacggttatgttagtaacgaagggagaagacaaagccattaattgcaagtgagagcgtgagatatagaaaggatgatgattataaagaatcgttgaacaatcacatgagagagaggctttgg

SEQ ID NO: 220504 - DNA, 395 bp, Glycine max
  unsure (1)..(395): unsure at all n locations
tatttccaaggtcattttgtttatcattatcgacactgctgagagcactgaaaatcttctttttggcatgtatgaaaaatattttgtttggttcaacggtctcctactaccaatgctaatgtaccatgaattctctatatttggtgtgtctatcagcgatgctatcttctctaaaggtagcaaaaagcgaaatgctttggcatagcgaagctcccaatttttacggtgctggtctaagatgcaaaatttgattccaagtattatattgtagaacgcttggttcagttggttgtggatattttatattttcatttgttttcttcccattntattaatgttaactcggagttgtttatagattaaaaaaaatctatgcaacattcatcaatgccttt

SEQ ID NO: 220505 - DNA, 390 bp, Glycine max
  unsure (1)..(390): unsure at all n locations
cagtcgggtgcataacttattntctcttataaattacaccaaaaatgatttctgattagttgagagtgtaataacttntacagaanaactgcatctcgattaaactcacaaaatccaacagctaaaaacaggaaattagcagagtcaattcatcaaacacttggtgtgcgagaacctgaacgattcctgcgaaggcgcggttccacccgttggcgagggacagcggcacgatggccaccgacatgacgacgcgatcggcgttgcatagagcgagagcaagagccagcatggccaccactttgactctctcggaagtgatgaactcagcaaaactcgacgactgttgttgctggctctcctcgtgacccgaatagaagtgagcgtcgttgg

SEQ ID NO: 220506 - DNA, 259 bp, Glycine max
ccatgaaacccccagatgtccaagaggatcacatatttctgaaggcttttcctcattcattagagggagtggcaaaggactggctgtattaccttgctccaaggtccatcacgagctgggatgaccttaagagagtattcttagaaaaaattttccttgcttccaggaccacagccatcaggaaggatatctcaggtattagacaactcagtggagagagcctgtatgagtactgggagagatttaagaaactatgtgc

SEQ ID NO: 220507 - DNA, 470 bp, Glycine max
  unsure (1)..(470): unsure at all n locations
taagctttctcttatatttcttctatgaatctccaataatatcccgctgaatgcaaaagaactcctaatctaaaaaacagacttaggactctcccactcaaggacaacttctatcttagaggggtctacatttatacccccttgagatatcacataccctaggaaactaactttctctaaccaaaactcacacttggacaacttancataaagttgtcggtccttaaggttttacagcagaatcctcaagtgctcctcatgttcctctctagtcttggagtataccaaaatatcatctatgaatactaccacaaaactatcaaggtaagggtgaaagattctattcatgtaatctataaacacaccaagagcgttagtcacaccgaagggcatgactaaatacttgtagtgactataacgggtcctaaaagtagtcttcagaatatcctcggacttcattcggatctgat

SEQ ID NO: 220508 - DNA, 391 bp, Glycine max
  unsure (1)..(391): unsure at all n locations
agcttctaatttcttattttagattggtgctgtttaccacacaaaactttatggttgcaaatcctgttcttgcccccactattatggagcatgaagaccccacttaaaaatttctgcaaggaagaatcatttgaccaattgattcatttgttattgtcctaatagcgacagaaagtgctacacccaaccaccggaacagaaccaacacacaaatgccatactggcgaccataaatttgaacaagaaagttaagaatttggaacaatgttagtcttacaaaattcaaattgaatgttggaaattcaaatttaaccggtaccgatttaacttaacttctacgatcattcgtctagaanaatgccaattacaattttgtacgcatgtgtttcct

SEQ ID NO: 220509 - DNA, 404 bp, Glycine max
aaattaaaatgatattaaaatccttattatttcattaaaaacaataatagagtagataaattgtaattattcttaatcaaaattgactatcaattaaacccaaatttcgcagttattaacaatataagctataacccttagactgtgtagcatatccaatgaaatacccactaatagttctcaagtctagttattctcttgtgagtataaattctacttctgacatgcattctcaacatgtatatgtcgtaactatgtttcaacatttgaatactcaaaaggtgtcttgagacaccttggcagactctattaatattaccaattgtctaagtgctcaatccacaaaattgaggaagttgcatatgctcatactctcaccagtccttgatgtcgattcctttttg

SEQ ID NO: 220510 - DNA, 400 bp, Glycine max
  unsure (1)..(400): unsure at all n locations
agctngcggagaacatagaggccaatgaagtttcttcgtcnagaccgaagcggcgaacagcattctgagagcacagacaatggaactggccgatcgattgcgcttcttgaactccatccttgagatcgctgaaaaggtcgaagggttatccgttgagattcccgagattccagatcctctcctcaagccctggcagattcctcatccgatacaaccgattatggccaccgcaaacatgtttctgcgttgatcattcctgaggattttactttaattagggttattcagtgcggtagtaactttctctgttatgtgtattatattactattagtgttatctgtctgcatcaaaagtatcgtgtggtcatcaatgcattgggttcctgagagagatgaatgt

SEQ ID NO: 220511 - DNA, 408 bp, Glycine max
  unsure (1)..(408): unsure at all n locations
cactaaagntgcacgaaatttctacttgcctttatgaatagttgatggccacgcgtggtacctttaattgcactaaaattcttaaccatatgtggggcatatgccgccatgcgtttatctacacccaaaagaatacgtgtcaatacaccctataagtatgtatagtgggctgtcatttatctggatgaaatttgaagtgattattctatgatgatacccttaatttcaccgttgatttccattatagctcagcaattattctgataaacgttccctgatactctcgttcattaaaaaaaaaattaggatttgttactctcgacgtatagaagtcataaccttatgcgaggccccctgtcatgagcttcacagacctgctttgagtgggattttgaaattccatagcca

SEQ ID NO: 220512 - DNA, 406 bp, Glycine max
agcttctatataagctgaaccattttatcaatttacacaagttgagttttattcagaaaattagagtttatctcttttatcttagtgagagtgattctcctaaattcttgagtgattcaagaacaccctggctgtatcaaaggactttcacaacctttgtgtgttgccctcgttggaaagagagattctttccttcctttcatcttcacccttgttctttcaaaccacaattccagaaaatccacctctgcccagaattatctcgtggccataactcccattttacgcactcaaattaagtgattcttgagcctaaattgactttcaaaacgagacctttcacctcgttttggaatcatctcatttggagccctgtagcttcagttattgccatttctatatttct

SEQ ID NO: 220513 - DNA, 455 bp, Glycine max
  unsure (1)..(455): unsure at all n locations
cagatttagtaatgacccactaacctagaattaatttttcttaatgccattaacctanggaattaanananacttaatggctgagtgtaactganattgtggcaaccaaaagtcacccccaacagccaacaagccagccaccatttggtctcccaaaatgctgatgcctaggttgccaattgggcccttattacaacttgaactaaacctaactaaagcccttntagttgattaacccaaaacatattnttggtcagccaactttacaaggattgggccattatttagacaaactaaacactctaaaattgagacaaggtggtgtcatttagtcctcctccatttgggccatgattcaactcacaaccttggactttttccttgaaacttgggcttgattcaatagtatggcagcacttgtaaagagcttcttggcttcctgctctaccctgcat

SEQ ID NO: 220514 - DNA, 403 bp, Glycine max
cagcttacacaagcattcactagtccaacacttttttaacgaatagtcatcatcagtccatagttccaatcaatcatgctcagtatgatgcatgcacctgacctcaactcttaaatgcaatgtggtaccatccccaaggaaatagcctaagcgtgtccacacgacactttcacttaggaaaactaggcagtaagtgtcgaggtcaccctgtcgtgcacaggcaactcccccccatggtgattagcctgagtctcaagggagttccaaaccgagtgacatgcccccaagtacaagtattcctcctcatgagaaactacaagtacttactgacaaagtttatactatttccatgtcatatgaagtatgaaacatgggcaccatcaagtcctcgagttgagttttg

SEQ ID NO: 220515 - DNA, 423 bp, Glycine max
  unsure (1)..(423): unsure at all n locations
gagagganagggacgaatcgcaattagatggtttattcttgaggacgaattgaagacttgcctaaggtcaaataggagtttgtctcagcggttatgtgagaccgaaataaacatgttggccatcatcagcaagtacaaagaagaattaaatttggccatcgcccacgagcacaaagtggcggacgaatacgcccgagtgtacacganaaaggaggctagaggaagggttgatgactcattacatcaagaagcgacgatgtggatggaccagtttgctctcactttaaacgggagccaagaacttccccaattactggcgaaggccaaagaaatggtggacgcgtactctgcccccgaggaaatccatgggctcctcagctattgtcagcatatgatagacttgatggcccatataattaggag

SEQ ID NO: 220516 - DNA, 346 bp, Glycine max
ctatgaagatcgtggtatggtattgtaaatgaccatccttggccaaagtgggtttgattgggaccgcactaagcacatgatcatagttgaggatgaaaatgtttggaatgaatattgcacggtaagtaagtatttctttaatatgttattatttgttattcaaagtagattggatttgacttttttcttttttttgtcccgtcgcataaatcggctaaaccgtttcaatgcaaggtgcttcaatactgggatgatatagtggatttgtgtgctaaagatagagccacgggtcatggagctgaaactgctatggatgctgatgaagcgatgggtagagaaacaaatg

SEQ ID NO: 220517 - DNA, 328 bp, Glycine max
tacttacagggaacaaaagatcacatacttacatataggaagtctgatcaccttgaggtgattgggtattcaaactcagaacttgttggatctgtagatacgagaaaatccactcttaactatgtatttactttaactggaggagtagtatcatggaagagtgaaaagaaatcatgtgttgctgcatctaccatgacagttgaattgtagcatgttttgaggctacaattcacgctaattgggtgcagattggaattgcaacagtatcgctatgcccgtgaagatgtattatgataactctacaacaatattgttctctaataacgat

SEQ ID NO: 220518 - DNA, 366 bp, Glycine max
gggttgataggtgtggctgctgcatgaagataacgataggacgcttaccgaaatggcgagctctcggcagtcttatagaaactgcagggagtgggtttattatttattgatcattatttctttctcttcctttattaaaccgcgtgtttcaagaggcttggtaaaagataaaagggcacacaccccatctccatattaaataacatttccattgttcttgactctacatgaatggcttggaaatcttgtatttgatagatcacagtatttggattatgcactggcctcactgctgctgatgttgttagcattccacattggatatgcagtgacatgcctcacttatataataaataacatttctat

SEQ ID NO: 220519 - DNA, 76 bp, Glycine max
acacagagcggagattgaagcatagggggggaaaatactttggctttgtgaaaatgactggaatttttcacaagat

SEQ ID NO: 220520 - DNA, 468 bp, Glycine max
  unsure (1)..(468): unsure at all n locations
gggttcgaggcacttacccgttgaagatcgatgaacgatgattatctattgaagaacgtcgaagaacggttganacctttgcgagattcctcacggaaaacgttacggaaacgtttcggaagcgcctcggcttagatattcttcacggaaacaatttttccaagcaaattcgaaagagagagaagtgcctaaggggctggaccccttccttcttcatttcctccccaatntatagcanaataggggaggtggttgccgcccagctcgcccaggcgagctcagctcgcccaggcgagcagggttgcttcctccagaagcaaccgccttctggaggaatcttctggagggcccaaatgggcctgggtgctatttgcacccccatttttactaagtacacccccctctgctgtgttttggtgaatcttttntcgtacagtacgganacttacgaatttcgtaacgatactt

SEQ ID NO: 220521 - DNA, 283 bp, Glycine max
ttaaccaataaattggggactttaaaaaaccacaatcctaaattgaatgccgtggggacaatcatatccaaattcctaacaagattagtagtttgttaaggtcatccaaatacttcccaagcttctgaaaatacttccaaaatggtaacaagaaagacctcccaattaattaatgttactaatgaagatagggaccaaaacttagataccacaactgagataggatcagtgtcagaaaagaataataatccataaactcccaacactggaaaccccctccaat

SEQ ID NO: 220522 - DNA, 396 bp, Glycine max
  unsure (1)..(396): unsure at all n locations
aaacacaaaagcatatgctataccttcacattaatcacatgctcataacaaaacatctcaagtacaacacaacatctctcacacacaattcattacccaccatcacgtagcaagtcacaatgatcatcacacagacgttatgcaacatatatactaagactcaatcctatattgaatgtggtaatttgtcagtgaacaataacactacggcatatctctncaccaaagggaggctatcttcacaacatctgaattcccaatccgcttcagcacccatactctgatataaaaacattgcaccaaagaataccgtcatggtttaaattacggttggtgctgcagaaaattttacattgcgaaaatatgcgattgatatggccgcaagtacggctgttc

SEQ ID NO: 220523 - DNA, 252 bp, Glycine max
  unsure (1)..(252): unsure at all n locations
ggacccaagcacgagctgcactataataggttctgcatgtgttttcaccgnaaggtatatgaactaggatatttcatatctatgattggtctggtcatcttttatgctaattgatctcttattgaaaccttggtgctagtaggattacatggaaagattgtgcttaactgagaaaaatgaaactattacagaggacgcgtaagttggttctatgtgtacaaagagtggtagcagcccagagactagaaacta

SEQ ID NO: 220524 - DNA, 445 bp, Glycine max
  unsure (1)..(445): unsure at all n locations
ttttcatttaacatagagatgaanagtgtcgcanaactaaatcaactccaaatcacgagagaaacatttatgaatctctaagtcattagccaaaataaattataaatccttaacgggtgaggtgtcatatatatataaaaagcgattttttaagtttaatgaaatacaaaattattatcttcatttgttatttgtaatcaaggtattntttgattgaaaataaaaaattaatcccttgagatactaaaattcatttaaaagaataatttctcttaacaaatattttttcatatgcacacatcanagatcgaattcataataaataattaacatgattaaatcaaagataatgtattaacaaaatgtctactcattaagaaacttttttcattnttgcatacctagttaaccctatctttgaagaaatcanatggtagtataatca

SEQ ID NO: 220525 - DNA, 401 bp, Glycine max
  unsure (1)..(401): unsure at all n locations
attatggggtacccatcagatgtttactatttgttggtcgggcgatggtgcacaacatgttttncacattcacaatgcgcgcataaacccaccattccctgttgcccacctccaactgagctcacgtactcccacgtagcccatatcctcgtttctctcaacaccgggtccccatcaatcctctcaagcttccacaacatccaagcaaaacaacattcacacagcacaagctatcacaaccaagcaaaacagagcaaaggcagaaaacttttgccaaacaccaaccaaaaatcacagctgtttccactcaaagaccccagtaacaattccttcgatccaattcgttaaccggtggatcgactccaaaaatttactggaagtctctagtacatacacctaca

SEQ ID NO: 220526 - DNA, 304 bp, Glycine max
  unsure (1)..(304): unsure at all n locations
tcatcgcttctgttatacatangagcaagggcaacacccttgttgacccccacaanataaaagaatatataaagggaaaagtaaataattctgaagtcacgttgcacacactcgattaaaggctgccgtccctcgtgacaggcatgtggggtgctaataccttccccatgcataaacaactctggaacccttcttttcaatattcgcagacctctnnnttggttttctaatgatttcctccaataaatgtatggggcgactccactcgttntctcccttggagacgaacacttnggcttatcta

SEQ ID NO: 220527 - DNA, 406 bp, Glycine max
  unsure (1)..(406): unsure at all n locations
cagctgaaaaacccactggtctttgtcctttttatccattgnnggctctaaacaaatcaaaagatttgtggtttgtttgttcgctgactaactcttaaccgtcttgcaaactaatatacaatctaagcacttagttttttctttgaaagggttcaaggtgttttaagagcttttcaaactatacaaaaagctttttactaaagaatttgaatgttagcacgttggtttgtaacccatgtcttcaaagcttttggtatttatagttcttcaacaagtgtttgttgtctctaaacgaattgatttcttcacttgagcttgcgtctaaagattgtggccattggagcatttaatacttccattaaatgcacgtactccttaatactagaaaatcactctagttagcttt

SEQ ID NO: 220528 - DNA, 436 bp, Glycine max
  unsure (1)..(436): unsure at all n locations
tctanaggaaggtttctcaagagaacttctcaaggaagctacttattctataaatagaaacatgtgtaacacttgttgtaactntgatgaatgagagtcttgtgagacacaactcanagttcaacttctctccctctttcttccttcaatttcgtgctcccccctctctctttctctccctttttcttttcctccattgaagcctcctctccaagcttcttatccaaggctcatcttggtggtgaagctccttcttccatggcttattccctagtggatggcgcctcctctcacctcttctcctttgtcttccgctgcatctccatggtggaaaaccaccattaaaggacctcattgaagctcaaagatccagcctccatagaagctccacaagcaagcttccatgaagtggtatcagagcacaagagcttcaagt

SEQ ID NO: 220529 - DNA, 404 bp, Glycine max
  unsure (1)..(404): unsure at all n locations
agcttcanaatgtagttaagactgcagacattttctgttcatgttngaagcttgatagaaacacagatgttagctatagtaatatgaggaaggctgcttcttgagaaagattgactgacaactatttattctatccaaaagctgtagatcttcagtacaaggatttaaggcattttcagtggcattgggaaaagggggagcctgtcattgtcagcaatgtgcttgaatgtacatctggtttaagctgggaatcgcttgtcatgtggcgtgcattacgtcatgtaactaataccaagcatggccaacatttggcggagaaaacaattgattgcttagattggactgaggtttgcttaatttcccaatctttaactttattgaccatggagagctttttacacaaa

SEQ ID NO: 220530 - DNA, 500 bp, Glycine max
  unsure (1)..(500): unsure at all n locations
cacctaacccgggcatagtcagtcagtgagatcctgtgatgtacctaaacaggcgagctcctggcagtcaacagataaaaggaacaaagaccacaaagcaaggaggcttgtggtggctggccagctgtgaactntgtgtgatatatgggttgtggcctctggtaatcgattaccaagggtgggtaatcgattacaaggcttaaaaatgaagacaggaggctaagatggtctctggtaatcgattaccaaggggtgtaatcgattaccagggtaatcgattaccaggcttgaaaacgaggtcaagaagccatgagggcttctggtaatcgattaccaaggnggtgtaatcgattaccaggcttagaaaggggactggaacattgtggaggcctctggtaatcgattaccagcctgtgtaatcgattacatagagggatgggtcactggtaatcgataccaggcatgtgtaatcgatacacagtgcatttttgatatttatg

SEQ ID NO: 220531 - DNA, 403 bp, Glycine max
gcttccttaagaagaggccttagaagctattgtttatctacacatacctctctaatagctaagctcaccttcttgagatgagaagctagagcttagctacacaccccctataatagctaagctcacccccatgacaaaaaacatgaaaataacaaaaaaaagtccttattaaaaagacaactcaaaatgccccgaaatacaaggctaaaaccctatactactagaatggccaaaatacaaggcctagacgaaggaataacctattctaatatttacaaagataagcgggctcatacttagcccatgggctcgaaatctaccctaaggctcatgagaaccctatggcctttccttggatctctagcccaatctacttggagtcttctagccaatgcccttgcgg

SEQ ID NO: 220532 - DNA, 394 bp, Glycine max
cattctctgatatagtaacttttcaccacaatttacaagtttccattcaactgtaccccattccaccatattcttgtggctatgattgtggattatatgatagtattctgagaaattaccgtacttttgaaataatacaccttatcaaaacaagataatgaaagaataaagcattttgtgccaaaagaaaatacagattttgcatgggccacacaatttatttacgtgattgtttacaagaatgacatatggagctgctgtttcacatatgagctattctatctatgcttatggtgttgcacttcagtcaatacaataatgaaccacaatacacagaaggccacatggagtcttcttaactagcagaaattcttaaaattgttgcacatagcat

SEQ ID NO: 220533 - DNA, 402 bp, Glycine max
agcttattcattacttggtaagattacaaaatatatatagaaaggatggaagagagagacagcctactctcaggcctatctctgctaacttctcagataagcaaaatattacatcagtcatacatcaagtaaagcaagatattcaacagaatattacttgctacaattcttactccgacctcatattttttattttgaataaaataagccaaacctaatacttaaaccatgatccataccctacgagacaaccatattttgtctaccatcagcacaaaataaatccagcctagatccaatgtcatgatgctccattcatcatctacctaaggcaggctaccattttgcaggcacagatccagaagcatactaacagattttaaacaacaaatgtcattttac

SEQ ID NO: 220534 - DNA, 427 bp, Glycine max
  unsure (1)..(427): unsure at all n locations
ctacagcagaatttagtaatgacccactaacctagaattaatatatcttaatgccattaacctagggaattaaaagaacttaatggctggtgaaatgtggcaaccaaaagtcacccccaacagccaacaagtcatccaccatttggtctcccanaaggctgatgcctaggttgccaattgggcccttattacaacttgaactaaacctaactaaagcccttttagttgattaacccaaaacatattnttggtcagtcaactttacaaggattgtgccattatttatacaaactaaacactctatatatgagacacagtggtgccatttagtcctcctccatttgggccatgatacaactcataaccttggacttttctccttgaaacttgngcatgtattcaaatagtatggacaacaccttgtgat

SEQ ID NO: 220535 - DNA, 381 bp, Glycine max
agctttacattcccagtaatggtatttatttatttaattccttgcctttattgtttcctttatttttatttccctattttctaaatgtcttactttgttgctattcttcttatcaatccacgttatatcttttctctcagttttcaatcacatttctggcattttgtttaaatttattgtttgtttttttgctcaatgcttttaactttttttctttcttgttagttttctttgagttcgatatttgacatatttctctaagctttgctctttatgtttttttttttttaaacttctctatgttttctgcatttcatttactttaccttaaacccattattttcagttctaaattttctgctgatttcatttgttcctatc

SEQ ID NO: 220536 - DNA, 426 bp, Glycine max
  unsure (1)..(426): unsure at all n locations
ctaagcttttcaggtcttgatttacagcacaagtcactcatgtcattgtttcaaattagttcanaacaagatatcatgacaaacaccagttactgagaaaaaaatcatgaaaatgctagattaaaccactgttcaaatccaaaagacagtaaaataactaaataaataaagaaaactgtatgaaaaaacaagataattaaatggaatcttatcaatcctcagtcctatgctggtatgggccatggatcccaggtcctctgcgctgcagtgacatctgctacataatcagcgtccacgtctgcctctactgcacctatatcctccctagcctctggngtgtcctcagcagcctncttatcctttggagaaccctcaacagcctgngcctgtgcatcctgtgcctgaggagcctcacctnccccaaaa

SEQ ID NO: 220537 - DNA, 344 bp, Glycine max
aattctatgcaaacctctacgacccagaagacaagtcacctaagtagttacgggtcaggggtcatctaattaaatttgatgaagatactttgaataattttttgaagaccccagttattgtagaagagagggagaatttatgtgcttattcgagatttgcactcctgagacctgatccttaagagttatctgctaagctctgtatcccagggaggggatttgagctgaatgttgatggtctccccttcaagatcttaaggaagaacatgactactctcactcggacatggaacgttctttcttattataacttggtcccaacctcccatacttttgacatcaca

SEQ ID NO: 220538 - DNA, 426 bp, Glycine max
tccttatttccataatgtttattctatcaatagacctccaatctttaatggagagggttaccactactggaaaacccgaatgcaaatttttatcgaggcaatagatctaaatatctgggaagccattgaaatagggccttatatacccaccacagtagaaagagtttcaatagatggtagttcatcaagtgaaagcataaccatagaaaaacctatagatagatggtctgaagaggatagaaaacgagtacaatacaaccttaaagccaaaaacataataacatctgccctaggaatggatgaatatttcagagtttcaaatcgcaagagtgctaaggaaatgtgggacactcttcgattaacacatgaaggaactacagatgttaaaagatctaggataaatgcactaactcatgagtatgaatc

SEQ ID NO: 220539 - DNA, 349 bp, Glycine max
ctcgctttcatttactttccggaccccttttgacgtgcttaagccattttaattaagtcatttctcggttaacctaaaaataaaataaatctccaccgatcgtttgaaaggtattatccgttaatttcggttaaaatgaaattccgaccgtttggtcgtgccgcaaccacgttggaaatcaaaaaagaggtaaaaaataatataataatcaaaaaaataccttttagtaaaataaagcgaaaaatcaattggacgttttctctttgggatttctcattcatgattgaattgactaataactaaagtgaaactaaggctaaaatcaactcgcctagtcaagctcgttcat

SEQ ID NO: 220540 - DNA, 449 bp, Glycine max
  unsure (1)..(449): unsure at all n locations
gatctgatgtcctctcaaagaattggtcattatatctgcaagttgatcattngagctgacaaattcagtactgactccttggatatctggttctccctaacaaagaggcaatcaatctctatatgtttgtgtctatcatgaaacactgcattggacgcaatgtgaagagctgccgggttgccactattacaatgtttgactgaatgtcgtgtgtcagactagaccacacttcatcttatcacagaatgaataggaatcagtaattgattacaaaatcaatcaattactgattaataaaaattacaataattcctaataaatacaatatctgatataatctcacactcccccttgagctggagcatatatgtcatatgatctgagcttattacacatgtgatcaacccaagaacctttgagagggttagtgaacatgtcttctagttgat

SEQ ID NO: 220541 - DNA, 509 bp, Glycine max
  unsure (1)..(509): unsure at all n locations
ntttatggacttanataatgtcaccatacttcaccaactaattcattttgatgtgatccctcttgttgtctgattntgaattggacaagcatgtaacattggaactgtgagcttagcaccagttacaatgttgacagctagattgtgaagttcactagctagatagatagctagattgtaaacctatgtagctagtgagaagacacagctagcatgcatgtcccaagcatgcaagctgtgtcttataatatccactgctctttctgtaaaatcaattntaaaataaccaaagtaaaaaaattcatatataatatcaaattctatacaactttatctgctgcaaacactactatagtactattgctatgtcttataaaatataaaactgcagttacttctcttgcccttctcaaggaaatcacaagtatttacctcttaaagtggccaatactcctctttgtcataggctacatattctatctctttctataactgaatctggtgaagat

SEQ ID NO: 220542 - DNA, 259 bp, Glycine max
gttgtgctgccaatactaactcctgagcgtctacaacgatatacatattacccaacacttacctatttttaagaaatcatgtgttgagatttttaacttacaaaattacggattgttttgctaaagaattgagtgaagctcgaagtcataacctttttaaagctatagattataggcctctcttcaaggacgtgctcaacggagaattcttacttagctcgttgagcttaggctgtgaacattaagctgcttataggca

SEQ ID NO: 220543 - DNA, 252 bp, Glycine max
cagacacatcttcttcaacctgtgtgagtcttgactctcattcattgaagcgcacatccactggtaattccaaagagcaaacctctcaccaacaaaggtttgaagaccatcaaacctgtccctcctcttctaaagaagagaagaatattctccatcatgtccttcttcaccaacaatttgagcacccttcttcacccaagagccatcatgctctttgtgataaccaaaggatgctatgactgaagcgcctat

SEQ ID NO: 220544 - DNA, 402 bp, Glycine max
  unsure (1)..(402): unsure at all n locations
agctttaagccaattcatacgacaataacttttttcttttttgtatgaatgagncccggaatataacgaaacgctcgaaattgaatgtttaagctttgaaccaattctaacgaaaataactttttactcggatgtccgaatgagtctcggaatatatcgacacgctcgaaattgaatgttgaagctctaagcctattcaaacaacaataacgttntactcggatgtccgattcagtgacgtaatatatcgggacgctcgaaattgaaagttgaacctctgagccaacccaaacgacaataactttttacttggatgtctgattgagtaccgaaatatatcaagacgctcgaaattgaaagttgaacctatgagcctattcaaacgacaataactttttactc

SEQ ID NO: 220545 - DNA, 263 bp, Glycine max
ctgcagctatcttggtgctctgctgagtttttatcttttttataatgaaaaaagattggtgtctcgatattactatttcggtgagaaggaagttctttctctatagaacttaatttctaaatcccaaccgtgggaaaggtgccatataagagtttcaaacccatgcttcaaaattctaccaccgattcaaccagttaactaagcctgagattatagatttactgagataagtttgagtgcatggggaaaaaaagggttttggg

SEQ ID NO: 220546 - DNA, 170 bp, Glycine max
cacactgatttacgctagcaataacaaacacttttgtcatccctcctatctctctctctatctgtctctctgtcttatacttctcccgagctcgtcatcttcattgagactgactgaggctcggagactagcactaacactggtgctttcattgttgtgactatggagga

SEQ ID NO: 220547 - DNA, 390 bp, Glycine max
  unsure (1)..(390): unsure at all n locations
agcttgccttgccccttgatatatttgatgttctcatggncactatgaatgacaaattccttgggataaaggtagtgttgccatgtttttgatgaggacatgaccaagagcaagggcaaggatccacttgaaggacttggaggacctatgacaagggctagagcaaggaaagccaaggaagctcttcaacaagtgctgtccatactatttgaatacaagcccaagtttcaaggagaaaagtccaaggttgtgagttgtatcatggcccaaatggaggaggactaaatgacaccactttgtctcaatttttagagtgtttagtttgtctaaataatggcccaatccttgtaaagttggctgaccaaaaatatgttttgggttaatcaatta

SEQ ID NO: 220548 - DNA, 471 bp, Glycine max
gctgaatgacaacgagctctcagagaacggtgttttttttttacacagatgtccgattcggtgatataatatatcgagacgcacgaaattgaacaacggaagctctcgagaaatatgaatggtcataacatttcactcggatgttcgatccggggacataatttatcgagacgctcgaaattgaacaaccgaagctctcgacaaattagaatggtcgtaacttttcacgcgaatggtcgattcggggacataattcatctagacgctcgatattgaacaacggaagctctcgagaaatttgaatggtcataagctttcacacggatgtccgattcgggaacataatatatcaagacgatcgaaattgaacaacggaagctctcgagataatcgaatggtcataacagttcacacagatgtccgattcggggacataactcatctagacactcgaaattgaacaacggaatc

SEQ ID NO: 220549 - DNA, 397 bp, Glycine max
  unsure (1)..(397): unsure at all n locations
gcttgctttggctgtaccatatggtccgtaccttttttatnnnctgcctacccatggtgcttcctttaccttcaactccgcaatccaatcattgaacctcctagaggtaccgtcttccacagctttgtggcatacacccattctctctgttggctgcctaatgctattgaaatcacctactatgcaccaaaaacccccagatgtggggcttttcagctgcttaaaactatcccacaacaatcttttattctgaatatcgcagggcgagtaaatgttgacaatgtgaactcgcacggcctcttgaagccacattcctatcagcagtataaatccattcccaatgaccttcctctctagcacaaaagatttctcactctanatgcataagataccacct

SEQ ID NO: 220550 - DNA, 468 bp, Glycine max
  unsure (1)..(468): unsure at all n locations
tttatagccctaaacatctttctttcatcaatgtgcacaccataatgttctctgagatgttcatgtgcctccacatgatttaggtttggatgaaacctaagcttatcagccaccctttttgccacccatttcattgtagcttatttatttttgaagacctttccacatatgtgctcctccaaaaaaaattgatttgaaagcttattgtaacttcagaccattaacaaaaaanttcccatgagcattcaactngtttacagtgagctttagctcgaatggtgtcaactnttacccatttcagatctctgccatggaaaatagtatactctctcacggcttcaatacacattttgatggtatcaaacttcatcccaacctccaaatgcacttgtccaaaactacttctagaattgtagtgagatacacgattttagaatnggagtcaccctcatcatcactgttggaaag

SEQ ID NO: 220551 - DNA, 402 bp, Glycine max
agcttctaaatctacacgagggttgttatttttattttttctaatataataataataatattgatcgagttgaaaggtatctctcatagcagcaaaattgcaaaaccttcaaagtaggaaccatttcatgttccaaaactatgggatatttctcagttgctttacagttacatgtgcaactaggatccacaaagctagtcaataacttccaataatttaaaaaaaaagtactacaatactattttttttcttgagattatattttaactgaaaaagtaaactagaaataaaaattctatatattattatttgatatgattgtcggcaaataggacgagtaacacatatgtggttgataagtaccactcaacatcaacctaaacattaaaaataaacaatctt

SEQ ID NO: 220552 - DNA, 405 bp, Glycine max
  unsure (1)..(405): unsure at all n locations
tgcggcatgcaagcttgctcagacccatgaggattatgtgttatttaatgacgtacacgagcatttactgggaggtaacccaactctttttattttcattaatcattgcatatagttaggattaacttgtttatgattgcttgagtaagtcatcaacatgtttagtgtngaaaatggggttgtttaagcttctttgaagttgtggatgagaagtaacttagaaaattttttagtcatccacttgcttagcgtgccctgtgtgctaagcaaatcattatctatgcgctaagcgagtcattattcgcgctaagcgcatcatcccctaccaattggctgagggggtctcgctaagcaaaaccactgtgctaagcccaaaaacttctctagaaattcatttaatggaat

SEQ ID NO: 220553 - DNA, 399 bp, Glycine max
agcttaggaaaaagtggtttataagtataattcttttggtcaaactggtagtcaacaaaagttaactagtgttaaatgaaggaatgtagtcagctcattaatggtaattttgtaaataaagactctttaagcgaaaaatagaagatttggattaattaatgaaggtttaaggtattaatgtgtccaaatatacaattagttgaattaataaggggtgaggagaattaaattttactcattttaattaagttagttaggcttaattaaaaataattagtaagtgtattaaatactctaggatcaacatgaaagttcaaacctaattattgagctaaatataaagtttaagaaccctaagggtagttaggacaaaactctaacatgtcacctaatagtggg

SEQ ID NO: 220554 - DNA, 312 bp, Glycine max
  unsure (1)..(312): unsure at all n locations
tgcgggtctgggagacgaaagtcaagtgttcttaatatgctaatatgatgntccaagaactctggatatggtacgaccatgctctcttgatttccagctgngaaattggcgagtggaggaacgccccggcatatacacaacaagcataatgtaaacctttacggttttaaaaagctctatagttgggcctaggctttagagttttcattttgttaaggctttgagtcttttgttnttgaatatataatacaaggatctttcttcatctgttcctggtctctacacattctcattcatttgcatgtttacttc

SEQ ID NO: 220555 - DNA, 282 bp, Glycine max
ctataactctgaagaatgaaatgcatcttcctaaacttggacattgatccaaaacgtgatttgataggacatcctgtataactaaattgttattatgtgccaacatgtgtggggtagaagcctattacgagacacactagagcatgtgcctattacatgcttgagcctataacttgcagtcaatggtcattactagcaaagtttccaatctgattttgattcataatgaagactttatagcgatgatgattcttgatcacttcatctatactaggaaattct

SEQ ID NO: 220556 - DNA, 394 bp, Glycine max
  unsure (1)..(394): unsure at all n locations
gctgtagcaaattcgaacgacaatttcttttctctcggaaggccgattgagtcccgtaatatatcgagacgctcaaaatttaaaactgaagctcgcagcacattctaacgacaataacttttcactcggaagtccgaatgtgtcccgtaatatatcgagacgctccaaatttaaaaccgaagctcgtagcaaattcgaacgacaataacattntactcggaagtcccattgagtcccgtaatatatcgagacactcaaaatttaaaaccgaagctcgcagcaaattctaacgacaataacatttcactcggaagtccgattgagtcccgtaatatatcgacacgctcgaaatttaaaaccgaagctcgttgcaaatacgaacgacaataacttt

SEQ ID NO: 220557 - DNA, 217 bp, Glycine max
cccttaagtttttaagtttaagcctaccatgggataggataattcatagaatattctctggttctaaaatggccaacttattaatgacctacaagttaaataatcggattttggtctataaatagaaactagaacctctaaataaacttaaccattaaagtatgctacaattaattggggataataaaggtgattaatggtgatttacattccctac

SEQ ID NO: 220558 - DNA, 186 bp, Glycine max
ttttaacaactacatgtatctaatctctgggcaactactataactacaagtaacattaacaagttgcccaacctcttgtgactaactaacacacatatgttcagatataaacctctagtcacgacatttagactagtcatctgctatacatctaggacaacactccagctagcccacttgaccaag

SEQ ID NO: 220559 - DNA, 340 bp, Glycine max
  unsure (1)..(340): unsure at all n locations
tattattatgtattgaacggagtgtgtgaatcatgggtaatgggaatgatgattgaaaaaggaagacaaagttgtggaattacatgaattatgtttaagtaagtgatatctcatttagatgatatgtatatatagntattttgtttttttattagttatgaatgtgataactcactctctgtgtgctatttgtgtttggatcctgtgatgatcttgaactttgtgttcggnggagaaaatgtcttggtgaagtgctttaaggtaccttttgtgaaggacgtccggacacaatgctctgataggatgtgacattgggacataagttcttatattaattaca

SEQ ID NO: 220560 - DNA, 336 bp, Glycine max
  unsure (1)..(336): unsure at all n locations
gctatacctgaatcaattggattctgtgagtgtcaagctgcattctcatgtattatacctgaattagttcaaattctgttaaaaaaattctaaacntttacccctcttatttcaaatgttaggtagcgaaattggcttgtctcaacccaaactgccagctgtatttgttggagaagggtcaccacatcacgaataatcttcatcatttaagaggacttacattttgtcaactaattagtattacagttttagaagctcgttaagacgcactactcaatcataagtctcacgtacatagcacactaatgttacaataatgcactatatccaatggct

SEQ ID NO: 220561 - DNA, 406 bp, Glycine max
  unsure (1)..(406): unsure at all n locations
agctntttaataaataagaaactagtggcctaaatttctttaaataaaacgcattaaggtttttttctttttagatcaatttctttaaaaacacttataaaagaaaaaaataaaatgcattaaggttttttctttttataaattaaagccaacttatacaccttagtttttagaacagtcagaagtaatacaaaacagatataatacaatttttatttaaccagacttcaatctaaactattgaatttttaattacccagataccacgttcaagaagtatccaaccacaccgctacactttgtcttactgactagaatcaaatctcatcacataagttaaccttggcaaaaaccaacccagtattttaaccaattcctatcctttatctttcttcttcagatcatg

SEQ ID NO: 220562 - DNA, 432 bp, Glycine max
  unsure (1)..(432): unsure at all n locations
ttctagttaaagactgaaatcaggactgtgcttcttatattaccacaatctcctacccaagaccctctagtttctattccttgttcattgtaattattgtggttttaatcatccaagtttcacataggttacgaaattgatgcaaggcatgggaggaacaatataatattagattaagaagaaaacaacattgtcttattttttctatcttctttgntttccttgttgaacttatgttctcggaaattcctagagatgttagacaggaactgcaatttatattgttatctcaaatcatccatggtgtgattgttaagttggttcacgaatccttggtatactagcaagatctaaacccttgtcacatttatatgaaccctcatagaataagaagctctagtgtcttgattcagtaatatacctatgtaacca

SEQ ID NO: 220563 - DNA, 402 bp, Glycine max
ttaagtcacctgcagcatgcaagctggtagaggaaaggcacttctttttgttatgagccctgtcaacagggattaaagcagattttgataaagttaaaaacttcagaataatatggcctcgtctaactttccatttcctgagggaaattctattaatagacctcttgtgttcaatggtaagggttatcattatcggaaaacctgaatgcagatctttatagaagccatagatttaaatatatgggaagccattgaaattggtcccttcattcctacaatggtagtgagaaatgtgattatagaaaaacccagagaagaatgggatgatgatgaaagaagaaaggttcaatacaatttaaaggccaaaaatataatcacttctgcattaggcatggatgaata

SEQ ID NO: 220564 - DNA, 245 bp, Glycine max
ccactccaagcctagaaacttgagtattctcacattcttcgttgagtatattatcttgaagttgttcttcttattctacgctgagaaccatgcatcaagcatattgagagcagtctgaatgcactctcattgcttcctcttggaggacttggccttcctctgagctctggaggggtggctaaaataaaagttaggagttcatcaatgggtgattagagtaggcgtgggtgtgactgagaagagtc

SEQ ID NO: 220565 - DNA, 404 bp, Glycine max
  unsure (1)..(404): unsure at all n locations
agcttcggaagaaagtgatgaggtacaagcttctttttcatagcttgaaagagcctgggtagtcgaagagaagtcaagttcatagccatcaaagtctgaaaagagtatgatgaactaagggatgtcaatatggccaccgatgaagccttggaatgagaaaccaagaaagcccgaaaggaagaacacgaccaaagcaaagttttgaggggctttatagggcagcaatagtgagctcaagctccgaagaggtgaaaggaatcatcacgggtcaaaggcatgatcttgaaggacgagctaaaggcttgccttangtcgaaaagaaatttgtcccaacagttaagcaagactgaagggaatatgtgggccatcatcgatgagtgcaaagagaagctaaatctagcgac

SEQ ID NO: 220566 - DNA, 390 bp, Glycine max
  unsure (1)..(390): unsure at all n locations
taattaagaaacttcttatagcctgtgtgtatgtgcagntntgcacattatcatgtccatgataggcttctcatccagattccattaaatgtgttggtttctcgccaaggtatgtgtcatataaatttcttatagcctatgttgtagaagcaagcttcaaaggactaaccgcctgagatatcttttgtttccccttcacaaagtttcaaaggactaaccgcctgagaactttgtcgtaacacattggagggtacatcctttgtggtacaagtagagggtacatctactgggtttgtgtgactgagaacaagagagggtacatctcttgtggattagttcaagtggagggtacatccacttggttgttcaaagagaacaagggagggtaca

SEQ ID NO: 220567 - DNA, 377 bp, Glycine max
  unsure (1)..(377): unsure at all n locations
agctttggagcttgaagaagttgtgtctnttttattgcccaaccctctgagcggcctctatattgattattgcatcctagtctctatcttttcatgtgtacaccatgcatcatcgtgtataggtaggaagattgtttctaaaagttagaaacttcttcagtgcataaaactctctattctaatcgattaaaaggctgatcgtaatcgattacacaagtgtttgtagcttgcagagttagattttccaaccatagtttgtaattacctgtgtgttacatcgttgtgtgtggtttgaacaatggactctcgctatacaagttctatgtttactatatccggctttacgtagccttgcttagcctaaaaaacatgccttg

SEQ ID NO: 220568 - DNA, 396 bp, Glycine max
  unsure (1)..(396): unsure at all n locations
agaccattcgggcctccaccattgtgctctttcttgggtcgagaacaatctctntgagcggacccttaagccatctctttctcatattacgcctatatcgggacaattcaaggagatgagccctggcttaccacacctgctacaaatgatatgagtggagaaagtattgggtttgctactgctaccacctgcaaatcccctaacaacaagccctctgaatggcatggcgggtaccataattcctaagaggagtcgaatatggtctactcaatggcgaagcccactcatttcgttcctcattggacccgtactcctataatagacgccctgtctcggagtctcattccaatccacacatgcaaccaaaatgggactgagaacacatggaatcatagc

SEQ ID NO: 220569 - DNA, 385 bp, Glycine max
  unsure (1)..(385): unsure at all n locations
agcttttcttgcgcagcaagggtgagattgtgtananngagagagccagagctttgatatatataaaaataaaaagagtggtcctttctagtttggaagaagaagaatatgcatggcccaaagttcttttgcttcacccacctttcacttttttttttttttttatgattctcctcctcttcttgcatgtctctcgcctctctctctctctctcatttttattcataacataaaaacatgtctaatattttctttaaaaaaaacattcgccgcattttcttttntacattttgttggtatatttattaagataattattagaaaaattaataaatcaattgtttatgatagtttgagattgaatgatgatttattttctcatacc

SEQ ID NO: 220570 - DNA, 426 bp, Glycine max
aaatattcttatgcttaaagttaagtaagtgattgttgtacttaaagacgtctcgaaatctaaactttaattcattctgaattattaatgaaatatttgcatacttcatttgttctaaaataatagtctcttaaggctgtgatacactaattaagagaaattaatggatatttactctgaactcatatttaatttaagcaaaaaattattttgtatcttaaacttaaatataaataaatctgataatttcaccctatttacaactctatttcaagaactatatttttcatgaatcaaattacaactaatgcatcttatgataccctcatatttatttggactataaaactaaatgatgcaactttctttataatatgaaatattattgttattatactctaatgagatacaatttactaaacttct

SEQ ID NO: 220571 - DNA, 300 bp, Glycine max
tggatcttctcgatatttggttgcagattcacaggacccgatgtccacgatctgactgttgcgatctttgatttgatgtctggcgtgtgagacaatcttcctttcccgaaagaagaaacaatggagtgtttcggcctttgggatttgtgtagccttggaaaaaaacaccattttctttctccttctttcttccaacaccatttccaacgtcccaagctttttctccatcacccacaacaaccagtagccaccacgaaccgccgtatttctccattgatacccaacaccaagaggaaccct

SEQ ID NO: 220572 - DNA, 326 bp, Glycine max
ggtagaaagcatgcccaaatggactccctttgagaatcgatccacaactaataaaaccacagtagctccttggaagttaagccaccctgtaatgaaatccaaagccacgtcctcccacagaataaatagagggggaattggttgaagaatccttgaatgttatttaaggatatactttgtaagttgacaatcagaacaccttagtgatgtagcttctatggagcttgtaagccttggatcttcttcatcaatgaagtcatttgcttcttgaagtttgatggtagcggaatggagaaggagaaatatgattggagacgccacttcaa

SEQ ID NO: 220573 - DNA, 511 bp, Glycine max
  unsure (1)..(511): unsure at all n locations
acctaaacacacgctanatagactaaattaagagaagtagttgttgaatttaagttntcacctttccccagaatccagatgctttatcataccaataggatcctggcttcagttgttttggtgggtttcgacagttgaggagcaatntaagctgttccctattcagaggttgcaagttgacacaaacaagctccggtggtatttgatttgcttcacaagacctttcatcatccatgacttgagtcacagtcaactcagacagcaacaatttcatcatacgagaacacttccccagcttgcttctatttctctcataaattctgtagccaatgcaagtcacacattttcttccctctggcatggaccccatagccctcaccacacagctgcgacaatactntgcactacaaacaatgcaaactctctttggcgtaagacggatcccctngatgcacctatagcaagaaccctttttccaggcctcacagcacgttccatcactggaacactc

SEQ ID NO: 220574 - DNA, 260 bp, Glycine max
  unsure (1)..(260): unsure at all n locations
cccccccctttatagcttagcctacccccctaacaaaattcattgaaattaaaaaaatttcctacttcaaagaactactcaaatatcctcaaaatacagggcaaaaccctattatactagaatgacccaaatacaaggcccaaacgaaagaaaatgtcttgctcaacgcgacctctttgcttaacgaattaaaactgctcagnccaagcaagccgttaacgcaagaagcttatttgaagatagctgtcaagagcaagcat

SEQ ID NO: 220575 - DNA, 392 bp, Glycine max
  unsure (1)..(392): unsure at all n locations
gatttgtcaattcaaactgcaaaatataatcaatatagctatacatatgtcaactgctgactttggcatattcagattcctcanaatcggtgtgaaaaaacaataataaatataaaagattaagaacaatttatactcgggttgtttgagttgaatggagtttgatcatgatgcagttcaacacagaatcatattctacttacacaggaggaattatgcacactcatgatttggtagtagtcccagcgcatgaatccacctctctcgcacggtaaaatttgctccaacttgatgatatgtgaaagtctgataccataacacaccttaaatcaatatttccaatgctatcagtgtggtgatggcgaacatcaatatgaaacccgcgtttgctg

SEQ ID NO: 220576 - DNA, 276 bp, Glycine max
  unsure (1)..(276): unsure at all n locations
atggaattccaagaattcaaggaggaaagaaatcaatgaagccaaccaagtcaaagactttcacagagggagaagtatcaaaaagaatttttctataaaccaaacatagcacagttttgttttacaaaagagttttctcaaatttttctaagttaccagagtatttactctctggtaatcgattaccagtttcttgtaatcgattaccagtgataaaatttgatttcaaaaagtttttaagtgaattntcaacattccacatgatttataaatggt

SEQ ID NO: 220577 - DNA, 385 bp, Glycine max
  unsure (1)..(385): unsure at all n locations
cactcataaagcttataatgttgccagacacaatctaatcgattactaaatgtggtaattgattatctcgagccacaaagtcttccttcttctaaaactggctntataatcaattactaaattgataattgattaattcgatgactttagccaaatttgaaatagaagtgactttagccaaattaagcaacacatacaccaattaaccccttgttattaagcacaaacataatttaagcacatatgcaattaattgaacacgaagtgtgcacagattaacagaatgcatgtgggttaattggtgaatggaaaaccgataggagagcaacattaaaaatagaaccttaaagagagttacgcttctttctcagagggaaacaacact

SEQ ID NO: 220578 - DNA, 405 bp, Glycine max
agcctctcaagggagctacctaagccataaatataagtttgtgtaacaaatgttggaactttgatgaatgagagtcttgtgagacacaactcaaaggtcaacttctcttcctttttcttccttcaattatgtgctcccccctctctctttttctccctctttcttttcctccattgaagcatcctctccaagcttcttatccaaggctcatcttggtggtgaagctccttcttccatggcttattccctagtggatggcacctcctctcacctcttctcctttgtcttccgcttcatctccatggtgtaaaatcactattaaaggacctcattgaagctcaaagatccagcctccatagaagcaccacaagcaagctttcatcatgaaatggaggaaggaattgg

SEQ ID NO: 220579 - DNA, 397 bp, Glycine max
  unsure (1)..(397): unsure at all n locations
tatcttatatagtaatatgactcttataccatttaagagatgtgatcttctaagtagtagtaggacaacaataatcttttattcattattcgcaccaacatccttgaatttcttactatcagtaacatggcttacgggattcattgaaatccttagtgagcttaggatatgaacttgatcaattgaaatttaagcataatttaaatttgttntatgtttgtctttcagattaattatatattataaatttggttttctaatctccgtacagtgtctagtcatactattcttagatgataaacaaagttaatgccacatgtataaacattacanaaacaaatgatgtgcatcctatatagcaaataatataaatcatgatggatattttcatatgaca

SEQ ID NO: 220580 - DNA, 403 bp, Glycine max
  unsure (1)..(403): unsure at all n locations
agctctcttccttctntctgcggggaggcttttgcttgatgnctttatttccaaatctaatggaactaaattccctgttgaagaattacctcacatataagaagtactaacagagcaacaattaaccaggtcaagagaaaaaataaatcctaactatctattcacaaaatcaatcaaagaataatgaataaatgtctacaaactgaactatactatctaagtggaaagaaattacccgacaacggcgccaaaaacttggttgtgtgttagtaagtgtaccgattcgcacaagtagtatattaaaacggtaagactgagtatcatatccacatggaatttgtncactcagaactgtcattcagtgagcaaacatttgtacaaccaaaagagaattaaatatcaa

SEQ ID NO: 220581 - DNA, 402 bp, Glycine max
agcttgaagcacaaaaccaaaaatccgttctatatttacgatgggttgacgtgacgatgcaacaatttattcgttgtaacattcgagcaaacatatggccctattaacttcttttaatcactcattaagacaccgtgactttgataacgggtcatattctattggttatcagacagacctattaaatcagtctcatgtatcataataacacaaattcattcaaacattgatcattcacactcaaaagacttaaaaagtttaggtagtaaggataaataatatttgaaaagttaaaatcaacatatattttgatgatattcatttattcccattttcctatttccaattatgcctattgacacttagttgccaatgttgcttgattcagctattagtagttag

SEQ ID NO: 220582 - DNA, 398 bp, Glycine max
  unsure (1)..(398): unsure at all n locations
tgaagaacgncgaagaacgggtgaaccttngcgagattcctcacagaaaacgttacggatacgtctctgaagcgcctcggcttatagtatcttcacggagacaatatttccaagcaaattctaaagagagagaagtgcctaaggggctgaaccccttccttcctgccttcctcccctatttatagcaaaataggggaggtggttgacgcccagctcgcccaggcgagcagggttgcttcctccagaagcaaccgccttctggaggaatattccagagggcccaagtgggcctgtgtgctatntgcacccacatttttactaagtacaccctcctctgctattntttggtgatatttttttcgtaaagttacggaaacttacgagattcgtaacgatac

SEQ ID NO: 220583 - DNA, 398 bp, Glycine max
agcttagaaattgcacgtagggacatgcggtttttattttaagacatttatcgagagcttcaaatctaccttcacgtatctaaaataagtagaggaggctaatgcataagtcacctcgaaaggaaaataaataaacatgcaagggaaatgtaaactcacagattgtagagtaacttttcagactcaaaggggaggcttctcttattctccttagagaattcaaacaccattcgtcacaagattcagtagcttctttcccctgacagaataacattttatttttttaaaagaaaaggaaaacaatccaaatgcagtgttattaagcaccagatgatagaaaacattaacaatactcatcacctgtctcatctaacaaaatctgtaatgttcagctcact

SEQ ID NO: 220584 - DNA, 431 bp, Glycine max
agaaagaaagctgtaaaatgtgagtgtggttatggtacctcacaatcctaatgtgcgagatattcggcaaatgcggcacaattatgttccatgcagcatgggggcccaaaaccttggtgttgtggctaaacttgtggtcaccgaccttttgtaaaactctgtaaagtattgtgtccatggatctagaagtagtgtatctcccaatgtgttggttctgtgtggtgaaattaaattttattttcacctccatttttcttttctagcgtctgttttcagtgtcactctgtatagtgtatgaattgaagcagggtatcattctaatttgctgaccaacttcaggaacactgcctgcgtgcaatattataacagcaacttttgtacctatgccgcgatcacgctggtgtttgtagacgtgctgtacttcacattaa

SEQ ID NO: 220585 - DNA, 395 bp, Glycine max
  unsure (1)..(395): unsure at all n locations
nagcttaaatagatagaactatcattctttgtttatcaaaataggttttgtatgaaaaccttgtgtgtaagatgtgtcaaataattgcttaaagaatactaaatgaaaggttaagagagaaatataaatacttggtttatattggttcacacaatcaaagtgtttgatttcccctgcagttactttttggtccattttttctttatgcaaatatgttcaagggaaatccggtttgctagaaagtgcaccagatcgtcaagtatctaaaattaaaacgaaagaatccgagtatcgaactcaaggaactagtcttagacagggttaaattcaaaaataaggcatttgtgaaagaaatattcataattgatgatttagaacagaattaaactaagtct

SEQ ID NO: 220586 - DNA, 371 bp, Glycine max
  unsure (1)..(371): unsure at all n locations
aaaaatcttcagaaacaagtcacttgaagaattgntgatgcaatcctccctatgaagggaccaatcactataaccatgagcaagaggctccaagaagattgggctagagctgttgaagaaggccctacggttctcatgaaccttatggtagatttctgagcccatgggccaaggatgagtccaattatctttgtacatattagactacgattgcattatatttggtccttgtatatacggatccatattgtangtagggtaccctacaaatatatgattcttcagcccttcgattattgggcacctagactagtttttgtatcatgagtagttttgtaatttcatatgcactaagtggatacttgatgtgt

SEQ ID NO: 220587 - DNA, 401 bp, Glycine max
  unsure (1)..(401): unsure at all n locations
agctttcacaatatccaaacgattgtttttcttttgtcatcaaactacccaaaaaaanaaaaacagagttgagacagaaatatttacacaagattcattcaaattccatagagttttcctacccacatacctcaggaacatcctcttcgtttcaattcgttaaccattgaatcggcttgaaaattgaactgagggttcttaatacaaaaacctaagttttgaccgttgggatctactaaggaatgtctagaatgcgagatatactacctttctcgtgacagcagaaaccaacactgcacaaccatttttttctgcataattggcagatttactgcacaatttgacagcttttctgcataattttgcagattttcgaaatccaacttacatgcatgcaattc

SEQ ID NO: 220588 - DNA, 414 bp, Glycine max
  unsure (1)..(414): unsure at all n locations
acacattaagactcaagcctctacttatgtggcagggcgggcttccttcancttcttgtcttttactctgaacttgaccatggtacttccttcccgcgatgcttctttncatgtccgcctgagtgggcttatagcctacaccatacttgccacgatttccttgggtatttatcaggctagttatgccgccagtggtttttcctaaacccatcccgggttcataaccgttccccaacataactcgggccatcattaccgctgcatcggacagacaatgctgcccatagagggagtccacggaggaaatgctgaccaccctcaaagactggaaagcagtgtctaacgattcttctgcggcttcacatancgcatggaggatgggcagcttaccaagatatctttctcgcctgacac

SEQ ID NO: 220589 - DNA, 399 bp, Glycine max
  unsure (1)..(399): unsure at all n locations
agcttgctngtaggtttctttgacggaggatgttgttanaaggngacgggggaagatggtgcttgaatcttggaagagagaaaaaaaaaaagaaaaaatagaacttgtgtgtgtgcaagagtgttttgggtcaatcgaaaagcaagggagaggcgcagcggaaataaactgaagaaatgaattatgacatcaccaagctattgtacaacatagattaaaatatgataaataaaaaacgtgtgctaaatttatactctaattgcttttaattacattctttaggacaatatttaattacgttaattacttttaaatatgttttcttattatataatgttttaaattggtcttgagcagagtataataattattgagatacaatgtgacactattttgcgt

SEQ ID NO: 220590 - DNA, 137 bp, Glycine max
ctttgaaagaacttatagacaaatgcttagaaaatcggacttagcaaatcatatatcgaagtcagtcgactggaatcgattaccattgaggcgtaatcgattacacactgctagatgcgactctttatcatatattt

SEQ ID NO: 220591 - DNA, 204 bp, Glycine max
ttttcttgattttccaacttagttcatttgacgctgaatatcggaccaacgactcagtaaagtttgcgtgattgtaggcttgtttatttacgctgaatttacggcttatcacatcattaagtatgcgtgatttttaactccttaatcagcgttcattctcagacacgacccataaagtatggtgatttaactccttaatagacg

SEQ ID NO: 220592 - DNA, 508 bp, Glycine max
  unsure (1)..(508): unsure at all n locations
atctaacgacaataactntaaactcggatgtcttatcgagccctggaatatatcgagacgctcgtaattgaaaacggaagctctaagataagtcaaacgaacaataactttaactcggatgtctgatcgagccctataatatatcaagacgctcgaaattgaaaacggaagctctaagaaaagtcaaacgacaantaactttaactcggatgtcctattgagccctgtaatatatcgagacgctcgaaatngaaaacggaagctctaagaaacttcaaacgacaataactntttactcggatgtccgattgagtgccgtaatatatggagacgctcttaattgaanactgaagctctaagtaaagtcaaacgactataacttttaactcggatgtcttattgagccctgtagtatatcgagacgctcgaaatngaaaacggaagctctaagaaaagtcanacgacaatnaactttaactcggatgtccgattgagccctgtatatatc

SEQ ID NO: 220593 - DNA, 395 bp, Glycine max
cagcctatattattttgttgcaaaattatctatatccttcttcaaatgaaaattcgctcattctttttcattatttcctttcttgacactaccacctccatcaatgagcgaaaattctcaaattcctccttatttcatttcctactcttcactttcaccaccacagctagtaacttataatcgatcaccttctcccaaaaattctcaaagttctcaaacttttccttcaatgtcacaaaacacctcctctatgttccgtaagcctcccaatagttctattcgttcacaaaccccttcaaatgaagaagttgatacataattttcacaattttccacccaaattgagttagaaaatattatagtaaaggaaggaggagggagttctaaaggaagaa

SEQ ID NO: 220594 - DNA, 470 bp, Glycine max
  unsure (1)..(470): unsure at all n locations
tctaagattccggttgacccatttcgttcaattctggtcttagaaatgtgacctatacgcttatgccataatgctcatgagnttgtattatcaattctacgcttagtaccacgtaattgcgcattaaaggattcaacataggaaactacagtattaagtaaatatagattatcataagccaagagtgaaccagttccaacaatacctgaattgaaagacaacctatacacattgtttccaaatgaacacaaataacccaatttgtctgaataagaaactganaccaaattccgtctaaatgacagcacaacaaaagtgtctttcaaatcaaataaaaattagtacataataataatctaaagtccctatagcttcacttcaccgattaccatctcaactatatccattttcaaataattggctctggagctaggcacccttatgaacaatgtgtagagggcaccaatcta

SEQ ID NO: 220595 - DNA, 359 bp, Glycine max
ggagggggaacaccaaattgaagggagaaaaagggaaagaatttgaactttgagttgtgtcttacacaactcctattcatcaaaggtaccacaagtgttacacatgcttttatttatagactaggtagcttccttgagaagctttcttgagaaaacttccttgagaagcttctttgagaaaacttccttgagaagctagagcttagctacacacacccctctcataactaagctcacctccttgagaagcttccttaagaagattcctaaagaagctagagcttagctacacatacctctctaatagctaagctcacctccttgagatgagaagctagaacttagctacacacccccta

SEQ ID NO: 220596 - DNA, 412 bp, Glycine max
  unsure (1)..(412): unsure at all n locations
tatatgggccagtgagtgtatcatatgctgtctatatctgagaagtccgtggatctcctcggtggcggagtagatgtccaccaatgctttggccttggctagcaatcgcggaagttcctgactccccttcaaggtaagagcatatcggtccatccacattgttgcctcttgatgtaacgcgtggatcacccttcctctagcctccttttctatgtacactcgagcataactcgtcaccacttggtgctcgtgggccgaggctacatttaattcttctagatactcgctgatgatggctagcatgtcggnctctgtctcgcataaccgctgagacaagtttctcttggacctcaagcaagccttcaactcatccttcaagatctaactgtctacccgagactggtgcctttct

SEQ ID NO: 220597 - DNA, 336 bp, Glycine max
accccataggcaccatctctctttctcgaaatagctgaaggaaattagttccgggaagaaaatccaagccgaggggccttcggtaccgttccgggaggggatttgcgaaggttttccaccattcttcgacgatcttcattcgttcatcagactttcaatggggaagtaccttaaaccaagcttcttagttcattctatgtacccgtggtggcccacatttgggtatatgtaatttgattcacgatttctttaactattataacccgtttgacgcgcttaagccattatttaagcattactcgcttgatctaacaaaaaattaaattccccgatcgt

SEQ ID NO: 220598 - DNA, 176 bp, Glycine max
tctatgacagaaggacatgctttccctgcaagaacaacaaacgccgctcactattaatgtgcacattatacacacgcgtaagattagaatatcctatatttacggtacgtacacggactggcaccattctagttctccacatctatatacatcgtggataaaacacacattcttgg

SEQ ID NO: 220599 - DNA, 310 bp, Glycine max
  unsure (1)..(310): unsure at all n locations
tatataacttnttatatctacaccacttagaaaccctatctttactatttttcatatatatatatatatatatatatatatattattttgcatatgatatatttgataaatttgtctttttttttagcctcgattttattttaagattaatgaagctggtgcaaaacggtattgcaaattaagtatgggaagaaaatgggctgcaaataggcaaagcttatggaatgaattcaacgatccaaccaaaacaagagatgaaatcataaaaaatgtgccgataggcatagataaagatcaatgggctcgtttt

SEQ ID NO: 220600 - DNA, 379 bp, Glycine max
  unsure (1)..(379): unsure at all n locations
actcgatattgttgacaatcaacttgggttcctacctttatgatcttttagtgtaatgtgctaagttgtttcaagtttggtctttggcaagtgtgtacaaagttagtacctatcgctntctatattatttgttgttcagatctcactataaagactaaaagttgcaagtctttaatatgttagcttttaaatatttctggagatagatgttgaaggtacttacgtctgggcttgcgggagagctcattttcgtgaaggctatctcagcttttagtagaatgctatgtcagtctttaactgtgttactttattgctatgaaaaatgttgtctttgagagcgttgatgctcgcacaatacttagaaacaaagtatcaataa

SEQ ID NO: 220601 - DNA, 402 bp, Glycine max
  unsure (1)..(402): unsure at all n locations
atcgattactagagagtgtaaatgttttatttctacctttagaaatttgaatntaaattttaaagcctgtaattgattacaacttgtgtgtaattgattaccaacatgagaatttacattttaagtctgaaaaatcacaactcttcagaaattaactgtgtaatcgattacaacaggtatgtaatcgattaccaataaggaattttcgaaaataactcccaagagtcacaactgttcaaattttttttgaatggtcatcaatggcctataaatcaattaccagacatgaaaattcaaatttcaagtctgaagagtcacaactctttagaaactaattgtgtaatcgattacaacaattatgtaatcgattaccagtaagggaatttcgaaaataactcccaa

SEQ ID NO: 220602 - DNA, 331 bp, Glycine max
taagaaaagaaactgctcccttctacaataaatttgggaagatcttttaaattggcgatacaaaggaatattaatggttcttggcctaaaatacgtagggaaactatgcaacgttctcattcctatctacagcaaaatgtaggtataattaaagttcattttcaatgccctttttttcatatgtgatttatcttatacccacgctatatcttttttgttcgcattacatctttcaatttttatttttctcttcttatctcatatttcttcttctttggattgtatccacatccacttagaatgtgtttgtacaactaaaattattactttc

SEQ ID NO: 220603 - DNA, 343 bp, Glycine max
atgcgatgtttcccatgggacagacactcatatatgagatgatattccattatatctgctgtataatagtacataatagctatgtatattaattgtctttattacagactaccataagcaatacttagtaactgccttaacacgccaaagcagtgcctattatctattaatattgcattacgcttgcaaattgcgattgctcgttatataatattgctaataataaagtgtcgggaaaggtaatccctcacgctaattatcgatgaagacatgcaacatatcggttgattgaatgataagatatgatatagtctatagataattttatctactaaatatgtga

SEQ ID NO: 220604 - DNA, 239 bp, Glycine max
atatattaccttaaagagaattttttttaaaggtctttaagcctcaaccattccacccaaatttggctctctttttttttttttttaattttgcttataccaaattctggtttttttttataacaaaaaagacaaaaggcttaacttttgcaatggttcagcctaaaaaaaaaacatgaacaagaaggttatataaatggcaaagaaaataaagaaggatgttaccccatatttccagc

SEQ ID NO: 220605 - DNA, 406 bp, Glycine max
  unsure (1)..(406): unsure at all n locations
tagaatgacccactaacgctagaataatataacttattgccattaacctaaggaattaaaacaaacttaatggctgagtgtaactgaaattgtggcaaccaaaagtcacccccaacagccaacaagtcagccaccatttggtctcccaaaaggctgatgcctaagttgccaattgggcccttattacaacttgaactaaagcccttttagttgattaacccanaacaatattttggtcagccaactttacacggatngtgccactatttagacaaactaaacactctataattgaaataaagtggtgtcatttagtcctcctccatttgggccatgatacaactcacaaccttggacttttctccttgaaactngngcttgtattcaaatagtatggacaacactt

SEQ ID NO: 220606 - DNA, 334 bp, Glycine max
actactcatatgccccatttgaaattttatagcgtcctgtagatcctacacaagacagataggtcaagtaagcataaagtccaaaaataagtaacaattatcaattaagttcaattatttgcctaagaccgaaactgaattaatgtgagaaaataagggtaaaagaaatatcaaataaactaaaaagaataggaaaataataaactaaaaatgatccttcggagaccaaaatcatagattcaaaattatagaagaagtgaaattataatttagccaaaacaattattgctattattttaaatttattgatcgttggaatgcgatatttctcaat

SEQ ID NO: 220607 - DNA, 340 bp, Glycine max
ataatcgacgagaagggccttgttctatggtaatcgataacagggagtagtaatcgattaccagatcctataatatggtatttcaagtgatataatcacgacaatcaattattcgtcacccgcaaaactacacatttagtatatataatcaaaatagacaatcgtgaacaatcatcatatacaatcaaaatagactatcatcatatataatcatgaacaataattagcaaacacaatcacttcactcaacaaataattaatcaatcatgagagataactatctaacacaatcattgttctcaatcaaaggagacaatcatcttaaacaagcataattaac

SEQ ID NO: 220608 - DNA, 388 bp, Glycine max
  unsure (1)..(388): unsure at all n locations
acttaagcacgcgctgcactgatgtgggcggaacctctggtanttttgtaagcctnggactgagatgttgtgaaaatgaatgtgttgatgttcttatctcttgaaaggggaattggaaaataatgccaacaattgataaatggcttatttttgtgattgacaataaaaaaggtgaatttacgatcctatttataagcttgcgtgtgagagtgttgcttggtgcctgattatttgggatcttatgcttcatttttgcgtgcgtttggtgtgttctttaggcacattttcttgcagcttattatagttagttcaaatctttttcacttgctttgaatgtccgtcaactgaaaatgatatattctttgttcataagtggtattggttttta

SEQ ID NO: 220609 - DNA, 453 bp, Glycine max
  unsure (1)..(453): unsure at all n locations
tcagccatgctgatatatnacaaagaccttgtcacctcagcagtttattcttccacagcagaacaattatgacctctccagcaacagatacaaccctggatggaggaatcaccctaacctcagatggtccagccctcagcaacaacaacagcagcctgctcctttcttccaaaatgctgctggcccaagcagaccatacattcctccaccaatccaacaacagcgacaaccccagaagcaaccaacagttgaggcccctccacaacctctcctcgaagaacttgtgaggcatatgactatgcagaacatgcagtttcagcaagagaccagagcctncatncagagcttaaccaatcagatgggacaattggctacccaatagaatatcaacagtccagaaatccacaagctgcttctcagctgtccatattccaaaatgtagtgcattcattg

SEQ ID NO: 220610 - DNA, 401 bp, Glycine max
agcttgcatagatataaacacaaatgtttgtatgatggaggctatgatagagaacgtaaccaaaagcatagtaaaacaacttcagctgttgataccgtcaaaacaaccaattctctcatgtgaagaatatggaggcaaccaccatgcctgttactatatggaggaagtagccaaggaaaccaaattcatgagagaatgcactacaaagttagaagaaattgtaatcaaccttagcatcacatcttactccaacctcgagaacaccgtgaaggtaataaattttttaaaagatcaagtaaaagagttagcagtgcaaaaaaagaaattgccaacaaggttgactgtaatatcgtaacaacaagaagcatgttagcaactaaagagccagttagaaaagacat

SEQ ID NO: 220611 - DNA, 401 bp, Glycine max
  unsure (1)..(401): unsure at all n locations
gagcccgggtagtcaaagagaagttcaagtctatattcttcatagnctgaagagagtatgatgaactaatggacgtcaatatggccaccgatgaagccttgtaatgagaaaccaagaaggcccgaaaggaagaacacgaccaaaacaagttntgaagggctttatagggcagcaatagtgagctcacgctccgaagaggtgaaaggaatcatcacgggtcanaggcatgatcttgaagaacgagctaaaggcttgccttaggtcgaanagaaatttgtcccaacagttaagcaagactgaagggaatatgtgggccatcatcgatgagtgcanagagaagctatatctatcggcgactcacgagcaaaggctagaggatgagtacgccaagatatcatcag

SEQ ID NO: 220612 - DNA, 346 bp, Glycine max
gggcgatggtgcacaacaagctttcctcatccacaatgcgcgcataaacccaccatcccctgttgcccacctccaactgagctcacgtactcccacgtagcccatatcctcgtttctctcaacaccaggtccccatcaatcctctcaagcttccacaacatccaagcaaaacaacattcaaacagcacaagctatcacagccaagcaaaacagagcaaaggcagaaaactctgctcaacacatcaaccaaaatcacagcttttctcacgtaaagaccacagtaacaatttcttcgatccaattcgttaaccgttggatcgactccaaacttttactggaagtctat

SEQ ID NO: 220613 - DNA, 462 bp, Glycine max
  unsure (1)..(462): unsure at all n locations
gagcacanaattgaaggaattaaagatggagagaagtggaactttgaagtatgtctaacaagactctcattcatcaaaggtacaacaagtgttacacatgattctatttatagactacgcagcttccttgagaagctgtcttgagaaaacttccttgaggagcttctgtgagaaaacttccttgagaagcaagagcttagctacacacacccctctcataactaagctcacctccttgagaagctggcttaagaagattcctaaagaagctagaacttagctacacatacctctctaatagctaagctcacctccttacgatgagaagctagagcttagctgcacacctccaataataactaagctcacccctatgganaatacatgaatatacaaaaataaatccttactacagagactactcataatacctcgaantacaaggctaanaccctatactac

SEQ ID NO: 220614 - DNA, 399 bp, Glycine max
  unsure (1)..(399): unsure at all n locations
gcttagcctactaantcctggtaggtggttaatgcttttaacttttgnngaaaaaaactattggtaattgtatatgactcctcccatttatggctctttttgtaatattgtaattacttcttgataatttaggtaatacgtaccttgtatcccagttttgtgtattaaataattattccactttaattctaagtaaaataggcaggattagtgaagtgtaaatttcatgaactcgctaagccacttatcttcgggctaagcgcatcattcgctaagcgcccaatctggtggctaagcgcatggacaattctggaaggaggttgagttgtatagaggcgctgaatgaaggccaactcgctaagcgcaccatcttcaccttcaggttgagcgagtgtgact

SEQ ID NO: 220615 - DNA, 252 bp, Glycine max
tgtttaatgggccaactccttaaatgactcttccgatcattaaaaatatatcttgcaaaaaaaggataaactctatttaaccaacatttagctctcgaagaactacgtatgtcatatttccttaccacaattgaggaatacttatgaccaatggaatcatccttgtgaccactaaaaattatatatctttaggcacatatagcatagagacgtcattcggtcatcaatcacattgagtcatgtttcacactt

SEQ ID NO: 220616 - DNA, 411 bp, Glycine max
  unsure (1)..(411): unsure at all n locations
catgcaagcctncatnaccaatcatgcaagaaatcatttatttctttttcaactaaacaccactgcgaaggggaagcatattaccaaaactaacaatctttttatttgacttccaatttacgtaaaccaaatgggtattcaaagttatgaaacccttagtattaatagaatgtccataaatcagacactaaacagatccttgccagaatagcacacaacagctctttactgatggttttcttcctctcatatattctcaacatatttatcttaaaaatatttctacataatgggtaatcgaggacacaaataacttatcaaagcctgaaactctggatacttaacaaaaatgaacggcaaattacgcctaatcattagattacacaacaatttgcgcgccatcatttgatc

SEQ ID NO: 220617 - DNA, 120 bp, Glycine max
tttgtgtgattgcagccatggagcttgtagcagaagatattggagataatgtgagatgatgcgccatacacttaagaataagccgtgtaagaagaagcttcaccaccatgagagtgtctt

SEQ ID NO: 220618 - DNA, 405 bp, Glycine max
agcttgtaaagccttttggttacttgtacttatgtctttttcttggacaaatgctcaacgtgtagcatgcttttgatcaaaggttgtacttacactcaaaaaaacctttcttttcgttaaattattgaaattcaaatcttagagcctattccaaaacaatataagaagagttaaccttaacattcaagctacataggaaatgggtctcacccattgaatcatccaaaaataaaacctaaaattgtgaaattcacaaatgctgccttatctattagggacaacgaaatgggtccgacccattgaatcacccagtttaacttgctaaatttgacgggttggattgcggatagaaatatcaactaccaacccacttaacctcatttgttttgatcccttaaaaatgac

SEQ ID NO: 220619 - DNA, 308 bp, Glycine max
tactagctaatgaatcagaatgcattagtaaagataagcttgagaaaacgaactttgtgggcatcagagagatagttgacacataatgatcgattatatgaatggcttactgggctatcttactatcattaacatgctctattaatatgctctagatcactcctgtccgaaaacactctatttaatccggaacaaaaaattatatgctgctagccttgtgcaacagagctaacaagtgtcgagtagtggtttaattatgctaagtcactcttggcttaaacactattggtatgttgaatgactggtag

SEQ ID NO: 220620 - DNA, 389 bp, Glycine max
  unsure (1)..(389): unsure at all n locations
agcttccatcaagtggtatctaagcactatatcttcaagnaggtgctccttaaacctctattaattttttgctttaccttctcttccattggtgtttcatcatttttctccatgtatctcctcacatgtcttgtgctaaatgtttttaacatgattctttagagtttccaccaattaaacttgctatagaagctaaatttgattttctatggatcaaatttcttgttcttattcttgaatcatgaattgcgttgagtttaggctcctttcagttttgccttgttattttttgtgactgaaactactgtaagctccattggagcttgaaggcctaagatcgtcttcacaatggattcctttcttcttggacgataatggaacataatgga

SEQ ID NO: 220621 - DNA, 305 bp, Glycine max
ccatcaccttggttaccacggccctttcatcaaaacaaagagttcaaatggatcattgctgttcaaccttgtcagtaaatctgaagaacctcaccacacacaggacagcaatttaataatggtgtccctgcataccagaagctttctcagcaaataagaatagaacaaactttcaagtaagtcacacattataattataaatcatcaaatcacaaataatgatatagagataccacttaaatacctaacgcagagcactttgagcaaagacaaaatatgatacaaaattaaaactttattctcga

SEQ ID NO: 220622 - DNA, 400 bp, Glycine max
  unsure (1)..(400): unsure at all n locations
agccttgtaaatggctagacatgatacatgttttggcttggtttggntcaaggataaaagggatgccccacattatttccatgacacaaatgcaaaaaatgatgaattggaaactttatgcgaaactggtcatgcatgcacctatgcggacactcaagtgtcaaatttttatggtcatgtgatgctagggctcaggattcatttcctctattttagtcaacccaacgtttccaaaatatgttcttttatcaatttgtgcattcatccgagtccaatttgggcgtctgggaaaatcttcacagcattcacccttcaagtgtatacacattttttcagaaactagttatgatcagtgagattttccaaagaaaagttggaagtcatctctcttacaaagcat

SEQ ID NO: 220623 - DNA, 451 bp, Glycine max
  unsure (1)..(451): unsure at all n locations
tgcaaaaacaaatggaatccatttttgaggtgaaatcgaatgcttgcggtttatgcaaaaaatggaatcaagaactaaagtgaaatcagaagctactcacaactcacaatattgcatcaaaagcttgcatttcatagcctctttctgacaatcatttcatcagagtatagaatgggcatagcctagaacctacgaaccgtagactgcaatcttgaatttgaaatgtttngaaagttggtagagctgaaagactggaaggaagaagcaacgggaatgttgcgtgcattggtgatggaagatagtgaggaagctaatacgcgacacgaggaaattaantattggaggagacgcgatgcactgacacgtggatatagcggacgtctgtttattactaactaacgcatagactttaactatgttntgacctctttcacttcagacaagaatatac

SEQ ID NO: 220624 - DNA, 403 bp, Glycine max
  unsure (1)..(403): unsure at all n locations
agcttcnttgagagaacgtgcttgttgtgtttttttgacaaaacccccctgagaagctagagcttagctacacacacccctctcataactaagctcaccttcttgagaagcttccttaagaagattcctaaagaagctagagcttagctacacatacctctctaatagctaagctcacctccttgagatgagaagctagagcttagctacacaccccctataatagctaagctcacccccatgacaaaaaacatgaaaataacaaaaaaagtccttattacaaagacaacttaaaaatgccccgaaatacaaggctaaaaccctatactactagaatggccaaaatacaaggcctagacgaaggaaaaacctattctaatatttacaaagataagcgggctca

SEQ ID NO: 220625 - DNA, 400 bp, Glycine max
  unsure (1)..(400): unsure at all n locations
ttatgtnggncatgctgcgcgctctatctctatcatttgattcctctaagaggaagcactcgtcacttccctatctaattcccgcgatatctgtgctgtggagcacgttggattntcagacttaatcgggtgaagatctgatcttgaggggttcaatgataagataaggagcactgagaagtggaccacgactgatgaggaggagtagtagtaggaggaggagagcttacattttgtggcattctatggccaccaatatctttatctcattaccaatgtccacttaagatggatgggaatgaatgatttgaatcatattataaacatgagaagaccaagatatactgtttaaaagattaaaaatcatactgtaaaatacaatataacgatctatatgagc

SEQ ID NO: 220626 - DNA, 399 bp, Glycine max
agcttatggattataaaataagtgttccgtattgtttgacaagtatcccattgagaataaatttagaattaatccttgtgtccatcatatccataagtcagggaagttgttgttagaaaatgatgaaaagcagcctttacaaattataaccccatctcatcatagtgattcaggtacttatttagcacttgacaaacaaaaggttaaactaagtgatcagtttggttttaaatccaacaattgcagaagtgtttttaatgttggtgcaagttatcttaattttggaccccaatggatggccaaaatgaagcatttggaggtgcttcaactgggtcgttggctgcaaggttcaccaaaacatcatattgaagtggagagtgaagaattctttgaggagtt

SEQ ID NO: 220627 - DNA, 244 bp, Glycine max
tgcgctcatcggtcatcaattgtgtgcctgagattagcacgtcacaattaaccaatcacattgacaacaacaacatgtactaagaaacattatatagaccatcatagaatagtgaccaaaatattaaatcattgaatggactgttgatccacactgctcttggaatatataaaccacttcaattatagtaaacattttgcaacaatagtgatggcataggacaattgtgcaaagtgaattatag

SEQ ID NO: 220628 - DNA, 262 bp, Glycine max
accattattgggaaatccgcatgcaaatatttatagaggctatagatcttaatatatgggaagccataaatattggaccctacattcccactatggcgacaggatatacaaccatagataaacctatggatcaatggagtgaagaggaaaagagattatttcaatactatttaaaagccaacaatatcattacatctgcattatgaacagatgaatactctatggtgtcacattgaaaacatgcaacagatatataagatac

SEQ ID NO: 220629 - DNA, 395 bp, Glycine max
agcttagactgagttcagcctaccatcctcttactgatggccaaactgaacggaccattcagtcattggaggaccttttaagagcatgtgtcttaaagcagaagggaagttgggagggttttcttccattgatagagttcacttataacaatagttttcattctaccattggcatggctccctatgaagctttgtatggtagaagctgtagaacacccctatgttggttagagcccgaagaaagcctcaccttaggaccagaagtggtacaacaaaccactgagaaagttaagttaattcaggaaaggatgagaactgctcatagtatgcagaaaagttatcatgataagaggaggaaagatctggaattcgaggttggggatcatgtattcttg

SEQ ID NO: 220630 - DNA, 424 bp, Glycine max
  unsure (1)..(424): unsure at all n locations
tggtcctggtnngctattgcacccncatgttttactatatacaccccttgctttttttgatgattctttttccgtaacgttatgaaactgtacgaaatttgtaacgatgcttggtttctttccgtaatgttacgaaaccttatggactacgtaatcaaaccctatttggtgtttgggatgtcacagaactttacggattgcgcactaacacttccttttaattttcggcatgtcacggaacttcacgaattgcctaacgataggtgccaagtacctcgaaatggtcatacgagggtcgcatcccaacaacggatggtccccagatgaaattagggtatgacagtatgctgtcgctcacgaagaagccggcctccaatcatctcaacgtcctcttgtcgttgtcggaatcctctggtgggtactc

SEQ ID NO: 220631 - DNA, 365 bp, Glycine max
  unsure (1)..(365): unsure at all n locations
tatactccgancaactgatgcaatctatttgattgaaaagataatttatattacacttctaatgtagtcgacaactaaaaaaaaatataacagaaagtaatgcttaagccaatcaaatcaaatcatttagaatctcatcattactatcatgcatctcaaagagaaggagaatcacgcatcataatgtatagcacaacaaaacattaaaagaaaacatgccttctaaagccaaccaaggtaaaaatgtatttatatttgtgaactttttcaaaattataacacatatataaccatatataaaaacatggttgaacaatctgaccacatgcacaacacattccacacattatttctgataatgagtg

SEQ ID NO: 220632 - DNA, 340 bp, Glycine max
  unsure (1)..(340): unsure at all n locations
ttttactactcttctatgtagtgacaactagaaaaataatatatcagcaaatagtgcttaagccattcaaaacaaggcattttgaatctcatcattagtataatacatatatatgtgtcatagagaaagataaacatgcatggtaatgcataacacaacaaaacattataagatatatgctttctaaagccagccaagggtaaaatggtttcatatttcatacaatagtttccacantatacgacatatataaccatttaaaaaggcatgggtgtacaacttgaccacatgcacaacatagaccacacattattttatataataagtggcactattaata

SEQ ID NO: 220633 - DNA, 399 bp, Glycine max
agcttctaagcctcgtttctctccccctttgtaaacatcaaataaccaaagtacatggtaagcaacataaggcagaaaataataatcaaatataactaaagttcacataatcattcataagtcaaaatcaaatataatttagtcataaaatactaagtgccaaatactgaaatataactaaagttcagagaataatgacttaaaaaaaacatagccaaatacacgacttaaaataaaagataataataatctaaatctaggaaggtggtggaaggtcgaagcaccgacgaaaataactcacatcctcttcaagttgagtgatgcgggtattcattccttcaaagcgagcatcaatagcatcgatacgaccatccaaggaatcaaagcgttcaccaacat

SEQ ID NO: 220634 - DNA, 442 bp, Glycine max
tcaagaaaaagatggcctcagcaaactccttatttccatataggaattctatcaatagacctccaatctttaatggagagggttaccattactggaaaacccgaatgcaaatttttattgaggcaatagacctaaatatttgggaagccatagaaatagggccttatatacccaccacagtagaaataattacaatagatgacagttcatcaagtgaaagtataactatagaaaaacctatagatagatggtctgaagaggatagaaaacgagtacaatacaatttaaaagccaaaaacataataacattgggaatggatgaatattttatggtttcaaattgtaagagtgctaaggaaatgtgggacactcttcgattaacacatgaaggaactacagatgttaaaagatctatgataaatgcactaactcatgagtatga

SEQ ID NO: 220635 - DNA, 284 bp, Glycine max
  unsure (1)..(284): unsure at all n locations
agcttagagcggattcaggcggaaagcacttgtgatactcggtatgttccgangncgaancaccgaaatataatcgagacgctcgtagaggatcacccaatctttgagtatattcaaacgacatatgctgtatactcggaagtcagattgagtccgtaaattaggcgagaagcttgataatgaacaccaaagctctgagcaaattccatccacaatagcttatgactcggatgtgtgactgagtcctgtatatttcacgcaccccgtaattgagggtcgagagc

SEQ ID NO: 220636 - DNA, 234 bp, Glycine max
tatggatggaacacccacctgggggtgacgaacaaaagctcatatttgtttcaaaaaacgcgaaaaaagaagaccctatggctgcaaactcgacaatcccaggggtatggcttatgaaaggggggaaaagaagaatttgaatgcgaaaacgtgcccccttgcgtcatgcttataatttggcgcaggggtggctcgcctatgcgagcacacacttgcccaagcgagcatcaccag

SEQ ID NO: 220637 - DNA, 399 bp, Glycine max
  unsure (1)..(399): unsure at all n locations
acctgccgcatgcaagcttgcagaatttggattggcgaaggcattttttctctttcatttacgcntctcgatctaggatctcttttatttcttgaatatctcggaaccacctatagatgtctgaatgaaggttcaattgcttatgatttccattttctgatatcactttatgaattggtttcaggcaaccaaattgaatgacgctaaatcatgatgggcacatcattctggatggcgcctgaggtttgccttcaatctttacatctgagcagaaatactgcataatggttcttctgccaagtttattaatggagtgtgtacatggttccaaacttcaaaataatttccttaacagtaattagatatgttaatatatgcatgacttgaacattatcttct

SEQ ID NO: 220638 - DNA, 313 bp, Glycine max
ttgtaacattgcctcatcactaagcctcaaaatgtatttactaaatctttatagtcaagtaatatgcagatcaaggaattaataagtgggcattatagctgaaacaagccaaattcatgctactgttacgctgtgaaagaattaagaattaaaatgcatctgctcttaataatgttaaaacataatcaggaattctgcgttaacatccatataaactcctgttctatgtcaatcaataatggaaaccaaatgcaagcgccggcacaataatcataatggttgacatagtattcattacaacttcatgcaccat

SEQ ID NO: 220639 - DNA, 404 bp, Glycine max
  unsure (1)..(404): unsure at all n locations
agctttgaaaaaggtgaggctcggnctattttttttacactcatagccactttttatttggcaaaccaagttctttctatatgtattggttgctttctcccatatattatactttatttttaggaatatgttatacttaatatgcttttttatcctcccatgtgcaatatttattaggttaattaatgttccatttatgtctttctgtgaagtagtagtaaacacgtttcgccttagctcaaccacaggtaccactcaatgcaaccaaagctagtgaaagcaaactactagtctctctgagaaatgttattatacgataattcatacaacagtttgtataaaaagagaatgcaacaaaattgatttgcccgatcgaaaatngattttactctttttatgcatta

SEQ ID NO: 220640 - DNA, 419 bp, Glycine max
tatgtcggttgtgaggattataaagtggtggcccaactgtattgttcgccattttttatcgccgtcatgattgctacaagttctctcacataggtggaggcgtgaagcaatttggagcataaggttttactaaagaatgcaataggatgattctgttgtgataatattgctcccatgcccacccctgatgcatttgtctccacgacaaagggtaaggagaagtccggtaaccccaagaccggtgccctgacacagggcttccttcaatttcgaaaaagcatgatcagctgcaggtgtccactggaattgatcattggtcaacaaggttgtgaggggagcggtcaccgtggcgtacccttttatgtaacagcggtaaaatcctgagaggcccaacaagccacgaagggctcgaacagact

SEQ ID NO: 220641 - DNA, 393 bp, Glycine max
  unsure (1)..(393): unsure at all n locations
agcttngaggggttgatggggactcggtgctgttatttattttgattacggctacctacgagtgcgtgagctcaatttaaaggtgggcaactggggatggtgtgttcatgtttgacttggggaagtgggagaattgatttgcaccatcgcccgatcgccacctagtaccgcatatgacgggtgccccataatccaataagcttgatgtgagaaagcgtggaagagtcagtcttcttacttttgtttgttgaccacagagtggtacttggagatatgtcgcgggggtcatgagaccttggggacgtcaagtggtgtgctattgcccaaaaccaaacttgtttaatcccgacccaacccgggcatattcagtcagtaagaacctgcgacgcacct

SEQ ID NO: 220642 - DNA, 438 bp, Glycine max
ctcagctgctagggagctcatggggctggatcttagctttttgttgtccttttatgggatttccaccatggagatgcagcggaagacaaaggataagacgtgagaggaggcgccatccattaaggaataagccatggaagaaggagcttcaccaccaagaattgccttggataaaaagcttgaagaggatgctctaatggaggaaaagaaagagagaaggggggagcacgaaattgaaggaataaaagagggaaagaagtggaactttgaagtgtatctcataagactttcattcatcaaagttaaaacaagtgttacacatgcttctatttatagactatgtagcttccttgagaagctttcttgagaaaacttccttgagaagcttctttgagaagctagagcttagctacacacacccctctcataactaagctc

SEQ ID NO: 220643 - DNA, 392 bp, Glycine max
  unsure (1)..(392): unsure at all n locations
agctngtaggattatggggtacccatcacatgtggtactaggtggcggtcgggcgatggtgcaaaacaattctccacatccacagatcacgtataacccaccatcccctgttgcccacctcaactgagctcacgtactcccacgtagcccttatcctcgttcctctcaacgccgggtccccatcaatcctcccaagcttccacaacatccaagtaattcaacatccaagcatcatgaactaacacagccaagaaaacagggcagaggcagaaaactctgcccaaaacacaaaccaacatcacaacttttcacactcaaataccccaataatattctcttcgttccaattagttaaccgttggatcgactcgaaaattttactggaagtctct

SEQ ID NO: 220644 - DNA, 433 bp, Glycine max
  unsure (1)..(433): unsure at all n locations
tctcagctcacacaacttatttctanacttgagttggaagttctttactaagnctttcctaactagatgattgacatgagacatgtttatttgtgcaatcctacgatgccataactaagaatcatctatcttacttaccaaatagctaagctcatgaaatgatgcatgttcaatgttcaaaggagatgatatggactaagatgcaaaattcaatataacaaccaataaaaatgccactcaaaggagttgggcatgtaaaaaacaaaacatcttcaagcttttctccaagcttcaagctttagtcttcatgttgcttcccttatctctaacagttctcggttagttttaccccaatataagggagttcattagaaacactctgagatagatagatagatatatatagagagagagagangttccttgtattatg

SEQ ID NO: 220645 - DNA, 386 bp, Glycine max
agcttgaaggagtgtagcttttcatctttttatagtagaatactggtaatgtgtctactatcattgtcatcatttttttctccgccattgaggtgccacttgagctgccaggtctctcctcctttgggcgtattcttttgaaagattcgtgcccccttttttcacatgttctgtagttgcatcctatccgaagacattatactgacactgcttaacgaaggcaaccactaggtccttccaagaatggactcgggaaggttccaagttagtgtaccaggtaacagctaccccagtaagactttcttggaaggaatgtatcagcaattcctcatattttgcgtatgcccccatcttccaataatacatctttagatggttcttggggc

SEQ ID NO: 220646 - DNA, 341 bp, Glycine max
agctactagtctcaatattgatcgtgtcgatatatcacctaattcaatcggacatccgagtaaaaagttattgtcgtttgaatttgctacgagcttccattttcaacttggagcgtctcgatatattacgggactcaatcggacaaccgtgtataaagctattgtcgtttgaatttgctaagagcttccgttttcaatttggagcgtctcgatatattacaggacccaattggacatccgggtataaagtttttgtcgtttgaatttgctacgagcttccgttttccatttggagcatgtcgatatattacgggactcatgaggacatccgattataaagt

SEQ ID NO: 220647 - DNA, 394 bp, Glycine max
  unsure (1)..(394): unsure at all n locations
ccatcgcgatatattaccggattcattctgtaatccgcgnagaaagttagtgtcaattcaatttactcagagcttcggatctaaatcttgagcggctcgatatattacaggacttaatcagacatccgagtaaaaagctattgtcgcctgaaatttgataccagcttccgttttcaagttgaagcataccgcgataaaagacgacactctgtcaggcattcgagtaaaaagctatacgtcttgtaatgttctaagaatttccattctcaatttggagcgtcttcatatattacgggactcacgcggacatctcgggaaaaagatattgccattgaaatttagctcagagctacttatctcactctgaacgtgctgtatatataccccattcaaa

SEQ ID NO: 220648 - DNA, 403 bp, Glycine max
agcttaaagaaattatgaactattttatttgtttgttataaaaaaagagattttagaaactgttatttaatttgagtattgttatcatgagtgtgagggaaggtagtgtgcgattaaaccaaagcaaattttattcctttgtatttaacctactaaaaaactaacgtgttctcagtgcgtgataaaaggaagagtattacatgagaacatcggttactgaataaaaatttcgaaacattttgtattctttttaccattttattctttaattaattaaatgggttaatttgtgaatataaattttgaaggatacagtagtccaaataaaaatggacaccaaaagtagttactaaaacatgtatctcctttatatatatatatatatatatatatatatatatat

SEQ ID NO: 220649 - DNA, 420 bp, Glycine max
  unsure (1)..(420): unsure at all n locations
cttgatatatnggnggtgacataatattgtgattgttgtgtttatatgatgnatctggcgaatgagaaattctgatttcgttcttgtgttgtactatctggcaggacgacaagagaaaaatggttgcatctgcttttggggaagaccatgctggcgcgtctggaactcgccttacagtagatgatctgaagtatcttttcatggtgtagactctagaccactccttgcttgttcttcccatgatggatgatttgaagttttgttttgggtggtttggcatggagttaggatggttcttaaggaggagggtatgactgttttttgagtacctgctgacatcggttgcacaagttggcaggcaaggcgaggctttggtgatccaagtggtaacttgatctgttttgaagcccacaagggcat

SEQ ID NO: 220650 - DNA, 380 bp, Glycine max
atcttcaataataggcctaactcctctccattatctgattttaggcttaaatatgtggctttgctggatcttgtgaggccacagtccctgagccttctgttgaggaggcaagtaggtcacaaatgagatagaaggctgctactcttgataggtcaccacaggttacaccaaatccacccttaccagtggtggatatattatctactcagcagccatcagacctttctacactagtgcatgagatgccagcagaccctcctacaccagtacttgagataccagaggaccctgccacaccagttctgggactgactactactcctccactcactcctgtgttacactttacagataaggaggatactcaggatcaggacacc

SEQ ID NO: 220651 - DNA, 425 bp, Glycine max
  unsure (1)..(425): unsure at all n locations
cttggtattatgaagtcaagatctgtcaggatttgtactctttccagcagaattccaggtttgttaatactatcaaactgcagtttattntttgaaataaagaaataaaaaggactcattagatattgcataaacttatctccatattaatgattctttcaagaactatggaaaaaaatgatctgctgatgatagccgccactcgggatagactactgttttgcataacttaatcttttagcaattgacttaatggggttttaacagaatttctatgtattcaataagtttttcaattgagttttctgtttaaacattcaaagtagatcaaggaagaaaatacttcttaacatgagtttctaatcaaaggcaatcaagaaagtggtatcacttgtgggtgggatgagaatgatcttcttgtaaat

SEQ ID NO: 220652 - DNA, 382 bp, Glycine max
agcttggtaggattgatggggacccggtgtttataaaaacgaggatatgggctatgtgggagtacgtgagctcagttggagttgggcaacaggggatgatgggtttatatgtgatttgtggatgtggaaaacttgttgtgcaccatcgcccgaccgccacctagtaccacatgtgatgggtaccccataatcctacaagcttgagatgaggaaatgtagaagggtgaaacttcctgcttttattcgttgaccacagagtggtacctggagatatgtcgcgggggtcaggagaccttggggacgtcaggtggggtgctattgcccacaaccaagctttaccaattccgacccaacccgggcatagtcagtcagtgagaacctg

SEQ ID NO: 220653 - DNA, 423 bp, Glycine max
  unsure (1)..(423): unsure at all n locations
tatgaaacccnncttttcaatattaaacaagctgaaaactcacaatcacaagtaacaactacactaaatgcaagcaaaacaaaattaaaaatgactgggttgcctcccagcaagcgctcatttaacatcattagcttaacgcatcgttctggtatcctaggtcaatcttggttctctccttcaaaaccttcttatccaactccttcacctataagcatacatcctggtccaacaattttcttccttcattaaatagatcaaagttgatttgttggttttccagactcatttctaactttttcttcaccatatccacaacacagcttgcagtagacataaatgaatgtcctaaaatgataggaatatctgtatcttcctcaatgtccattacaacaaaatcagtaggaaagatgagatacttga

SEQ ID NO: 220654 - DNA, 411 bp, Glycine max
tgcaagcttgtttaacagcaagaacatccatgccattaacctgaacaaagtaatattcttctaaaaaataaaaaatattgttcaaaaagactacttactatgtaattaattaacctatgtatagatatgcagacaagtattattcaactgcataacaacacttgtaaaaatacacacctaagcaacggtagcaaagtccaaccaataaagacaacatatagcccacataatcctacatatttagacatcaaaacatgcaaaacaggaataaagcccaatgaggaggctaaaaaaggagagtccacagaagcatcaacgtataatgcaagaacaggaaaggcatacatccctcagaaatcaaaacctcattcagacccttcattcataagaccttcaaaaggcatttcgcca

SEQ ID NO: 220655 - DNA, 440 bp, Glycine max
  unsure (1)..(440): unsure at all n locations
tctccactaatntccagataactgttagctgaaaacaatatattatctcgactattatgaaagcgaacaaataacacattatggcaatcacaacaaaaacaaagaaaaagaacagaaccgtactaatagcagtgaaatgctgcttaattaagaaacatggatgtttcagattattctcgaactgaaatttactaccttgcatcatataattttgacttttttgaattttgtgccaatacaagtgaaatattaatatactataacaactttattatactgaaattttataattcttgttgagctagcctaacaagttgactcaaactcaaaaaagttcaataattccatggtgaaaaaatgagtcaactagcttggaaactaagaccggatcaaccttggctagatttgggaaaaattagatagactcagtcaaaaacatg

SEQ ID NO: 220656 - DNA, 404 bp, Glycine max
agcttgaaattgaacaacggaagctctcgagatattgaaatggttataacttatgacacggaagtccaattcaggcgcataatatatcaagacgctcgaaattgcacaacggaagctctccagaaattcaaatggtcataacttttcaaacggaagtctgattcaggtgcataatatatcgagaagcttaaaattaaacaatggaagctctcgagaaattcaaatggtcataacttttctaacggaagtctgattaaggtgcataataaatcgagaagcttgaaattgaacaacggaagctctcgagaaattcaaatggtcataacttgtcacacggaagtccgattctgacgcataatataccgagacgctcgaaattgaacaacggaatctgtcgagaaatt

SEQ ID NO: 220657 - DNA, 440 bp, Glycine max
  unsure (1)..(440): unsure at all n locations
tctcgaataatatacgcctgaatcggacttccatctgattagntatgancattngaannncncgagagcttccgttgttcaattttgagcgtctttgtatattatgcgcctgaatcggacttccgtgtgataagttatgaccatctgaatttctcaagagcttcctttgttaaatttcaagcttctcgatataatatgcgcctgaatcggacttccatttgtaaagttatgactatttcaatttctcgagagctttggttgttcaattcagaccttctcgatatattatgctctggaatcggacctccgtgagataagttatgaccatttgaatttctcgagagcttccgttgttcaatttcgagcgtctcgatatattatgcgcctgaatcggacctccgtgtgacaacatatgaccatttgaatatctcgagagcttt

SEQ ID NO: 220658 - DNA, 404 bp, Glycine max
  unsure (1)..(404): unsure at all n locations
agctnttgttcctttttataaaaagagaagttatgaaactcatcacgttgnctaaaaaggtcttgaggtggatccaagtgctatgatcattcattagcatattcatgatttggtggcatgctcaccactgtttgtttctttagggaactcaccataactaaaaaagcgcaaaggcacccctataacacccgatccaaaagtaagatggataacgaagagggagtgccagaacagataaaggccgacatgtcggccttaaaagatcagatggcttctattacggaagccatgctaaaaattcaaaaatcaatagaagacaatgttgcggcagccgcttccaatacagctagggaagcagaaccggtgctacagtccgcaataaacttgggtcgagacaaaaacgt

SEQ ID NO: 220659 - DNA, 437 bp, Glycine max
  unsure (1)..(437): unsure at all n locations
gtcaagaataatggccttncaaaaatttattcccagatttatctctattttaggcctcctattttaatggagagggttactactactggaaaatccgaatgcaaattntcattgaggcaatagacttaaacatttggtaagccatagaagttggaccttatgtacccaccatggtggctggtaatacaacaatagagaaacctagagaagagtggtctgaagaagaaagaagattagtgcagtacaatttaaaggctaaaaacatcattacttctgccctaagaatggatgaatattttatggtgtcaaattgtaagagtgctaaggatatgtgggacactctacaagttacacatgagggaacaactgatgtcaaaagatctaggataaatactctaactcatgagtatgaattatttaggatgaagacaaatgag

SEQ ID NO: 220660 - DNA, 409 bp, Glycine max
  unsure (1)..(409): unsure at all n locations
agctttctcccaagtcctaaaggacanngcagtgctagtattaactcactttaacctccatttaccacagaattcagacttagccttccaactctcaaagcctcactctttttccaatcataacaccacattctcactttccaaccctaggttaactctatatttcatctctaacagttttccatgggcaatttcagcatacaaacatcacaaacatcatcacaaaaccctaaaacagaatgggtatgtctaactcacccaaacatggcaatttcaacaagctttcaacaagagtcttcacaaaaaaccatcatgaagcagaaaactaacaaaactacccatcatatctcccaaaaccccatacccacgaaaatcaaaggagaaagaagtccacccaaacctgaaattt

SEQ ID NO: 220661 - DNA, 437 bp, Glycine max
  unsure (1)..(437): unsure at all n locations
ntattgaaatcctaggtgtccaatgtgttacttttcttttgttatttctctaaanaacttacagntgatntctatatacattaagtttcttgcccgcccaaaaagggacatgtgcatagcttgtttttccacattgattcttttaaaagtttcaattctccttatattcactccctttgtatttttcaattacattttgatttttaaagatttgttatgagttaggataagcaccaccacagatcaaatattctctaagtcatacaagatagtggagacgaggaagacttgtgcttagaaaagaacaactattttttttttgtagtgaaaggccaatattgttgtacttttcgtttatctctcttcaccatataaagacatgttgcaaggggcacatgtgatttttccaaacgggaagaatcctataggttcacact

SEQ ID NO: 220662 - DNA, 409 bp, Glycine max
  unsure (1)..(409): unsure at all n locations
agcttgaaccataaccggtgagagngtgatcttattcttgagtgaacgactttctttgagtaatagtctttgcatcaatctctgaattttagaatgaaatgtatgaataaggccatgattgtatatacaagccaattgaccaaaaagcttaccttgaattataattgtatcctttgcaccctttgtgatttgaatgatattttcaaaattgaaccctgaacttaaatgactatctctagataccttgcttagattctaggagagcagatggttcaaggcaatttacccctaactgggatgcaaagtgaaaggtaaagcacatcagcacacgcaactaataagttatgtttaaaaaaaaatcaaagaaagtgtgtgctattgtaataaggtcaaatgcaaatttaagtga

SEQ ID NO: 220663 - DNA, 424 bp, Glycine max
  unsure (1)..(424): unsure at all n locations
tggacgttaagaacgctactgagaggcaacccatctttttttanttttctaancaananngngggctgggcatcattacatgtagctaggttgcgactcatttgagattgctagagtaaagtgttaagcatgttttgtgtgataaaggggttggccaaaagcttctctgaagcatatgataaggaaagaacttacaaaaatttttagtcatccaactcgctcagtgtgccccatgcactaagcgagacataccctatgcgctaagcaagtagcatctctcgctaagcgcactaacccccatccattggttggtggggtctcgctaatcgagacaatcgctctaagccaaaaaacctctcgggttgtgcatttaatggaattgggctaagcaagtcatctcgctgagcgcaacatggtctcttgc

SEQ ID NO: 220664 - DNA, 388 bp, Glycine max
agcttaagccatatgatgtgtttaatgaattttttgttaaagctgcgatacaggtcctacttctaatttccataccaagactatgaacagaaaattgttgattctcacgaatgatcacttctattaactgcttcctgggctatatataaatgaaagcagttctatgggatgcataactagatctacatactgggttgtatacaattttctacaatctttgcatgtaaagaggtctgacacagatctctgaaatgactagagcagtccatggcttaagacatgttctatttctatcaatagagaccacaaacataagtcgaatgatgcttgaaagcattcacaacatactacattctgatttgtgtggggaattggtgaaattatctgg

SEQ ID NO: 220665 - DNA, 375 bp, Glycine max
cctcttgctatatatataggaagacatactttggtctacactcatgtttatttgcttgatacctgtgtactaacacaaactaatgaactttcttatgttgatgggaatgatacaatacactggtctcatgtttgctgaacatttggtgtgaacttgagtaaatattacttattcaattactcttcatccaaaggttgtggagaatagcaatgctgatgctgctcggtttgaccccttttggaatgagatcataagacatctaagggaggaggattattgttccaactcgttagtcatggaagctgctatacatattcttggctttaattatcatcgcttcatcccttcttacttaatagcctgaatggacatggt

SEQ ID NO: 220666 - DNA, 393 bp, Glycine max
  unsure (1)..(393): unsure at all n locations
agctttgaatgctctattcaatggagntgactagaatatcttcagactgatcaacacatgtacagtggccaaggatgcttgggagatcctgaaaaccactcatgaaggaacctccaaagtgaagatgtccagattgcaactattggccacaaaattcgaaaatctgaagatgaaggaggaagaatgtattcatgacttccacatgaacattcttgaaattgccaatgcttgcactgccttgggagagaggatgacagatgaaaagctggtgagaaagatcctcagatccttgcctaagagatttgacatgaaagtcactgcaatagaggaggcccaagacatttgcaacatgagagtagatgaactcattggttcccttcaaacctttgagct

SEQ ID NO: 220667 - DNA, 394 bp, Glycine max
  unsure (1)..(394): unsure at all n locations
tttctctgctngcacgagagtctagccttggcttgaagcttttgcatgttaaggaagttctagagagagaaaggtccaagttccaaaaagttttgagagattttgctgtgtgaagatctgcagagacaagagctcaaagcggaagccgttctgagagcttgagatgagtttgcgagtgattgtgagatcctagaggtgaaggagacatcctcaccacttgtatttttgcaatctttcatcttgttcttctctgcgttgtaaaggaggtttccggactatggaaagctaaatcctttgttggatcttccctgtaggtacctgatgtaaatatatatctatctatgtaatgatgttttgtgtgttctctgtgctatctgctnttcattccagtatg

SEQ ID NO: 220668 - DNA, 395 bp, Glycine max
  unsure (1)..(395): unsure at all n locations
agcttctatataagctgatctattttatcattaaacacaagnngagttttattcagaaaattagagtttatctcttttatcttagtgagagtgattctcctaaattcttgagtgattcaagaacaccctggctgtatcaaaggactttcacaacctttgtgtgttgccctcgctggaaagagagattctttccttcctatcatctccacccttgttctttcaaaccacaattccagaaaatccacctctgcccaaaattatctcgtgaccataactcccattttacacactcaaattaagtgattcttgagcctaaattgaatttcaaaacgagacctttcacctcgttttggactcacctcatttggagccctgtagcttccgttattgccatt

SEQ ID NO: 220669 - DNA, 383 bp, Glycine max
gacaatgcctacaagattgacttgcctagtgagtataatgtaagtgccactttcaatgtgtctgatctatctctttttgatgcagatggaggagccttggatttgaggacaaatccttttcaagaatgagggagtgatgaggacataacctagggcaaggaccatgaagcacttgaaggtcccatgaccagaggcagacttatacaagcccaacacgtcatagagacaaggctggtcatttgtatagctgccattgatgatgattgaaggcccaagtggagaaagatgaatgcccataggcagaggcactaccaagactactaattgttgttgaggcccaaactaacttgaaggcccaagttaaataaagttttagttataat

SEQ ID NO: 220670 - DNA, 390 bp, Glycine max
  unsure (1)..(390): unsure at all n locations
agcttatacggattnnggatttgtaacatttagttaagnnnaaattttttttagttattaccttatttgtattatcattttaaataataatttaattgtttatatgtgtagaatgatataggatttttgcattttactaatcatgagttattgtgactgacagtaaaagatggacgaagttattatgtagtgttttctattatatatagtgtgcggttaggtgttgtatgtttgtgttgaaatttatgatttattgttaagatggacgaagatcaaaatgaagaagaatgtggtgtgaatgaatcacatgttgattgttcggatgcgttcaatatttctcaagtaataatgttcattattgtgagtgatttaataaagtgaatgtgttgt

SEQ ID NO: 220671 - DNA, 417 bp, Glycine max
  unsure (1)..(417): unsure at all n locations
ttttatcttcaaactctatgaatacatgttcgttttcttgttttcttngncaaagcttaattttttttgtgttcctgacgttgttttctcttggttttcttgcattttgggttcaaatctatagcattgggtatctttgtgaccgacagcaacaacgaagacaacaaatagtgtccgacatttggaggacagatttgtgatgtatttcatttcttcaaaaagctttgattttgtatgtgttttttttccagttttttattttttcactgcatgttcattgtttcttctaaagctgtcatttttatctcaaaaagcttcgatttttatctccaaactccatgaacacaagttngttttcttgctttatctcaaaaagctttcgatctttgcctctatccctctcgatgtggtgttgat

SEQ ID NO: 220672 - DNA, 403 bp, Glycine max
  unsure (1)..(403): unsure at all n locations
agcttctatggaggctgtaactangttctttattatggncattcaatggngatattcagccatagagttgcagcggaagataaaggagaagaggtgagaggaggcgccatccactaaggaataagccatggaaggagaagcttcaccaccaagagagagccttggataataagcttagagaggaaacttcaatggaggaagagaatgaaagagagaggagggtgcatgggaattgaaggagattatgaagaaaagttgaactttgaagtgtgtctcacaagtttctcattcatcaaagttaccacaagtgttacacatgcttctatttatagcctatgtagctctcttgagaagcttcattgagaagctagtgttacacccctctaatagctaagctcaccct

SEQ ID NO: 220673 - DNA, 433 bp, Glycine max
  unsure (1)..(433): unsure at all n locations
cttacctgtcaaactcaaggaacctacttgtagattatattaggaaganaggaaggaactttgggtccaagatgcaagctctccctcacccttattgcagttctacatcatccgcaccaccttaaccctaaaaaccaacataaaacacatcaaaaccttgaaatagtacacctttatgaaacttctaaaagtgcctatggaagaaaacaaaaatggaggatgagaggggaaaaaaaagggtttcttacctctaaaatcaatccaaattcgaaaaatcctttgtgctaaggtttcaagtcactaaaaactaagtgtatgactcttcctcttttttctatgcgcaccgcatagcttcctaagctcacttactccattctatatcactcaaggcccattcatcttagcccaaacatcctaaaacagactattcaca

SEQ ID NO: 220674 - DNA, 382 bp, Glycine max
agctttaatgcttgagctgttagcaagtgttattgttatccttgctcagaaaaaaaatcaaacagcagatgataccaaagagcacaaccctcctacactttaagcaggaaaagcacagtgactcttccgtaagagcttgtggggttggacagattgagagacagagagccataaatattggctataaagaaaaagactgattgaacttaattactgatattttataccttaatgcttgaccttcttttcagtttatccagggtaatgattcacctacaccgatacaccatgatggcatgttgggattagatatcttattactttaatacatacagtgtgacttcgagaatattttggagaacaaattagaaaagaatagtaa

SEQ ID NO: 220675 - DNA, 348 bp, Glycine max
accttatgacctactcacagtaacaacatttaatgccccaacgcagctgtaactatcaattactattcaactctgtgtgcctattataaaaaaaaaaactattcaactctgtattatttttgttttacaaatactaacaagtgttcttaagatattaattaaaaaactaaaagatttgtttttgaatcagaatatataaaattatattatttatgctatttgtgattttcataataaattatattttttataattctttgattaatatccaaaaaacacaagttagaaagatcctttttgatttggtaagttcaaatcctcattttaatgcatgtaacatattttgtt

SEQ ID NO: 220676 - DNA, 383 bp, Glycine max
  unsure (1)..(383): unsure at all n locations
agctntgacttcagtcatcaaaagattatatttatgtgaccatggcatgaatntgaacaatcaagaaatctatctttcaatcttctctctcaacatcattcaatatctttcaactctttctacagaattttttgattcatttctctttatctttctaaaagttttttttcaaatactttctcttccaagaaaagttctttgttcaaaaacttgggttattcatctttttcattctcttctccctttgccaaaagaacgaaggactaaccgcctgaattcttttgtgtctctcttctcccttacaaaagattcaaaggactaaccgcctgagaattcttttgattcttcccttccccttaagcaaaagatttcaaaggactaac

SEQ ID NO: 220677 - DNA, 416 bp, Glycine max
tctaatgtatatttctagaccgaaatccaattattaacatctaggccattaatgagttgaccattatttgaccaaaggattttcattgaattatccttattctttctagactttaggttaaaaacttaagagcttaaccatgctttggtgtcctatggtaacatctctttttctatcatttcaatagtctaaaaacactattcaatcacacaacaaagcaataacattgtctaccacacacacatgaaaaattgggatgttacagatggctcgttcattctagcatttgctctactaggtaaatgtcaatccttcctttggtaataagattttcttaattaatagggttatgctatctattatgatgttggaaaattgctttattttttcttcttctatgcagtggtcatactaaa

SEQ ID NO: 220678 - DNA, 414 bp, Glycine max
  unsure (1)..(414): unsure at all n locations
cctgcacgcatgcaagcttgtacacccaaattaggttttagttgatcaattccctgtataagaaggattaggncaactatttcaccctcaaggagtttaacagaactttagagaaacaacattgatgccaataatattcaacttacagatgctagaggccaacccttcaatggaagacttgtaactccttgatttattcctgaaggatgattaataaacatcaacaaaaaatacctcatgtgatacaagtttcacaagatgtgtcagccatgcaatgaatgtgtcaagggcctgcctcacatactgaatttctgacgttggcaacgggacttgagcgtcaccatcgtaaactttttcaacactcaccgttaccacatcatctgcataaggcacgttgtgtatggtagacctacc

SEQ ID NO: 220679 - DNA, 440 bp, Glycine max
  unsure (1)..(440): unsure at all n locations
gctgccaccagaacctattctttagtccatcatcattatatatgcttgttcaatgttttctttnangnngcttttattctttaataaagtattttaaaaaataataatttaattttgattcattttttttctatcctttggagtatatgcataacaaaaagaaaaagaaaaagtactgtgtcatcaagaggcagagcaagagttgtggcaagaagagaatagccaatgattactccaatttcgagtgttttcttcgcattcaggattttaagcaacattgatatgaactgcgcttcctccgctggaatactcaacaaataacccctactgacatatatataaatgataaacccttcacaataataatttctaatatactatatcaacaaaataagttaactcgattntattttatatattatcataccttaataaagatg

SEQ ID NO: 220680 - DNA, 401 bp, Glycine max
agctggcctcaaagaggtccaggaaggacaaggcggccgaagtaactagtttcgctcctgagaatgacagccaccgctttaggagcgctgtacaccagcagcgcttcgaggccatcaagggatggtcgtttctccaggagcgacgcgtccagctcagggacgacgagtatactgatttccaggaggaaatagggcgtcggcggtggacatcactggttactcccatggccaagttcgatccagaaatagtccttgagttttatgccaatgcttggccaacagaggagggcgtgcgtgacatgagatcctgggtaaggggtcagtggatcccgtttgatgccgacgctatcagccagctcctgtgatatccgttggtgttggaagagggccaggaatgcgag

SEQ ID NO: 220681 - DNA, 385 bp, Glycine max
cttcataatcctcctatcccctgagttattataggggttggagcacatatcttcaatgaccttgatggcatcaataagggttttaacatgaggttacccctacaagcaacatccaaacttgtccttttatgtgcgaacactctaccatggaaaatgtgaattatcctttgtagggagaaacgatgatgtggatagcttctgatcatctcttggaactttcccaggcttcaagtagactctcttgttccctctgcacaaagtttccaatggctctgatatattgatttgtattcatggtagataaatacctccataagaaagcacttgtgcactggtttcatgtagtgatgttgttctcaagtagtaaacacagtcggtcccatgc

SEQ ID NO: 220682 - DNA, 403 bp, Glycine max
agcttcagaccaaagcaactcaaaatctaggtatctaacacccctcaatttagtggattctcaaggtttgagaagtgaaactgagaatgggggtaattttggagcaaactctcatctcaaacaagtctataacattaatctaaactcgctcaaactagttttatgacgaaaactctaccgaatcaaaatttgactcctcaacacccaatttaccctagaaaagggctcttgccttcactttggtcactcattttcctcctttgcacagcccaagctttcccacagtcctaaatgacatttcaaactaggatttactcactttaacctccaattaccactaaatccagatttagcttttcaaatcctcaaagcatcacacttttccactcatatcactacattc

SEQ ID NO: 220683 - DNA, 447 bp, Glycine max
  unsure (1)..(447): unsure at all n locations
atactaagcttttatcggaatcttgaaantcaggacaacactctgatttctaanaatttttttgataaaaanggncattgactagncccttttccatgacttaaccaaactacccagtgacggtgtaccatttgaaggtacactgaatgacaactggaaatttgatttctctgcccatgatgcccgccagttggtttgcaccaacaatgcggatatgaccggacgtcttcttgccgggtcattggcttttgaaagccgcatccttcactatttaatcgtgcatattttgcttccacggtcttccaaccttgcccaggtttctgaggaagatctaattatcatgtgggcctttcatacagggcgtcaacttgactgggcacacttagtcagatatcgcatgcataaggcattgcgattaaatgctccactaccatatccacagcttgt

SEQ ID NO: 220684 - DNA, 393 bp, Glycine max
  unsure (1)..(393): unsure at all n locations
agcttatgtcatcatgaaccgacatgcatattttccattctttattgnncnaactaataaaaaattatatattaataatataaaaaattattgaaatcattccatcataatttatcaatttatcgtatataataaatttattaatttttaaaataattcaaataataatataaaattaatctataccgtcatttcatgatattaaacttctaaataataagtattctctcccctcttcttgttttgcttttacatgttttccacttataagatgttatgtcgcgcgtacgtgtaatttgtgtgctgaaagtaatgattatcctatatgatgcttctaagcaccattagaaaggagattttggtggggattggttactatttacgatggataat

SEQ ID NO: 220685 - DNA, 349 bp, Glycine max
tacttttaggcgcatcccacgctcaagccagaggagagggacttggacttgtgcatgctttttgcaagctgtaaacatccaccttttcaagcgagtgttgccatcaaatatcaaatatatcaaaccttcaaatacgcgtattgggtacagctcactacaccctattataagccaaaatcaaagtgatgtttttctgcgtactaatatgcgaaactagagtttggttatacatgtcttccttgaaaatccagtgatttatttgccatgcatgtattggtgcgaccgtgtccaaacgacgtattaataaatcattaatgattacatccacccacgttatatgttgattgga

SEQ ID NO: 220686 - DNA, 406 bp, Glycine max
  unsure (1)..(406): unsure at all n locations
agcttcatgatgatgaatcaagtatgcatcttttatttntgtttatgaaaaaaagcccaaaagaatgatttcaagattgagtcaacaagttcaagatcaagattaatttcaagattcaagagaagttgatttcaagattcaagaaaagacatcaagaagaatcaagattcaagagaagataattcatgattcaagagaagaaatcaagaagcaacaagtcaagacttcacaagggaagtattgaaaatgatttttcaaaaaccaaacatagcacagttttgttttacaaaagagttttctcaaatttttctaagttaccagagtatttactctctggtaatcgattaccagtttcctataatcaattatcagtgataaaatttgatttcaaaaagtttttaactga

SEQ ID NO: 220687 - DNA, 440 bp, Glycine max
  unsure (1)..(440): unsure at all n locations
gctattggtccctagaatacaatgtatgctgaatgtacctgtatctttacattcttcaggatnnggggaacagatttacgcggagacatttctgcccatactaattctttcacttcctttaagcttccgcttattagtgcacagctccttcaagaatttagcatatcttggaatttgctttattgcatccagcagaggtatgtttacctctacttttctaaatgtttccaatatctccttctctgcctcttccatttttttgttggaaattgctcttggagggaatggaagagggatatgctgcttctctttagattcacctgcatagaaattgttaggtaacttactctttaaatttttgtcatcatctttttctagagtaaagtgaggttgggcaggttcatttgcggatgaggaagatgttgctggttgaggtcctt

SEQ ID NO: 220688 - DNA, 390 bp, Glycine max
  unsure (1)..(390): unsure at all n locations
agcttgtctcagcatttatgcgagacggagttatcttgttatctatcatcgccaagnaccaagaagagttacgtctagccatggcccacgagcatagaatcgcggatgagtatgctcaagtatatgcggaaaaagaggctagaggaagggtgatcgactctttacaccaagaggcaaccatgtggatggaccggtttgctcttaccttgaacgggagtcaagaacttccccgcttgttagccaaggccaaggcaatggcagacacctactccacccccgaagagattcatgggcttctcggctattgtcagcatatgatagacttaatggcccacataattagaaatcgttaggaaacttgtatggtctctcagaccttgactagatacg

SEQ ID NO: 220689 - DNA, 370 bp, Glycine max
ttccctagtatatggtgcctcctctcacctcttctcctttatcttacgttgaatctccatggtggaaaatcaccattgaaggacctcattgaaactcaaagatctaacctccatagaagcttcataagcaagcttccatcacaagacacttatagtagtcaagaggatactacttctttcccttcctctagtggaagtgaagatgaagtaaggggtgaagagtctagtgaggaagtctaccctcatgaataagtacctcctaatggttagaaagctccttggaggccaataccaaagagagaacatctttcgtacaagatgcagaattctagataagactcgttctctcattatttttaagcctcgtatt

SEQ ID NO: 220690 - DNA, 390 bp, Glycine max
  unsure (1)..(390): unsure at all n locations
agcttttcgattcattctatgtgcccgnatgtgttccacattgtttttcgngcatntttattctcgttttgtttactttttataccccctgttgacgtgcttaagccattttacttaagtcatttctcgcttaacttaaaaataaaataaatttccaccgaacgtttgaattgtattatccattaacttcggttaaaataaattccgaccgttcggtcgtgccgtaaccacgttggaaatcaaaaagaggtaaaaaaataatataataatcaaaaagacatcttttagtaaaataaagcggaaaatcaatcggacgttttctctttgggatttctcattcttaatcgaattgattaataactaaagtgaaactaaaagctaaaatcaatt

SEQ ID NO: 220691 - DNA, 412 bp, Glycine max
  unsure (1)..(412): unsure at all n locations
tcggcttattagtgcacagctccttcagaattttcttatcttggaattngctttattgcatccagtagaggtatgtttacctctacttttctaaatgtttccaagatctccttctttggctcttccatttttttgttggaaattgctcttggagggaatggaagagggatatgttgcttctctttaaattcacctgcatagaaattgttaggtatcttactctttaaattttngtcatcatctttttctggagtagagtgaagttgggcaggttcatttgcagatgaggaagatgttgctggttgaggttcttgacactgctttcccgacctcaatgcaatggcactcacatatttgggattctggacagattgagaaggtaatctgtcagaattctgggactggtgttgat

SEQ ID NO: 220692 - DNA, 397 bp, Glycine max
agcttcattagagaatcgcattatcaaacattatcactaacatttacacaattatcaatttcagagagcacatttccagacataaagcaaacacgttgcgattccgtcaccacctcacccgtgtttcttcttctcgaaaccaaatagggcttatttgtcgcaaggtatggagaagacgaaacacgactgaggtggtgatgacagaacattggaatgtgaggaagaagaggcacgaggaagatgaacttacctgctaatggaacaaatgcggcggagaggcgcaggagaggcaaacagagaggagatgaacagacaagagtatgcgcaagagaaaatatgactcatagaggcattttaaatatttttaaatgtaggttttaatatcagtttttactaa

SEQ ID NO: 220693 - DNA, 396 bp, Glycine max
agcttatccgtagttttgtatctcacctggtttggtggaaaggctgttatatatatatatatatatatatatatatagatttccttcatttttctatatatctcagcaagtaaccgtagccaccacaaaatgcagcagccgaaggaacgacaaggtatcgatggagaagagcaagtagtgccaatgcgagtgaccagtagcattgatcatgacgaggcgtatttcgaatcctatgctcgaattagcgttcacgaacagttgctcaagggtttctttcttaatctctcgatcttgcgctaggtttttttctctttcgtttgatatactaattattttctaagaaacatgaatacctcttttgtttcaagtgttgtctgacacttacatggtgtggga

SEQ ID NO: 220694 - DNA, 323 bp, Glycine max
  unsure (1)..(323): unsure at all n locations
aataagaggggggaaagagccccaccggaagagacatcattnggtataagaagaaaaaagaactaataaactctattcttgacgtgagcctgtgacccccttcggaatgaaaaatcagggcatacacccactctcgattggtaaccgaaattacaggacgaagcggataaaaataagtcaatgaaaccaaatgctgtgattgaccacacatgccaatcaaatcttttctgaaggcgaaatcccatcctcacgaaggaaggtgcattattaggcccacatacatctcactgagaaataaaagaacaacaaaaaagtttaccaaa

SEQ ID NO: 220695 - DNA, 397 bp, Glycine max
  unsure (1)..(397): unsure at all n locations
agctntgatgactaaaatattttaatagtcttttttcttgagagattttcggcgacaagggtgaaattttgagagatttgattagtgctcttgtgttgatgactataataacatgcttttgacattaacagggtgagataggtgatgggcaggacgtacttgtgagagtacattctgaatgtctcattggggacatttttggggcaacatgtcaatgtaaaaaccaattaaaacttgcattgaagcaaattgaagcagcaggtaggggtgtcttggtgtatctccgaggaaatgaaggtagaggtattggcttaagccacatggtccgtgctagcccattggaagatgacaagtatgaggaattgcagctacctgttgattctagggagtacggtat

SEQ ID NO: 220696 - DNA, 434 bp, Glycine max
  unsure (1)..(434): unsure at all n locations
ggaccatcagngaaggcataccagtgtgcctcttattctatttttcccttaaatgtgaggctcactggccgtttttgaatgaaagacaagtctttgtcataatttatgccagatagaatgacaagaacatctggatttgctgcatgaatcgcttctgctcctttcaccatgtacctttagttcagaacaacaacttatcaatcacatgagatttctctttgtttcgnttttttttcctaattgagagagagaaaactattaacatgtaaaaagaatattttacttcaatcttgatagtcacatactattcaacccacaattgcaatattaatataattccattcggattatagaaatagagaaatacttaattaaaattttagtcctgaatcttttcagattcatttaaaaacaaaatttggcaactttttaat

SEQ ID NO: 220697 - DNA, 382 bp, Glycine max
agcttgtacagctccatctatgacagatgatttcttattaagatcatcctccaagcagaccttatctctgccagatatgaaacctgaacgagctaagagagctatcatctccaatgtcccttcccagtattccttaaaaaatataaatctttttgcaagcttttcctccacgagcatcctcatccacccagaacatatatcaggtgaaaacctatacatttggacattgggaacttccatgcatacagaatccaattcttcaaaagagcacaagaaatttccataattagaagacttcatattcatgttgcatcctaaagatgaggcaggctctacaagatccaaattgagttgaaggctttcagccgataggacatatgca

SEQ ID NO: 220698 - DNA, 406 bp, Glycine max
  unsure (1)..(406): unsure at all n locations
ngttgggagcagaggctcanaatatcttatttttgactttgataaacnggaagagggacgatatctagttattattgaactacacactatactagatgttctttacgtgtttcaatatgtattgacattatcattatatgactgataattgtaggttactgcaatggtgacaacaaacctcaataaaataattgatgttaattactacccagttgatactgcatttgtggaactgctttttgatctacaatttaagctagatgttcatcaatttgatactttacattgacatgaggggcaggctcagcagttgaacaaggatatatttcagactatatactatcatgcactaaaaactttatctgaattggctgcaaaagaaagtccctatgaaacacttagtgga

SEQ ID NO: 220699 - DNA, 383 bp, Glycine max
  unsure (1)..(383): unsure at all n locations
agctntataagtgcgggtttggaagacnaattgtatgtgctcgcgatatgtgaagatgatgttccaagtacttcggatttggtccgaccatgccctcctgatttccagctgggaaattggcgagtggaggaatgccccggcatttacgcaacaagcataatgtaaacctttacggatttaaaagctctatagttgggcctaggctttagagttttcattttgttaaggctttgtgtcttttgtttttggatttataaatataaggatctttcttcatctgtccctagtctctacccattctcattcatttgcatgtttacttctttttctaaaacggcagattcgatgacgagtcccccgaaggtactaatacctgggacccg

SEQ ID NO: 220700 - DNA, 416 bp, Glycine max
  unsure (1)..(416): unsure at all n locations
ntctacatgatagaggaaaaaaaaaaagtatgtttcttttttggncaaaacatcatcttttaatttatttttattcctacctggaaaaaccctcttatcattgacgttattaatttcgccaaatggttgatatatatgaacaaatttgtaaatgtattttatataaacatattgtaaaaatattttatgtaaggttaaaaacaaaaagaatagtgtcaaatgttctatttttatactttaacattatattttgcataaatattatataactaaatataatagtttatatttgaaaacatgtttaaattttaaaaaaatgtgaaaaagctgaattttgaaattctaaactaactatccaacgtattttattctttttacaaaggttatgacggctaaacatgatgataatttttaaa

SEQ ID NO: 220701 - DNA, 405 bp, Glycine max
agcttgaagaggatgctttaatggaggaaaagaaagagagaatgtgggagcactaaattgaaggaataaaagaaggaaagaagtggaactttgaagtgtatctcataagactttcattcatcaaagttacaacaagtgttacacatgcttctatttatagactaggtagcttccttgagaagctttcttaagaaaacttccttgagaagctttcttaagaaaacttccttgagaagctttcttaagaaaacttccttgagaagtttctttgagaaaacttccttgagaagctagagtttagctacacacacccatctaaaaactaagctcacctccttgagaagcttccttgagaagctagagcttagctacacacacccatctaaaaactaagctcacctcctt

SEQ ID NO: 220702 - DNA, 441 bp, Glycine max
  unsure (1)..(441): unsure at all n locations
tgtgagctcttcgtcccagtgtcttctcattagttcctctctaaagtcatcgaactntgtgtggtagattaccatatttcgttctggtaacagcttccttggtacaattatatcagtataccttatgtgccattattttctcctatttcttaaccctttttgcaccattttaattactgattagtcttaattgtcaaattaattatgcagttttatcatttgggcctattggactaattttgtgtttttaatttaatttcaggagaattataagcaattgagcttgaatccagaattaggcttggactttaagaaagcaaacaattttatcaaatcttatcttatctagaatttatctaatctagatattatttcatctagatcttatcttatcttatttagattttatttcatctagattttattttatcttatcttatc

SEQ ID NO: 220703 - DNA, 403 bp, Glycine max
agcttgatattcatctaaatgtaagcaaagattgaagattatttacatagatggataatattcataggaaagaaattgttcagataacaaaattaacaaagcatttgggtgaaagtttacaaaatacaaaatgaaaaatacaaaacgacctttaatctgtgtcgctattctcccagtgcttctgtctcctaatcacaatttcccaatttttttcatggcactgatagtagaatgacacttcatctccatgatcgaagtcgctctcattgagaaagacataccatggtcgaacaatgctcctatcaccaatgccagggtccagggtaacgacgttccattgtaaaagaggcccatatttccttaaaattgtcatgaaatttcctggatatttaaaaaacaaatt

SEQ ID NO: 220704 - DNA, 428 bp, Glycine max
  unsure (1)..(428): unsure at all n locations
tgtaatcgattacacacatactgtaatcgattaccagattatatttttataaaatattctcagcagncacatctttttatttggttcttgaatagccatcaaaggcttatatatatgtgacttgagacacgaatttgcaaagagttttcagaacaaaaaggtcttatcctcttaacaagaaaaattgttttatcctcttacaaattctgtagatgcaattggctttgatgttttgatgatgatcatgatgatgtgttgcaattgatgcaaatgggcttttcaagattaaaattcaagacaatacttcaagattacaagtcacaacatcaagatgatcactagaatattatgaagggaattcctaattgaattagcaaaggtttggccaagtgatttaaaataaaaagtggttctcacacgttttactc

SEQ ID NO: 220705 - DNA, 404 bp, Glycine max
agctttacggctgcaaatgatgcattataaatagggtttctttccaatactattatttggaggaaaaagatatatttgttcacaaaactagctttttaggtgcatacacacacgtttcattggaattttttttttaaatgaagaatatctttcatactaaataatacttaggtatatatttaattttgctttaagacataaaagaaaaatagtttatattatgtatttttaaacaagggaggtattttatttttcacaatggtgacaatgagattttgatttaaaatattgtacaaactatctaaacctctaataactaaacggattctagtgggtatgttaaatggagtatattataaagttttcttcattaaaaggaaacctgccgtcgcattcaatatatt

SEQ ID NO: 220706 - DNA, 405 bp, Glycine max
agcttgttgaattaaccccaattccaatgctgtatgctaacttactcccgtatctgctcaataaggcaatggtagttgtaagcccatcaaagattcatcaacctccatttttccaaaggatacaaatccaatgtgacatgtgctaatcatgggggagtaccggggcattccattgagcattgtatgaccttgaaacataaggtgcaaagtctgatcgatgcaggttggctgagatttgaggaggagagtcgcttgtgaattttgatgttgtcaagcaatactatcataccctaatttcatctagggaccatctgtttgttgggatgcgaccctcgcttgaccacttcgaggtacttgacacccatcgttaggcaatctgtgaagttccgcgacatgtcgagagtt

SEQ ID NO: 220707 - DNA, 414 bp, Glycine max
gaatctatccttcctaagatggagccttacccaatccccctcattaagaactagctcctttcttcctctattgcttttagccgcatacaccttcgtttggttctttatttggttcctaaccctctcatgcaacttctttacaaactctaacctagattccccttctttatgtataaaagaagtgttaagtgggatgggaatgatgcaatcatacccccaagggaattggatagaagactccaagaatattgggccagagatgcaagagaaggccctagggttttcatgagcctttgggtagattttgggcccatgggctaagtatgagatcacttatctttgtacatattagattaaggtttcattatatttgggccttgtatttagggctccataatatagatatggtaccct

SEQ ID NO: 220708 - DNA, 404 bp, Glycine max
  unsure (1)..(404): unsure at all n locations
agcttaactcatccaaacatggcaagttcatcttgtctttcaacaaatntcttcacaaataactatcaaaaagcgtaaaccaagcaaaactatccatcatatatttcaaagccccatacccacgaaaatcaagtgagaaagaagtctacccaaacctgaaatttcgaggtcccacacgtagagatgcgcttcccgactccgaaaatgccttcctttcgcgatttggagcaaaaatggtgaccaaaggttggagcttttgtgggcaacaatggtggaggaagaagatgagaacggcaacgtgagagagagaaaagagctttttgaaatttctttggctgagggaagagagaaaaaccagcttttggttaaaagacaagctttctctttctttatttattttagct

SEQ ID NO: 220709 - DNA, 385 bp, Glycine max
  unsure (1)..(385): unsure at all n locations
ggagntgtagcagaagataaagcagaagaggtgagaggggcgttatccactagggaataagccatggaagaagaagcttcaccactaagaaagtatcttggataaaaagcttagagaggaagcttcaatggagaaagagaatgagagagaaaaaaagtggcataggaatgaaggaaagatagggagagaagttaaactttgaagtttgtctcacaagactctctcattcatgaaagttatgacaagtgttacacatgtttctatttatacactagcacatggaaagcttccttgagaaacaaggaaggtagcttccttgggaaattagaggaagaaagcttccttaagaagctagagggggactactcatatccctccaatagct

SEQ ID NO: 220710 - DNA, 391 bp, Glycine max
  unsure (1)..(391): unsure at all n locations
agcttgttgacacgcggagatttacgtcattttccacgctcacaagatctgtcatactcaaatttgagtcacgctgacgggcggaaatacccgagtggttatccgtataaacattcttttttgttgtctgtaagacgaaaagcctgatagcaagcagagactaacgtcgttntctgcgcccttcgtcaatcgcggccgacaagtcccgttgacacgcggagatttacgtcatcttccgcgcacacaagatctgtcatactgacatttgagtcacgttgacgggcggaaatacccaagtggttatccgtataaactttcttttttgctgtctgtaagacgaaaagcctgatagcacgcagagactaacgtcgtcttctgtgcccttcgtcaa

SEQ ID NO: 220711 - DNA, 373 bp, Glycine max
  unsure (1)..(373): unsure at all n locations
agcctcanagaggtccaggaaggacaaggctttctaatttctagntccgccccggagtacgacagtcaccgctttatgagcgttgtacaccagcagcgcttcgaagccatcaagggatggtcgtttctccgggagcgacgcgtccagctcagggacgacgagtatactgatttccaggaggaaatagggcgccggcggtgggcaccactggttactcccatggccaagtttgatccagaaatagtccttgagttttatgccaatgcttggccaacagaggagggcgtgcgtgacatgagatcctgggttaggggtcagtggatcccgttcgatgccgacgctatcagccagctcctgggatatccgatggtat

SEQ ID NO: 220712 - DNA, 391 bp, Glycine max
agctttaggaattggcttgctgagatggagttactcctccacattggtgctggttgcactgaaagcaaccctcagcagcggttagacatggcggaagccattagaaggataatagagattaaatttgagtgtggtcatgaataaagaagccttgcagattctcatcatgctgaacaatcacagaggaggcatggaacaaacagcttcggaaactgggataatatcgaatatggcagctcctaggtaacactaatttaggtttttcataaagactagacttggctttgttattcccctaaaacactatctttttcggggaagcttcaatggataatgttaaagctgtcaaggatattcttagaagttatgagatggtttctggcatgagaat

SEQ ID NO: 220713 - DNA, 412 bp, Glycine max
tatatatgtgtataataaatataacataatttagcaattttttttatgtaacggtaaagttcaacatgaatgaacatgtttgcaattgatgaattggatgacaaataataatagagtttctaagttgaaattgaatgatgaataacaagtatagttttgaatagacatgtaacaacatgtgccgatttgaacatgtaagtacgataaaatgttaaatgaaattggctgagatgtaaaactaatacctgaagaagtcaaatagtgaatcatttgggggtgtacatagtccaacatgtaggaaacataagaatttatctcagtaaattatcatgagacctatgtaggccagaatagtaaagttgaattttgaaacttttagacttggaaaagatttggaaaagtgtctcaacac

SEQ ID NO: 220714 - DNA, 395 bp, Glycine max
agctttagaaccacaaacattattttatttgttattagctttttgtaaaacaaaaaatatgacatatgttaataaaaaccatttcatacactctgcaaaaccatttcatacagtatttgtagtgtactctcaatggaaatacacttatgagataacctctaatatttttttatcagtgaaaaactctataaaaaaaggtaaaaccaaaagacagaaactccaaggaccttataagtccaatcagctgagcccactgagcatcaacagtactccattgatccccctcaataaccaaaaaaatatgaaatacggcatgtgagaatagggtcagagaggataacattagcacagaccatgatatcaaagatggttgacagacacgaaatcttgtttgc

SEQ ID NO: 220715 - DNA, 369 bp, Glycine max
aacgagagtgggtaatgatttttgtttttggccctccctgaacatccttcagtaaaatgaacatttctctctatatgattaactttgaattttgagtcatacctcatccaaatctagacatacatgactttttatactggtaaagtttataaattttttttatacgataagtataagttatgcaatagttttataaattctctatagaagaaaaaaatgtaaacttgagttttaatataaatttttaatcagataaatatatttatgtataaatttggtttgagttggattagattgaatttcaaaatgaaatccaaaatctggatttatccaaaacaaatgggtttattatattttaatttgttcaac

SEQ ID NO: 220716 - DNA, 393 bp, Glycine max
  unsure (1)..(393): unsure at all n locations
agcttgaaaaanaaggtgtgttgtgttatatcttcacgncttgaacttctgggagaatttttgggtgattttctcaaccccttctctacaatcaccagcaactcgcttagcaccttctttgattccagatccaacttcaagggcacttagctgcaactcactggctgacttgcctacctttgagatggcagcttctccaaattcttcagcctgttttcctgttttgcatgcccattccctcaattttgatattaattgggaaaccatgtgaatgattttatcaagggtatctctagactttcctctgatatctgcagccatttgtttgagcttgtccaataagctctcggccctgtcaactgttccttgaaccgagacctgctctgaggcatt

SEQ ID NO: 220717 - DNA, 431 bp, Glycine max
  unsure (1)..(431): unsure at all n locations
ntaagagaagttgcaagagaaaagacagcatcctctatgttttgaaactggagtcattatatatgacaaagtcccttgcaaatcggctatgcttgaagcaacaactatacaccttcaagatgacagagtcaagaacagcaccgaacaattggctgatttcaacaagattcttgatgatttggaaaatattgaagtaaagcttgaagaggaggataaagctctcttgcttctgaattccttaccaaaatcctttgaacatttcaaggatgcaattctttatggcaaagatcaagacattgccctagaagaagtccagacctcaataaggaccaaggagatgcaaaaacagcaagactccaaatctgaggataatggtgaaagcttgaatatttcaaggtgaaggagtgaaaagaagggaacaagaggaaaga

SEQ ID NO: 220718 - DNA, 398 bp, Glycine max
agcttgccgcccagctcgcccaagcgagcattgttgcttccttcagaagcaacaaccttctggaggaatcttctagagggcccaagtgggcctggttgctatttgcaccccccctttttactaaatgcacccccttctattttttggtaattctttttccgtaatgttacgaaactttacgaatttcgtaacgatacttatttttcttccgcaagattacgaatccttacggattatgtatttactcttttttagctttcgaagaagttacggaaacttacggattgcgcaaaacacctcttttcaatttccgtcacattacggaatttcacggattgcgcaagcctgcttccttttgatttccgagacgtctcgggacttcatttattgtgcaacaa

SEQ ID NO: 220719 - DNA, 434 bp, Glycine max
tatattgtagggaatggtgtatgtttggtggtatattatgtagttaaaactttcaatatttgtgcaattacctgtaaatcaattatcttaaagtatttaaccttgtgtttctaatttcaaaatttcaagtaaatttgaaatggctaaaatttgaattgctttgatttcaaaatttcaagtaaatttcaaaaccttgtatttaacctgcattttgcttgttcttgttcatacaagaaactcattcttttgtgaagtaaaatatgatcttggcacaacaaattggtgcggtgaacgtggagcgatttttgagttcgattcaagaaatgggctcggccaagtatgaggttgaaaaattcacaggacaaaatgatttcgggctatggcgattgaagatgagagctcttcttgttcaacagggcctggtggaagcactt

SEQ ID NO: 220720 - DNA, 384 bp, Glycine max
agcttgtgcttgttgtatggccttagcaaatgaaaacaagaacaaccaaacactgttagaaaagagtaatcaggatgtttactgaatagtttctaataaggaacttcattattgatagcaaataagggcaatctgttgatgaggtaaatgcttgagacaaaagcatgatcccaataatgaagaggtagcttgacttgaaataaaagagtgagacccagctccactacatgtctatgcttgtgttctactacattttggtgatgagtatgaggacatattaatcggtggtaggtctatggtgcatactaggagatttcaataatatcagaactccattcgaaagaatgggtgcttgtcagagggggttggaggacaacaacatca

SEQ ID NO: 220721 - DNA, 420 bp, Glycine max
tctacttatgtggcagggcggacttccttcatcttcttgtctccaacgcgaactttgaccattgttcttccttcccgcgatgcttctcttcatgtctgcctgagtgggcttatagcctaaaccatacttcccacgatttccttgagtatttatcaggctagttatgccgccgttgttttttcctaaacccatcccgggttcaaaaccgttccccaacataactcgggccatcattaccgctgcatcggacagacaaggttgcccaaagagggagtccacggaggaaatgctgaccacctcaaaagactggaaagcagtttctaacgattcttctgcggctttcacataaggcatggaggatgggcagcttaccaagatatcttcctcgcctgacacgatgaccaagtgcccctccactac

SEQ ID NO: 220722 - DNA, 388 bp, Glycine max
agcttgcttgtggagcttctatggaggctgtatctttgagcttcaatgaggtcctttaatggtgattttccaccatggagatgcagcgaaagacaaaggagaagaggtgagaggaggtgccatccactaaggaataagccatggaagaaggagcttcaccaccaagatgagccttggataagaagcttggagaggatgcttcaatggaggaaaagaaagagggagagaaagagagaggggggagcacgaaattgaaggaagaaaatgggagagaagttgaactttgagttgtgtctcacaagactctcattcatcaaagttacaacaagtgttacacatgcttctatttatagactaggtagcttccttgagaagctttcttaagaaa

SEQ ID NO: 220723 - DNA, 376 bp, Glycine max
tgtgcattcaatatcctgatgagggtgttccatatgttctcaagactggactaatacatttgctgcccaagtttcatggtcttgcaggtgaagatcctcataagcatcttaaggagttccatattgtttgttccaccatgaagccccctgatgtccaggaagatcatatctttatgaaaaagaggatgagatagttgcacataagagaaagcttcctaacaaaaattttcatgtaggtggagcttcttctagtaattctgacttaccacagccgcctatctctcttccattcccacctagagcaattccaaacaaaaaaatggaagcagcggaaaaggggatcttggagacctttatgaaagtagaggtgaacata

SEQ ID NO: 220724 - DNA, 402 bp, Glycine max
  unsure (1)..(402): unsure at all n locations
agctngagttcattggtgctgccccacaaagcccctcggaacttatttcagccccattcctcttttcgggccctcttcgtctcccattccaatgcttcggctgtggccatgctgatgtccttcagctcgtggtactctttctatacctttatggctgtcgtcttgagtttttctttgaccactcaggttctttcaagttctgccttcaaggcttacacctcctcgctctccgcaaaggtttcggcctcttcctcacttgaaaccttttgcttcgggagccagtctaactcttgcgtccgagccctcatccacttgtgatagccaccgatgatcccattactacttcctcgaagctccttatcctttctttgcaccggattccatgcttttcagactctttga

SEQ ID NO: 220725 - DNA, 440 bp, Glycine max
  unsure (1)..(440): unsure at all n locations
tagaacnttaaaatgatacataaacataaagaaaactgttacgactgtattccacgcggaatcagttacggaggaagaagagaagaaactgaaacggcgataatccacactgaatcagtaaggagggagaagggagataaaagaaaaaacttgcaaatttatttgataacaacgaaagaaaagcttacaaaaagtgttttccagagcttctctctctacaatctatgtgactatttctatttgaaaaaagggtgcctcacaatagagttgaggaattcttttatagaaaattttgaggtactatagctacaatgcaggtaacaaaatcggaactatgtttacaggaatcggtaaaatttatacatcatccaaacaaataccaaaacaatcctcttcattttggtagaaatgatcattttctgaagaattcgtatcttctt

SEQ ID NO: 220726 - DNA, 400 bp, Glycine max
agcttctcctaatcggcgactcttccgatggaaaatcttgttttcttctcagattcgctgggagtcatcactttatttgcttctcctaatctctctttttgttcacttcctttgtttcttcgtttcgtttcaggatgactcctaggtcgacagctacgtaagtactattggatttgatttcgaaattatcatttttcttctcttttgttatttctatttatggcctaacactcatttttattttgttttcagaaaatcagaaccgtggagctggaagggaaaaccgtcaagctgcagattgtgagtattcatacttcaccgacacgaatcaatgtcttttatcgactacttcatttataatgcctacaaagcatgatcatcacccgtttttgtctgattt

SEQ ID NO: 220727 - DNA, 442 bp, Glycine max
  unsure (1)..(442): unsure at all n locations
actaagctccgagcaccttccaaggtgggctctagaccttntctttccctttatattatnccatatagggggatatttggaaaattctccagcttagcaggatcaatgtgaacacttttaatctggaacctaccatcactcgagcacttccatctcacgtctttaaaccctgcaatctacagtttgaaaagtatcccacacatgtttgactccagaccataaattaaatctcatccttttgttctcaattatgggcataactttctctccacacctatacttagatcgaatgaccttcacccccaaggtatttggtttaatacacaactcccatgccactttcatcatgaatgaatcatttataagacacgtttgcctccaaataataaacttttattggttatatgatcgatccaactcttaaaacatgattgatgtcttc

SEQ ID NO: 220728 - DNA, 410 bp, Glycine max
  unsure (1)..(410): unsure at all n locations
cgcatgcaagcttgcaggaattcttgctgtgggagggattgtctctaatttttgtccnaattggccacggggcgaaaaagctcatgtcacagtccctttgtggtagatagtgatctttcaagtgggtatatgggtttaaccctattcttttgttaatgctgggatcctcatgtattctttcctcgtttgtctttcgagatctgtttgatgatgaacctcctgtacaacaatttaccattttcccacaccagctcaaggaaatcattgtcattactgaattaagtaaatcaccttcttatattaaatcaaataaggagaagatagccacgatgaaacacccttgaatatattatacaaatatttgtataagaatttaatacatcttgttctttcatggaggctacatggga

SEQ ID NO: 220729 - DNA, 429 bp, Glycine max
  unsure (1)..(429): unsure at all n locations
actcaagctgaaacttttaacggnanctctccgttaaaggaatttatattctttgatttatcgcacctagcttccttcgttgcaatttaagtcgcgttgctctgaatcagaatataagtgtcccaaactctggcctgcctgcctgcattcgccattctattttttcagaacatcatagcctagccggtaaaatcactctcctccctctctctctctctctgtaatgagtccgttttacgatattctctcgattttttcccaactatgaaactcatagaatcttgtattctcacagctattcttaacttactttattgacctcgtcagtgtcgcgcaaactcagtattacactggtgaatcaacactgtgccggaagattcttatctttccacgtacataaccaaatacacacacccccgctctattcct

SEQ ID NO: 220730 - DNA, 406 bp, Glycine max
  unsure (1)..(406): unsure at all n locations
agcttaagcccttcataaatggagaaaagcttatcgttgactttttttgnaaacccacaccaaccataatagccaagcgtctagtgcccatgagaattntgaaagagaccaccaaaaccagataggccaggattaccaattgaacttccataggtgttgagcttaagaacttgaatttggtttataatatgccatggtgaagacgcaagcattctgagctctccaaatgaaccaacaacctacaccaaccaattacctcttggacctcggcaaaaacaccaaatgggggcactcttacaaattatttaccaaaaatgggctcttttgcaattatttacctgggggtttgtttttatattacaaagcgccccacagacaggcgccttcactgtgcacgtgacacaac

SEQ ID NO: 220731 - DNA, 368 bp, Glycine max
  unsure (1)..(368): unsure at all n locations
gccttggtatcgatacagncttacaatttaaattcaacgttttggtagagcatctcaaaaattattttggccactgtgaatcaattacagcctctggtaatcgattactatagagtaaatatcatatttaagaaatctcagtaaaacttttggaaaatatcctttggccaaacctatgcatcatcaattaagaaactcttccttagattctaagaaccaagttcatcaattatcttgaatttctggattcttgacttggatcaaacgtgagaagcgcttatctttgacatcatcaaaacttcatatcatatttgcttctacatctactatatactattacccacataccaacatgagatgtttcagtg

SEQ ID NO: 220732 - DNA, 409 bp, Glycine max
  unsure (1)..(409): unsure at all n locations
agcttgggctatttgcaatcaaaantatgctttattcctagttttttaacgnaaagagnaaantcattcagttcaaattctaagagtacttcctagtcaaaattaaaatccaatttcatgaaactagtgatcaaatagaatcaaacattatgaatagaatgaaatcaccataaatgagtagaaaagattcatatatatatatatatatatatatatatatatatatatatatatcaaaagagatacataaggatacaaaaattacatccaatcctttgaataaactagctggtcattgcgtagagcacaacgtcaacaaaagaaatcatgaaggaagagattcacgaccactttctttcctctttctctcccctagttgagtgcttcttcctctgggttcttccactcc

SEQ ID NO: 220733 - DNA, 379 bp, Glycine max
  unsure (1)..(379): unsure at all n locations
ggctcatgggccactttgggatagacaagacgcttgtcttactcaaagaaaagttttattggccccatatgaagaaagatgtccataagcattgcactaggtgtgtggcttgtttacaagccaagtctagggtgatgcctcatgggctatacacacccttacccatcccttctgcaccttgggtagacattagtatggactttgtccttgggcttcctagaacccaaagaggtgtagactctatctttgtggtggtggataattntagcaagatggcacactttataacatgccacaaggtggatgatgcttcccacatctcanaactctttttcagggaagttgtgagactccatggtttgcctaggaccattgtgtc

SEQ ID NO: 220734 - DNA, 392 bp, Glycine max
agcttgcatccattagaagataaagaacatgttattagaagtatgactggaaatgttagtcagtttgtcagattgattgtgaaggaatgcattgactgtatcccggtgagagtgtgatccttaaattttgagagaaacgactatcatttagtactgatttttgcatgaatctctgaagtatggactgaatgcatgtaactgaggatgatgaaggccatgtttgattgtgatagccacttagccaaaaaactgaccacgtgcttgaatgatttatcccttgcacccaatttgagctgaatgaattattgattgattgaaccttgagcctatatagtgttatctcctaataccttgtcttaggttgtaggagagcatcattcacagaaagcttg

SEQ ID NO: 220735 - DNA, 282 bp, Glycine max
aaggagcatttctggaaaactaactttccaaatgttgccttccaagaaaggccccgagaagctttctcaagatgccaggaagacaggcggccgaagaactagttcgctcctgatatgaagtcaccgtttagagcgtgtcaccacagtgttcgagccatcaaggatggtcgttctcgggacgatcgtcactcaggcgacagatactgtttccagagaaaaggcgccgcggtgaatactggtctccatggcaattgatcaaaattttctgatttattccatgct

SEQ ID NO: 220736 - DNA, 355 bp, Glycine max
  unsure (1)..(355): unsure at all n locations
caatgaatgtatactccgacaccacacccanggaaaggtcatctcctcagcagatttcgcattcaccgacgtctgcagggaatctgctacacgcctactgaacactgccgaagcctcggcaaattccttccgcaccacatctgaggagctgacgcaagagtccgaataagtgttctctggcgacgacagaaaatcaataaaaaaggatgcgcgcaccgtccagaggaggctggacatttttaaagactcagaaaaacacctaacttgtggaagaggcggacttcctcccattacacatgaattgatgaacccatcagagataatgccatacaaacaaaaagccgccttaaccaag

SEQ ID NO: 220737 - DNA, 290 bp, Glycine max
ggaatggaagacaccggtgatgcacacagcagaagcagtaccactcctatatcaaatacgaacaccaaatcggatgtgagacctaaccgatactatagtacaatgcagtataaacaacccaaacatagaacaacgaaatagaactcttctgtcaccacacaccagaacccagaacaaggggacacagaattgtgaatacatacggcaaaggggagagagcccccggaagaaagaggaagaccagacccgcgcttccggcaaaaccatcgacaccggacgcggggatcgcg

SEQ ID NO: 220738 - DNA, 387 bp, Glycine max
  unsure (1)..(387): unsure at all n locations
agctnggtgggagtgaccgacactccatatttttggcaaaggcctatgatcaaagctggaaacccaagtgccctattggacttctctaagtccactgggtatctaggaggtgtgatccttgaaaattgatatatagcgtctgagatcaactgggccacatggacactcccctaggtcaggatggcatggactagccggcacatcggcagggggaggtcggaattatggttgctggggagaatgttgctgagcaacaatgtcatccaaatctgcgacaaggtggtcatgctagtaggcatgatccacacccgtctccctactacgctctgggcaaagtcctgccctgtgacacacaattgctggctgatggcctcctcgtcaaatccc

SEQ ID NO: 220739 - DNA, 380 bp, Glycine max
  unsure (1)..(380): unsure at all n locations
gaggcctcagaatcttaagatgggggggtcgaataagatattacaacttattttcccaattaaaaaattctatttaactctctattcaagttataaattcccttaataatgaatttcttaaatattgattcaaatataacaatgtgaatatgaatataaaataataataaataaagaagtttatgagaagagaaaatgcaaactcagatttatactggttcggccacacccttgtgcctacgtccaatccccaagcaacccgcttgagagttccactatcttgtaaattctttttacaagttctaaacacacaaggacaacccttcctttgngtttagaattctttcacaacaagagacctctcgtctcttatccccttt

SEQ ID NO: 220740 - DNA, 366 bp, Glycine max
accaccgagcagcacagacacaaagaggggagacgattttccaccatatgttcgaagaaacgagaactcaaccccataacccaacaggccggacaacaaaagggcagcgcaactacgagtgatacgtcatctggcaatcgcggaagcatatacacgcgcctcacaaatccatagtacacacatacaacgcagcttgaggttacggaagcccgaaccactaccaaaatagagaggtagttcacacaaacgaccacatccataacagcttactccgcacaacggaggccactcgggaatgaagcggccatacctccgaccgaagacgcatggacactcatccccgacccaaatacaattcgagcgaaa

SEQ ID NO: 220741 - DNA, 397 bp, Glycine max
agctggttcttctacaacccgacgaggttgattcttgaatggcgcgaacttcccgactcgaactcgcagttcgtgaagaaagatattggtcgatcacttcaaagaaatgaggttagtgagttaattagttaggttaagcttcttttaaccttcttttaggttaagcttcaaagaaacccagtcaataaggttaaaatcttatgttgaaggtagtgtcattgttaatattgttgtttcataagcacttatgcaaactatattgcccactaatattgttgcatctccagctccaaaggctacaagctcattagaagtttttgatataaacttagtacataatatatttgtagtatgtcctgtgtcaatcgattgtaaaagttctagccataatagctca

SEQ ID NO: 220742 - DNA, 438 bp, Glycine max
  unsure (1)..(438): unsure at all n locations
gcttgtgaccctctctctatctcgctcacacgagtcttttttttttttacttgctnngcttacctaacacatattcttacttgagcatcagagtctttcgttttccaggtcccctcttctgtcaaagatacctctccaagctgacgtgtgaagtttgggacccactcaatcacgtgcaccttgacatgtcacgattccggattttggtaagaacacatagtgatagtactataaaaaatttcaagaaaaacaaaaaggtataagtttaataattgcttcctgtaataacaaatgttgaaataaaaatgctcatcactccagacagcatgaagattaaaaagattttgaagaaccatttctttttcacctgaatctgttaaaagggccaacgaacattataaaatattnggaaccacaacagtttgtacaaatcataca

SEQ ID NO: 220743 - DNA, 384 bp, Glycine max
  unsure (1)..(384): unsure at all n locations
agcttgcttgtggagcttctatggaggctgtatctttgagcttcaatgaggtcctttaatggtgattntccaccatggagatgcagcggatgacaaaggagaagaggtaagaggcggcaccatccactagggaataagccatggaagaaggagcttcaccaccaagatgagccttggataaaaagcttggagaggatgcttcaatggaggaaaagaaagagggagagaaagagagaggggggagcacgaaattgaaggaagaaaaagggagagaagttgaactttgagttgtgtctaacaagactctcattcatcaaagttacaacaagtgttacacatgcttctatatatagactaggtagcttccttgagaagctgtcttta

SEQ ID NO: 220744 - DNA, 431 bp, Glycine max
tcaagcgaacctatgggtagataatatgtccttaccctttatgttgaaaacccacaagggtggcctatgccaaaattaaggaaataaaaaaagaataacaatcatgggtgtgttatcaaaggttttgttccaaaatccaaactgtaaaagtctctattcaagatttgaaatgacaaatggccgtgtttattcatcccaaacactaatttatcccttgttacccctcccgagccaaatcatgtttcttttcttttaaaaacaacaacaacatcaacaataacaacaacaacaacaacaacaacaaaaaaccctaagtaggaaccaccactaaactggcaaaaagaaaaatgcaaacaacacatgcatgatgtttaccaagctttatgttgggaaacaatgatgttaaacaatggggggcagaaagcaaattc

SEQ ID NO: 220745 - DNA, 355 bp, Glycine max
ccttaagtcaccgcagctgcagctgtattgtcaccgtcaatagcaatattttcaaccttctctaacatttttcttcattttcatcaaagcatttgaaatctcttcttttgattttgtaaaaaaaaattacaaaatgtaatccttgattattttattacaataatagtagagtaaaaagttcaattatattaaccaaaatgactgcaattaactacattttaccgctatcaatgacaaaaaaatatcctatttaagactaatacattatttggcctaaaaaaaactttggtttgaattaagttttatataataactaatctaatgtatatctgccgcttactcactggttacgcgt

SEQ ID NO: 220746 - DNA, 386 bp, Glycine max
  unsure (1)..(386): unsure at all n locations
cttagatgaggaggaagggacaagtatattgttttttttagtttagcacncaagggtcaatgaatactctgatattgatggccttgacttacttccagaaatgaaagtactaagagaagtgttaagagaagaaattagcacaccaatagaagtattgagttatattaacactttaatctttgttctcaaatgtttacattgcatatagaattttattgacaatccctgtatcagatgctactgctgaaagaagttcttcaaaattaaaattgcttaaatcatatataaaattaacaattgtcaccagatagattgaatgaattagctattttatctattgaaagtgaagtgttagaattgtttgatcataaaaatctgattaatga

SEQ ID NO: 220747 - DNA, 378 bp, Glycine max
gagcctctcgatatattacgggactcaatcaaactttcgaaaaaaacgttattgtcgtttgaattcgcacagaggttcaacattcaatttcgagcgtctcgatatattacgggactcaatcagacatccgagtaaaacgttattgtcgtttgaattggctcaaaggttcaacattcaatctcgagcgtctcgatataatacgggactcaatcagacatccgaataaaaagttattgtcgtttgaattggctcagagcttcaacattcaatttcgagcgtctcgatatatgacgggactcaatcagacatccgagtaaaaagttattgtcgtttgaattggctcagaggttcaacattcaatttcgagcgtctcgaaat

SEQ ID NO: 220748 - DNA, 441 bp, Glycine max
  unsure (1)..(441): unsure at all n locations
gcttctaaggaagttntctcaagaaagcttctcaaggaagctacctagtctataaatagaagcatgtgtaacacttgttgtaactttgatgaatgagagtcttgtgagacatacttcaaagttccacttctatacctcttttattccttcaatttcgtgctcccccctctctctttctctccctctttcttttcctccattgaagcatcctctccaagcttcttatccaaggctcatcttggtggtgaagctccttcttccatggcttattccttaatggatggcgcctcctctcacctattttcctttgtcttccgctgcatctccatggtggaaaatcaccattaaaggaccccattgaagctcatagatccagcctccatagaagctccacaagcaagcttccatcaagatgtcttattgagtcccgtaatatatcga

SEQ ID NO: 220749 - DNA, 389 bp, Glycine max
  unsure (1)..(389): unsure at all n locations
ttaaaatgcagcttgtacaacctagcttggccaatttttacccatgttgataanaagaaaaatattttatttactactgtcttaaattaaatcttaaatatataatcatataaatattagagaaagaattttaccggataataactctatcgcgatgattttaattccaaaaaatttcaatcctaagagcatcttaatagaaatacactacactacccaaatatacatggtggtatctagctcgacagatatttatcaaaataataataatacatgtcgtcttaatcttagattattattgattatgtaggctctagcttctcttaatttttttcctatcatgcatgtttcctttgttgttgatgttgctgatgatattattattatta

SEQ ID NO: 220750 - DNA, 442 bp, Glycine max
  unsure (1)..(442): unsure at all n locations
actaagcttctccctatntgctataaatatggagaggagtgaatttttaangtgtttatccttcttggcacttctcattctctcgaaattgctgaggaaaattatttccgtgaagaagattcaagccgaggcgcttccgtaacgtttctgtaacgtttccgtgagtaattacgcgaagattctcgaccgttcttcaacattcatcgttcgttcttcgttttcttcagtcttcaacgggtaagtacctcaaaccgagcttttcaattcattctatgtacccgcggtggtccacattttggttcatgtatttttattctcgttttcattcgctatttatacccccttttgacgtgtgtaagtcatttatttaagtcattcctcgcctaatctacaaataacataaattccaccgatcgtttgaattgtatcatccggtaatttc

SEQ ID NO: 220751 - DNA, 418 bp, Glycine max
cacgcatgcacagcttgagggattggtctttgccagtgaatggatctatgtgggtctgaaattttgtataaattactcatcctgcttggacgaatgaaaaaactggggcaaatgaatagggtgagaaagagggagaaacccatgccgtaactgccattcctatacggccaagtttcccatcaacccaacaatgtcattacttagccaataacaaaccttatccttacccaccgctcagttatccacaaaggccatccctaaatcaaccacaaagcctgtctaccgcacttccaatgacgaagaccacctttagcacaaaccaaaaaacaccaacaaaaaggaattttgcagcaaaaagcctgtagggttcaccccaaattccgctgtcatatgctaaacttgatcccatatccactca

SEQ ID NO: 220752 - DNA, 422 bp, Glycine max
  unsure (1)..(422): unsure at all n locations
ctaagcttagttacctccagaaaacccgattcaccntagtntcatttgttattgctctgccttccatcatcactgggtactggatccatacccttgccagtatgatcattgatatcagcaccctcaacccctggtgatattaagcacgtgatggtaatctaccgataccctatattgcagttcctagttcaatgggaaggactcttgccagatgacacttcatgggaagattgggaactgctgaagcgttagcatcaccttgaggacaaggtgcttctcgatgtcaaagggaattttataaagaaggatctgtagaagaaaagttcaatcctattagaaaggcccaaaaggagagtcataccaccaaagtatttccaagatttcatgtagaagttgttaagctagcatagtggatgtcccga

SEQ ID NO: 220753 - DNA, 374 bp, Glycine max
agctttaagaaaaatcaacgacaataagtttttactcggatgtctgataaaggcccgtaaaatatcgagacgctcaaaattgaaaacagaagcactcagcaaattcaaacgacaataacttttgactcggatgtccgattgtgtctcgttgtatatcgagacgctcgaaattgaaaactgaagctctgagaaaaatcaaacgacaataactttttactcgaatgtccacttgagtcccatattatatcgagacgctcgtaattgaaaacagaagctctgagcatattcaaacgacaataacttttaactcgggtgtccgaatgtgtcccgtaatatatcgagacgctcgtaattgaaaacggaggctttagaaa

SEQ ID NO: 220754 - DNA, 344 bp, Glycine max
aatttgcttagagcttctgttctcaaccacgagcgtctcgatatattacaggactcaatcggacatccgagtagaaagttattgtctgttgaattttctcagagcttcagttttcaatttcgagcgcctcgatatactacaggacacaatcatacatccgagtaaaaagttattgacttttcagtttgctcaaagcttccgttttaaattttgagcgtctcgatattttacggggctcaatccgacatctgagtaaaaggtatgtcattgaatttctaaaacttcccttttaattacagcgtcttgatatactagggacacattcgacatacgagtaaaagtat

SEQ ID NO: 220755 - DNA, 405 bp, Glycine max
agcttatacaaaattattaagtaagaatagttttatagatatttttatcgccagcgctttatatacattttatcttaatatttatgaattttaaccaaattcaatttgaaatacttgtaccaaaaaaagtaaaaatttgaaatcaaaattgatttgaacaatacaaaaaatttaaatatatatatatatatataaaagttaacttgaccttaaaaatatattaatgtagcatttatataaatatataaataaacaaaattttctttatataatatcataaatatgacacgattttgttatttaataatgttttaaaaaggaatatgaaacatgaccatgcaatttttcatcaataaaatgatctaataattctttcgcttttgcatacccccacatattcatgta

SEQ ID NO: 220756 - DNA, 320 bp, Glycine max
tttttttttaaaagagagaggggagataaaggataggaggaacaaccccgggattgaaagagaaggggtgagaaggaaaaaaaattgagaagaaaattattagattaaaaatttggaaaatagatatgtgaattagtgggtgttaagaaagagtattattgtttggtaattataataatgaattagtctaaaatggaattaagtattagtaatcttttgaaaatgaaaataaaatatgagtaaaaagtatatttaaacttttttgtattggatggaaatgaattttggttaaaattaagttgtgaagtgtgattgtaaat

SEQ ID NO: 220757 - DNA, 393 bp, Glycine max
agcttagacgaaatgccattgtgtgaaggttttttccctcacagcccacttacatcaaggaacaaggtgtcctaatgggccaagttgcctatggaagctgggattgctccatagaggctgttgcccgacagttggatagtggaaagtgaatggagatttcccactccatcatgaataaaaccatattaactgtttttataaaggtaaagataatataaattgctcaagttttcaattgtagaggggatttcaccagagagaaagttttcaaacaaatcaagttgaccaagttgtttcaaaaaaccaatttcaggaggaatgaagccagaaagattattatatccgagatctataatctggagattaaccaacttcccaattttttcgggcatg

SEQ ID NO: 220758 - DNA, 394 bp, Glycine max
agcttttcaaagttttctggttttccaaaccttgaaaacttgtgctattcatctttccattcttttctccctttgccaaaaagaattctccaaggactaaccacctgatttttttgtgtctctctcttctcccttttccaaaagaacaaaggactaaccgcctgaattcttttgtgtctcccttctcccttgtcaaagaattcaaaacaacacagtctgagaattcttttgattcttccctttcccttatacaaaagtattcaaaggactaactgcttaagaattcttttgtatccccattcacaaagtatcaaaggtttaaccgcctgagatctttgtcttaacacattggagggtatatcctttgtggtacaagtagagggtacatctactt

SEQ ID NO: 220759 - DNA, 399 bp, Glycine max
agcttgtgtttcattttacaaccaaagcatttatctagatggcactttacctggtaacaaggaccaggttggcacctccaagatgaaccaaccaagatgagtcacctacaccccctatcctctctcacgtttccaaaaagtgtcaatttctcaacaataaagcatggaagattgcaccgaccatatgaagccatccatggtgccattaccaagtcaataagtccccggaacgggtgacaggcgccacccaggtgtcaacttgttgactgataccaccaatatccaatgtaacttgaatcacctactctaataaatactttgtgaaccaacccaatatggtattaagtttcaaaaaatcacccattttggtcaattactccattaattgttatcacattt

SEQ ID NO: 220760 - DNA, 397 bp, Glycine max
agcttcaaccaaggggagatggaccatttttttgcttgaaataatcaatgacaatgcttacaaagttgagctgcccggtgagtataatgttagtcccaccttcaatgactctgatttatctctttttgatgcagatggagaatccgatttgaggacaaatccttttcaagagggagagaatgatgaggacatgttcaagagcaagggcaaggatccacttgaaggacttggaggacctatgactagggctatatcaaggaaagccaaggaagctctttaacaagtgctgtccatactatttgaatacaagcccaagtttcaaggagaaaagtccaaggctgtgagttgtatcatggcccacatggaggaggactaaatgacaccactttgtctcaat

SEQ ID NO: 220761 - DNA, 398 bp, Glycine max
  unsure (1)..(398): unsure at all n locations
atcttaagcaccgcggcatgcacttcatacacactatatcatagattcttatgacctangaatatatngaaggactgtaagtcaacaagttatgtcccaatgcagataattatacataatttgttattcagaagatcatatcatttaactttcttttcctaaactaattgtgtgaaaaacaaactattttttatcttcttccagcaaaaagccatgtttgccttcaattgtccattggaatgcaagcttgagcacctatgtgcttgtactcagtattaataaaaaaacacagtaacttactaacacacctaatattagagcactagaaacaaattatactaatacaaatactaaaatttcaagtttagataccagactcaatgatgctatgtaaaaca

SEQ ID NO: 220762 - DNA, 383 bp, Glycine max
  unsure (1)..(383): unsure at all n locations
agcttgtgcttgttgtatggccttancaattgaatacaagaacaaccaaacactgttagaaaagagtaatcaggatgtttactgaatagtttctaataaggaacttcattattgatagcaaataagggcaatctgttgatgaggtagatgcttgaaacaaaagcatgatcccaatattgaagaggtagcttgacttgaaataaaagagtgagacccagctccactacatgtctatgcttgtgttctactacattttggtgatgagtatgaggacatattaatcggtggtaggtctatggtgcatactaggagatttcaataatatcagaactccattctaaagaatgggtgcttgtcagagggggttggaggacaacaacatc

SEQ ID NO: 220763 - DNA, 429 bp, Glycine max
  unsure (1)..(429): unsure at all n locations
cttagacactacgctctacttaagggcgggcggacttcttcccttcntttcttctcgcgaactttgaccattgttcttcctttccgcgatgcttctcttcatgtctgcctgagtgggcttatagcctaaaccatacttcccacgatttccttgagtatttatcaagctagttatgccgccgttgttttttcctaaacccatcccgggttcaaaaccgttccccaacataactcgggccatcattaccgctgcatcggacagacaaggttgcccaaagagggagtccacggaggaaatgctgaccacctcaaaagactggaaagcagtttctaacgattcttctgcggcttccacataaggcatggaggatgggcagcttaccaagatatcttcctcgcctgacacgatgaccaagtgcccctccactac

SEQ ID NO: 220764 - DNA, 381 bp, Glycine max
  unsure (1)..(381): unsure at all n locations
agctttaacttaatcaaactcttagctcatttgtaatgatagctttgacaacaactttctcttaagtaaatctgattgtcgatggacacttttagtgatattntttactcgatgatgatgatgatgatgatgatgatgatgatgatgatgatgatgatgatgatgataataataataataataataataataataataataataatacgtgacacgtgtcggacacgacaaagacatgaacacgtgaatacctcacctcttgaaaaagttaatgagatgttgatttacttatcagtgtcggtgtcgtgtcgaacacaaacacggacacgtgtcagacatccaacccattcataacttgtaggtaatgtttcaattcatata

SEQ ID NO: 220765 - DNA, 358 bp, Glycine max
tacactacctgacgcgtctaattactaagtagttcaagtcattccataaccagctcgaggctaattactcaaatagcttctatgtggttcaaattttatgtctatccgagtagcgaaataggtaacttcgaaattacttgttgaattaaaattacttgggcgtttctgtggccgaaaaatcaatatgtggaagtaattttgggatataattttggcttcattaatgctctatatttttttaaaaaatgattttaactacacggtctaatgtgtggagaataattacacaaataattcaaatctttcccgaccgggcatgtggctaattactcatataataccatcacaacttctatgt

SEQ ID NO: 220766 - DNA, 375 bp, Glycine max
cgcacgggttttgtcatcctttgacgaatattctggccgcgctcttcggtacttccgctttatcctccatgcctactactactactatcccaacaacagagagaataatagggttctctgttttcacttggcactaaaaaagcggcgcttgacgacgccgcttttgctatatgtggtttttttgaatttttagaataagttattatttttagtatacttttaatttggctacgatatgtcaaaaaatgtattttaactttttaaaaaattggcttgaacctcacaggcatcttggtggaccaatcaggaattgatagtttgacttggtcgaacctcttattgaggagtagactacgctagaccaccttatagatg

SEQ ID NO: 220767 - DNA, 451 bp, Glycine max
  unsure (1)..(451): unsure at all n locations
taaacctcagcttattaaggcttanagctgtgacctgttcgataaatactgaggcacttcccttctcattgncaaaaaggtttcttctccatgagaattcccactgccaaccttcttctccaaaggaccccatgcttcccactaacagaagtttgtgagaggatatttgatacaattcacgatatttttctctaagagttattccatcacccacccaagagtcttcccaaaataatatttggtcgccactgtccaatttccactggaactgttttaagacctcagccatgctgctgtgatgcattacagacttcaaatcacaccaccaaaaggaatgggtatcggctaaatatgttctatacatgattgtcatactcacaaaacttgggcaagtttgcgagtccacggtaaaaaatatgtgctgtcccactatgaaaattggaccttatca

SEQ ID NO: 220768 - DNA, 384 bp, Glycine max
  unsure (1)..(384): unsure at all n locations
ccctagcttgttccaaaattaaaccacatttgattttntttataaaatattctttatttaactacatgtctttaaatttaaatcttaaatatataatcatattaaatatttagagaaagaattttaccgggtataataactctatcgtctatgattttaattcacaaaagatttcaatcctaagagcaacttaatagaaatacactacactacccaaatatacatggtggtatctagctcgacagatatttatcaaaataataataatacatgtcgtcttaatcttagattattattgattatgtaggctctagcttctcttaatttttttcctatcatgcatgtttcctttgttgttgatgatgttggtgttattattattat

SEQ ID NO: 220769 - DNA, 444 bp, Glycine max
  unsure (1)..(444): unsure at all n locations
tactaagcttctcccctattntgctataaatatggtgaggagtgaatggagaaggtttttatctcttcncggcacttctcattctctcgaaattgctgaggaaaattatctccgtgaagaaaatccaagccgaggcgcttccgtaacggttctgtaacgtttccgtgagtaattacgcgaagattctcgaccgttcttcaacattcatcgttcgttcttcgttttcttcagtcttcaacgggtaagtacctcaaaccgagcttttcaattcattctatgtacccgtggtggtccacattttgtttcatgtatttttattctcgctttcattcgctttttatacccccttttgacgtgtttaagtcatttatttaagtcatttctcgcctaatctaaaaataaaataaatttccaccgatcgtttgaattgtatcatccgctaat

SEQ ID NO: 220770 - DNA, 356 bp, Glycine max
ctttttctgtgattatgcgaacccataacgccgctatagttgagtaaaattatggtgaacttttgttgtgcttttttttttttttaatggaattgaattattaatgaaatgtggcatacactgtttttgtagtagaacacatagatggttcacctctctgtacatttaattggttctgactcctagtgagatcgtgccatttattgaatttttgggctttagtgcattgcgaacattttgattatcagattatgtaagctattttggtttttgaatacggtttaaacttatccaaattaaaacttatcctaaaccaaaatataagtatatttcaatgaatgttttcttacaataca

SEQ ID NO: 220771 - DNA, 434 bp, Glycine max
ctaagctaaccgcccaggggctatttcctataataagcttattgtattgtttaaagggatagaaggttagcattcagtagtggaggaaaatgagagaattatgagagaagaagatgaatgatgaggatacgatgctgaggcgttgccaaatcacaagtatgatcaatccctacatcgttccttgtttggtgttcttcgtgcgactatcggttagttttgtttttaagatttgaatgtgatctatgaacccttagggatccccctttgtttttttatgcatattcatttgctccatctatcatcgttattctcatatttttttgttaagtttaatccaaaccgatcactagtgtcgtaaagctatctttatagagattaaaagttaatgagcaaaaccaactcataactgaattcctctacatcaaaagtcactt

SEQ ID NO: 220772 - DNA, 379 bp, Glycine max
  unsure (1)..(379): unsure at all n locations
agcttgccagcgcncgcggagcggagaggaagggtgctactgtcttatgtgaccacccgctggacgagggaccgcgcgctcctggctgatacacgaacaaccatatttacagattggacccttgtactaatcatgctcgggagcgcttagtgggctgctcacagaaactaaacaatttccaatctattgttgatgcatctacgaattgtaccggatacctcaggacctcgtatacctccccctttttcacttttaagatagaaactgaaccaaaatataagtgcctatatgcttacttatgataaccagtgtgacacaggaccttacagaatgtgtatgaaatccaagtgctcgaactacgcatgaataccgatcttca

SEQ ID NO: 220773 - DNA, 363 bp, Glycine max
acccggtgaagaacattatgctcactcggccacctatatagagatacgcgggactctcacgcaggcaagcgagcctgcggatgcaatcatgttgaggggatcatcaatcacgttatctggagaacctaagagatgacttcgttctcttaaacgaaacagaatgaaatcatggtgtgaagtgataaaaaagatcttacaaaagtacttccttgtgtcgaagactgcgaaacgaaaagcgtccatctcttacttccaccacttgccaaatgaatcgatgagggaggcacttgacagatgcaaacgtatattgcatacgactcccattcacggttcttcagatacaatacaactcaacatattcat

SEQ ID NO: 220774 - DNA, 420 bp, Glycine max
  unsure (1)..(420): unsure at all n locations
cacctgaggcatgcaagctngatnattnnacaaagacgagcngcttttcttcttctctacttttacgaagctcaaacccattttcgtttcttttccacactacttggccaaacactataccaagttgaaagcgttataacgtaataaaacctacctcttcaccaatcacaactcaacttcttctgtaacaacaaattatttctctctatgataaattcgataggtgcgttggtgaggaaagaattgtttcgttctgttctgtccaagtgttgctcccacaggacctgttctgcaaatgcactcctcacgcgtttagatttagaaattattacccttgattattttacaggtggattctttcggataatatttgactcgtttcaatctagctgaaactttatatatactttgcactaatta

SEQ ID NO: 220775 - DNA, 398 bp, Glycine max
agcttgtcaaatgaaaaagacaaaaaaaaattatcattctaatgcaccaaattgagaaacaagtattttctctcgttgagattaaagcaaacaacttttatccaaacacaccttagttatcaagcaagggcattacaggaaaaaggaacaaaaaatgtggccatgcaacacaaggtgacaagggtaacattgtttctaaatttggtctaacaagaaagttaggggcctatttatgcacaataaagcttttttttatcttttccaagtatatatgagacataaacagctaggtcctcatcagggttccctgccatttatgcatatcaaatttaatggttgattatttactcaataaggaatcattttcaacctctagctagttttgaatgtcagttaag

SEQ ID NO: 220776 - DNA, 403 bp, Glycine max
gaccttaagcaccgcggctgcaactgaactggggaaactgaaatttttgtctttattgcctaactcgcttgagtggcatttatattggttgttatcttgtatgttgcatcttagtacatatcatatatgttatgcatctttcatcatcatagtaagtgtgaagaaaagtttcaaagttagaaagctttcttcaagaggcaaaaccctctgttttaatcgattacaggattgtcgtaatcgattacaacaaattgtttgaagcttggagagttgagtctcgtatcagtttaatcgattatagtagtctcgtaatcgattacactgttgtttgagacaatgactgatttattcaagagtctttattttaatcgattaccaagtggtttaattaattaattctctt

SEQ ID NO: 220777 - DNA, 397 bp, Glycine max
agcttgaatcggacatctgtgtgaatagttttgatcatttgaatttatcaagagcttccgttgttctatttcgagcgtctctatatgtgatgcgccataatttaacatccgtgtgaaaagttgtgaccatttgaatttctcaagagcttccgttgttcaatttcgagcctctcgacatcttatgcgcccgaatcgaacatccgtgtgaaaagttatgaccatttgaatttctcgagagcttccgatgtttaatttcgagcgtatcgatatattataagccttaatcggacctcaatgtgaaaagttatgaccattttaatttcccgagagcttccgttgttcattttcgagcgtctctatatgtgatgtgccttaatctaacatccgtgtgaaaagt

SEQ ID NO: 220778 - DNA, 397 bp, Glycine max
agctttcacaaggaaatgatcttctggcaaagtgattatataggtttttggaagccggtatgactagtcgcgatactttgctcagctctgtgatcgttccccatgccgtagcagctagttcactaattttgtgtgtgtgtgtgtgtgtgtgtgtgtgtgtgtgtgtgtgggcctgtgggtctgtatgtgtgtgtgtgtgtgtgtctggggatgtggttgtgtgtgtgtgtgtgggggtgtgtgtgtgtcaacagcacaacctgcatttcaaagatagctttaggggaggactattgacagatactcattagatgttagataaagttagttaaacaaatacagcaatttatctaccaaacaatggtattgggcttgcaaattcattatttgagaatta

SEQ ID NO: 220779 - DNA, 388 bp, Glycine max
  unsure (1)..(388): unsure at all n locations
agcgtgttttatttatctgtttccccgccttctataccgacaangccacctcctcctccccctccgctttcagggaactgcgtttgatcataacttcatcgcaaaacataaacacttgcactttcagatacccagaatattaacatacataatatgctaaactctacaagccatcaaacatttcacttgttcaacgcccaaactatctaaaaattataataacctcattcctcaggttgaaagaaggtatacatttatccattttctaagtaatcaatgaggtaatttacaacgttactcatataacgtgcctgggaactaatatgtccacatacaattagaacatatcaaatcgctttanccataccctaattaacacgaccattat

SEQ ID NO: 220780 - DNA, 382 bp, Glycine max
  unsure (1)..(382): unsure at all n locations
agcttagcgccactacctgttctaagcacactttcttgacnncgaaacaaaatgatgatgtcgcttagcacatcctttctcgctaagcccagcttgaaagctcaacttacagaatgaatctggggcttagcgtaggatggcgcgcttagtgcacctataataaattttcacaaagaggaagtggcacttagcgcaccatgcacgctaagcccattgcttaaggtgcaacttacagtgaagatgttggtcttaacacagcgatgtgcgcttagctgaaccattcagccaatcaatcaggggtctttgtgcttagcgcgagcaagctcagcttagcgcgtgaagagatggctcttagcgcaaggtttgcgcttagcggataaac

SEQ ID NO: 220781 - DNA, 388 bp, Glycine max
  unsure (1)..(388): unsure at all n locations
agcnacatgatgaagaatttttttgatnctttatggcncgaaacgacaaagatgatgaaaaaaagcccaacgaatgatttcaagattaagtcaacacgttcaagagaagtttgatatcacaattcaagaaaagatgaattctagtttcaagagaagaaatcaagaagacttcacaagggaagtattgaaaagatttttaaaaaacaaacatagcacaattttgtttttcaaaagagttttcacaaaattttctaagttaccagagtttttactctctggtaatcgattaccagtggcaaagtttgttttcaaaagcttttaactgaatttacaatgttccaattgatttcaaaatggtgtaaacgattacaagatattggtaatcgat

SEQ ID NO: 220782 - DNA, 428 bp, Glycine max
  unsure (1)..(428): unsure at all n locations
tggttcgcganacatanagccattgctttagtttatggtgnattgggaagagncatatgcgaaaatttcgtcgtggctaacacacatgcaaaatcattcttctggatcatcttttcaaatactacatgacgattttattattgggaatacggttagtcgcaaacaccgtcagtttcatagagtgtttttgacttttggtcaatgtaaagaggctttcaagtattgtaagccaatcatacaagttgacggcacacatttgtacgacaaataccgtgggaccctcttaatgggcacatcacaagatggaaatggtggtgtccttcctctatcattcaccgtggtcgaaggtgagacgttaacaacctggtcatggtttttggcacacttgcgtgaacacgtcccagataaaaatggtatttgtatcatat

SEQ ID NO: 220783 - DNA, 396 bp, Glycine max
  unsure (1)..(396): unsure at all n locations
tgacgagatacaccacacaccatgatgactggngagatgtttgaaattgtacctactggaccttgtcatgaagacatatgcattatgtatcgcatctgaatctaagattgaacgctgcaacttaaatgaagccttcatgtatgataactggttcgttgacatgccagaacatctggacctgtctgcgatataccatgtatcgtgagtggacaaaaaaccagttgactacactttgttaagagcaaaatgggttacaataaacatgttaccacagcacggtattggtgtgagaagacaaccctcttaaaccatggcgcgcatatgatatgatcgatatactgtatgatacaatgctcctgtgcatattataaccatcacaacgctgtggatatgcac

SEQ ID NO: 220784 - DNA, 342 bp, Glycine max
ccccattcctcttttcgggccctctttgtatcccattccacagcttccggtgtggccatgctgatgtccttcaactgggggactctttcatacctttatggctgtccgtcttgagtttttctttgaccactcaagtctttcaagttctgccttcaaggcttacacctcctccctctccgcagaggtttcggcctcttcctcacttgaaaccttttgcttcgggagccagtctaactcttgcgtccgagccctcatccacttgtgatagccaccgatgatcccattactacttcctcgaagctccttattctttctgtgcaccgaattccatgcttttcagac

SEQ ID NO: 220785 - DNA, 441 bp, Glycine max
aaactaagcttaaactaaaatgatctaaacattagagactgatcgacatattccacgcggaatcagttacggaggaagaagagaagaaactgaaacggcgataatccacactgaatcagtaaggagggagaagggagataaaagaaaaaacttgcaaatttatttgataacaacgaaagataagcttacaaaaagtgttttccagagcttctctctctacaatctatgtgactatttctatttgaaaaaagggtgcctcacaatagagttgaggaattcttttatagaaaattttgaggtactatagctacaatgcaggtaacaaaatcggaactatgtttacaggaatcggtaaaatttatacatcatccaaacaaataccaaaacaatcctcttcattttggtagaaatgatcattttctgaagaattcgtatcttctt

SEQ ID NO: 220786 - DNA, 376 bp, Glycine max
gcaagctttgagaccctgaattgctgcaaggatttttgttttgtatatttaccaagttccacagggatttttgatttttatgagtacattcgcaggcctgattctgatattttgcttccaaggaccccggttgtgtgcaaaccctttcaagatgcatttgaaaaggctttcgatatggcagatattgaccctcaaagaaccagaagatcactaatccttctttggccatggattttcccttttgtctctaatattaaataacccttgccatgatgatcttgcaacttgtgtcttttgtaacaatgaataccaattatcatttttttcttgattatgtgcaattttgtgaaaattaagtaatcatttccattatttt

SEQ ID NO: 220787 - DNA, 433 bp, Glycine max
ccaaactaagctatatggatagtacacttaagttcgcgccaggttttatttttttattaaaaaatttcacatacttatttaggtttcatagtcttacagactcaaagaatgaggtacaaatttaatgactaaatagatcatctactaaaaaaatatgctctatccaaattatacatttaacatttaagagatttgaattgctttatccaaacaaataatttagaacatataagaaatttagctaaaagatgtttgaattctaggtattctaagattgtgaggataaagttcttgaaagaatacatattatcaaacaaagtttctgattctttttatgttgaacattatttaatggttaactgttaatgttaaaaacatattctaatgtttatatagttagaactaaaaaaaaatatttacagatgtcttaaag

SEQ ID NO: 220788 - DNA, 418 bp, Glycine max
  unsure (1)..(418): unsure at all n locations
acctgangcatgcaagactggnnttgggcaatagcaccccacctttacgtcccattttctcctgacccccgtgacatatctccaggtaccactctatggtcaacgaataaaagcaggaagtttcacccttctacacttcctcatctcaagcttgtaggattatggggtacccatcacatgtggtactaggtggcggtcgggcgatggtgcacaacaagttttccacatccacaaatcgcgcataaatccaccatcccctgttgcccaccttcaactgagctcacgtactcccacgtagcccatatcctcgtttttctcaaccccgtgtccccatcaatccttccatgcttccccaacatccagggtattcatcattcaaatcatcacagactaaaaaatcaagcaaaatagggcaaag

SEQ ID NO: 220789 - DNA, 370 bp, Glycine max
  unsure (1)..(370): unsure at all n locations
aaacttatgagacacactncaaagttgaacttctttccctctntttctccttcaatttcttgcccnccccccctctctctcattcttttccttcattgaagcttcctctctaagcttcttatccaaggcactctcttggtggtgaaacttctccttccatggcttattctttagtagatggctcctcctttcacctcttctcctttatcttctgttacatctccatgatgaaaaatcaccattgaagggcctctctgaagctcaaagatccagcctccatagaaggttctcaagaaagcttccatcagtaaatgtagccattaacttatgcgtaattttaatattttaaaacaataatatgttatttctt

SEQ ID NO: 220790 - DNA, 389 bp, Glycine max
agctttgttgttaactatattgtacaactatcattaaaatcctgtttcaacattggaagactacaacatcaagttcaatgcataatatataattgaattaaaaaatgcttcatgttttttgctcttgattccacatcttttatttgaatagggaaattgcaaaataagatctattgcaattttacataacccgcgaaagcctactatatcagtaaatgcttcaatttaactgtcatatattggcaaaagtagtaatgaactatgagatcaagaagaagacattgatactgcagtaatagacagtattttcagagaacataagatcatcacatacaaattccactcatatatagacagatattcatcagattcttgtcaaagataactgc

SEQ ID NO: 220791 - DNA, 319 bp, Glycine max
  unsure (1)..(319): unsure at all n locations
gggtgaccggcactccattttttttgttaatgtcnttgancagaggaganaaccccaaggcctggtaggacttctccgaggccattgggcgtctcaaaagcggcatgccctacaaactgatagatatcatctaagatcagctgggcaacaaggacactcacctgagtcaagatggcgtaaaccagctgacacttcaacatgggaagggatgaattatggacactggtgagaatgttactaagcagcagcgtcatccacatctgcgtgagggtggtcatgctggtgcgtatgaaacgtacacgttttcccgctacacttc

SEQ ID NO: 220792 - DNA, 396 bp, Glycine max
agcttgcttgtggagcttctatggaggctttatctttgagcttcaatgaggccctttaatggtgattttccactatggagatgcagcggaagacaaaggagaagaggtgagaggaggcgccatccactagggaataagccatggaagaaggagcttcaccaccaagatgagccttggataagaagcttggagaggatgcttcaatggaggaaaagaaatagggagagaaagagagagggggggcacaaaattgaaggaagaaaaagggagagaagttgaactttgagttgtgtctcacaagactctcattcatcaaagttacaacaagtgttacacatgcttctatttatagactaggtagcttccttgagaagctttcttaagaaaacttccttg

SEQ ID NO: 220793 - DNA, 395 bp, Glycine max
agcttctcaaggaggtaagcttaattattatatgtgtgtgtgtagctaagctctagcttctcaaggaatttttctcaaagaagcttctcaaggaagttttctcaatcaagcttctcaaggaagctacctagtctataaatagaagcatgtgtaacacttgttgtaactttgatgaatgggagtcttgtgagacacaactcaaagttcaacttctctcccttttttcttccttcaattgtgtgctcccccctctctctttctctctctctttcttttcctccattgaagcatcctctccaagcttcttatccaagactcatcttggtggtgaagctccttcttccatggcttattgcttattggatggcgcctcctctcacctcttctcctttgtc

SEQ ID NO: 220794 - DNA, 395 bp, Glycine max
  unsure (1)..(395): unsure at all n locations
agcttgctcatctngagctattatgtcgntttctttatnngaagncggnggngcaacatatttcttnggtctcatacgaactccaatatttttgcagcttctgatgttatgattggtttggtcacacctttcacatgtaaagtcagacaatttcctctttatcctatgtcctatgacattgtcttcatttgcatctctccttctatctttcttaggccttcctctttggacctttttatgtggtggaataggttgtgcatattatgtctgggcccaatattgtgatccttggactggctcaataaaatgatgatatgtcttattataagcctctatggacagccactcatgacacatgtcctcaggcttgccttctttgtgacttattgatgcaa

SEQ ID NO: 220795 - DNA, 399 bp, Glycine max
agctttgagatagctacatgatgatggtgctgttcgtctatgctcttatctttgggttcgtggctttgaattgcttgcaagtgtttgaagaatccaatgctcaacgcttaccgcaagatgaaggtacgcttccacactttgttttccctggattttgttgttttagttggtttggttatgtagttaatattggaacaacaaaagaacttttttgaaacttgcttttcataactcagcatagaagaagaaactgccttttatggtcttaaacttttaattaaccccccttctaaccgttctcacttatgcaatagatgaacgtagaaattagaaactatgaaaaatttgaatgtttgcatcattgtcccctttttatacttagggtgtgttgactctttc

SEQ ID NO: 220796 - DNA, 390 bp, Glycine max
  unsure (1)..(390): unsure at all n locations
agcnggttgttaaatttatcttcaagagggaattggngagacatgctattactagatttgccacttcttatctaacattggaaaggctccacaaagagaaagccaatattagaaagatgttcacttttgatgagtggatcttaaacaagttatctaaggagcctaaggggaaagaagctgcaaaggtagtgctcatgccttctttttggaatagtgtggtttatattcttaaagtcatggctccacttgtcaaagcgcttcgtcttgtggatggtgaaaggaaactagccatgggctatatttatgaagcaatggacaaggcaaaagaaacaattatcaagtctttcaacaacaatgaaagcaagtacaaagatgtgtttgcaatcattg

SEQ ID NO: 220797 - DNA, 203 bp, Glycine max
agcccaatacaagggttgagacctacaatggagagggtccctatctgtcacatctagcaaaagctctgtcaatgcggagtggaagcatgaagatcaagctgttgtactgggcaaagaaacctaccaaggccagccaaaccgggtgcaatcgcgctctccgggctctaaattgaagaattggcggatcatggagcgacccgaga

SEQ ID NO: 220798 - DNA, 383 bp, Glycine max
agcttatactcagcctcaattaaatgcttctatgtgaactccaaatgcttcccccactgggcaatatacccctcaatgctctgcacatcattgaactccgccacagaaatctcaaggtaatccaaatttagcgcctgcaaacttgccctcacattcgaactcctcacctcaacataaatccccacacacctatccagcctgtcattggcaatcaacctcccgagaatcgcctgcagcttgtgaacaaccgacaccggcaatggcgacggggcaatgcacgcctgatccccgcttgccgacgccatcggcaatggcacactattctcacccaacaacaacctaaactcatcctccaatttactcaatgcagcatccaacaaccc

SEQ ID NO: 220799 - DNA, 415 bp, Glycine max
  unsure (1)..(415): unsure at all n locations
gcttaccttgatatgaccatttgtttttcttctggaggcattgccacgcattgcattcttgtggagagagaaggaataaaagtacaaacaatgtttgcgttcaggtgtaatgaggaattcagacctacgtagttctttaagtctgaatgtttgtgtgctaaattgattttatgttttttttaagatttattttaattgcgaacaaaaagtcgtctaaggtgttggaccttgaaacaatgttttatgtttcaaaaagtggagagaatcgttaaggcgttggacctcgaaacgatctcaagtgatatttgataaaaaagaagaggttatgaattggttttatcttgngtttgtttattaactttcaatctttgttaagacaactttataacactagtgatcggttaagaattgaact

SEQ ID NO: 220800 - DNA, 391 bp, Glycine max
  unsure (1)..(391): unsure at all n locations
agcttcttatctcaagctcatcttggnggtgaaactccttcttccatggcttattccctagtggatggcgcctcctctcacctcttatcctttgtcttccgctgcatctccatggtggaaaatcaccattaaaggaactcattgaagctcaaagatccagcctccatagaagccacacaagcaagcttccatcaagaagggcatacgaccctctttcaacatggaaacaccaatgcaaagttgggagaactcacacattcaaggcattntgttacctaagatacatacacgcatttcaaagcattgtggccacctcaagatcacgatatttttgccaataaaaatgcacacccgcatagccaagtatcttggctaccaaaaacgtatgcac

SEQ ID NO: 220801 - DNA, 429 bp, Glycine max
gggaaggatgcttcaatggaggaaaagaaagatggagttatagagagaggggggagcacgaaattgaaggaataaaagagggagagaagtggaactttgaagtgtgtctcataagactttcattcatcaaagttacaacaagtgttacatatgtttctatttatagactaggtagcttcctggagaagctttcttgagaaaacttccttgagaggcttctttgagaaaacttccttgaggagctagagcttagcaacacacacccctctcataactaagctcacttccttaagaagattcctaaagaagctagagcttagctacacacacctctctaatagctaagctcacttccttgagatgagaagctagagcttagctacacaccccctataatagctaagctcacccctatgaaaaaatacatga

SEQ ID NO: 220802 - DNA, 412 bp, Glycine max
gctctaagcccgtagctgtgccactttgtaatacatcaaaaaccaaagtacatggtaagcatcataaggcagaaaataataatcaaatataactaaagttacataatcattcataagtcaaaatcaaatataatttagtcataaaatactaagtgccaaatactgaaatataactaaagttcagagaataatgacttaaaaaaaacatagccaaatacacgacttaaaataaaagataataataatctaaatctaggaaggtggtggaaggtcgaagcaccgacgaagataactcacatcctcttcaagttgagggatgcgggtattcattccttcaaagcgagcatcaatagcatcgatacgaccatccaaggaatcaaagcgttcaccaacataggtgcggaggccttgt

SEQ ID NO: 220803 - DNA, 419 bp, Glycine max
ctcttatttcagaagggattctattttagacctccaatctttaatggagagggttaccattactggaaaacccgaatgcaaatttttattgaggcaatagacctaaatatttgggaagccatagaaatagggccttatatacccaccacagtagaaataattacaatagatgacagttcatcaagtgaaagtataactatagaaaaacctagagatagatggtctgaagaggatagaaaacgagtacaatacaatttaaaagccaaaaacataataacattgggaatggatgaatattttagggtttcaaattgtaagagtgctaaggaaatgtgggacactcttcgattaacacatgaaggaactacagatgttaaaagatctatgataaatgcactaactcatgagtatgaattatt

SEQ ID NO: 220804 - DNA, 415 bp, Glycine max
  unsure (1)..(415): unsure at all n locations
tgcctataataagacatacgagcattttattgatccagnccaaggaccacaatagtgggcccagacacagtatacacacccctgtttcaccacataaaaaggtcccaagaggaaggcccaagaacaatagaaagagatctgttgatgaggacaatgtcacaggacaagctaaagaggaaattggctgattttacatgtggaaggtgtggccaaaccaatcataacattagaagctgtaaaaatattggagttcctgttaggccaaagaaatatgttgcaccatcaacttcaaatgaggatgaccacctattatctcaagatgaacaagctttgaatgaggctgaagaagctgttgctcatgttcaacaagatccggtggagattaatttatctcagcctcatttatcacaagata

SEQ ID NO: 220805 - DNA, 429 bp, Glycine max
  unsure (1)..(429): unsure at all n locations
gaaggactagttccgcttctgattatgacagtcaccgctctatgagcgctgtacaccactagcgcttcgaggccatcaagggatggtcgtttcgacgggagcgacgcgtccaactcagggacgacgagtatactgatttccacgaggagatagggcaccggcggtggacatcactggttacccccatggccaagttcgatccagaaatagtccttgagttttatgccaatgcttggccaacagaggagggcgtgcgtgacatgaggtcctgngtaaggggtcagtggatcccgtttgatgccgacgctatcggccagctcctaagatatccgttggtgttggaagaaggccaagagtgtgagtatggccagaggaggaaccggtctgatgggttcgatgaggaggccatcgcccagctgctatgtatac

SEQ ID NO: 220806 - DNA, 437 bp, Glycine max
  unsure (1)..(437): unsure at all n locations
ttaagtcacctgcggcatgcaagctngagatgaggaagttgtgaagggtgaaactttctgcttttattggtgaccacagagtggtacctggagatatgtcgcgggggtcaggagaccttgtggacgtcaggtggggtgctattgcccaaaaccaagcttgaccaatcccgacccaacccgggcatagtcggtcagtgagaacctgtgatgtacctaaacaggcgagctcctggcagtcaacaaataaaaggaacaaagaccacaaagcaaggaggcttgtggtggctggccagctgtgaactttgattgatatgtgggttatggcctctggtaattgattaccaagggtaggtaatcgattacaaggcttaaaattgaagacatgaggctaagatggtctctggtaatcgattaccacggggtgtaatcgattacca

SEQ ID NO: 220807 - DNA, 463 bp, Glycine max
  unsure (1)..(463): unsure at all n locations
tgttagttacaatagaaagctaactaatctaacaaactcagtctcactaactatacttgctaactgatttattattgttgagactagttactctgattaagcgaacttatgaaattctgatttctaattccaggggaagggttcatgtagtgtcattggtgaaaggcttaaaaatagttttagttccttagatttataactttattttgttaatctcctaaattataaattgcattttttaatactttaaatttatgagacgcttattttagttctcctgcaataaaaaattatcactaattatacatataataaactaccgaaaattcgtcaagagaaaaaaaaaacattttacaagtttaaaagactaaaaaaantttaatttaaaaaattaaaaaaatttaaatgtaaggaactaaaaatatactaaactttcttntttgtccgtaacacttaatctaag

SEQ ID NO: 220808 - DNA, 417 bp, Glycine max
  unsure (1)..(417): unsure at all n locations
ctgccgcagcaagcttaagggccatggggactcggtgcttatangaactangataacggctccctaggagcgcgtgagctcaatttaaaggtgggcaactggggatggtgtagtcatggttgactagtggaaggggaaaaattgaattgcaccattccccgatcgccacctattaccgaatatgacgggtgccccataatccaataagcttgatgtgagaaagcgtggaaaagtcactcttcttacttttgtttgttgaccacagagtggtacttggagatatgttgcgggggtcaggagaccttggggacgtcatgtggggtgctattgcccaaaaccaagcttggttaatcccgacccaacccgggcatagtcagtcattaagaacctgcgacgtacctaagcaggtgagctcct

SEQ ID NO: 220809 - DNA, 467 bp, Glycine max
  unsure (1)..(467): unsure at all n locations
acctatgaaactcagctgcttgggagctttatggagctggatctttggctttttggtgtcctttaatggngantttccaccatggagatgcagcggaagacaaaggaaaagaggtgagaggaggcgccatccattaaggaataagccatggaagaaggagcttcaccaccaagaattgccttggataagaagcttgaagaggatgctttaatggaggaaaagaaagagagaaggggggagcacgaaattgaaggaataaaagagggaaagaagtggaactttgaagtgtatctcataagactttcattcatcaaagttaaaacaagtgttacacatgcttctatttatagactaggtagcttccttgagaagctntcttgagaaaacttccttgagaagcttctttgagaagctagagcttagctacacacacccctctcataactaagctcacctccttgagaagc

SEQ ID NO: 220810 - DNA, 199 bp, Glycine max
ctcatacaatcttatcctaatccaaaattttatgtatatttttgcacatgcgccctggacttacaacaaaatttgtaagctctggggctgaggacctatataacaacaccagggttttaccttacagggaagccccggagacgacaataatttaagagattggcaattccaacttttactggacatgcacactgttcac

SEQ ID NO: 220811 - DNA, 401 bp, Glycine max
agcttaacccttgatgggatggacgttatttatgtttttaagatgatcattaacaatgcccataggctgtacctcccatagtactatggagtaagcaccacttttaacatttgtgatttaaatccttttgcaagtggagctgatattgacgaagaggaactaacatatttgaggtccaattctcttcatggggaaggggatgatgcaatcctccctaggaagggacaagttactaaagtcatgtgcaaaaggctacaagaggaatgggctacagcttctgaagaaggccctaaggttctcatgaaccttaaggtaagattctaagcccatgggccatggttgagttcaattatctttgtgcatattacactaagatgacattatatttgaaccttgtattt

SEQ ID NO: 220812 - DNA, 400 bp, Glycine max
ttgcggatctggtcttcgtcgacataagatcgaagcttatctgaacataggcaaatctgatcatactgctgtgatgaatgagaaaaatggggccaatgatgaggatgagaatgatgaaggaatccatgttgaggctgccattcctacatggacgaaatgaccatcatcccaacaatgtcagtacttagccaatatcagaccttctcattacctaccacccggtcatacacagaggctatccgcaaatcatccacaaagtttgctgaccgcgcatgctatgccaaagcgcacaccataacaccaaccaggagatgaattttgctgcgacaaatcctatagaattcaacccaattactgtggactatgctaacatgcttccatatcaacttgataatgcaat

SEQ ID NO: 220813 - DNA, 414 bp, Glycine max
  unsure (1)..(414): unsure at all n locations
agctttgaggattaggtcttngccagtgaattgatctatgngggtctgaaaaaaggcaaatttagtcatcctgcttggacgaatgaaaaaactggggcaaatgaagagggtgagaaagagggagaaacccatgttgtgactgccattcctatatggccaagtttcccaccaacccaacaatgtcattactcagccaataacaaacctcctccttacccaccgcccagttatccataaaggccatccctaaatcaaccacaaagcctgtctaccgcacttccaatgacgaagaccacctttagcacaaaccaaaaaacaccaacaaaaaggaattttgcagcaaaaagcctgtagggttcaccccaaattccattgtcatatgctaaacttgatcccgtatccactcaataattc

SEQ ID NO: 220814 - DNA, 444 bp, Glycine max
  unsure (1)..(444): unsure at all n locations
tagccgaattcagattgaattgatgttggcttancacatccttggccagcttagcgggctaaattagcctcagatgcaagggttgggcgctaagcgcttgagactcgcggcttatcgcatgaacaaatatgagcttagcgtgaggcttgcgcttatcgaaggaatgatttttcagaaaatattttctaagttattattcagtcccttccttagtaaattgaaacccttatatctaacattcaaggataagctgatatactccaatgtacaaattatacagcaagttacaaatgatcaaatgcatgtaaaaacaaagataacagaaattaaaactgggttgcctcccaggaagcgcttctttaacgtcattagcttaacacatagcttaataccttcaaggtggcatgaaagtcacatagaacacatcttccttgaagtttcaat

SEQ ID NO: 220815 - DNA, 374 bp, Glycine max
gtatgattctcatcatcatggatattggggctctaatcatttccctttggccatctacattgtccatgtcttgtgagattaaacaaggatgctacgctatcataaaatatgattgatggatttcatatcttgagaatgatgaaaccaccttttggttctgaagtttttgtttattaaacatggatggattttacttgaaattctggtgtttgatgtaccactttttgaataattttgcaggttaataacatacttttcgcaataaagagaaaaaagtcaatggagaccattatactatcccttgttctgcccgatgcacatttctcattttcatggactggctatccaaatgaagctggtgtttgtgtcgggtg

SEQ ID NO: 220816 - DNA, 452 bp, Glycine max
  unsure (1)..(452): unsure at all n locations
ngaacaccataacaggggaggataaataagaacacgaatatatccatttaatattagcaaaaggaaacagataaaatgactacatgataatttcgattgagtttaagtggcttaatgctccaaaggaaacagaataaatgactacaaaaaatagtgtactaaatccttaacgcatttaagcactgggtacagggaatcatcttatgttaaatttcacagtgctaaaattctcacatgtatatataaaaagttgcatatgtcagctattacagaacatcactgagcaaaaattgtgacaatatgccaaccaaaaacaatataattaccgagaatgacttatttncttaattattaattgcacaacaataattaaatggtgttgagaaatgaatgaaacaaaagaatctatggttattttcagaaaaaatttcataaacactatgttatataaa

SEQ ID NO: 220817 - DNA, 363 bp, Glycine max
  unsure (1)..(363): unsure at all n locations
aaagggttcagccccttatgcacttttctctctctctctcgaaatagctgaggaaaaatagttccgtgaagaaaatccaagccgagacgctcccgtaacttttccgtaacgcttccgggagtaattacgcgaagattctcgaccggtcttaagattcatcgntcgttcttcgttttcttcagtcttcaacgggtaagtacctcaaaccaagcttttcaattcattctatgtacccgtggtggtccacattttgtgtcatgtgttctattctcgttttcatttactttttatacccccttttgacgcgcttaagccatttatttaggtcatttctcgcttaatctaaaaataaaataaatttcc

SEQ ID NO: 220818 - DNA, 455 bp, Glycine max
  unsure (1)..(455): unsure at all n locations
acactatnagaatactaagcttcacatccatattccggggccaaatgctgtttataatgctctgctttatagaactctctacatatcaaatacattcgttagaataaatgaaacaaattagataaagcagaagctcataataacactttcacaagttaagtatggtcaaataactgacatatctcacattacaaggtgaaacataacattttcctgcctccatatcctatcttgcatctaactctgtgatagaagcttcattgaccgaccacagtttgtgatttgccgacgaagaagttgcttcagatgtaacatttgttccggagtaaaagccaggagccattggctttggcaacaatctatcaccactcaacattgaaagaactgatgacatgtgtggcctatcttgtggtctntgttgcacacataatacggctacctgtatgcatccgatg

SEQ ID NO: 220819 - DNA, 444 bp, Glycine max
  unsure (1)..(444): unsure at all n locations
tgcttgggggtttctattgacgctggtatcttgagtttcaatgacttcctttaatggggattntccaccatggagatgcagcggaagacaaaagagaagaggtgagaggaggcgccatccactacggaataagccatggaagaaggagcttcaccaccaagatgagccttggataagaagcttggagagggtgcttcaatggaggaaaagaaagagggagagaaagagagaggggagagcacgaaattgaaggaaaaaaaagggagagaagttgaactttgagttgtgtctcacaagactctcattcatcaaagttacaacaagtgttacacatgtttctatntatagactatgtagcttccttgagaagctntcttgagaaaacttccttgagaagcttctttgaggaaacttccttgagaagctagagcttagctacacaca

SEQ ID NO: 220820 - DNA, 403 bp, Glycine max
  unsure (1)..(403): unsure at all n locations
agctntctagcatttcattggtgtantttgatctccttnttgngctctaaaatgtgggaatgtgctcaaatatgtggggcaattttggtttgttttcttgcttgattgggttggattgggggtttgtatgggatggccctaggcctataatgcattttgaagcaatggggcatgccacattgtccccgttctcttgctattgatgcctaaacgcgcgcccaccaagtgttcggtgaaatgcctcaatggcattagcgtgtgacttttgtaaggaaacaacccatggggcattttggtttgtacatattttctattttttgcgacatgtattcattcccgaaaaaggctagaataattgcctcacatatatactaagcctaggaaccaaaagttttatgcaaaa

SEQ ID NO: 220821 - DNA, 427 bp, Glycine max
tagcaggttattcactcttttagtattgttgaatcattttattcattcaaacttttgtttgtgaaagtcaagagtgaattactggtatggaatacttgggtggtcttagattcaaaaggagtggcaggacaaaatacttgtttgtaattaaagttttgattagtagaattctttacagtcacataaaggagaattgaacattgctttgtttaagtgaactagtataaaccaagtgttaccacatctttcttaattggttttattgagtattcttttaagcttatcttgacaccgtttctcaccaagtgtttacctgaaaaacctttgtggaaatattactttattattactggacgaccaaacttggttttcatcaaacttgttctccttattagtggatgactccatcgcatctatctttttggac

SEQ ID NO: 220822 - DNA, 393 bp, Glycine max
  unsure (1)..(393): unsure at all n locations
gcttctcccccaatttcctataaatagggggagaagngatatgaaaaagggttctggcccttangcacttctctctctttcgaatacgcttggaaaaattggttccgtgaagaaaatccaagtcgaggcgcttccgaaacgtttccgtaacgttttcgtgaggaatttcgcgaaggtttcgaccgttctttgacgttcttcatcgttcttcgatcttcaatgggtaagtaccttgaaccaagcttttcgattcattctatgtacccgtggtggtccacattgtgtttcatgtatttttattctcgtttcatttaccttttatacccctttttgacgtgcctaagccattttatttaagtcatttttcgcttaacccataaataaaaaaatttt

SEQ ID NO: 220823 - DNA, 465 bp, Glycine max
tcttccttgagaagctagagcttagctacacacacccatctattatactaagctcacctccttgacaaaatacatgaaaatacaaaaaaaaaaagtctctactacaaagactacccaaaatgccctctaatacaaggctaaaaccctatactacaagaatggccaaaatacaaggcccaaaagaaggaaaaacctattctaatatttacatagataagcaggctcatacttagcccatgggcccgaaatctaccctaaggctcatgagaaccctagggccttcccttggatctctggcccaatttacttggagtcttctatccaattcccttacgaggtaggattgcatcattccctccaccttggaaaggagttgacgtcaaatcctgaggttcttcatgtagacaaaggatcaagctgaaagttttgatgatgccaaaggattacatgaatcatatgtttctc

SEQ ID NO: 220824 - DNA, 403 bp, Glycine max
  unsure (1)..(403): unsure at all n locations
gttgtgcgtagcggcaccattttattcataacattcactaagtatggcggcttagtgagcaaggctcgctcagcccaatggctgccgtaatgaaatgggcttagcccagataggcttgacttagcgcacgacntttaaaaaaaaattggactaagttacccgggcttagcgattcatcctcgcttagccccaagtatctcaacaggaggatgagtgttcatcctcacaagatgagcttgcttagcgcggtaggtgcgcttatcgagttcgtctataaatgcatatattcaatgaatattgatgaactcgcttagcatagcatgctcgcttagcgagttcattgcgttttccagaaaaaacgcagttcattttcttccattcttgagcctctaaaaggcatatc

SEQ ID NO: 220825 - DNA, 464 bp, Glycine max
  unsure (1)..(464): unsure at all n locations
agatatccaagcataagctctagaagagtaaaatcatttgctatattcgcttgtctataaaagnccatcgccaattggaggggtactttttaatcttccttctagtgaccaaatgatccacttccataagcaagctgcttactaaaattcctttaggttgaagaggttggaagtaactcttgttatagagtgaaccaatattaaactccatgtgctttctctctctcatccttcattcttttagtttgcggacaacctttgcaaaataattctaaatgttagaaaaccttcttattgtgaaaagtattcaaaaatacacatacaattcaaccacttcttgtacaattcaaccacttcttggatgttctctttgtgttcatgtggctaccacattagtctggcattattacttattaattntntagttatgtcaagacatcttgtgacagttcttttgacgctag

SEQ ID NO: 220826 - DNA, 422 bp, Glycine max
  unsure (1)..(422): unsure at all n locations
agcttctggggggacatcggtgactngctttctaatctgacattcaccacagattctgccttcgtctattttcagattggggatgcctctaacagcacctttgtcaatgattttcttcatgcctcttaagtgcacgatgtcacaaaatcttgtgttgccaatattcctgacattcatctttctttggaggataaacatgtggaggagtacctggtttcttgaagtgtccataggtagcagttgtcctttgatctgctgcccttcattagaacttcactcttctcatttgtcaccaagcattctgactttgtgaagtttacattgaatccttcatcacacagctgactgatgctgatcaagtttgcagtcagtcccttcaccagcagttctttgttcagaccaggaagtccattatgaactag

SEQ ID NO: 220827 - DNA, 454 bp, Glycine max
ctataagtcctaaaggacattgcaagctaggattaactcactgttacctctttttaccacagaattcagacttaaccttccaaccctcaaagcctcactcttttttcactcataacaccacattctcactttccaaccctaggttaactctacatttcatctctaacagatttccatgggcaatttcagcatacaaacatcacaaacatcatcacaaaaccctaaaacagaatgggtatgtctaactcatccaaacatggcaatttcaacaagctttcaacaagtttcttcacaaataactatcatgaagcagacaactagcaagactacccatcatatctcccaaaaccccatacccacgaaattcaagagagagagaagtccacccaaacctgaattttgaagtcccctcgtagccacgcacttacgaacccaaaatgcctctttccgattg

SEQ ID NO: 220828 - DNA, 416 bp, Glycine max
gcttatatatgcaagaagtgatagaaaaatatctatattcacattggtagcaaaaaaatacctcgtgtttttcgggaataaatttaagcctcaatccaagggcaaaatgtttaaccacaattttgagaataaaaatccaacgtgcttttgggaaaaaaaatcatagctagattgatagcaaacaattcttttggggtaaaatcctcttctaaatttatctttaggagttccaaactctctagataaaaaggcaatacagaaaacatttcaaactaattggactcgagcaattaatgcaatgtagtgaataaatatcataatatcatataattcctcattcagataaattgtaactaagtatgggaaagacaaacatgtggacacaatgcttgctggcaaaaattcatcttgaataa

SEQ ID NO: 220829 - DNA, 469 bp, Glycine max
  unsure (1)..(469): unsure at all n locations
gcttggatctttccactaacaattcaagttgtagatacaaactcacatgcacatgatatcacacatgcaagcctctcgaaaacctatcaagaaaaaacttctcaacatgtagaagaaacctactacatgaaagacaacttgattaacccactcaagaaacaaaatttcactcatattttttggaaagaatatacctgattactaaaagatatgaaagttaatgcactttctaatgcatagtcaattactcttcatgattccatgataaagatccaatgattctttaggtatgaaagggttttgcatcaatgatcaaaaggctgtagacactntggctttctaagctttctctcatagaaaaacaaagtgaaaatatgaaagaattggtgtcatgcacaagaccttntgaaattatcgtgtttatagagtctgaatagaaataaccgattatatcatagagataatcaat

SEQ ID NO: 220830 - DNA, 414 bp, Glycine max
agcttgaaccataaccggtgagagtgtgatcttatactatgagtgaacgactagctttgagtaatagtctttgcatcaatctctgaattttagaatgaaatgtatgaataaggccatgattgtatatacaagccaattgaccaaaaagcttaccttgaattaataatgtatcctttgcaccctttgtgatttgaatgatattttcaaaattgaaccctgaacttaaatgactatctctagataccttgcttagattctaggagagcagatggttcaaggcaatttacccctaactgggatgcaaagtgaaaggtaaagcacatcagcacacgcaactaataagttatgtttaaaaaaaaatcaaagaaagtgtgtgctattgtaataaggtcaaatgcaaaattaagtgatagg

SEQ ID NO: 220831 - DNA, 447 bp, Glycine max
  unsure (1)..(447): unsure at all n locations
cttgtgacgttaaagaaacgcttactgggaggcaacccagctctgtcttagnttcctcaatcattttttttttctgttcatcattacatgtagttaggttgtgactcatttgagattgctagagtaaagtgttaagcatgttttgtgtgataaaggggttggccaaaagcttctctgaagcataggataaggaaagaacttagaaaaatttttagtcatccaactcgctcagtgtgccccatgcactaagcgagacataccctatgcgctaagcaagtagcatctctcgctaagcgcactaacccccatccattggttgttggggtctcgctaatcgagacaatcgctctaagccaaanaacctctcgggttgtgcatttaatggaattgggctaagcaagtcatctcgctgagcgcaacatggtctcttgctaagcgcgcctatgc

SEQ ID NO: 220832 - DNA, 415 bp, Glycine max
  unsure (1)..(415): unsure at all n locations
gatcttaagcaccgcagctgcagcntctaagaggggggtgtttgttttgcaacaaaaaagaacaatgaaatgatgaatgacgttttggtgggcatgttgtggccctaggaagcataaatcattcatttgagagcaaaacatatctttttggaaacaagggactgacgcttagagtttattttcctgaattaccaaaataggaatggatggattcattgaaccgatgaaagaacataatttggaaatattgggtctacttgtgttaatcccaagccttagtatcacaatgccataaactgaatgcttgagtacccacctagttgtggccatgacaaaattttgcacgttgttttcaaatcatcattggtacgcgtgccttgtggaaataatattggaattcaacccgagaccgacc

SEQ ID NO: 220833 - DNA, 349 bp, Glycine max
  unsure (1)..(349): unsure at all n locations
gcntaacatcacaagagagnnccttattcnttttctttgntatttttattgaacgtctacgagtagagaagccttagaataatattttagaatttttacgggctttactattcttactagttagttaacaattttttggactttttcacatgcttttgcattatgtacattcgtacttgaggcntacaggaaatacatacacttcttcgctgagccaaatctaattcgatcgggatctggattctgctaagctagccaaggctaagctgagctgattcaatcttgattntttagagtcagaatgcactaaccatgttgcaagaagtacatacacctttgacttgcttta

SEQ ID NO: 220834 - DNA, 409 bp, Glycine max
  unsure (1)..(409): unsure at all n locations
agcttgncgctggagctgacccatcaactgtcctaactctttcaaactagcgactcctaggctcttgaccttgacttgatagaacctatttttaagcgaaggcgcctgactcgaccccatgttttactaaagtgaaacaaaacccagtgcgaagcaagactccgacatttatcatggttggtgtaacaccctgatatatatatctatatattattagtaattatgtttgatgtttgattatttgttgcgttattttcgtccataattatttttaaggaagttaatttagttaatagaggggtgtggatagataagaatctagcttctcaaagaagcctcttgagaaagcttctcaaagaaaccacgaggaagcttctggaggaagcctcttaatgaagcttctagagaa

SEQ ID NO: 220835 - DNA, 361 bp, Glycine max
  unsure (1)..(361): unsure at all n locations
ttcagaatcacttaaaattagtgaaaaaaattggttccgtgaagaaaatccgagccgaggcacttccgtaacgtttccgtgggtgatttcgcgaaggttttcgaccgttcttcgacgttcttcattcgttctttgtcgntcttcggtctccaaccggtaagttccctaaatcaaacttttcaattcattctatgtacccttagtggtcctcatttgcttttacgtgctttcatttacatttcatttacttcccgtacccccttttgacgtgctttagtcatttgcttaagttattttctcgcctaatcaaaaaataaaataaatttccaccgttcatttgaattgaacattncgtagtttc

SEQ ID NO: 220836 - DNA, 225 bp, Glycine max
cccccaaactgcccaaatctaaaaaccaccgcaaaaatcaccctaaaaaaacatgcccatcaccgaagaactaacaccctcaaactcccacaaaacaaccgcaagagcattgacatccccaaggaagtcatactcaacctactacaacacaaaaacgcgcgcattgaacccaacggctcgaccccggatgccagagattatcacatttgaaatacatcacccccc

SEQ ID NO: 220837 - DNA, 450 bp, Glycine max
  unsure (1)..(450): unsure at all n locations
tcatanggagccactgctaatggtagagtgaaaaccgtnattattttgaactctaccaanggaagagaactctcccaacttcccttctgctctaagacacatgctcttacaaggtcctccaacgaatgaatggtccgatcacgctggccattagtctgaggatggtaggctgaactcactctaagcttggttcccaacgctctgttcaagctctcctaaaacctagagataaatcaaggatctctataagatactatgctagatggcacatcatgtaacctgacaacctcacttatatacaacgtggtcaacttcttcaaggaaaatttgatattaatgggaatgaagtgagcagacttagtcaatctgtccacaataacccagatagaatctacatctctacggtttctaggtaggcctaccacacaatccatggaaatattgcccact

SEQ ID NO: 220838 - DNA, 415 bp, Glycine max
  unsure (1)..(415): unsure at all n locations
gcaagcttgngactatattgtgtgtggatgcatgtacnttatgagaaggcaaggagatacctaactagcatgaggaaaaagcaccctgtgccatttgctctaaaatttcccaatgcagacccctttagcactaaggctactggaaaagttgttggcttttgatccaaaaaaccgacctactgctgaagaggtatgctacattgtgctctattgcttatattatgcgcaattgcaatgtatcgaagctgaatccttgactagatcttgagtttgtcttttcatttggacagtaaaatgtataaagaatcatcacattgaatagcactttataatattgggtcttgactttcatgctcaagaattttttaaatgattgtgttgataggctttggctgatccttacttcacaggactg

SEQ ID NO: 220839 - DNA, 450 bp, Glycine max
  unsure (1)..(450): unsure at all n locations
tgcagagttaatctctgattgaaacaaagatgggagcatatacccctttattaatcttaaaggttttattgtaagtaaacactccaattatgaaggaaaaaaaagaggataaaatttagatgcagctcttcacatgtttttggctttattctctaataaaaaatcaaagttttatcttagtaattcccaccatctaataattttcataactgattcatatggttgtttagctttaagatataaagaatgtgcattaaatgacatgagggattattgcttgctttcggcgaaagtgtcacgtactcatgtgccctgtatgtagggattatgccctttatcgtgattaccttnttcgaatcatcattcttatatcatgactcgcattaattaggctctgtttccatttgntggccataaagaatttttactcacatatganaaaaatagtac

SEQ ID NO: 220840 - DNA, 380 bp, Glycine max
  unsure (1)..(380): unsure at all n locations
agcttanagaggatgctgcggtggaggatattaaagagggagagaaagagagaggggggagcacgaaattgaaggaagaacaagggagagaagttgaactttgagttgtgtctcacaaaactctcattcatcaaagttacaacaagtgttacacatgcttctatttatagactaagtagcttccttgagaagctttcttgagaaaactttcttgagaagcttctttgagaaaacttccttgagaagctagagcttaactacacacacccctctcataactaagctcacctccttgagaagcttccttcagaagattcttaaagatgcttgagcttagctacacatacctctctaatagctaagctcaccttcttgagatg

SEQ ID NO: 220841 - DNA, 437 bp, Glycine max
  unsure (1)..(437): unsure at all n locations
tctagccaaatggacttaccttgaattaattcctttgattgcccttttgagccttgantccctttccttgttttgaagcttactacaagccttaagtgaaaaaccatgatattaccatatccttaaggaattttggagctttggaattgtttggggaataagtgtggggggtttttgtttcattggacaacttgttttgttggctatgcttcatgatgtattttgggccatacttgatgtacattgtatattggttaaatgttggacatgctgaatgaaatgttgtttctcaaaggctaaagagtaaaaaaaaaaaaaaaaaaaaaaaaatcgaataaaaaaaaaaattcggacaaagaataagaaaagcaataaagttgagtgaataagatcttaaatggcacaagaatgatgaaactcttgggtctactcttcat

SEQ ID NO: 220842 - DNA, 353 bp, Glycine max
gatggaacctaatatttatatgattggagcctatttaccgctccttgtttgtaggggttgatatttcctgtgcaaataattctctacttacagataataattgggagcttgtagataatgttagagataaatcatagcttatagataaaaagcctcaagaataactctaccatgtagataatatgtgtctttgtagatatataactacctgccaagagataaaggtattcaaatatattccaatattaataggttagagataacttgtcggttagggagcccgattgcttacggctaaatgctcatgctcctataacaggctgacatggaggcttgaacatgtcaccgattgc

SEQ ID NO: 220843 - DNA, 309 bp, Glycine max
gccgtaatgattgtgtgcttataaggcgcctcatgggataacggacaaaaacatttcagaactacttatggcggttagatatacatacctatagcatgtgacttgtgttagtgtaccaaaataatagcccttaattaatgcttatggactaaaggctctattaaactcactttgccatcctgtcacatattccaatatttggaaagaacaaaatagacccatcctttcacatatatcaatatttggacggaaacatggggaggaatttaactccgtcattatgcctttatcttctctcaatcttaaatc

SEQ ID NO: 220844 - DNA, 363 bp, Glycine max
  unsure (1)..(363): unsure at all n locations
tcaatgccacttcattnttgaactcatccaacccttgtacagatttctttgaaagccttttcacagctatctctttcccatctatcagtgggccctgaaagatattctgcaatagttagcaaggttttaaggataacagaaattctaaatatcattttttttatcaccttgtatactggtccaaagccaccttctccaagcttgttttcagaagaaaagtttcgagtggccttagttaagactgacaaattgaaagttggcaaatccaagtcttgcattctctttatattggtggaatggcctgtgaaaaatttcttacagcccctgattggttggaaataacagttttatacctggacacat

SEQ ID NO: 220845 - DNA, 440 bp, Glycine max
  unsure (1)..(440): unsure at all n locations
tgacaagttttctagccacagagtatgagaaaatatgtgtcaaccgttcacatccatctacggtcaaagaggtcaaattttgaaagtaagaaagttggtgattccatatcttatggatattgattgagtacagcttcaaggtctccaagtttggaaattcaacctgtcaacattatcctggttagattatcactaacaagtaactaaagaaggcctttcattacttttctaactaactcaagtaaaaaatgcccattaaaggcaaatgatttaattgccttgttggtaactggtaagtaaactctcctgttacatgatcaccatgtctaagagaacaattttattttcctaatcaattcaattgtgtnttttatagcctttgttcttctcttcttcaaaattaatggtattcatatcagcacanaataacagaaaaataa

SEQ ID NO: 220846 - DNA, 413 bp, Glycine max
  unsure (1)..(413): unsure at all n locations
ctgcagcttctactttattggtgatagngatctccntttggggctctaaattgtgggaatgtgctcaaatatatggggcaattttgatttgttctattgcttgattaggttgaattaggggtttgtatgagatggccctaggcctataatgcattttgaagtaatggggcatgccacattgtccccgttctcttgctattgacgcctaaacgcgcgcccaccgagtgttcggtgaaatgcctcaatggcattagcgtgtgatttttgtagggaaacaacccatggggcaatttggtttgcacatatttttgggacatgcattcattttcgaaagagctagaataattgccccgcatgtgtcctaggcttaaaaactaaaattttatgcaaaaagaatacaaaaggaggtgcat

SEQ ID NO: 220847 - DNA, 436 bp, Glycine max
atatttacgatggtttgacgtgacgatgcaactatttattcgttgtaacatccgagcaaacagatggccctattaacttcttttaatcactcattaagacaccgtgactttgataccatgtcatattctattggttatcagacagacctattaaatcagtctcatgtatcataataacacaaattcattcaaacattgatcattcacactcaaaagacttaaaacatttaggtagtaaggataaataatatttgaaaagttaaaatcaacatatattttgatgatattcatttattcccattttcctatttccaattatgcctattgacacttagttgccaatgttgcttgatttagttattagtacttagtagaggtcaaattagaaataagaaaatgatataaaagataataaaattataattattgagaacgt

SEQ ID NO: 220848 - DNA, 328 bp, Glycine max
atgatcagccgttgagatgctttacctttggggacttccaactgtcacccatgggggaagaatttgaagagatcctatgatgtcctctagggggaaggagaccatacctcttctcagggttctatcccttattagctagaatttcaaagatagtccaaatctcgatgtaggaattataccatggaaagcaagttagaaatggggtggttggaataccgagaaaatgtttggaggcaaaagcaagaaccttggcaggtagaggcgaatgggccccgttcatagacattctcgcactgttgatcttcggaggagtcctctttccaaatgt

SEQ ID NO: 220849 - DNA, 450 bp, Glycine max
tcgaaaataattgattgaagatgatcaactaacaatgaagaacggtttattaacaacgaagaacattcacataattggtcacggaaacgtcacggaaacatcacggaaacatcacggaagcgcctcaaccttgattttctccttctttcttcttctcctcactaatttttagtgaaatatgaataccaagggtgctgaaccccttccccttagcctcccatgtccatttatagaaaaaatggaggagaagctggaggctttcttcagaagcaacctactcacccaggcgagctggttgcttcccccctaagtcatctagtgggcccaggggctgtggaatgttccaaaatggaccattttgcccccatcttgagttccttgcccatttccttccgaaacattgtgaaacccttcggatcgcgcagtgatcactattaagcagctcaactc

SEQ ID NO: 220850 - DNA, 434 bp, Glycine max
  unsure (1)..(434): unsure at all n locations
cttaagtcacctgaggcatgcaagcttgggaggatngatggagacccggtgttgatataaactatgatatgggctacgtgggagtacgtgagctcaattggaggtgggcaataggggatggtgggtttatgcgcgcattgtggatgtggaaaacttgttgtgcaccatcgcccgacccgcacctagtaccacatgtgatgggtaccccataatcctacaagcttgagatgaggaagtgttgaagggtgaaacttcctgcttttattgttgaccacagagtggtacctggagatatgtcgcgggggtcaggataccttggggacgtcaggtggggtgctattgcccaaaaccaagcttgaccaatcccgacccaacccgggcatagtcggtcagtgagaacctgtgatgtacctaagcaggcgagctcctggcag

SEQ ID NO: 220851 - DNA, 453 bp, Glycine max
  unsure (1)..(453): unsure at all n locations
cttctcccctattttgctatanataggggaagaagtgaagaatataagggttcagtcttttangcacttctctctctttcgaatttgttgaggaaaattagttccgtgaaaaaaatccaagccgaggcgattccgtaacgtttccgtaatgtttccgtgagtaattacgcgaagattctcgaccgttcttcanagattcatcgcttgttcttcgttttcttcagtcttcaacgggtaagtacctcaaaccaagcttttcaattcactctatgtacccgtggtggtccacattctgtttcatgtatttttattctcgttttcatttactttttatacgcccttttgacgtgcttaagccatttatttaaatcatttctcgcttaatctaaaaataaaataaatttccaccgatcgtttgaattgtatcatctgttaattctggttaaaatgaat

SEQ ID NO: 220852 - DNA, 439 bp, Glycine max
  unsure (1)..(439): unsure at all n locations
cttanagaaactgcagcatgcatgctcgaagagctcactcaatggacaatcaaaattttaatgacntaactgacactctatagcatgagtcaattcagaccaagtacacaccaaagataatttctgtgacatttggaaccatgccattacatccttatcaaaatgcatctccacaatatccactctagacgtatcatgagtattatgataagtaaaaaatttctccgtcttgaagatccactccattaccggtgttgttccatcaaagtgaggaaatccaattaagatctctttaacaggcaaagaagcattaatcgatatcatcggggagccattgtttggagaacttccaggaggttgaaaagcattctgtcataataaactcattgctaacccaatttgatccatataaatctagatccgaaacatcttattcatt

SEQ ID NO: 220853 - DNA, 434 bp, Glycine max
tgcgaattaaacgcaccattgactctggaagaaaaaacttattcaatgattaaactccagaaacgtacactgagtagtaattaataaggatgaagaagaaaaaaagagttaaaaaatgtgcattgaatacgaattaaacgaagaagaggaaggaaagcaatacataatcttcataataacgttcaccaccgagtaataaagatgcagaaataaaaagagtaaaaaaaatagaatacgaatgaaacgcagaaggagaagaagaaaacaaatagcaatgcataaacttcatactaacgttcaccgactcaattaatgaatatgcaagagtaaaaaaatggaaaattgaatagctcagttacaaacgcaggaagtgcgcgaaaagaagaagaaaccgacacagtgaattaattggataaaggagaaaaaaagttacg

SEQ ID NO: 220854 - DNA, 368 bp, Glycine max
  unsure (1)..(368): unsure at all n locations
agctntgagctaanagaaacgaccagaagttttgctcgaatgtccgaacgagccccgaatctattgagacgctcgaaattgaattccgaagctttgagctaaatcaaacgacaataactttttgctcggatgtctgattgagtcccgtaatctattcagacgctccaaattgaattctgacctcatagctaattcaaacgacaataactttttactcggatgtctgaatgagacccgtaatatatccagacgatcgaaattgaattctgaagctctgagctaaatcaaacgacaataaagattcgcccagatgtctgaatgagtcccttaatacactcagacgctcgaaattgaacgttgaagctctc

SEQ ID NO: 220855 - DNA, 421 bp, Glycine max
  unsure (1)..(421): unsure at all n locations
tattcaattcgagcgtctccatatatgacgggacttattcatacatccttgttataagttattgccgcnggaattttcttagagcttcggtattcaatttcgagcgtctcgatatattacgggactcaatcagacatccgagtaaaaagttattgtcgttcgaatttgctcagagcttccgtattcaatctcgagcgtgtcgatatattacgcgactcaatcagacatccgagtaaaaagttattggccgttgaatttgctcagagcatcaacattcaatttcgagcgtgtcgatatattacgagactcaatccgacatcccagctaaaagttattgtcctttgaattggctgagagcttcaacattcaatctcgagtgtttcgatatattctgggactcaatcggacatccgagttaaaa

SEQ ID NO: 220856 - DNA, 423 bp, Glycine max
  unsure (1)..(423): unsure at all n locations
tgctgacccagacgccataagatatattttangagtaatatatacgtccacgaacagaagcacatagacaaccttcatgtcattttccgctccgctcaagcccacaacggctgtgatgatgtcggaacagagctccggccaccggtcaaggcagtggttaatggtgacgtccgagggggaccggaaaaaaggaaacgtggtttgccgaacgcttttatgcttctagtctaatggagaaattattaggtcataaactgttattggactcagacttcaatatcgggagaccaagtataaaaataaacaaacattcatatattcatatcaaatttcatatgaaatattcatatgttctgaaataaaattatataaaaaatctataatattcatagaaaatatatttatacaaaaagcaaacctaac

SEQ ID NO: 220857 - DNA, 408 bp, Glycine max
  unsure (1)..(408): unsure at all n locations
tagctncataagaggcgggctgtagaagctttctcgtggctncatagagaagtattctcaagaggctactttgagaagctacatccttatctatccatccctctattaactaaattaacttccttaaaaataattacggatgaaaataacgcaacaaataatcaaacatcaaacataattactaataatatatagatatatatatcagggtgttacacatcatatattgagacgctcgaaattgaacaatggaagctctcgagaaattaaaattgtcataaattttcacacggatgtccgatcaggcacatcagatatcgagacgctcgaaattaaaaaaacggatctcgagaaattcaaatggtcataattttcacacggaggtccgattctagcacatcacatatg

SEQ ID NO: 220858 - DNA, 450 bp, Glycine max
tcaccggatgatgccgatcgaacatttgctaatccacattatccaattgttattcacggattgaatagaataaacaatggccggtgtcggtcgttatatggcctcgactgatatctttcagccgacattgcgcaatttcttttacaaacgctagcgataatgtttttttttttggtttttacggcagaagaagttttttgcttcggtgttgcctaaaaaatttacaatgtatgtcggctacgttttttcgtgcgagctccaccgaggggtctgttccaccgacactggcatgtatttcctttcatttaagacgcgcagacaacgttggctcatcccggcaaaaacaaaaaacaaaacattatttaccgaaattgatcgacaaaaatgatagcttgacgtggcatggataggtgaccgaatgacgtctataaaagaagcctcccggatatc

SEQ ID NO: 220859 - DNA, 410 bp, Glycine max
  unsure (1)..(410): unsure at all n locations
agctngcattgcaatccttgatggtagccatttcttatcanaactataattattgaaggagctttcctgctgatgtggattacggttcaaaggaatctaattattaacgatactcatttgggtccgcatagtccggtgcatttgtaaaaagcaaatagtataatgtgatttttgaatgttttaaatgaaaagtagcttattgaatcagcggggctatatttaattgatgtaatgtaataatgagtctgtagtgcatttttgtattgaaaatgtaagcaaattacctgtttgtttgtcgaaagataaaatagatgatgcatacaatgtcgctagttttggtgttgatggtactgcatgtttgtggagttatgtctactagaagtctgacaccttggaggtttgtgtgcata

SEQ ID NO: 220860 - DNA, 440 bp, Glycine max
  unsure (1)..(440): unsure at all n locations
ntaaataactantctgccaagaaatataactnttcgattctttaaataaacacactctaaaaccattccttgtttagaatcatactttaggatatcatcttttattaccatacttcttctcgaaggaaaatcctattttaaagattnttatttaattattataattagactctttgatttttttaacgaaattctcatatatatattcataaatttatgtcctttaagctcattaattatctgactaatccccaatcttctttgtttactgttattacaatagtattttattcaattgatacgatttgcaacacccaagtgtgccaaaaacacacgcttgatatgatgagaaaaaaaaaattacaaccattaccattaaggatgtgcttggattcatgtttagcatgcctcaacttgagtttaaaagagtcaagtatgat

SEQ ID NO: 220861 - DNA, 353 bp, Glycine max
gcacaatcttccataatttttgttcctttgcgaatagttcatgattgtctaccatactaagatcagcatttttatttattttccagggttgactgtaatataacgccaatatcatacaaccctccttttgaacaacattcaaccaatctgagaagaaactgcctcccgcctacactcgagctgcagtttcctaacatccagctaaattaaagccaccccctgctctttaaaatcaggctcttcacatatttccacatagagctatcttgtcctgttggcagaaacaggattaatcttgtagaataaaagtctacaatttcaaatgagccctggtatgagaatccatagaaaaa

SEQ ID NO: 220862 - DNA, 394 bp, Glycine max
  unsure (1)..(394): unsure at all n locations
aaaaactacgctgatttatttcagttgaaagaatctacaatatatttatgcatgttaatcgccagagatagtcatcaatgtactgaatgtatattctgatgttgtcactttggtttctcctgttgtgattacggaacatatctactttcaaggccttaacgccaacaggcgccttaatttgttgaagctgcaattcttactttcttacatggcctatttgacattgaatacctcttttcacagggattaagaacagcactctaatctcaatctgattaattccttgggtggctataacatatttattatatggttcagatcaaagatgatggattcaatctgangatgaatacacatataacaatccatcattgcaactaccaaaaaatctatg

SEQ ID NO: 220863 - DNA, 398 bp, Glycine max
  unsure (1)..(398): unsure at all n locations
agcttggactgtgatagagagaaaaatatttatcaaagngaaccacaatccatttctagggcaaaattgagtgttgaggagtcacattttgattcggaggaattttaggtgtaaatccagtttgagcaagtttagattgatgttataaacttgtgtgaggtgagagtttgcttcaaatttgtcccatactcaatttgacttctcaagcctagaaaatccattaaattgaggggttttggacacctagattttgtgttgctgtggtttgaagcttgactttggtttaaacatgattgatacatgatttgggacttgtaggatttgatttgggcaatattggatgaggggaagcgtgggtttcgaaatctgcaccttgggcaaattttngctgtgaaatt

SEQ ID NO: 220864 - DNA, 449 bp, Glycine max
  unsure (1)..(449): unsure at all n locations
tggggactataccttcgaccgacatggtcgtgtntcgtcnttgcccgganncaangcgggctgtagcaccggctccgcttccctaactgtactggaggcggntgcggtggctttatcctctatggttntctgaagttttaacatgacctccgagatggaagccatttgatcttttaaggccgatagatcggccttcatccgttcctgcacgccctcttcattatccattcttctggatcgagtgttataggggtgccttggtgttntcttagttatgatgaaattcctaaagaaataaacaatggtgagtatgccaccaaaacatgatgtatgcaaatggatgatcagagcacttggatccaccccaagatttttagataacgtaatgagtccagaacttctcattttataaaaagaacaaagctttcatctagcacagattatacaaa

SEQ ID NO: 220865 - DNA, 378 bp, Glycine max
  unsure (1)..(378): unsure at all n locations
agctatgacgtgcgcagcaggtctgatttcttgagnantaatagaagacgacgcattgtaatcgattacaggtattggtaatctattacaggcccaataagccttctggtaatcatattacatgatgttgtaatccattacaagctgcctgttcattggtaatcgattacactggatggtaatcgattaccagagcctatccttagctagtttctaagacaatatctatatttatgctcaaatacatcctatatgactaattttcactactaatacactaaattcaatcattcaattactatatacacaagaaatcatatattctatcataaaaacaagaattcaaacagtatcaacaaaattatctacaatcaaaaa

SEQ ID NO: 220866 - DNA, 394 bp, Glycine max
  unsure (1)..(394): unsure at all n locations
tgagatgagaaagtgtagaagggtgaatcttnctgctgttattcgttgaccacagagtggtacctggagatatgtcgcgggggtcatgagaccctgcggacgtcaagtggggtgctattgtccaaaacctagcttgaccaatcccgacccaacccaggcatattcagtcagagagaacctgtgatgtacctaatcaggcgagctcctgaagtcaacagataaaaggaactaataccacaaagcaaggaggcttgtgtggtggctggccagctgtgaactttgtgtgatatatgggttattgcctctagtaatcgattaccaacggtgagtaatcgattacaatgcctaacaattgaaagcaggaggctaagatggtctctggtaatccattacc

SEQ ID NO: 220867 - DNA, 321 bp, Glycine max
ggtacctggagatatgtcccgggggtcaagagaccttggggacgtcaggtggggtgctattgcccaaaaccaagcttgaccaatcccgacccaacccgggcatagtccgtcagtgagaacctgtgatgtacctaagcaggcgagctcctggcagtcaacagataaaaggaaaacaagaccacaaagcaaggaggcttgtggtggctggccaactgtgaattttgtgtaatatgtgaaatatggcctctggtaatcgaataccaagggtgggtaatcgattacaaggcttaaaaatgaagacagggggctaagatggtctct

SEQ ID NO: 220868 - DNA, 439 bp, Glycine max
  unsure (1)..(439): unsure at all n locations
tattaaccacttcaataactttcttgatgagataatatttctcaagaagtaatataagtattagaaattgaagctaattcagttttcattaagcgaacactatatggatcgatgtttccctgctccacagttgcaactctgagagcctgcatgcattgcactgatggatgcagagaggaaccaaaattgcaggtaattcttagcatcctatacgtggaatctgaaaccaaaccatgggtccaccaatattcaaatgtgccaatataatcatgataatcatcagtaacaacattaccaacctgatatcaatcagagaaaaatcaaatccattatagatatatcgtagctaacaanaaaactaggatgcaaaaattatagatatatcgggcttattttcttggggatatanctatatgtatacatccagtacatttttctt

SEQ ID NO: 220869 - DNA, 442 bp, Glycine max
  unsure (1)..(442): unsure at all n locations
tagtttacctatctatccnccacatgcctttgcaaagactctacagataaaatgcatgaagttctaattctacatgtttgctttgacgcattggcataatgcaatcactctatgcctagcaatgattttattatgatatcttttcttcttgttctattagaagttatcctctcccgagcgtctaacccctaaaactaatgcatgcatatcttctttaaatcttatttagaagggaacctctcccgagcatctaacccctaacagaatataaagaagatgagtatgcaagataaaaacaaaaaagaaaatatgaaagaacaacctgatattgcattgataaatagtgaagagtacatcatacatcacattggcctgccaggccctaactaacggattagccactcatggccattgagggctttacaatgagaaggggtgaaag

SEQ ID NO: 220870 - DNA, 415 bp, Glycine max
agcttaggattaaataattatatgatcatattcttcttactaacattacagcgacggaagatttgaaactgaaatatcacaaaaaactactccaattgtaacattaacttcttctccagtactatctggcaattaaacacatgaaccagtaataattaagctgaagggcaaccttaaccggcaaccttaacctattccatatcaaaaagggggagaaataataaaaacacaattgagtgaattttcctaatcctggtcatttaaagaactgtttaacgggaagagacatttatggaacaattaaaacctcaaagagttaggtaagcacccaccttcctgattgccagaagccttaagtaccaaatcaagcaccaaaattgcccaaaaaaaaaaggaacccataaaagatgaagtc

SEQ ID NO: 220871 - DNA, 464 bp, Glycine max
  unsure (1)..(464): unsure at all n locations
ntgacactntgagtaagttatgaattaatatttgatttgttataaaaaagaatgatttcttctcaagatatattttatgaaaatcaaacggaaatcacccttacaaactcaactttgtatgttgagaattcaactacactcgtttgagtatttctttgagtaattgtaatatatagctagcggcgaaaggagataaatatttaggttaactgcactcataaattttaccgtgataaccgggtgccacgcatccatatcggagctttcatgcttctaaccaaaagacagattgtacatcgtggagcgatcatcaccttaaataatttgtccgctctctgtgaatgctgaacaccacatatttcagtatcattccatacgtaagtactcctttgtatatctagactatgcatgcatctttcattgcacattagttaatttcctcctagatctatcatcatggtcat

SEQ ID NO: 220872 - DNA, 380 bp, Glycine max
  unsure (1)..(380): unsure at all n locations
tctgctcttattcgncgaccacagagtggtacctggagatatgtcgcgggggtcaagagaccttggggacgtcatgtggggtactattgcccaaaaccaagcttgaccaatcccgacccaacccgggcatagtcagtcagtgagaacctgtgatgtacctaaacaggcgagctcctggcagtcaacagataaaaggaacaaagaccacaaagcaaggaggcttgtggtggctggccagctgtgaatcttgtgtgatatatgggttacggcctctggtaatcgattaccaagggtgggtaatcgattacatggcttaaaaatgaaaacaggaggctaagatggtctctggtaatcgattaccacggggtgtaatcgatttc

SEQ ID NO: 220873 - DNA, 461 bp, Glycine max
  unsure (1)..(461): unsure at all n locations
tgaggaatctcagganaccattagagatgtcgctatcgatgtcacaatgcacgtgtgagcccgcttagaggtatgggataagtttattgcaattgaggttagaatgaatatgtgtagggatccttagaggattacattggggtttattttgggatgtttattgaattataatttttcctttaagattataaatacaatattgttatgttttacgtaccaagatgttcttatgagaattgattgataaatttgagtgtccttgatgttttaatgttttgacctatgattttgatataattgtgtgaaattatttgaggggttttactccccatgttgtgataaaccttctgtatgaattgctatattgagattatgaaattgtggttcanatcgtgagtatgtgataaattgaacttgtgattaaaggtaaaatacatgtgtattgagttgtgagctatgaa

SEQ ID NO: 220874 - DNA, 407 bp, Glycine max
  unsure (1)..(407): unsure at all n locations
agacctggtctagnagatataggagctcgcacatttcaatatttctacatttcacccatagatccaggtttgctggaaataaaacctgctccttcaaccaaagacaatcaattacaggtgaaaagttaattcttcttaattcttatatacatgggctttaaggcgctgaagaattagtatttactagctacttttctttgctatatatgattggtttcttaacagaatatcattaagcttggagaaggacttttgaaggaaccacaagatgttgttgtatataaagaagggactctctatacagctactcgagatggttggattaaaaaattgcgcaggaataatggaaaatgggagaattggaagcatatagatagtcatactttgctaagaatcccaacaccaaa

SEQ ID NO: 220875 - DNA, 461 bp, Glycine max
  unsure (1)..(461): unsure at all n locations
ntacaattgacacaaggttntgattcttttaaacaaaatcttattgcaattgctttggatcattgaggtattgaggtgtcgggtgtaattaaggtaaaccttaaaagcatcattgtaatttactcttttttctattaaattacaagaagggaaatttcgtgtatggttcgaaacattttctttggataagtcaaacctcaagtaatgaagttaaaggctgcattaactagctagccaagctcattcgcttattgaggttcacgataagttcaaatgtaagatcgatttgatccaaactcttagaacaatttanaccccaattcactctgaggttcacaaacagtgcaaatacatgttcctttntggatagctgcgagcgagagagtgcaagctatgtttaagtgttaactctcaaatntcttcttcaattnnnttttttttttgatacaggagacagctac

SEQ ID NO: 220876 - DNA, 415 bp, Glycine max
agcttatagtcattacttgtagagaaccatattccaaagttgaatgttcctttgatataagaaataatttgttttgggccttgaaatgagtagtggttggagtctccatgtattgacttgatgagtccagtaccatataaaatgtctggtcttgtggacgtcaaatatcacaaactacccaccaaactcttgaaatttgtagcacccatcttttttgcttcgtcaaactttgataacttcattttgcactccaccggtattccaattggcttgcatagttttgctatgaaatgaagattcaatcttccttttgctttacctcaataccaagatagtatgacattagtccaatatcggtcatcttgaactccttgaccattgctttcttgaacttttcaacatacttggattactt

SEQ ID NO: 220877 - DNA, 440 bp, Glycine max
  unsure (1)..(440): unsure at all n locations
agcatattaacctntgttaatatgtcaattctgaaacctactttagtgcgaaattccttttccacaacacctacagaaacccctccatgtcgtgctccaacaagcataacggaacaaatccatataagcttctccaacatctacttttgaaacgcctccttgtcaagaacctggattttgagacatacatcagcgtgtgatatacatatcagacgtgtaaatatttgcttttgacattgcacaaggacatcctaccacttcaacctcgaagttaagcaaatcaaaaacacttaaatcccaaaaattaaaaagaaccacccccaacctaaatgagcacaactaaacaattcccaagtatcctatagttgctatcaaactaaataaactacaactataatgatcctcanagtacaggctctctaacaggtcacaagattaac

SEQ ID NO: 220878 - DNA, 337 bp, Glycine max
caaacacgcccatttaaaccacatgcaaagcacatactggcaaaacttggggggaagaactcaaataagacgcccaagaagccagccaataatattaattaacaaatatgcaaagaacaccttcaaccttatctctatagaatcacatggataaaatcattaactattaataaaaaataatcaacctacccaccaattaatctaatgaattattatcaatattacctgtcgctgaagagcgaagatatgagcaacacaaccatacacggggtctctaagcctcgcttgagcctcatagcaaattgcgaccaccgcatcaagccccttatgcaccgga

SEQ ID NO: 220879 - DNA, 437 bp, Glycine max
tggtgaatgtagtatttgggaattatatttaacacgatatattagaatgatgcctctaataagagtgcattattcattactttcttatttcaaacaaagattaatcatgtcaaaacataatagacttgtgaaataagtctatgaccaccattttttgtaaggacaagaacatgacccttgtcttcaataagaagctttcaatcattgccaaaaaaacaattttcgttttgcttctcatgaagatccacaaataactttttattgtcaagatactataagaatttattttcttcttctttattattaacaaaaatataagagcaaattataataatacttcctgatatttcttataattatataagatttctctactactttaatcatcactctcatctcctttataaaaggcggtagtttaagatttgatagggtgt

SEQ ID NO: 220880 - DNA, 452 bp, Glycine max
  unsure (1)..(452): unsure at all n locations
tctgccagtcaatcttctgaaccgggtactntgtgtagtcttccttgacgtagttcccgaaggagcatctgaaggtggaggggaacttgctggaggtgttgccatgggtcctatccaaaattaaaataagaatcaggaaacacaaagtaattacaacaacatgtaagtatcaaattgtaaataagtagaattgtaaaatgtaaaatagttaattttttgagttaaacattatttgggtatataccaccgttaaatagtcgtattctcccataaaccttcatcatgatcgttacgatttgcatgtacatcattgtcttcattttcagcatttatggaaggcatctgtggggaaaaagtgggcatgtcattaacatcaagtgttgaagtataaatacggtaagggataccacttgntttcccctgtagaacaacttaggtcactcggatcttga

SEQ ID NO: 220881 - DNA, 413 bp, Glycine max
  unsure (1)..(413): unsure at all n locations
agcttcgtgccaagccagtggttggaggacattgctggatggtgaanttgatgtgttggattcataatcatgaattggccaagtcattaattggacatccatatgccaggcgattgactaaagctgaaaagacacttattcctgatataatgaagtcaatggtcaaaccaagaaactttctgcttactctgaagaagcacaatgccaatagttgtacgaccatcaaacaaatatacaaagcaagaagtgcataccgttcttccataagaggaaatgataccaaaatgcaacatctaataaagcttcttgaacgagatcagtatattcattggcacagattaaaggatgaagacgtggttcgtgatatcttttggtgtcaccctaatgcagtgaagttagtcaacacatgtaat

SEQ ID NO: 220882 - DNA, 450 bp, Glycine max
  unsure (1)..(450): unsure at all n locations
tgtgaaatcaatggaatccaagatttatcttgacacatgtcgttcaattatgttctaagaaatgtgacctaagcgcttatgccataatgctcttgagttngtattatcaattctacgcttagtaccacgcaattaaaggattcaccataggaagctacagtatcatgtaaatatagattatcgttaaccaagagtgaaccagttccaacaatatctgaattaaaagacaacatgaacatattgttttcaaatgaacacaaataacccaatttgtccaaataagaaactgaaaccaaatttcgtctaaatgacagtacaacaaaagtgtctttcaaatccaaataaaaactagtacgtaataataatctaaagtgccctatagcttccacttccaccgatttaccatctccaacgtagatccatctttcagaatcaattggcttccagtag

SEQ ID NO: 220883 - DNA, 377 bp, Glycine max
cccctacaaagatcatgacctctctcgcctctacattttaattgggtatctgtttacgcgcgtctatctatatactcccattataaccaccgccattgaatggtttattttttggccaaatcccacttttgcataaaataataatagttataaattaatattctccagatttatatcttatcatcaacaaaacgatgttttattctagtacttgaaaattatacccatccatttttctttctcctgaataaaattcaaatagcctaaattttgattattgtacaaagactaataatgtatttgggattacaaattgcataatattactggcctttcattggagccactgaaaattagaaggcttggctcaatatatg

SEQ ID NO: 220884 - DNA, 453 bp, Glycine max
  unsure (1)..(453): unsure at all n locations
cgcgacctatgaaactaagcttctcgggccatttctgcgaatgtttacattggatttttagttntaccagcgggatactattcttaaaacaaaaatgacatacaacctcctcccataaatacaaacatcaatgtaaatttagaggaagcttatgcgcatatttccttacaaacgttctcttgcacaagacattctattaacccaaaaaaatgcacccatatacaatcaaggcagcttcgttacctagattatttacacgtacttccaaggtgtatttgttacttacatcacacacctccttggctaaattcacatacatgcatactcaaagcattttggggtaccaaaaattgcacatgtgcacatcttggtatttctaatacctatacatacacaaacttcatgatgaatcttgactatctacacaataaggtgctacattntatgctcttt

SEQ ID NO: 220885 - DNA, 406 bp, Glycine max
agcttataagaacagaattgtcttaatcatttccaaatatgcatgtgaattaagacgcatcaacaaaaatcaagccaaggctattgtgcaagcaatcaatggggcaaaacataccaaatgattataatgatggatggctcaaattctcacaaaggtaaaatcatcactttcaaattgagctttcaaaactatcatgacatgtagagaagaatcaaggatttcaagtcacaaaatgtcaagaacttttattttcaaaacaattacccattttttgaacatatcctataattcaaagaaaaacatgcaaagtcgtacgtgcacacgaaattgacccaaaatattaaactgaaaatccgacgaaactaacaacattaacaaattaacacaactaacaaattaacaaaac

SEQ ID NO: 220886 - DNA, 421 bp, Glycine max
  unsure (1)..(421): unsure at all n locations
actaagcttgcacccagctcgcccaggcgagcagggttgcttcctttataagcaacaaccttctggaggaatcttctagagggcccaagtgggcctggttgctatttgtacccccatttttactaaatacaccccctacctttttttggtgattcttttttcgtaaagttacggaaacttacgaatttcgtaacgatacttgttttctttccgtaatgttacggaaccttgcggatcacataatcatcccctttntgacttacggaatgttacggaaccatgtcagtctctgcatgctatcaagcgttctgtcttacagatagcaaaagaatgtttatacggataaccactcgggtatttccgcccgtcagcgtgactcanaagtcagtatgacagatcttgtgagcgcggaagatgacgt

SEQ ID NO: 220887 - DNA, 393 bp, Glycine max
agcttgtatgagtattgggattgattcaatatattgggtgcaagctgtcctcaccaccagatttctgagcaactccttctgcagtatttctatgagggacttggcaacatggagaggattatgattgatgctgccagtggtggagccttggtgatatgactcctgctgaggctatgaatttgattgaaaagatggcttccaactcccaactattcagtgcaagaaatgatgctattgttcttagaggagtccaagaggtggccacggattcatcttcatctactgaaaataaaaagcttgaaggaaaacttgatgccttggtcaacctagtaacacagcttgccatgaataagaaatctacacctgttgcaagagtctgtggtctatgtttct

SEQ ID NO: 220888 - DNA, 429 bp, Glycine max
  unsure (1)..(429): unsure at all n locations
tgaaccaaaaaccggtgagagtgtgaccttactctgtgagtgaacgactaactgtgaataatgatctttgcataaatctctgaattctagaatgatctgtataactcagaacatgatgaaggccatgaattgtatagacacaagctcttttgaccaaatagcttaccttgaatgatacttgtatcttttgctcccttgtataaagcttattgatttgtcatgaattgaaccctaaactttaaatgattatctcttaataccttgtttagattctacgagagcatatggttcaaggaaaatttactctaaatttggggggaggaaagtcaattagaatgaaaagaaaaaggttaagcatcagcacacacaacaaataagttgtatgtcaaaaaaaaaaagaannaaaaaataacttgtgcttgtacaaaa

SEQ ID NO: 220889 - DNA, 357 bp, Glycine max
aaaaggatcttagagtgtctagggttgtgccaggagggtgtactctggtttctcattaaaagtggcattcctgcttgtcatcccaaaacctatagccatacatgtcagatccataaccaataaaataatacttcctcaccttcgaatccatcaaacacttgaatcctgagttgctcaccacaagaatcgccttatatctttttctaccgtcagattcttcctctagcctataaattcacttattctgtaaagctctctttccttctggaaatttaattaaagaccacgttttattcttctaaagggatgtcatcttatctttcattgctagctctcactgaatagagtcattcccct

SEQ ID NO: 220890 - DNA, 421 bp, Glycine max
  unsure (1)..(421): unsure at all n locations
tctcgctntctgataattccaagagatacactcgctgcagatcctgagtacatttactacctttgttagaagaaaaatagtaagataataactctagacaataatcagatgttaattataaatggagaaaaaaactggaaaactagagatggagccaccgtaaaactgtgaacagtangcattgcagatttaacagttgactcaatcacaaaattataatcgattaataggtgaacatatttgaaaagcatttgcattcacattatgcaacaaaagaaacaataaaaaactaagaacattacattagtgctaccatacctacgaaattcttcgcttctgctaatggcctcataatcaacatgttgcctatcatcagaggcataagactcaagaatggcagacataatctgtggaagcctca

SEQ ID NO: 220891 - DNA, 355 bp, Glycine max
gagaatgtatcacaagagaaagaagaatggaagataactttgaataccactcaggaataggacgatatcgctcttttttattcacatgtgaatgtgagtatgagtacggtgcgtgtggtgtgcgtttttacgattatgtgtcatttttgctataggtggctgatgctttggagatgatggtgcgcatgacgcacagaggtgcttgcggctgcggctgtgaagccaacactagagatggagcagggatcatggtggctctacctcaccagggttacaaggaggtagtattctattctattttattttttaaatttttttacggagaacttttgattttttttccctttttttataa

SEQ ID NO: 220892 - DNA, 389 bp, Glycine max
aagccaaagaacccgggaatcaacacaggtataacaatggaagaccaagataataagatcagaggatcaaaatccacataagcgcaaaactcaataaatcaaagataaataagtccaaacccagaatttcaaaataccatacaattgtcaacaaccacaaaatatccaagactgaaacacaagaaaaataagcaaagtacttagcataaaaatgtaaattctaagaaactaaaagccaaaatacacggcttaaaaaagataaataagccgaatctaaaatctaagaagacggaggaggtggtggaagatcaacactctgacgaatgtatccgacatcctcctcaagctgtgaaagacgaatgtccataccggcaaagcgggaatctaac

SEQ ID NO: 220893 - DNA, 430 bp, Glycine max
  unsure (1)..(430): unsure at all n locations
tgatgttgcgcgtactgatgggtaccatgaggcgtttgctggngtttgatccatgccggtgttgaagagacagcatgggcatctccttccttcctttntgcccctgttgccccgattcttttggcgttcacgtttgtggaggaaacgtaatcaaactttcctctcttcaatcccacctcgattctttccccggcaaacaccagatccgcaaagctggacggcatgtaacccactagcttctcatagtagaacactggcagagtgtctaccatcatggtgatcatctctctctcaaccatgggaggagctacttgtgccgccaaatccctccatcgctgcgcatattctttaaaggtttcaccctctttcttgaacatattctgcagttgagtaccggcccgagccatatcagaaatgtactgatactgcc

SEQ ID NO: 220894 - DNA, 414 bp, Glycine max
agctttgatctaccaccacgcggcgacaccatcttttttatttttcctattatttaataactactagtaccttgctttctagccgcgtatttggctatattaagacacttggataacttagtatttctttatttgcatggcttgaatgaacaattatgaattatattatatgactatgtggtttttatattcatgtttcttgcttcatgaatggattatattcttccatgattgtcttgtgaataattagaagtatatgtatgtttcatacttgttacgcactttggctttttgttgatgccaaagggggagagaaatagagattaaatcaagaacacacataagcaattatctaacttaatttcaaatgaagcataaactcaaaaacaaagggcgagaatggaatattatgtg

SEQ ID NO: 220895 - DNA, 83 bp, Glycine max
  unsure (1)..(83): unsure at all n locations
gctntagtaaaaaaatttgccaaccgaatatcgtatctacagtgttctagtttctgcttctcattggtggcttggtgatgtag

SEQ ID NO: 220896 - DNA, 364 bp, Glycine max
ctataaatagaagcatgtgttacacttgtggtaactttgatgaatgaaaagcttgggagacaccacctcaagttcaacttctctccctttttttttcttcaatttcgggctcccccctctctctttctctaccattttcttttcctccattgaagcatccttcccagcttcttatccaaggctcatcttggtggtgaagctctattttccatggcttattccttaatggatggcgcctcctctcacctcttctcctttgtcttccgctgcatctccatggtgaaaaatcaccattgaaggacctcattgaagctcaaagatccagcctccatagaagctccacaagctagcttccatcaagaaa

SEQ ID NO: 220897 - DNA, 462 bp, Glycine max
acctgtcagtggttattccatgcctgtaattctgatgtacttgactatttgttctattgtttggttgaacgtttgcaaaagtgatttgaatgaaattgattttgcaaaattgattctagttaaatttaatgctgaagtaaagtgatttatgttgagtgtttttgttttaaaactcggtttcaaatttttatccaatgtaaaagctacctaaatttgtttaaacccagaattcattatgggctcaaaataaattctttagcacgagaccaacatgtgaacatttactcaaaatcgtgatatttggtatttcaacttgattttggatatcttaatgtgaaactaaagatccactatgtgaacaattcattctagtttgacggaaggtatacacgatagaagtggtgcttttactgtgaatctgtaatttctcaattagaaagaaagtcttcctaataaatggcg

SEQ ID NO: 220898 - DNA, 352 bp, Glycine max
  unsure (1)..(352): unsure at all n locations
gattggatggttgaactgattgtancaaatatgcccaagttatagctgtttgagcatgtctctcattatttgagctgacatctactttcaccctgcttgcctttagaccttgaatatgtgtgaaaaattacacatagccatgggtgcatacatttgtgcatgaatctatgtttatgtatgtattaaaatgtatatattaagctttttttatcattattttttatattgatcaacccaatatgatgcactgcgttaaataaataaaggattaaacatgtttttaatccccctaaaatttgtatctcttagtctttacattttaaaattttcatataagtctctttgaattccg

SEQ ID NO: 220899 - DNA, 348 bp, Glycine max
  unsure (1)..(348): unsure at all n locations
aaaactcagctaagccgatctattattaattgtctttacaaagtctgagtctaaccttttaattaaatatgtcagctcaagccagacttatgtaggcaagtcgtangcccctgtaggccgacctggcctattcgcacccctacttaatatgaatcaaattattaatcctttgattaaaattctttataaataatatgttgtaaattggattacaaacatttatatggaaatatcaactcattatcatttattactgtgctataaagtataatgaatgatcttgccttatttaagggtgcattttcagctttaacaaagaattaaaattagctttaccaattaacagac

SEQ ID NO: 220900 - DNA, 463 bp, Glycine max
ccttacaaactcaagctagagggacctgtgactaacttgcttacatgtgcttcttcttgagctcggaaggtagactaaagactcagaaacagcaccagttctcctgcacgaggcactaaggctaataaacccacaaacgatcactaatactccttattggcaccttagctccattccacagatttctacttgaaattcttcattatcatcctttgagcattcaacaagtgcagcaaagagaggatccctttggaaaacactttgtattgaattctttttcctaatccttgtttcttcatgagagtgctttttagaagaacagtgtgtggtatgtggagggggcaatggtagtagtttcaaggaagactcttgccgcttcttttagaattttgtttcttgggaattccacgcaagtgttcccatgaaaatggaacaccagagaatctaagaggggatgcatgac

SEQ ID NO: 220901 - DNA, 408 bp, Glycine max
  unsure (1)..(408): unsure at all n locations
gcttgtagcagatgccactctactctatttttttgaaagatatgctaacaaggaagcataaatatattcgtcaggaaaacatcatagtggaaggaaattgcaatgctgtgatccagaagatccttccactcaagcataaagatcctgggagtgtaactattccttgatcaattggagaaatcaatgtgggaaaagcttttattgacctgggagccagtatcaatttgatgtcactctccatgtgcagaaaattgggagagttggaaataatgcccacttgaatgactttacaattagctgacagctccattaccaggtcatatagagtaattgaagatgttttggtcagagtaaaacattttatcttcccgacagacnttgtggtaatggatatctctgaagatactg

SEQ ID NO: 220902 - DNA, 459 bp, Glycine max
  unsure (1)..(459): unsure at all n locations
gaaactcaagctgaggattatggcgcacccatcacatgtggtactaggtggcggtcgggcgatggtgcaagtcaactcttcacatccacagatcacacataaacccaccatccccagttgcccaccttcactgagctcacgtactcccacgtagcccttatcctcgttcctctcaacaccgggtccccatcaatctctccaagcttccacaacatccaagcaattcaacatcccaaacatcatgaactatcaaacccaaggaaaacagggcagaggcagaaaactctgcccaacacaaaccaatatcacagtttttctcacttaaataccccagtaacattctcttcgttccaattccgtaactattggatcgactcgaaaantttactggaagtctctagcacatnaatctacattgtgaccgttgggatctgctagaanacgtccagaacccaatct

SEQ ID NO: 220903 - DNA, 404 bp, Glycine max
  unsure (1)..(404): unsure at all n locations
agcttncaaagtgagataggagcgtctttttcctaagagtcctctcacgagggggaggttgagccttgttctcagtataaaaattaatcgtggaatgctcaaaatcataatattcaaaattactagcaccgaattctcagaatgttcataatgcacagaatgatcaggaagcacactatgcctaactaatctatgaaatgtcctatctatctcaagatcaaagggttgtaagtcagatggatttcctctagtccaacactaaattcaccatgcacaattagttgcctttttatgcaagtaacagttgtaagttgaactacagctaccatcaaatgatgtccaaatgacttaaaattttgtcagccaccttataaaatgatgagaagatagcacacaaaatttcc

SEQ ID NO: 220904 - DNA, 442 bp, Glycine max
taggctaaactgtcataagctacttgagctgagtctagtcttacatgatttatctacggacgaaacttagtttaagttagtctaaacctacaagggctgtctaaatcgggcctagtcttacatgtgggatctgcgaacgaagcttggattaattcggcttgacgagggattgagggtttagtaatttatgctactacatagaacacaagagcatgattgattagagaaatatatttctatgcatcacgcttgttgttagaaagacccaacatttctacctactgtcgttattgtatttactttgcactttatagtttttagcataaaagtttagttgaaatactgtctgaaattatcacttatacatgttatctcaacaatgcttcaattctgcacttaattcacgctaacattagttctctgtgctcaatacttggattca

SEQ ID NO: 220905 - DNA, 396 bp, Glycine max
aacaatatacctgcccctcactaactgtctttgggcttggcggccacctctcatacaaagtacatttcgagaaggttgggttgtcatcgctggccattatacgaacgtcccttcttctatacataaagccccttcgatcgcattattatccctttgacaacgccgatcaaatccaatgttgctattggcttggaactcacgttgaccaaaatttttctaaacatttgatacaaaaatgttgcttgcaaaggaagtgtaggcctgcaataaaattacgttatgatataacaacttttaacgtatatattgaaacgtacaataacacgcgaccaatcacatttattatattcttacccaatattcttcaacatcttctttttggttggcattattgaa

SEQ ID NO: 220906 - DNA, 456 bp, Glycine max
ctatacacaactcaagctggaagggacacccacatttcctagtcccagtgtctcttctgataaattcttttttcctacacctatactcgccactcctttcacagccaattaacacaaatgtagtcattcctctactacctgtgtttgagtccgaccctaaaatcactgtcacaaatccgttttcatgagccacggatcaagcccaccgcaaaacattctctcagcactcaaacacctacaaagaaatccacataattttttttctactagtattcattgtattaaatctgtgacaaacattaacattataacttgagaagtgttgaacacatccgaacaatcaacatgtggttcattcgcaccacatgcttcttctgcattttcataatccatatccgctcgttcaaacattatttcatacatccactcatcttcgtccatctaaccaaatcaaac

SEQ ID NO: 220907 - DNA, 344 bp, Glycine max
cttttttgggctcagactcaaaccatgtttgaaaactcttttctatgttctgtccattttccaagtgtgtcaagacaacactagtggcaatataaattataaaatagaaacatgttgtataacaagtagcagttttgttagtttggtcagtacggttcactcttcctcattttaaaaattaaggtttcgaataatgattattaattaaaaaaattgtggttgatatgtaatgcaataattttataatttatttaatgtgcaattaagtattttgtcacaattttaattaataaggttctattaccattttttacattatacttgggctttcaatgtgcatctat

SEQ ID NO: 220908 - DNA, 423 bp, Glycine max
  unsure (1)..(423): unsure at all n locations
tattcaggatatgggatgtcagtctgcaaatgtttggtattggaagcttgaatggagaagacanccttctgaatggagaagccagtttctgtgtgtgtgtgtgtgtgcggaagctngaatcaagaatctgtctaagtttaatgcagcatccctaggctgcattaaatcacattacaggagcatcactacatccaacagatgggaagtcacaaagacaatgggtgggagtggagctttatttggagaaggccattgttttgacaatgaaattgatatggctggtgtttttctcaatgaggttcaggatatggccattcaacaacatggacctgatgtgtgggaatggactgctgaccctacaggtcagtatacagcanacaatgcatataaggtaataatgggaggagcaacagcaataaccca

SEQ ID NO: 220909 - DNA, 379 bp, Glycine max
  unsure (1)..(379): unsure at all n locations
agctntagaactcgataggaacataaatactttcttggtagtaaaatggaagaagaattacgagagaagctttagatattttgttggtttatttggcacgaatgttactattaagaaagaatatgacagaaaaaaggaaagcatgagacagattgaaaaaaagaaccagagatatgggtgaagcttaatgggaatagtgaagagggaaagtatctcaaggttgatgaccaaccaaatatcttgtcttgtagacctaaagttaaataaaagcactcagacagagtgttcaagcaaagttctaactcaatagcaacttcaacttaacacaaaatttcattctcaagtacagctaggtcaaacaaagaaccacataaaaaaa

SEQ ID NO: 220910 - DNA, 367 bp, Glycine max
agattgacaagaatattgctgtatcactatcaagttttcaattactaataaaactaaatattgatacatgaaacagaaaaatggatacaagcttcatttgattgtatatgcattacaacttgcagaagtagcatagcatggtgtgaatcaatcatgttatatatattctcaacattcaatatagatgcaatgcaattacaaacataccaaaatggcgaagaagtcattatcaccagctatcaactttgacgacatactagtcttggcacagttaaatagtgaatcctttcccagcttttcaacctaacatcattggcgttcaaatattctagcaatgacatctactgacaatctaaggagagaagag

SEQ ID NO: 220911 - DNA, 394 bp, Glycine max
tcgagcctctcgtatattacgggactcaatcaaacatccgaaaaaaacgttattgtcgtttgaatttgcacaaaggttcaacattcaatttcgagcgtctcgatatattacgggactcaatcagacatccgagtaaaacgttattgtcgtttgaattggctcagaggttcaacattcaatttcgagcgtctcgatatattacgggactcaatcagacatccgagtaaaaagttattgtcgtttgaattggctctgagcttcaacattcaatttcgagcgtctcgatatatgacgggactcaatcagacatccgagtaaaaagttattgtccgttgatttggctcagaggttcaacattcaatttccagcgtctcgatatatacgggactcaatc

SEQ ID NO: 220912 - DNA, 477 bp, Glycine max
  unsure (1)..(477): unsure at all n locations
tttaggaccttaaaactcagcttctacggaagttttctcaagagagcttctcaaggaagctacctagtctataaatagaagcatgtgtaacacttgttgtaactntgatgaatgagagtcttgtgagacatacttcaaagttccacttctatacctcttttattccttcaatttcgtgctcccccctctctctttctctccctctttcttttcctccattgaagcatcctctccaagcttcttatccaaggctcatcttggtggtgaagctccttcttccatggcttattccttaatggatggcgcctcctctcacctattttcctttgtcttccgctgcatctccatggtggaaaatcaccattaaaggaccccattgaagctcanagatccagcctccatagaagctccacaagcaagcttccatcaggatgtcttattgagtcccgtaatatatcgagacgctcgaaattgaat

SEQ ID NO: 220913 - DNA, 418 bp, Glycine max
agcttctagaaccctagcttgttccaaaaatttttccacatgttgattaagttagataaaatattttttatttaactacatgtctttaaatttaaatcttaaatatataatcatattaaatatttagagaaagaattttaccgtgtataataactctatcgtctatgattttaattcacaaaagatttcaatcctaagagcaacttaatagaaatacactacactacccaaatatacatggtggtatctagctcgacagatatttatcaaaataataataatacatgtcatcttaatcttagattattattgattatgtaggctctagcttctcttaatttttttcctatcatgcatgtttcctttgttgttgttggtggtgctggtattattattattattattattattatcatag

SEQ ID NO: 220914 - DNA, 396 bp, Glycine max
  unsure (1)..(396): unsure at all n locations
tctccccttatttgctataaatatggggaggagtgaatgtttaatgggntcagtcttcttggcacttctcattctctcgaaattgctgaggaaaattatttccgtgaagaaaatccaagccgaggcgcttccgtaacgtttcttggacgtttccgtgagtaattacgcgaagattctcgaccgttcttcaacattcatcgttcgttcttcgttttcttcagtctttaacgggtaagtacctcaaaccgagcttttcaaatcattctatgtacccgcgggggggcacattttgtttcatgtagttttattctcgttgtcattccctctttatacccccctttgacgggttgtaagaatttatttttgccatttcttccccctcttaaaataaaataa

SEQ ID NO: 220915 - DNA, 352 bp, Glycine max
aaatttattcattctgcttggaccaatgagaaaactggggcaaatgaaaagggtgagaaagagggagaaacccatgccggaactggcattcctatacggccaagttttccatcaacccaacaatgtcattacttagccaataacaaaccttatccttacccaccgctcagttatccacaaaggccatccctaaatcaaccacaaagcctgtctaccgcacttccaatgacgaaaaccacctttagcacaaaccaaaaaacaccaacaaaaaggaattttgcagcaaacagcctgtagggttcaccccaaattccgctggcatatgcttaacttgatccatattcactcaata

SEQ ID NO: 220916 - DNA, 456 bp, Glycine max
  unsure (1)..(456): unsure at all n locations
tcagttacctncagaaacccgtattcaccttatttttcattgttcattgctcaagcctttccatcaatctactggtgttactggacttccattacccttgccagttatgatcattgataatcagccagccctcaaacccctggtgatattaagcacgtgatggtaatctaccgataccctaaattgcagttcctagttcaatgggaaggactcttgccagatgacacttcatgggaagattgggaactgctgaagcgttagcatcaccttgaggacaaggtgcttctcgatgtcaaagggaattttagaaagaaggatctgtagaagaaaagttcaatcctattagaaaggcccaaaaggagagtcataccaccaaagtatttccaagatttcatgtagaagtngttaagctagcatagtggatgtcccgaaaatgttgtctgccattactttcaa

SEQ ID NO: 220917 - DNA, 382 bp, Glycine max
  unsure (1)..(382): unsure at all n locations
cgcagcagcaacttaaaaaacaaagagcaaagtttttcttgttgccagaaaaaggccccgaaaatatcgagacgctcaacaatgaaaacagaagcactcaacaaatncaaacgacaataacttttgacccggaagtccgaatgggtcccgttgtaaatcaagacgctcgaaaatgaaaactggaacctctgagaaaaatcaaacgacaaaaaacttttactccgatgtccacttgagccccatagaataatcgagaccgctcgtaaatagaacacagaagctctgagcaaattcaaacgacaataacttttaactcgggtgcccgattgtgtctcggaagacatcgcgacgctcggaattgaaaacggaagctctaagaaaa

SEQ ID NO: 220918 - DNA, 453 bp, Glycine max
  unsure (1)..(453): unsure at all n locations
actcagctctcgtttaattacgagcgtctcgatatatttcgggactcaatcggacatcatagtaaaaagttattgtcgtttgaatttgcttagagcttctgttttcaattaccagcgtctcgatatattacaggactcaatcggacatccgagtaaaaagttattgtcgtttgatttttctcagagcttcagttttcaattccgagcgtctcgatatactacaggacacaatcagacatccgagtaaaaagttattgtcttttcagtttgctcagagcttctgttttaaattatgagcgtctcgatattttacggagctcaatccgacatctgagttaaaagttattgtcatttgattcttctaagagcttctctgttcaattacgagcgtctcgatatattacgggacacaatcgaacatccgagtcanaagttattgtcgtttgaatttgt

SEQ ID NO: 220919 - DNA, 423 bp, Glycine max
  unsure (1)..(423): unsure at all n locations
atgcaagcttgctnctacaatctgcgcgtggtggatgatgacaacttnngaaaccaagaaacacacacacacactttttcctagtcgatcactcacataaatttccattctccccctttggttgtgaaattatgcttctcttaaaattaagttgattactcatgtaagttcttgatttaatccctatttctctccccctttggcatcaacaaanagccaaagtgcgtaacaagtataagacaatcatatactatcaatcattcacaaaacatacattgaagaatatgaaccaatcatgaagcaagaaacatgactagatcaaatatacagaaaagtcacatagtcatataacataattcataattgttcaaacacaccatgcaaataaagaaatactaaattgttcaaatgtaataataatat

SEQ ID NO: 220920 - DNA, 462 bp, Glycine max
  unsure (1)..(462): unsure at all n locations
cttcaaatggataaaaggctcacattcactgtcttctacatcatattcaaacttgttcaaataaataataaagncatctcgactaaaagaaaatcatataagtctcatacaattaatataaaacctatatcctaatgtcacatcctatcagagcgtggtgttcccgtgtcctctagcatgagggttttcatagtcatccacctattcatctgctcccccgaacacaagttcaagatcatcacaggatccaaacacaacaacacacagggagtgagttatcacattcctagctaatagagaaacaagacaattaaatatacatattatataaatgagataccacttgcttaaacatagctcacgtaacttcaccacttcatcattcaaaattcacttttcaattatcaatcacattacacaagaatcccacacttcgatcaagatataataacacatcaatta

SEQ ID NO: 220921 - DNA, 403 bp, Glycine max
agcttgaaattcgtaggagaaagactttttattctgagaggagaactctcactgagaagctttgagtcttaaaaaaaagggactaaaatgaacatttgtaaaaacttaaaaaaaccatttgaaccttcttttgttgaactaatttgagtctttaaaaataaggggactaaaatgaacctactaaataacatataggatcaaagtgaattcacttaccaacattttcaccatttccagcaagtataccaatagtgtcttctgctgcttctggagtatgtttatcagaacttgtagttcggttgtcaacttgtataccacccttgacagcatctacgcactctttattggcacttatacaaggattctcattgacaacatctaaacaatgtaacaacaattgggt

SEQ ID NO: 220922 - DNA, 451 bp, Glycine max
  unsure (1)..(451): unsure at all n locations
tttcgtcgagtaaaagaaaaactttattcataatgtcatgtgttancttcagaagttctccacacggttaatatcagattactggtatcatttggtatatgtatctttttctattttaaaatttgaagtttcgaagggatacaaatgaattttatgatgcacacaaatgaaattgaagtgaagtctggtggactttttcattgcaccgttgtgttcaactgcctagtctcaaattaagatcaataaatttaggaaaagttaaataaattaatttatgagaaaatattagaagaaaccagaacacggcacatttggtcagtggtatgccttgaatttatatagtttaaaaggagtgcatntggcttatttgggttaaactcagtatgatatgattttaagctttatggttatcanggttcanagtccaaagccattacattatcaatcacta

SEQ ID NO: 220923 - DNA, 412 bp, Glycine max
agctttttttttgttgctcagcaaaattatttattatattatacgcaaagtaccagaggtactgaaaatacaaacagtagtaatatacacagattgtatcagtactatcctagagattagtattagataccatttgaacccaaggccaagatcagaaatacctttcacattctgagatcccctgtttaacatatccacatagcccttgatggcccgatatacttcacgaacaaccatttccattctttggcaaaatgagcaccagctattgctaaacaagaccaggacatctttattccatgaattagaagtattttctttgttagaaaggttaaaaccaataacaagttcagagaaagtatgagccatgattcgaggtatagaatccaccttatgaaaatccaaattaaca

SEQ ID NO: 220924 - DNA, 446 bp, Glycine max
  unsure (1)..(446): unsure at all n locations
taaagntntgtcagtttcatatcatttctgttattttgctgcccttctcatggttggcctttctttttatggggctcagaaacctgcagcaaaagttgccgttccttcaaaaaatcaatctgccaaaaatggtactctaagtactctagctaagaaaggcaagccagctgccagttcaagctcttctgaatcttctgatgataactctgatgaggatgaggtgagtaaaacacctttcataacattgataatagtgaaaatttccaggtccattaggggtgtgcaatactcacaatgccttgtttttaattttttctattgttttcaggcaccaaaaaccaaggtggcccctgctgcaggcaaaaatggacatgcttctacaaagaaaactcagccaagtgaaagctctgacagtgatagctctgattctgatagcagctctgatg

SEQ ID NO: 220925 - DNA, 408 bp, Glycine max
  unsure (1)..(408): unsure at all n locations
agctatgcgcatatttccttacgaacgttctcttgcacaagacattctattaactaagaaaaatgcacccatatacaatcaaggcagctttgttacctaaattttttacacgtatttccaaagtgtatttgttacttacatcacacacatctccttggctaaatttacatacatgcatactcaaagcattttggggtaccaaaaattgcacatgtgcacatcttggtatttctaatacctatacatacacaaacttcatgatgaatcttgactatcttcacaaaaaggtgctacactttattccttttttcaagtttttgctacctaaagccgcatgcaaattcaagcatattttcctttgctgactaaaattgtattcaaattaaaaggtatatntttttgtaatat

SEQ ID NO: 220926 - DNA, 450 bp, Glycine max
  unsure (1)..(450): unsure at all n locations
tcatgatgaatcaacaatgattcatatgtgttttgatgataacaatgatgacaacaaaagatgatgacaaaggtgatgaacaaaaagctcaaaagatcaaagaacaactcaagtgaatcaagaacaagtcaagagttcaagaatcaagaagaattcaagactcaagaagaaagtctacaatcaagaatcaagattcaagattcaagatctcaagaatcaagatcaagattcaagaatgaagaanagactcaatcaagataagtattaaaaagttttttcaaaactttgaatagcacatgagtttttgacaaaacctttaccaaagagtttttactctctggtaatcgattaccatattgttgtaatcaattaccaatagcacaatgagtttgaaaaagttttcaaactgaatttacaacgttccanatattttcaaaaggctgtaatcga

SEQ ID NO: 220927 - DNA, 406 bp, Glycine max
  unsure (1)..(406): unsure at all n locations
gcttngatattggtgagtaaatgcctcaattcttctattatatttcctggttctgaagtacgtcttttctcactaacatctctttttataacattaatctctttaatcctctcatttgtactaattactttatcttacatttttcttccttttcttctcatctccttttctattaaaaaagttgcccgattttgttatataaatgcaatttctcttttcattttacccaactttatataaagatattttatttgtttcaccaggacatatttgctgctggaactgatacttcagcatcaacactagagtgggctatggcagaaatgatgagaaatccaagagtgagggagaaagcccaagctgaattgagacaagcttttcgagaaaaggaaataattcatgaaag

SEQ ID NO: 220928 - DNA, 431 bp, Glycine max
tagacgaaggggtagacaaaggtgtcgagggtttaggctacaagggtgaatggtgagtcgaaaaactgcgctggccatgatggcggtccagcatcttatcttcctggagtcgtgcgagatcgatcgcctgaggaagagaaagagggcgcagagcttgaacttcccggtgaagttccagaatcaacccttggatgaagcagctcgacaagatggaaggggcaaggcccacaatccgattcgccaatcattcggactccataaggtactcactaacaatgccgatctattggagtttgaacaaagcgccttgagggtcatcgtagaaggagggaacaaaccgtgattccagagcttgaagcatggcctgccaggaagggaaaaacccgttccaggacatccattggtaccatgacaatgcagggccatccatg

SEQ ID NO: 220929 - DNA, 331 bp, Glycine max
  unsure (1)..(331): unsure at all n locations
gctgatttaggtagtcggggcgaattgatcatagcgggnccgaaaaggggaaaatttgatcattctgctctgacaaataaaaaacctggggcaaatanagagaatgagaaggagggaggaacccatgttgtgactgttgttcctacctggccacattttccaccagcttaaacaatgtcaatactcaaccaatattagcccttctcattacccaccaccatttcagccaagaacacccaattattcacaaaggtcattcctaaattcagccacaaaggcttgctggcgcacattcaatgccaaacaccacccttaacacaaaccaaaacac

SEQ ID NO: 220930 - DNA, 439 bp, Glycine max
  unsure (1)..(439): unsure at all n locations
gctgaatgttccataancanggtgtttgaataaagtttttattcacttttctacctgantaacaaaaattccttgcagaagagaagttaattggaggatgggaagcaagggtgccttcattcttgtgttgcttgtggcacgggaagatatggtagaattcaaatgattgtttcttctaagtttattttcttgggaggtgttacttccaattntgttcattttttattaggaggtgttacaatgtttctaaagtatttcaatgctttcttaggctctaataatattagtgtgtatttgcatcagtcatttctcttttaattattcttggctatgatttactaattctacaaaattataaataatggatacaattataccaagaacgtaaaatttacacctagcctatgcgtccacacaggtgttgtactagttttgaaat

SEQ ID NO: 220931 - DNA, 406 bp, Glycine max
agcttgataatgggaaagtttgttatgctttattcacccccccccccctctaaagttattgagtccacttggccaacataaccaacttggttcccttcacatacatcaagagaatacgcaatatctcaaaaataagaaacaagcctctgaatgagctaaagatctcgagctgctattagtggaaaaagaagagaagaaaagagctttgtatagtaagtcacaacttcaaaatcgtttgattgtgaatactttttcttaaaagtgagttgtgtctcgagttcaggaagaacacctccttagtcaagcaagggttttttggaaaagattaatcagtttttatctatctttactcttgatttccgtgtatgggtttacacataattttgtttgtgcatgaattgcttaa

SEQ ID NO: 220932 - DNA, 380 bp, Glycine max
  unsure (1)..(380): unsure at all n locations
tcatgatgaatcaagattgattcaaagatgttctgatgattacaaagatgatgacaaaggtgatgacaaaaaacagctcaaaggtcaatcaaagaatgagttcaagatgttcaagatagaatcaagaacacttcaagattcaagaggaaagttgaagaacacttcaagattcaacatgaaagttgatttcaagaatcaagaattcaaggatcaagctttcaagaatcaagatcaagattcaagaatcaagagaaggcttaatcaagataagtatgaaaaggttttttcaaaaactgagtagcacatggattcttctcaaaacatgtttatcgaagagttcttactctctggtnatcgattaccagattattgtaatcgat

SEQ ID NO: 220933 - DNA, 399 bp, Glycine max
  unsure (1)..(399): unsure at all n locations
agcttcaacctttggtgcttatttctgccttaaatcgngaaaggagagcattttcggggtcgtgaagcgcgtggctacgagtgggacttcgaaaattcaggtttgggtggacttctttctcttttaaatttcgtgggtatggggttttgggagatatgatgggtggttttgttagttttctgctgtgtgatgattatttgtgaaggaacttgttgaaagcttgttgaaattgccatgtttgggtgagttagacatacccattctgttttagggtttttgtgatgatatttgcgatgtttatatgctgaaattgctgatggaaagctgttacagatggagggtagaactaacttacggttagaaagtgagaatgtgatgttatgagtggaaaaaagagtg

SEQ ID NO: 220934 - DNA, 439 bp, Glycine max
  unsure (1)..(439): unsure at all n locations
gttggagaatgatttctatacacaagttagtcgtatgaatcgactaacaactcccaacttacttccaatgaaaggcctttttgttacaaaatttgaatgcaatgaaggtaagtaaattgtcaattaaaaaatacagaaaggtcctcaattttggtggtttttctctctttggtgattcactcaatttggagtgcttcttagtccaatagctcttgaggtgattggccccttgcttcttgactcanattcgtcaagggatgacaccaatactcctttccaattctctatatgacaactcacaaacaaggaaacaaagagacaagcaataaccaaagaccacaaaaatgaaatgaaagctaaaccaatagatttttaacaagacaaattttcaaggattattcaacaattaaagcaataaaaagcacataatagaaagcta

SEQ ID NO: 220935 - DNA, 419 bp, Glycine max
  unsure (1)..(419): unsure at all n locations
catgcaagcttccataccactcctatgtatctctactgttgcaaatcgagacccctgccacacctcggnttctactttgattatctcttccctctttccaagcctcaacaaacatcataccagaatacaaatcgacaagccactcttcatccctaatcttgtgccactctaaaattcagattcacaatcccaaatcaaaactccaatttcagattcaaataaaaattgggatttagagttgatggtaagagttttgcatgtgcaatgtttacagtgataaagggagggttgcatgcaagattttgggtatgggtggagccgtggaggtggttgcaacccatgatagcggttttgatgttgttttgttcggatctggtgacgggtgatggttttgggtgcggatttgacagatctaatga

SEQ ID NO: 220936 - DNA, 462 bp, Glycine max
  unsure (1)..(462): unsure at all n locations
ttgatgcaagaaaacacaagaatgggtgcatattgtgtgaagctaccctttntggccagcaattagctataagccacgctataatagtttccatacacctagacgtttaggaattttgttcatcacggacgtgtaggtgtagaataggtagcaaaatacctttggcaatttacactttgggtatgatagcaaaatacttggatgtatgtacatgtaatttttggtagtcaaaatgtctcacaaaaatatatatatgttgcatgttatgtaaagaaataccttacaaagataccttttaatttgaatgcaattttagtcagcaaaaggaaatatacttgaatttgcatgcggctttaggtagcaaaaacacttgaataaagcatgaaatgtagcaccttattgtgtaaatagccaagattcatcacgaagtttgtgttgtataggtattagaaatacttgaat

SEQ ID NO: 220937 - DNA, 409 bp, Glycine max
  unsure (1)..(409): unsure at all n locations
gcttctcaaggaagttttcttaagaaagcttctctggaagctacctagnctataaatagaagcatgtgtaacacttgttgtaactttgatgaatgaaagtcttgtgagacatacttcaaagttccacttctctctctcttttattccttcaatttcgggctcccccctctctttctctccctctttcttttcctccattgaagcatccttccaagcttcttatccaaggcttatcttggtggtgaagctccttcttccatggcttattccctagtggatggcgcctcctttcacctcttctcctttgtcttccactgcatctccatggtagaaaaccaccattaaaggacctcattgaagctcaaagatccagcctccatagaagctccacaagcaagcttccatcaat

SEQ ID NO: 220938 - DNA, 471 bp, Glycine max
  unsure (1)..(471): unsure at all n locations
gcttgagaaacatgtaaccctttggcaatctttgagaaacatgtaaccctctggctttatcaaaacattcagcttgatcctttgtctacagaaacaaagagacaagtaataaccaaagaccaaaaaatgaaatgaaaggtaaaccaataaattttaacaagacaaattttcaaggattattcaacaattaaagcaatgaaaaccacataaaagcatgctaggactcaaagtgaaacctagaatggctctagagtagagtaaaaaaaactaaaaaaaagactcaagaaacctctagtttggccacttgttttcacactacttttcaattgaaatttcagatctaagattggtataaaataggcaccaattatagaacgaattttgagccaaaacaacaagcacacttcattttcactttntnttggacactgattntcttgtcaaattgtgggatttttcttagtttttatt

SEQ ID NO: 220939 - DNA, 355 bp, Glycine max
gcctatgcctaggcattatggggagtgttttataggagtcgaacgttagcattcagcagcgggggtttttgagagaattaagagagaagaataatgacagaagacgaaacgaatctgaggcgctgtctatatacatgtatgatcaacccctacatcgtccttgataggtgtgattcgggcgactatcggatcgctttgtgattaagaattgaatgtgatctatgaacccttaaggatccccctttgattggtgatgcatattgagttgctccatttatcgatcctgttgtcacatcacactgaccagttaagccataccgatcactattgctgacactgtctctttatagagatt

SEQ ID NO: 220940 - DNA, 412 bp, Glycine max
  unsure (1)..(412): unsure at all n locations
agctntgatctaccaccacgcgcgcgccaccatcattttatttnttctattatttaataatactagtactttgctttctagccgcgcatttggctatattatgacatttggataatctagcatttctttatttgcatgggttgaatgaacacatatgaattatattatatgactatgtgggttttatattcatgtttcttgcttcatgattggattatattcttccatgatggtcttgtgaataattagtagtatatgtatgtttcatacttgttacgcactttggctttntgntgatgccaaagggggagagaaatagagattaaatcaagaacacacataagtaattatctaacttaatttcaaatgaagcatacactcaacaaacaagggggagaatggaaatatatgt

SEQ ID NO: 220941 - DNA, 75 bp, Glycine max
agtaaaaaaatttgccaaccgaatttcggatctacagtgttctagtttctgcttctcattgctggcttggtgatg

SEQ ID NO: 220942 - DNA, 243 bp, Glycine max
aacacaaccctcttcctcccttctcacactacatggcagaacaccataccacagtgaaagcgctacaacgtaataaaacttaacctctcaccaatcacaactacaatcctcccgcaacaacgaataaactccccctatgacaatagtgaaaagcgcgctggcaaggaacgaactgctccgctcagttctgatcaaaatattgcacccaaaggacctggcctgctaatgcactctcacaggctt

SEQ ID NO: 220943 - DNA, 383 bp, Glycine max
atgggcaatacatttatcaaatttcaaggcaagatttacaggaagccctgttgctgagtcacacattattggacgcgatatgctttctgtctttgttttatgcatttataggatttcatgtttattatgcttgataagtgattacttcacatttgtataagggtacgaatgctacctgctactcgtagaatttgcgctgtcatgctcatgtcatgcctagaggagagtgctattttcttctagcttattaaattaataatgttgcaagcttagctgtctctattcaccaataatctgaatattgctatattatttggcggaagatgtttatgcaccagtgaacatactcagttatatgagaattactatggtaatgtggaccc

SEQ ID NO: 220944 - DNA, 345 bp, Glycine max
ctaaccacattatgggcacatattaaaaccaaaacttaatcccgcaatcccttcttgtaaaactaaagtttcaattttgcttcattcaagttctaaaggcacaatacatttcccaatgctaaaatcacctaaccaagcacaaaaattgttgatcagaccaagagcatacagaatttaagcattgaaagaagcattgaacacaagaaacacaatcaattagatattaaaataattacatcatttgttctttagaaatccccaactaggttgtttaacaagccattacagaaaaacccctaataataatgagattacaaaacctatgtatctctgcaaaagctgctc

SEQ ID NO: 220945 - DNA, 454 bp, Glycine max
  unsure (1)..(454): unsure at all n locations
ntaacctcatcatctctcatagtctttagatntgggagccaatccaatccttgtgtccggactctcagccacttatgatagccgccgatgctcccattactgcttcccctaagctctctgtcctttcttcacaccgcatcacatgccttgtgaactccttagagtaccctcgcattggggtcactgaaaccccgtgcgatgaaaggcgtgatgctttcgtctgatggcactcctctcatggggtagccaagctgtcttatggcgaggaggggattatagttaatacaaccccttgttcccatcaagggaacatttggacatccttcgcatgaagatagaatcctgattcttccttccttctagcgagggaatcaattaacagacgcccctccatgctagccaagagttggtcccaattcgcctttcctttttcgacgcacgagcagtgaccttg

SEQ ID NO: 220946 - DNA, 414 bp, Glycine max
agcttggtaagtcttggaagccacaattttttcttactacttggggagcgggccactcaggaatgacctttattctcttagggttcatgggaaccccttgatcacaatttaaaaaattaagcaaagtaaagcaatagaacatacctttttctgtattttcatgttgattattcctaccaaaaagtatgacaaacctaaggtgtcccatatgagtgcctaagtttgtattgaaactaaaaataagaacaaacctacctaatgagttacacaaatcatgaagatgttgggtgcacgagtaattctacaaaagagtgttgcaccacccaaaacattcatcacaccacctattttagggatttggcgcctaataatacctattttgggcaccaacaaagcacaaggatttaatctctt

SEQ ID NO: 220947 - DNA, 454 bp, Glycine max
  unsure (1)..(454): unsure at all n locations
tcatcctctctttcacctaanaattttcaaaatcccgttctcgaactcgtgactcttccctcacaccgatgatcctctacttcaagaaacactgtctgagctcacgaagcgtcgatcgggtgtggacacagggggatacgtagaatgccacccgacagtcaggagagcagccatcgttgcctatcacgccgtaaaggtgctcgacggcgcggagggtctgggccatgccttgtgctgttaactgaatgttgtgatcgggtatagtggtatacgtcgttatgtcccagttcccctacgactccccatgccgtatcaatactcttctctttagaagcacaccaaccatatattctcttctctttgcatttattttcttttaccctcacaattttaatttatttttatccaaacacaaacatttgaaaataaaagaatttcacttgaagtatttgaa

SEQ ID NO: 220948 - DNA, 404 bp, Glycine max
ttcttccatggcttataccctattttatggcgcctcctctcaactcttctcttttatcttccgctacatctccatggtggaaaatcaccattgaaggacctcattgaagctcatagatccagactccatagaagcttctcaagcaagcttccatcaagtggtatcagagcacaagagcttcaagttggtgctccttaaacctccattagttttcagctttaccttctcgtccatttttgtttcttcatttttctccatgtatctcctcacatgtcttttgctgaattttttgaacatgattttttagaatttccaccaattaaacttgctatagaagctagatttgattctctatggttcaaatttcttgttcttgttcttgaaccatgaattgtgttgagttt

SEQ ID NO: 220949 - DNA, 443 bp, Glycine max
ttggatactttcttttcctttcaagatggcttacttgtatgttgtcataaacatattcgttttgctattcgtgcttctcttatcaatgattctggcaacagcaagggtgcccctttggatatccgaacctcatcacaaagcacgtaagtgacctctagcatccctagaacaaataatattaagtttttgaaattaactgaactaatttttctgatgtatctagaaccatgactagtgcttcaagtttccattattttttctccaagacttatgaatttcgtatatattatttgtattttgtttgtttgaatattatatactggatggttttactgattattcaattccaatattgtttgggaacctttaagatggacgcctccttgctatggatgatccacgtgaccaccattataaatttacaccataatcaccgaggagtg

SEQ ID NO: 220950 - DNA, 368 bp, Glycine max
gacaagatcagcgaaaacatgatcaacttatttgaaagcaacacactgttaatatactcacttaacatttcaccaaacgtatgaacctaactcagaaaacatttacagaaaaattatagtggtgcccgagccccaaagtcaacatgttaggttttggatcatccaaagaacaagcccaaaacgtggattgtttgctccaggagaaataagaaaaaaattgcaggccagaattacaaataggtctagttgtaggagagttatctaattgtatatgatggagaaataatatggtaggacagttttgtaacagctattcaactgtatgtggtatagttatatggactagggagtatgttttgtcgggaaca

SEQ ID NO: 220951 - DNA, 441 bp, Glycine max
  unsure (1)..(441): unsure at all n locations
tcatgattagccattatccttngtgctactgtggcagttttaatatcttttgggctttcgagcaagtggaatattcccatgctcttagggacctcatatggatctaattcacactgcatattacaacttgttcagtaatatgcccaaaaaaaaaaggaaaattatattgtatcccaagtgaacagtaaaagtacagcacacttacatttaatgtcttctcagcaacagtaccatgcacaactactgagatattgaaagtggtgatctgtttgattccaaaaaataaacttcatcagaatgaaaatatccaatggattcaaattatgatcaagaacacttcagatgaagcaaggaacgagttaaaaaataaaaataatgatcaagaacacttcagatgaagcaatgaaaatatccaatcaattcaaattatactacaaatgt

SEQ ID NO: 220952 - DNA, 400 bp, Glycine max
  unsure (1)..(400): unsure at all n locations
agcttcacatgacgtagcatctattcttcattgnggatggttaaacaaggtcttagatggaaattgaatgatggttatattgttaaatcttgtaaggcccatatgatcagtcatgtcacaaacacctcttttcgttaaatatgttgacaagctaatcaagttgttcaccatctgtcacacgagcatctaaattatttgctagtttgcatcattttcatgtcatacttgattatattgatgccttgattattattgaaatgatataagcatctttcattcaaaaaaatgaactttaattatgtaggttaaattggaatttttggtctctctataatttctaatatgcaatttggttccccatttctaaatcaagacattttgttctcttttttttcttttc

SEQ ID NO: 220953 - DNA, 425 bp, Glycine max
  unsure (1)..(425): unsure at all n locations
tttcagcccgccctgganactgctccatcttgacaccctttttacaaaggacatctaccctaccacaaagagcccccgctcaagccccggctcctgcaaggcctcgtcccaccggtgatttcaatcctggcacgagttccaatccgaggaggaaccctccagtgaagaagcttccggagttcgccccgattccgacgtcatacggggatttgttgccatccttaatcgccaaccagctggcagtgttgaccgccgaaagaatttaccagtcttatttcccgaggtggtacaaccctgacgcaacctgtgtgtatcacggtgtactccggggcgttcgatcgagcagtgcgtggccatcaagcataaagtccaaagcttgattgatgcgggatggctaacattccaagaagatggttcgaatgtga

SEQ ID NO: 220954 - DNA, 361 bp, Glycine max
ctattggttcctcgcacctccaagttgcttacaacaccttctttatggcttccaaaatgtaaaattacattacgaaatgcacctttttttggtttcccaaatgaccaattcgaaaggtaaaaacattccagaaagggtgtacgaagcaattggaggtgcacgaagtaaccacccataccttaaggtgatctcccattcatgcaattgcccaatgggtgttcttacttatgggcctctattactaaagctaccaatatcctccaagatggtttccgactcaaagtgggtgaaggaaaactgactatttggttgatagatggaattctaacgtgctcttaccaattggttgattatgtcatat

SEQ ID NO: 220955 - DNA, 413 bp, Glycine max
  unsure (1)..(413): unsure at all n locations
taagtgacatccttctaggctacaatgataaaatggactatctagacgtgtgacacctcacttaggagcacttgtcttgcatgatgacaattggataactaattttttcgcaacaagcgtggtataaaacatgcaaaacactggtatggtaactaacttcatttctcactccaccttgagttattactgacttgagtattggagtgcatgcaaacaccccaacaccaccatcagaaccacttgatgccaccatactttgcaattggaatcaccatcgtaagtcaactctatatcagaatctctcattgaactgaatctcccatttcttgaatcgaacaaaatgtataanaagaaccaaaccaaaccttctaattgattcttatataaggaccggaatgaatgtaacttatggc

SEQ ID NO: 220956 - DNA, 407 bp, Glycine max
agctataggatcaaaatcttttctctctttttctctcaatgggtcttcatttttcttcctcttttcactttttttcttccttttttcttgaacaaattttgtgtcttttccattagtgatgatcatggaaggctaaacacttaaatccaaggatccactccaagcaaggatgaatttgggttctagtttagtattggtggacaaatggcctcaataacttaagatgggggatttttaatccccttttaaatgatatatgataggctcaaaatgtagaagaagaagcaacaattaaattaatcaatattctttaaacgtgcaagacaaaaatcaattgcaataaaataaatgagataagggaagagagaattgcaaactcgatttatattggttcggccacttcctgt

SEQ ID NO: 220957 - DNA, 417 bp, Glycine max
gcttggaaataatgtgaatcaagattctggttgacacatttcggtcaattttgctcttagaaatgtcacctaagtgcttatgcccgaatgctcctgagtttgtattatcaattctacacttagtaccacgcaattctgcattaaaggattcatgataggaagctacagtatcaagtaaatataagatatcattaaccaagagtgaactagttccaacaatatctaaattaaaagacagactgaacacattggttccaaatgaacacaaataaactaatttgtccacataagagactgaaaccaaatttcttctaaatgaaggtacatacaaagtgtctttcaatcccaataaaacttatacataataataatctaaaggccttatagcttcactttcaccgatttacatctcaacat

SEQ ID NO: 220958 - DNA, 412 bp, Glycine max
  unsure (1)..(412): unsure at all n locations
tgcaagcttatggattagagcctatcctagatttcttaanaagggtcacactatcacacaccatgttatacatgcagcaaaccaaaaagtgttgggcatgagggggtgtattgggaaaaacctaagtttcacattggctagagatagtgccaagatagagtatataagtgaggggcaaccctcaccctatgagctagttttggggttgagttaggcctaaactcacattctaagacttctttgcctctggaatttgattaacatcagtactcaactctgtacagccatccaaaggtattctcactcatgaaataaggcactttaaccctttttatctgcgcttctcttcttgattccttttcactatcaaaattgccactgttgtttcttccttcattactgcctcaacctt

SEQ ID NO: 220959 - DNA, 450 bp, Glycine max
  unsure (1)..(450): unsure at all n locations
ctacaaaaaatctttggtttttctatgattcaaaggcttttattctaagagacccaaatcctagacttatccaagtaatcttttcaatacaattagcttactcactagcctttcactttaattttcttttgaccttattacaacagcacacattttctttgattgctcttttttttcaacatacaacttatttattgtgtgtgctgatgctctacattntactttacatcctaatcaactccactcccctaaatttggggtaaattttccttgaaccatatgctttcctagaatctaagcaaggtatttggagatattcattcaagttcagggttcaatttttaacaatatcatttagcacacaaagggtgcaaaggatacaattataattcaaggtaagctttntggtcaattggcttgtatatacacaatcatggccttcatcatgtc

SEQ ID NO: 220960 - DNA, 368 bp, Glycine max
atgggctacgtgggagtacgtgagctcacatggaggggggccacaggggatggtgggtttatgcgcgctttgtggatgtgaaaaacttgttgggcaccatcggccggccgccacctagtaccacatgtgatgggtaccccataatcctacaagcttgaaatgaggaagtgttgaagggtgaaacttcctgcttttattgttgaccacagagtggtacctggagatatgtcgcgggggtcaggagaccttggggacgtcaggtggggtgctattgcccaaaaccaagctagaccaatcccgacccaacccgggcatagtcggtcagtgagaacctgtgatgtacctaaacaggcgagctcctggcagtc

SEQ ID NO: 220961 - DNA, 465 bp, Glycine max
  unsure (1)..(465): unsure at all n locations
agctggnggtactatagctgcacttaattgttgctggggtaattttatgcagatgttatgtttagaagggggtaaagacaatatattactacaattatatgaacagaaaaccattgcacgcaatcaccattataggatttgtgattcattatgaatcacagtagcatgaccgacaataaaatagccgctgtgtaaaataacataacaattgtctcaaatacatgaaaaaagaaatactcctacgccatcattagccgtttttacttattgccgtctttaaaaaaaatgttgcccatttttttcgaattgtggtgatcatgtcgatgtccaacggtgtgtcattagcaaaccactgcaagtattcataattgtaagttagtactgcaaatataaaaattcagttccaattgcactgaagtttatgcataccatggaccagtcactctttatgtcgctggctatgat

SEQ ID NO: 220962 - DNA, 318 bp, Glycine max
taaatggttggaatggagccatttgaaccaacctaaaacatgaccttgaatgaagaagggaatataatgaagccgctgtggggtggtgtgtccgttaagtcaaaatagtgttcagccttgaagatccagtcaagaggatctttcccattaaaggaagatagggttattttgggtaatttgatggttgattgtggcgggtcggttcgaaccggagaggatgaatgggctgcacattgtgaaaatatttgttcacgtatgagaaggggtaattgtgtggagagaaaattttggatatctgtttgttgtttggtgaccgcc

SEQ ID NO: 220963 - DNA, 457 bp, Glycine max
  unsure (1)..(457): unsure at all n locations
gccactcactctatggcttgaagcaatctccccgtgtttggtttggtcatttcaactttgctatgtttgagtttggtatgactcattgagaagttgatcacttgatattttccctctattctatgtcttgccagtgcatccatcttgttgtatatgttgaagacattgtcatcactggcgatgactccaatagatttctctgtcccaagtctcacctccacattcactttcaaatcaagcacttgggtccactcaggtacttccttgacattgaagttgtccaattctcatcagacacactttttattattggttaaaatttattgaanatcataaaaaaattatagattntacatcttatttaataattctctcttgaatttttagttttcaataaattctaagcaattaaagatagtattttttaaagagtttgtaaagagtactcttccaacac

SEQ ID NO: 220964 - DNA, 405 bp, Glycine max
agcttgtggtggacctctctgtggtctagccaattttatgtgatgatgtaccttgaatgacgcttgaggagcttctatctcccttatttatatgtcggctctttgttttaattaatttccctgcttaacattaggagtatttgcccttcaagtggggggggaatggtttataaaagaaaaaaaaatatggtttctctggtatgattattacttctagctgctcttttctatttctgttggtttctgtttttggattctattttagtttctatatagctgtttgctggttctatttttgttgatgattctattttctgtttggctatatttgatttgttttgctctattgtttttacatatataaaataaaaaaattaagaatttggggttgctgttttatgatgt

SEQ ID NO: 220965 - DNA, 462 bp, Glycine max
  unsure (1)..(462): unsure at all n locations
tgccacccagcttgcccaggcgagtagggttgcttcctctattggcccaagtgtgtctggttgctatttgcacccccatttttactaagtacaccccctgcctttnttttggtgattcttttttcgtaaagttacggaaacttacgaatttcgtaacgatacttgttttctttccgtaatgttacggaaccttgtggattacataatcatcccctttttgacttacgaaatgttacggaacctcactaattgtgcaacgatgcttccatttgatttccggtgtgtcacggaaccttacggattgtgcatcaatattttcttttgttttccggcatgtcccggaatttcacaaattgcctaatgatgggtgccaagcaccttacaaggaccaaacaaaagtcgcatgtcatcaagcaaaggtccccggacgaaattagggtatgacactaaatatggattata

SEQ ID NO: 220966 - DNA, 360 bp, Glycine max
tacggaaacaaacaagcgagacacctaaattcaagctgcatagttctcctaaattatcaatctatataataataaaggggggaaaagttattttatgaatggttaccattatccattggtggcgggaaaagatctttcaccaccaactttgaaatataagctgacaaagtatgctacttttttccaccccggaattttccatcaacaaaatcttgaaagagagatcatagccactgctctgacctgaggatgacctcattctctccttctctgatgaatgtcttaagcgtgtgtgccaaaaaagtcactgataaaaacgttttcctgcgggataaaaaaaaaaagcttttggggttggct

SEQ ID NO: 220967 - DNA, 455 bp, Glycine max
  unsure (1)..(455): unsure at all n locations
gacctataaaactaagcttgcgaactcatatcactgcaattataaagagcagataatattctaagatcggcatatttggaaaatntgaacaattcacatttcacaacatcagagtaagtagaaagtactaattgtacgactaacagcacccttcctaactattttccatttacaaatcagatacaactaaaaccatgaaaagcgaataaacgatgaanactcaaacctcttgtccttcaaaacggcaataactgcagcagcttcggaaggtggaacatgagacgaaggcctctgcgataatgaagaagaagatgcagtcggtgtaacaggcctcgatgaagtaggtgaactcaccaccgatggcggataccacgactgtgactgcgaagaaccatcctgcgattgttgctcttgtgatcccctgcgcacaatcggaaattcatatatgctattaa

SEQ ID NO: 220968 - DNA, 410 bp, Glycine max
cttaagcaccgcggctgcagcttaaccaaggcgtgctactttttcttgacctggggaaatgcccatctgctttcgaagagacaaaaatgaagttccgacaaggtcgaagaagcaaagagaaaactcccatcaaagattgggagagagcaaaaatagaaagaaaatttccgatcaaagatcggaagaaaacatacgaaatatgcagaaaggtctttgggccagacaatatctgaacaatacagaattgtcaccaccaaataaggaaagaaaggaaaccacgacctgaagtggtcctctccctttgattgccaaccaaaatcctgtgcgtcagtgactttttcacctcgcactaaacaaaaatagaaaaggaaaagggccaaacactcagagccaatatcccctccaaaaac

SEQ ID NO: 220969 - DNA, 399 bp, Glycine max
  unsure (1)..(399): unsure at all n locations
ntcataagtgagatcaggtgcaaccatctccctaagagtttctcacgangnggagggggagccatgttctcagtataaaaattagtagtggaatgctcaaaatcagaatcattagaatcatcagcaacagaatgttcaaaatgcacagaatgatcaggatgcacagaataatcaggatgcacactatgcctaactaatctatgaaaggttctatctatttcaagatcaaagggtgataaatcacctggattgccccaagtcatgcactatatgcagcanataatgtgtttctcaacagcacctaacaagggggtaaaattacagctatactcaaacgatatcaaaattagctgaaattttgtgagggaacaccctaaatcatgaaaagatagaacaaaa

SEQ ID NO: 220970 - DNA, 413 bp, Glycine max
agcttatagaaaacaacaatgaatgttgaataaggtatattccaatggaatttctaattataaattataactggatcaacctttgttattcaagtttttatgattcttatgttttcatttttttattttcacagttactttcttcattaacttctgcctttgaatttggttcagttgctgatttagctttaattgtattgttgaaaatgggttcctagctttcgattgcggagctagtttaatgtcaaggtaagttataatttcatattttcatgccaatgattttcttttccctttcttacagtgcatacttttatctctattttactctttttaattaggattcagtcctattcttttattggatttcgatattcatatctaggtacttcgaacaattgtaaaactttttg

SEQ ID NO: 220971 - DNA, 446 bp, Glycine max
  unsure (1)..(446): unsure at all n locations
tgcttgagaagcttcaatggaggctggatctttgagcttctttaaggtccttcaatagtgattttcagccatggagttgcagtggaagataaaggagaagaggtgagaagaggcatcatccactagagaataagtcatggaaggagaagcttcaccaccaaaagagtgccttggataagaagctntttcaccaccaagacagtgccttgtataagaagcttatagaggaagcttcaatggaggaagagagtgagagagagggggggaggcgtgggaattgaaggagattatggagagaagttaaactttgaaatgtttcttacaagtttctcatttatcaaagttatgacaagtgttacacatgtttctatttatagcctagcacatgggaagcttccttgagaagcaaggaaggtagcttccttgggaagctagaggaagaaaac

SEQ ID NO: 220972 - DNA, 418 bp, Glycine max
  unsure (1)..(418): unsure at all n locations
catgcaagccttccgccaatggtatgtgaggtttaatgatatcattcgatcctttagaattaaggaaaatactgtttatcagtgtatgtatctaatggtcagtgggagtaacgttattttctaatcttgtatattgatgatatcttgtttgcaattaacgatcttgatcttcttcatgagaccaagaaatttctctctaganaacttgaagtgaaagatatgagtgaggtaagctatgtgatagggataaaatattntgtaaatagatcacaaggattgttagacttatctcagaaagcgtatatcaacaaagtactagagagattcaagatggaaaggtgtttaacatcacctattctaatttagaaatgaaacanagttagtctcgcacaatgtcctatatatgatatggaacaaa

SEQ ID NO: 220973 - DNA, 447 bp, Glycine max
  unsure (1)..(447): unsure at all n locations
tgagatgaggaagtgtngaagggttatacttcctgcttttattgntgaccacagagtggtacctggagatatgtcgcgggggtcaggagaccttggggacgtcaggtggggtgctattgcccaaaaccaagcttgaccaatcccgacccaacccgggcatagtcggtcagtgagaacctgtgatgtacctaagcaggcgagctcctggcagtcaacagataaaaggaaaacaagaccacaaagcaaggaggcttgtggtggctggccagctgtgaattttgtgtaatatgtggatggtggcctctggtaatcgattaccaagggtgggtaatcgattacaaggcttaaaattgaggacaggaggctaagatggtctctggtaatcgattaccaaggggtgtaatcgattaccaggcttgaaaacgaagtcaggaaacttatggagcc

SEQ ID NO: 220974 - DNA, 429 bp, Glycine max
cggatccttgagtcacctgcggcatgctgcttcactttggtttataggcattttgcttaaagataacttgaagccctttttcgttcttaagtcacaaatacgcaaccttggcctctccctatcatgttgaatcttgatatcaggggctcaactatttgcaaaccttgggggtaagcttatgcttgatgagttacatacatctaagacaagagttttcctaaatctaatagatcttctctagagagctttaagtttggagtagttggatggatagaaaaggatcttgtaatgggcatccaaatgagtatgcttttcccatgtaatgggtggagatttggctacccttatacggatccaggctgattttatgaatgagtggagtgccttttcacctctaaaccttcttgtcttcttagccttttcagctta

SEQ ID NO: 220975 - DNA, 448 bp, Glycine max
taattcaaatgaatacaatattgtttaactcatggatatctattaaaagaatatcaattcttttttttctctatctcaaaaagacaaaaacacctaaaatgagcagcttagacccaaaattaaataccatggtttgaaaaaggtgcacaataccacctggaccaatcattaccactccttttaaaaaactgtgacatcatttcaataatctcaatgaaaagagatttcaaaactattattcataagataaacatgcttcaatgaaatactcacagaggactgtgacatacactagtaggtataacctattatcaactatcatgcatgaaacttgacttcaaaaagtatagggagagtatacaaccatcatgttacactaaaggtcaccataatcacataaaaaagatgacttcttttgactgcttctctaagtaaaaatcctcaacat

SEQ ID NO: 220976 - DNA, 351 bp, Glycine max
ccccccccccccaaacaccacaaaagaacatgtcctgaactgagaccggactaagcccgggagcaccaggagagaggaggttcttttgaagccaacaaatccggtcagaaacacggaaatgaagccaaactaggggaacaacaccgctgaatattgggtaataaacaagccctggatagctggaaaagaggggcatttggctctgggacaccacatgggaagagtgccattcgaagttacgaaaaccgctcgaattggggtgagagagccattctattggggcaagctctgccgaaacggcccggcagggactgaagtatagccatatgtgggtccaaaaagaagaaaaga

SEQ ID NO: 220977 - DNA, 341 bp, Glycine max
  unsure (1)..(341): unsure at all n locations
gttatgcttgacaatgcgtgggcttgaaatgtggcacgggctgcgctgggattatttgaagataatagatacaaatcagaagccaagaaatcaacactaacgtccattgactctattggtcttgggacacgacctgaactggagaagaaactgaagtacgcaggagatgtttcttccggaattatctttggaagggagcttgtaaattctcctgctaatgtgctcacaccaggttcatatgacactttgaatgtatatgatatgatatattgttcctcactcttgcagttgtttggctggcacgtggacaatctcatatctgttanggaagtgtgcttctc

SEQ ID NO: 220978 - DNA, 395 bp, Glycine max
gcttgaatgtttgggtgaactctgaaggtgttcaatgtccattggcaaataattgcagaaacaagacaaccccagaagcaatttaacaagacagcactattaagacaggttttttgtccaatgatgaaaaagtcacaaggaacaaacaaccccttccttttcaacaaccaagcacaaatttgatgactttttgcagtatattaccatcataccctccctaatattcgtaaaccaaatcatccaccaagtgacgtgtttgatttagtttattgagaaatataataatgcattgcccactgcatctgcatgaatcaattgacgcttaagttgtttaaggttaacaagaaatatcggtttgatttctggttatataaaatacaaataaatgaaagaaa

SEQ ID NO: 220979 - DNA, 404 bp, Glycine max
  unsure (1)..(404): unsure at all n locations
gacctataaaactcaacttgtgcangcgatggcgaagttgtttgcttaagaaggctataggtttggagttctaaagcaagacgacgccaatggctgtgcccgaagcatcggtgtctaggtaaaatggaatcgtaaaatctggggaagccaatatagagcttgtgtcataagtgacttcaagtggtcgaatgccttctgtgcatcggtgctccactggaacttatctcgacaaagaagcgtcattaacggtgcagcagtggcggcatagcctcgaatgaaccttctatagaatctcgtgagacccagaaaacttctgaggtctgtgggcgaggtgggcacaagccaagaaagcattgccttgattttatcggngtctggcgcgatccccaccgccgagatgacat

SEQ ID NO: 220980 - DNA, 405 bp, Glycine max
agcttgttgaaatggccatggttggatgatttaaacatacccattctgttttagggtttttgtgatgacgtttgtgatgtttatatgctgaaattacttatggaaaactgttagagatgaaaggtagagttaacctagggttagaaagtgagaatgtgatgttatgagtggaaaaagagtgaggctttgagagttggaaggttaagtctgaattctgtggtaaatggaggttaaagtgagttaatcctagcttgaaatgtcatttaggacttatgagaaagcttggactgtgctagagagaaaaacaaatgaccaaagtgaacaaagagccatttctagggcaaatttgggtgttgaagagttaaattttgattcggtgagattctaggtgtaaatccaatttga

SEQ ID NO: 220981 - DNA, 404 bp, Glycine max
atttcctaatacgcttgtgaattaggaagcatcaacaagaatcaagccaaggctattgtgcaagcaatcaatggggcaaaacaaaccaaaagattatgatgatggatatctcaaattctcacaaaggtaaacctatcactttcaaattgagctttcaaaactatcatgacatgtagaggaaaaacaaggatttcaaatcacaaaatggcaagagacttttattttcagaacaattacccattacttgaacatatcctataattcaaagaaaaacatgcaaatttaacacaacaaaactaacaaaattaaactagaacccaacaaaactaacaaaattaaactaatttaacagaactatcacaaccaaaaccaaagaacacccctccatacttaaacaacacatt

SEQ ID NO: 220982 - DNA, 479 bp, Glycine max
  unsure (1)..(479): unsure at all n locations
aagtgtcntctttgatccattaatagacttgatgttatctggagcacgtgccataattctgcaacaacaacatgatcgataaactttgaatagaaatgcacatgggagaatcaaagaaggtgcagcaaggcagcaagacatatggcagaaaacaaaggcaagcgagcaaggtagctggcaaaaaactaagggcaaaacgggaggggtcaaatangcatttcaatggcctgcttttgtacttacacatccaataaatgatccaagaaatggccaagcatggccacgacaaaccgaaaagttaattgatcagtcagaaacaaaacatgaagttggaaatgtggtaacaatgaccaacaaaggaaaaacaaacatgcataagaatgaggcaagctacggacacaagtgcataatagacatgcaagtctcagcctgagatgaaaaaatatatcagaaagaacacacaacattatatgaagaac

SEQ ID NO: 220983 - DNA, 372 bp, Glycine max
ctagctgccccaacgtcagatgataggcggatgaaggactatttttctcctgagtatgacagtcaccgctttaggagcgctggacaccactaacgcctttatgccatctttggatggacgtttccactggatcgacgcgttcaacttatggacgacgattatactgacatccaggaagacatatggcaccggcggtggacatcacttgtacctcccaggccagtttccatccaaaacttgtccttgagttttatgccaatgctttgccaacatatgatggcgtgcgtgacatgacgtactgggttatgggtcatagtattcctgttgatgcctacgctatcggccacctcctaagatattcgttggtgttgg

SEQ ID NO: 220984 - DNA, 372 bp, Glycine max
  unsure (1)..(372): unsure at all n locations
tctaaatgagcaatctgacatctgcttgataatgcaaaaaacaacaaactacggcacatgaagagggtgagaatgagggagaagcccatgcttgtgactgccattcctatacagccaagtttcccaccaacccaacaatgtcattactcagccaataacaaaccttcttcttacccaccgcccagttatccacaaaggcaatccctaaatcaaccacaaagtctgtctaccacacttccaatgacgaacaccacctttagcacaaaccaaatacaccaaccaagaaatgaatnttgcagcgagaaagcctgtagaattcatccccaataccgtgtcctatgctgacctgctcccatatttacttgataattc

SEQ ID NO: 220985 - DNA, 398 bp, Glycine max
ataaaagaggcggagaagtacaactttgaagtgtgtctcataagactttcattcatcaaaggtacaacaagtgttacacatgcctctatttatagactaggtagcttccttgagaagctttcttgagaaaactttcttgagaagcttctctgagaaaacttccttgagaaactagagcttagctacacacacccctctcataactaagctcacctccttgagaagctcccttaacaagattcctaaagaagcttgagcttaactacacatacctctgttatagctaagctcacctccttgagatgagaagctagagcttagctacacaccccctataatagctaagctcacccccatgaccaaaacatgagaatcaaaaaaagtcttttacaagacac

SEQ ID NO: 220986 - DNA, 394 bp, Glycine max
  unsure (1)..(394): unsure at all n locations
ctacattacttgttacttacccttgtctcaatattggtgtggtattgaccatcactcanaatgactctctattcatcctccgatccacaggatgacaatgcgaatgcatgcatgcttttgatttggatgtttaagtgcaacaattaaataagtgttattgtgttcaattttactttaacacttacgacatcccgttgatcgggccaaatggctctggatttttgcgcaagatctagagtgtatgttctttataagtaaaagacaccacacaggaagttaagatgccattattaatccaatactcattaatggtgtgatcatcggttaacaacgattctaacatctttgtagatcctatgagttcntggagacaattatgtattaaaccttctag

SEQ ID NO: 220987 - DNA, 268 bp, Glycine max
  unsure (1)..(268): unsure at all n locations
ttatgttaaaanacatggnacaaaaagtatgttgaattaagtgagaattattaatgaataaaagggattattgattatagaataactatatttaagaaaaagaactcaatagcttttaaagcttagtactaacttaattatataaagtttagaagatatataaaaataatgaaagaaaaggatttttaatgggtaaaaaataaggaatttatatataaaaacaatttgaaaagctttgaatagtaaaatgtttttaaaaagtagaata

SEQ ID NO: 220988 - DNA, 336 bp, Glycine max
  unsure (1)..(336): unsure at all n locations
ctatcagcntagcaattgacgagactgagcaaaaggatggtatgactatagacagcaaaatgtcaattcagaactttataacatgattataaaataggagataatatgataccgtccaatcagctccttatgtaatatttatacaacaatttatagattatcctttatttgaaaatgaaaaattacatttttctctgtcccctccaacacttccatccaaacataactgttcactaggggcatgtataatcagacaaggtaaggaacaaaaacaatactgaagatagacataatcattaattaacaaatctgaatgaagtcaaagcagaactatga

SEQ ID NO: 220989 - DNA, 415 bp, Glycine max
ttgatcatcctgctttgatgagtgagaaaactggggccaatgatgaggatgagaatgatgaaagaatccatgttgaggctgccattcctacatggccaaatttaccatcattccaacaatgtcattacttagccaatatcagcccttctcattacctaccacccgcgcattcacacaggctatccccaaattatccacaaagattgctgaccgcgcatccaatgcctaagcgcaaaccaaaacaccaacctagaaatgaactttgctgcgaaaaatcctatagaattcaccccaattcctgtgtcctatgctaacttgctcccatatcaacttgataatgcaatggtagccataaccctttccaggttccttaagctccattttctgaggattcgactctaacgcgacatgtgct

SEQ ID NO: 220990 - DNA, 348 bp, Glycine max
gcttgttaagtgtcttgctaccgattattgcttattatgatgcgtttgcttccataagtagatatcttatggtgaagctcctggagagcttgtgtttgaccaaaggtggtcatcaagtccacatagcctctagtctcttctttcttgcctgcaaagacgaggagtcaactgacatgaggatggacaatgtcaggggagacctcaagtctctaaaaagttttccaatacaggatatcatggaactaccctagacgataaggactcttgacaccatgaaagttgcaatgattatggagaccaccacgaggttgtctcggttgacaaggttgatccccttgaattccctat

SEQ ID NO: 220991 - DNA, 427 bp, Glycine max
  unsure (1)..(427): unsure at all n locations
ttgttgccacaccttataattcggagacctggtttcccgttggtttagattttccaattgggacagggatgcagacctgttttaaagaaggacaagcgtgcaaatccgctactaccatgataattntgcatgagttcttctttatattttattgtttcagttttttttttttacttagtcaataagtgattcctacacttaaagagcaaatagtttgtaatccaaggttgctggaatcttggtaacattattttttgttagaatggagatcattttttttatattttgcatataataaaatctatcagctatgcaaattttatgtttccttatgtaaaatcagtttagacaacctgtagtaagttaaattttatatactaagtcagtgttatccacactttttttcttgtatcactgtatttttcac

SEQ ID NO: 220992 - DNA, 358 bp, Glycine max
  unsure (1)..(358): unsure at all n locations
gaataatgctcaacatctcaatctcctatttatagaaatgctcaacgaaatagtttctctcttgttactctataacgaaggatatgagtgatgcaagttatatgattcggatagaaatattctgaaatatatcataacggatagttaatcttgtcttacaaagcatatattaatacagtactatagagattaagatggaaaagtgcttaacattcacctttccaattcataatagagacaaatttagtcccacacaatgtcctanatatgatctggaacaataacacatggaaataatcccgtatgcactcgttgttgtgagtattatgcatgctcaatctgtactcgaccaaacata

SEQ ID NO: 220993 - DNA, 471 bp, Glycine max
  unsure (1)..(471): unsure at all n locations
acacaaaaactcagcttctagatattcgaacgaaaatatacgatctcaatcttatcatacaaacgnccacacagacttagggtactttgatttaactcatgtatctaatgataaactatttgtgagaaggccaccagtggtggtgcatacaaatattcatacctcttcaaggaaagactatgaatcattcttgacaatgaagatgaaatggatttgtttgctgcaggagcaaattttcttcttgaggaacgatcctaacacacattctaaattcttcattttattggtacaaaacatacatcctctcatttttaaatttcaaattacacatattatgagattcagattcatttttcctccattcattctacaaatagtctttgatgtaaaacattagcatatgggttgaactggaagctttataatacacacatcatggtatgaactacggtgctgaaagcttgaagactg

SEQ ID NO: 220994 - DNA, 320 bp, Glycine max
cacggaccataaaactaagcttacatatatcggacgaagtgaggaggagatgttgtttttatccgctaacgatacagatacattcgttagagtagttgaccatctgcatgaagcagaagctcatatggacgactttgcatgtgaggaatagtcagataactgacatggctctcattttaaggtgaaacataacatttaatttgcttcatattctaccttgcatcaaactctgggatagaagctctctgtgaccaaccacaatatgtgattttccgacgaaaaagatgcttcacatgaaacatttgttccggagtgtaagc

SEQ ID NO: 220995 - DNA, 415 bp, Glycine max
  unsure (1)..(415): unsure at all n locations
acttgctttctcacacctatcgttgttccattctcgacatcggacaacatttgtccatgcttgggggcttgaaaaactcgtcactctcctacttgtcaagactgccacctcccgcatcacgcaatctcatttgacactggacaacctctttcgctcgtaagccggctcatagcttgtgggacttatgtactgaccagagttcacanaatacacgtgacatcttccatggtactttgagacacacgtataaccctccatgttagccttaacactagagcacgggcacctcacccttaagagcacgctttccgactgatangtatctcctactcttattgattaatataaagcatcccttatctttggacggattaattatctcaaagcaccattttctgtagtataatatctacta

SEQ ID NO: 220996 - DNA, 400 bp, Glycine max
acacaaaaactcactttgggcactgcaaacgctgcgagacttattgttccatgcttctactcgccgcagagataactgcgccaactgccttgatataaatgcatcttttctttggtatccaagacttgcatacagacgagctattcaatatatatatatgagctcatcacttgcatcgattaaagatttatcaccatctgcagtagtgggcaacaacatccaccacctccttggacaactttctacttgttgagagaatttatattaaattggttctaaactgattctaataaaacatattcttattgtattactgcacctcagatcacttaaaattggaaacacaatggcatagactattaacataataagagtcagcattgtttctaaatcaggagca

SEQ ID NO: 220997 - DNA, 87 bp, Glycine max
  unsure (1)..(87): unsure at all n locations
ctttacaagcttacagaaatctgtgtcttattcatggnagaagtctctgcagaggccattgcctccctcgcccagtattatgatcag

SEQ ID NO: 220998 - DNA, 443 bp, Glycine max
cctttagatctttccctatagtcacaaatcaatgattggggaaagatgtgacctttggctatcccaacgaagattcaaaaatcaaaggacataatcattgcgcctttttaaaagatacgcaaaaatatttaatgtgtttgaaccaacgtaatagttgacaggatgtcgcttcgaatactccaccatttagactcgacattgattgaataaaattccctttatgactaggtgaaaaacttggctaaagaagatatccctctttgactcaactacaatcaaactgatgaataatactcagacttggctggtagatggcaacgttagagcagaggacttaagattatttttcccaaagctccttcaaccaccttcatagcttgggggacatatgtactacttggactcggcaagcctctatactcagtggtcgcccaagtagtcta

SEQ ID NO: 220999 - DNA, 485 bp, Glycine max
ctaagcttagaatccagctaagcttagaagataatatcatattctattttgtttgtctagaacagtccattgccaattggagagttactttttaatcttccttctagtgaccaaatgatccacttccataagcaagctgcttactaaaattcctttatgttgaagaggttggaagtaactcttgttatagagtgaaccaatattaaactccatgtgctttctctctctcatccttcattcttttagtttgcggacaacctttgcaaaataattttaaatgttagaaaaccttcttattgtgaaaagtattcaaaaatacacatacaattcaaccacttcttgtacaattcaaccacttcttgtatgttctctttgtgtttcatgtggctaccacattagactggcattaatacttaataactttttagttatgtcaagacattttgtgacagttcttttgacgctagttataaattattcgactg

SEQ ID NO: 221000 - DNA, 328 bp, Glycine max
  unsure (1)..(328): unsure at all n locations
aatctttgatgccatattctgacttcatcttcttttgaggatagacatgtggaggagtagctgtgttcttgaggtgtccataggtagcagttgtcctttgatctgctgcccttcattagaacttcactcttctcatttgtcaccaagcattctgactttgtgaagtttacattgaatccttcatcacacagctgactgatgcntgatcaagtttgcagcagtcccttcaccagcagtacttttgtcagactagggaagtcattatgaactagctntcccattccaatgatctttcttttagagccatcctctaatgtcacataactag

SEQ ID NO: 221001 - DNA, 432 bp, Glycine max
  unsure (1)..(432): unsure at all n locations
atgacatttcaagctaggattaactcactttatcctccatttaccacagaattcagacttaaccttccaaccctcaaagcctcactctttttccactcataacaccacattctcactttccaaccctaggttaactctacatttcatctctaacagttttccatgggcaatttcagcatacaaacatcacaaacatcatcacaaaaccctaaaacagaatgggtatgtctaactcatccaaacatggcaatttcaacaagctttcaacaagtntcttcacaaataactatcatgaagcagaaaactagcaagactacccatcatatctcccanaaccccatacccacgaaattcaagagagaaagaagtccacccaaacctcgaatttttagtcccactcgtagccacgcacttcacgaacccgaaaatgcc

SEQ ID NO: 221002 - DNA, 390 bp, Glycine max
  unsure (1)..(390): unsure at all n locations
tctcccatttctcttaatatgaaatttttcctgtgaaatgggaacctcccaatgaaattaccctttgcttacgtcatgttcactgatgatcgaacattatacaacctaggaaggcgcatatttgttgtctacctatattntctctctgacaagcaagtatttcatatacttaaaagggccgggccatgttcaaatttcagatcttcactttntaaaaagatatttgattggaagtagaattgttgttcttttaataatacatgtgaaattactggaataaacagaatatcatatgacagttggggaacattacccacttagattcttcatttatgaagtcaattagtacaacttattaaaaaaagatcttaacattgcatgcttaaaatt

SEQ ID NO: 221003 - DNA, 445 bp, Glycine max
  unsure (1)..(445): unsure at all n locations
tcaattattctgcatagaanagaaatataggctgtgggaccgttcttattctcattgaaggatggaaatggattgttacactttggtatatgaccaagtgaaactttcctgatttaagatcgtagagtgatgccatgggtttgtcaatcccactaaaacttgatgacatgggtcgatcccgaaagagtttatataacaaagactacccttggattcataaggaatcctaaggggtctgtacgagcgactaacatcagatatatcctactatcacaattgtctttaggcaattttcacgagctcttggtcgaatgagctttcttctcaaatgtgcaagtgcaaaccttgaggcttttttttttgtgcgtaatcacaagcgtgtgtaggttctattccaaaatccaaacctaaaagcaaaattaatcattccttgatccacttgggc

SEQ ID NO: 221004 - DNA, 312 bp, Glycine max
  unsure (1)..(312): unsure at all n locations
ggacgagattctatagggtaatttgaagataaagatcattgtaaacacgcgtagcattttgtgctagagaaatgattatttggactcaccaggttcactagagcagacttggctataactctttcataccgctcaaagtaacaccaaacttcattatcacattgatatgaagcacatgaccacatctctcacgtttattatagtacagacattattttcacatgaatggatgctcnttttaatatcaccacatgagctttattagatatatgcttcaaagcttaattatacaaaacaacatgtcatttttat

SEQ ID NO: 221005 - DNA, 446 bp, Glycine max
  unsure (1)..(446): unsure at all n locations
natactcngagaancnctcangtctcgaagatgaaagatgttcttatgtaacatngagagaaacaacacagatgaaatctcacatatataaaaagttcgaactaataaaaaaaacagtactgtattattcataagcaccatctacattgaaaagagaattttattcttattgaaattagtaatatattaagacgttgaatataaagattagaaaatgagtcaaaatgtatcaaaactcaaactaaaaagggacaatcggataaaccaatatttaagaggaaggaaaaggtgagtttgtttaaactttaaaaagtaattttaaaataagggaatgctgaaagaaagtctttaaataagcagaaatgattgcttctgaaaaaatagaatagccatttagataatttagacaaccatccaaaaaatgaattatattattaataaagttt

SEQ ID NO: 221006 - DNA, 306 bp, Glycine max
ccacaggggctctgtaacgaatgtccggtttacatgctcgacttgcattcgattgctatgattacctataacttatgttaaagataatttattatggaaatgagttaaatagatttttaatgactgtataataattattttagcgtggaaatctttattactgaaaaattttttgacgctgaataaatatgtcttctgctggattaaaaatttaaaattttttggtacaataattttagcaattaaaatggtactcgccaatggcttacccaacaggtataaaaatatcaccaataaaatttttga

SEQ ID NO: 221007 - DNA, 420 bp, Glycine max
tatatactcttgcataatatcgattcttcattcaaacatcataattcacaacaatactcctcaatgtcaataagagtggaggatttgatgcaacaccaaagcttatagtgaagacgtgccatctttattcttgtcagacaactaaatcttttatgtattaatgacacattagaactgattacttcctatactaatactgagataccctgatcctcaagcttcccaattcaaaaagcatattcttgatttccatcatgagtatcatagtgagactcaatagttacttacaccaaatgagtgccacaaatgcctaatagtcatcatccgcttattttcctacgtctttacaccttttatacattataactttgatatctttgtcatcatccacttctcaccaatctctctatagaatataaa

SEQ ID NO: 221008 - DNA, 374 bp, Glycine max
  unsure (1)..(374): unsure at all n locations
aacaaagtactattgacactttctagtacgttgatgtcaccaatgctgctatggtatatgttgcgacaatcctcttaataccttattgataccttataganaggattcgtctgacatgcggtccatatctgacaccctatctctactcgcaagccaatctatcatcttttcatttgacatgctaacatgcacatggtgctatggctggacgtcagtgtacgaaaatgtcactaatttttgataaataaaagcgccttccaggagtgtccgctgcatacaaatagttctgtataactatttctaggcctaaatgatatcaatataaatgtatacataatatatggaatctgtaccaatttctacaccaattcttt

SEQ ID NO: 221009 - DNA, 256 bp, Glycine max
  unsure (1)..(256): unsure at all n locations
caaaaacagacagatgcttgtatacaatgaaggagaaaataatactgatattacttgctttgcaaggaagctgactacattatttgtagntatttacaaggataatcaactntggctaactaactaaagcacaactaacctaatcaaactatctaatagtagttaatacaaaatcacgagttagttatacaacttaggtttgtggcttcaacaaaaaacctacggttcacaaatcgcatgaaaaagcaaggattat

SEQ ID NO: 221010 - DNA, 332 bp, Glycine max
tagttcttacgctgtcttgcggactatctctttgtttaaactaacctcgatgacgccatctttcggtgtgttagattcattttaatacgaaactaatattgaagcatcattctgggagaattatgttggaaaactaatctatgtcacaattattatataatttatcctattgaaatcataaaataaactatatttaaaaatattacatatgtttaatatttcatgaatcttcattctaatatctccctttatcctccgtaagacttaaccaccaatacctattctaacatctacttattaggttctgacccgctttaacacgagagattcat

SEQ ID NO: 221011 - DNA, 386 bp, Glycine max
  unsure (1)..(386): unsure at all n locations
agctnntgatttatatgtatacagggaaataatatatatattaatatggattntatatggctacagggaaaactttctatttaatcaaatatatttagttgctttgccctgttggagctagttgttntctcttttgggctttatccaatagttataataattggagtgctgctaggtgcacttaacagttttgctggtgcacccagcaattgttgggaaaagaccttctagtccttaccatttttgtaaaaaaaataactattgtcactctcttgccacgccgcgagcttcttcattcttctacttcttcttgagttactgcatcttcttcattcttgccggattgttgtcgtgaacctcctcagacctcccaagtgaacttcgca

SEQ ID NO: 221012 - DNA, 286 bp, Glycine max
agtacgacagtcaccgctttaggagcgctgtacaccatcagcgcttcgaatccatcaagggatggtcgtttctccgggagcgacgcgtccagctcagggacgacgagtatactgattttcatgaggaaatatggcgccggcggtgggcaccactggttactcctatggccaagtttgatccagaaatagtccttgagttttatgccaatgcttggccaacaaaggagggcgtgcgtgacatgacgtcctgggttatgggtcaaaggatctccgtcgatgccgacgc

SEQ ID NO: 221013 - DNA, 361 bp, Glycine max
  unsure (1)..(361): unsure at all n locations
ctntggtagacctcgagcgggcatctatctatgtctangtctaccgncactaatctcgaccatttccgagaatgatatttttttgccaagatgggctaatgtcttcctggccgaataaatgggaaaatgccatttttctgccgaaacgaatagccggttgggctctgcacaactaaacctagctcgacctacattttaaatttcttatgctacactaaaacaagataacttcctgtgccgtattaaaacaaaaaacattacttgacagcgagcgttttgaaaaacaaatagcgctacgtccgctgaaaaatatcagacggtgctttataccacccatgtcagttttgagttttaattttat

SEQ ID NO: 221014 - DNA, 327 bp, Glycine max
tccaactggccatgaatcaaaaatctacacctgtcgccagactccgtggtttatgctcctctgctgaccacctcataaacactttgcccttctgtgcagcaattgaacagcctgaatcttatgctgcaaataactacaatagaccttcttaacctcagcagcaaaatcagccacaacagaacaattatgacttctccagcaacatgtacaatccctggtggaggaatcattccaaccttagatggtcgaattcttcacaacaacaacaacaacaacaacaaccttattttcagagtgttgctggccgcagccaaccatatgttcctt

SEQ ID NO: 221015 - DNA, 202 bp, Glycine max
gattctatcccatgtttgctagaatgaataatgtcgattgatcaatacttcaacaccctatcatggaggaaatatgatgaatgcaccaatgattgcttatgctatgcatgacacaaatgcattttacaaacacgacaagtcggaagatcactttttcttacccacatagcattgagcatcatggttcatttatggtcattac

SEQ ID NO: 221016 - DNA, 260 bp, Glycine max
tatcttgcatatattctatcttgatctcgactcagaataaattgcacatcaaaagggaaaggaaaccaaacttgatttatgttgagagcccggacatcccttcagttattcaaacaaattcccaaatcatatcctcctccagacattcttgtgattatgaaggaattccaagttgaaacagcaagaaggttcgcccattaatttaaaccaaaatgttttaccagagaatactctctgtaatccactccacaagatgtatt

SEQ ID NO: 221017 - DNA, 413 bp, Glycine max
  unsure (1)..(413): unsure at all n locations
tggcttatctactgagttcaattaaattgtgcacggggttggtcttatttggcaaccatgagacagattgctctgtattagctgtatcaatgaaggtgggtaagttaagttttgtgcctgaacctctggccacgcaacacttgagaaatattgcggcaccaaagtacttgagtaatcttccaaggtcactcgacgaggatgctcttcagccatgacttcggcttcagattctactatntgagattccctggatgtaggtgaattacaagatgatgactattagtcggttaatacgactaacttttctgtaaaaaagctgagtaaattgtattcgactccttccattgacagatcattctgtagtatcgtaagtacttttgtaaatttaggtaataaggacttagtatcccact

SEQ ID NO: 221018 - DNA, 162 bp, Glycine max
gcttgcttgcctctagttgacaaaggtacggataatctttgggtatctccgaatgccacctgacttgccgcctttaaatgacaaaaggctgaggctaatatagtcttgatcaataagctcgcttgcctttaatcgacaaaggtgcagataaccctttggtat

SEQ ID NO: 221019 - DNA, 420 bp, Glycine max
  unsure (1)..(420): unsure at all n locations
acctccaatctctaatggagagggttaccactactggaaaacccgaatgcannattttatcgaggcaatagatctaaatatctgggaagccatagaaatagggccttatatacccaccacagtagaaagagtttcaatagatggtagttcatcaagtgaaagcataaccatagaaaaacctatagatagatggtctgaagaggatagaaaacgagtacaatacaacctaaaagccaaaaacataataacatctgccctaggaatggatgaatatttcagagtttcaaattgcaagagtgctaatgaaatgtgggacactcttcgattaacacatgaaggaactacagatgttaaaagatctatgataaatgcactaactcatgagtatgaattatttagaatgaatacaaatgaagatat

SEQ ID NO: 221020 - DNA, 311 bp, Glycine max
cttgacttataccattgctgcccaagttggatggtcttgcacgtgacaatccttataagcatcttgaggagttccatattgtttgcttcaccatgaagcccctgatgtccagaagatcatatctttctaaaggcttttccttattctctggaggaagtggtcaaagattggctatactaccttgctcctaggtgtattttcagttgggatgaccttaagagggtgtgctcttggagaaattcttccctgcatctaggaccactgccatcagaaaagacatttcatgcatcaggccacttggtggagaaagc

SEQ ID NO: 221021 - DNA, 430 bp, Glycine max
  unsure (1)..(430): unsure at all n locations
ctaagcttaacctagaactanaattaggatacatacccccatttattgtgatttaagggttgagaagtgaaaatgagaatggagtaaatttggagcaaactctcacctcacacaagtctataacatcaatctacacttgctcaaactggtgttacgcctaaaattctgtcgaatcaaaatttgactcctcaacacccaattttaccctagaaatggctcttgccttcactttggtcatttgtttttctctcttgcacagcccaaactttctcataagtcataaatgacatttcaaactaggattaactccctttaacctccaaataccactaaattcagatttggccttccaactctcaaagcttcactcttgttccactcataacaccatattcttactttctaaccctanggtaaccctacccttcat

SEQ ID NO: 221022 - DNA, 468 bp, Glycine max
  unsure (1)..(468): unsure at all n locations
agctngaagagctcanccattggacaatcaanaggtgattgactgaatngagactctagagcatgagtcaattcagaccaagtagacaccagagataatttctgtgacatctggaaccatgccattacatccttatcnaaatgcatcgccacaatatccactctagacgtatcaggagtattatgataagtaaaaaatttctccgccttgaagatccactccatcaccggtggttgttcatcaaagtgaggaaatccaagtaagatctctttacaggcaaagaagcattaatcgatatcatcggggagccattgtttggagaacttccaggaggttgagaagcattctgcaataatagaatcatcgcctaaccgaattgatccatagaattctagatccgaaacatcttatncatttgctcttggtaacacatatccactcgttaaccgagacgacgaatatcatccg

SEQ ID NO: 221023 - DNA, 402 bp, Glycine max
aactccagaaacgtacactgagtagtaattaataaggatgaagaagaaaaaaagagttaaaaaatgtgcattgaatacgaattaaacgaagaagaggaaggaaagcaatacataatcttcataataacgttcaccaccgagtaataaagatgcagaaataaaaagagtaaaaaaaatagaatacgaatgaaacgcagaaggagaagaagataacaaatagcaatgcataaacttcatactaacgttcaccgactcaattaatgaatatgcaagagtaaaaaaatggaaaattgaatagctcagttacaaacgcaggaagtgcgcgaaaagaagaagaaaccgacacagtgaaatatatggataaaggagaaaaaatttacgttttcatggcaacgcatgcag

SEQ ID NO: 221024 - DNA, 361 bp, Glycine max
taaaaataaaactgacctatgtgggaggggatcggcgcatgggattgaaatctgatggagaatggagaaagacggtcagggatatggtttcgttagagagagaaagaacgaatgggagacatagagagagagggtttgtttgtgtctttggggtcgaaaaagagatgagattagaaaattcaattcaaccgcgtgggttctttggattctctctcttttcttaaattattactctctctatctatcttgttgcggcgggggtttttttttttcttgcaggcggcatgcctacgaccgcgttaaaggaacccctttcctattcttctactgctactgttaattgaccctcccttccatttcc

SEQ ID NO: 221025 - DNA, 404 bp, Glycine max
cttggcttattaactggcttggcttgcggtccgctcttattagactttcgacacctactgtacgttgatttcaccaatgctgttatgggaatgttgcgacaatcctttaaaaccttattgatacattctgagaggttccttgtcatgtggccatatcgacgtccttctctatcgtaagccatcgtccatttttcctttgagatgcgatcaatccatgttgctatggctggactcacgtcaccaaatttttctaaattttgatcaaaaaatgtgcttgcatggagtggtagctgcctaaaattacttatgaataacacatttaagtataaatgaaagtcaaataaacgtggacccccaatatgaaatcttcccaattccttaacatttctttgtgtttggcatta

SEQ ID NO: 221026 - DNA, 244 bp, Glycine max
tcagctgatttaccattaaaaatatttgggtgtaatgcttttgttcatgaacataagcagatcagaatacttgacccacgtgctataaaatggtttcattggtactcttcaaccccaaaacgattataatgtttttaccaaaatcaaaatatttttggtaagatggatgtaccttttttgaaaccaacctgttatgacattcatcttcggaagaagatcaaaggaagattatattggccttatt

SEQ ID NO: 221027 - DNA, 420 bp, Glycine max
  unsure (1)..(420): unsure at all n locations
cttaagactctaaaatggaacatagcaaaatctctctgttcatccagcaagcatgtcctgaattgtttatcacaattcaatgatatattcttacccctttcaaatgtatgcctgacatatcattcctctctattcctcaaaataataccacatgtgaatgtgctaacccagtttttctacactagccagngaatgaactgctgactaagtttcctttcctgccaagaactatgtatttttttttatctgatattacctggaaaacgaaaacaaaagaaagatatatgatcgggaattccagggtgaagctggagattgataggtaaatcctattattaagtacatagtggataacttacatagtttgggcgccctttggggaggctttgatttttcttttataaattgctaaactaaact

SEQ ID NO: 221028 - DNA, 117 bp, Glycine max
  unsure (1)..(117): unsure at all n locations
gcatgcagcttctaagaacaaagatacgaccctgctattaanaaagaattgcactattctgaccaaccaactatatgagaggacaaaaatgaaaggttgtaaaattgaattgtaaag

SEQ ID NO: 221029 - DNA, 347 bp, Glycine max
  unsure (1)..(347): unsure at all n locations
tcttttcttcagtananaagaaagagcttggctctacggtttattgggaatcgacaatttttcattttttagggggaatatgcagagttgatgaggagaatgcgtgcctaccaccaaaaggacttagtttaaaaattaatcacgtgactaagtctattaatatttaaaatgaacaacaaaaaatctacactcttaaaatacactcatctaaagctaaaactaagtcactcataagtcatacccaaacatatcccgcatgctccaaatcttgagccgcatcggcaaactacccggaattgggcaataacttggccgaagtggtacatgttcattaaaaaaaatactta

SEQ ID NO: 221030 - DNA, 367 bp, Glycine max
  unsure (1)..(367): unsure at all n locations
tgagattctgcatatttatgtgcattcaattgccttgagtttgacagaggaataccataagacacaagttttggtgatgtacatgtataagttaattaatggtggtgataagtggatttttctgaggaagtttttactttttgttgggtgttatagntacctgacaaatcaaattttattggcaattgttgtttcatgcgggatattaacaatgtgtctcatttatattttaataaatagagagaggacatagataagttctccctccattccaaaactatagatgttcaaggttagtgcacatccattaaaatatattatttgatataagtttagactacaatactcctatttaatcatgttaagt

SEQ ID NO: 221031 - DNA, 458 bp, Glycine max
  unsure (1)..(458): unsure at all n locations
tcagcanannncctaacacaagtggagagccctggcctatatattgaagctgcnatcacgggaagttaacgtgatgtgaaattcatacaaaaccagatatcccatgcatgggtgttaaactctcgatatagatcgtaaaatcttacgattttacgattctactaaaggttgacgagttcaatcggaagtaaaatcgaaatcggagtatactcgtccgactttacgtagactcggacgaagttgggtagactcgccaggttgctccgagtccacgagtttatgaaaatccaaaacggctgcgtacaacaacccttcgataatgactcttgcgactctttctactcactcactctaccttgttcaagctactaacccccccaaagtgaccctcgttgagctactcgccgccgtcgtggttggtcgctataagctgccatgcctgcattgcttgactgctg

SEQ ID NO: 221032 - DNA, 345 bp, Glycine max
  unsure (1)..(345): unsure at all n locations
tatccttagagacacctcccgcatgcagtctatgnaactgtgtgtggtgcggttctcttttttcttatatataancggaaaagatttctatttaaactacgacaagtatatctcttgaggaaaaataaatcctcattattaatatttatttaatgatcactatatactcgaacatcttgaacacactgtttgcaacaagaatatctctgtctatcttatacttttaatatcaactgaaatatctaacataccctcaagctattacgaagactctcaagtaaagttatcacagaaatattcacatgactccttaatatgtcagtttttatattttggtaccatatt

SEQ ID NO: 221033 - DNA, 402 bp, Glycine max
  unsure (1)..(402): unsure at all n locations
ntggnatntcacggattgaagacacgagaggcggcctattgtttttgntgttganncngcacgatggacaagctctgatgcttgcttcggacttctgcaagaacattgaaaaaatcgatgttggtcgaatatctcatagaacttatgcaccattgttgcacctacattcatgttgcccctaaatatatgtatcgactaatgaatttcatacgtggttagttagatttaactttctagactatattgtcattagctgtaatggtaatgtattacattctcctagccgacgcttttgcacaccttcaacttgggggaggggttcaaaatttagacttccattgctagtaccagcttaatattacttagatcttaccagtatgattcgttcttagctctcttttc

SEQ ID NO: 221034 - DNA, 382 bp, Glycine max
atgcaagctctatgtgctttcaatgagagagtttaatgtcttcaaacatattggcaatttagcgcatatttggtttgttgtagaaaatgttgtagcacgtgttccaatgttaatcctacagatataagcaaaattaatgcaaatgcaagagttatgatccattggtaaaattactttttcctcaaatgttattgtacaactacgagccaaacatactcttagtttgtctaaaacagcaatgacatggaaattcaatgtacctatgaattgtcatgtaatatcataaagtgcacacatgtaggcacattcaatgaatttttccacagaagatctcttgaagaggaggtgtgtattccaaaatttgatggggtgccattcaact

SEQ ID NO: 221035 - DNA, 366 bp, Glycine max
aatctttgagaaactattattattattattgtttactgtataaaattagaaactgttgctagtgtttgcaaaatgaaggtcgaagggaaccaccaaatgggactttgatttcctttgagactaatgcatgctagattgaaatcagaggataagggtatcccaattcttattcaccaaatagcaattgttatgatttgaactttgaagttatgcttgttatcttatttgaattgggggaagaaggtcttgaatctgattgattgtgaattaaatatgtgttattttataatactcacgaagtgaagactgaaaatcgattatgttatatcaagctggttttttcttaataccaacttttggttttta

SEQ ID NO: 221036 - DNA, 409 bp, Glycine max
  unsure (1)..(409): unsure at all n locations
agctntgaatgaggctgattaatctgctgctcatgttcaacaagattcggtggagaataatttatctcagcctcatttgtcacaagatagtgattaggagttgatggtaaatatttgtcacaacaaagtagttntatcttaacctaattggttgcagcactccatttttatatattacaattattcatgtttggcatttgcatgtaggtccctgcaactattattgttccaccaataacaaggaataagctaactataacaagagacaaacaaaggaaggttgctgataaagatgatgcaatataaagaaaaatgaagacccattctttgttgcattctgatattaagaagtgtagttgtatatttgaaagcttcactggcatgtgaaatgatgtaacattatggttac

SEQ ID NO: 221037 - DNA, 347 bp, Glycine max
  unsure (1)..(347): unsure at all n locations
tctacatgaagcaaccagctcgcctgggcatgcctgttactttatgcttaagccaccagctcgcctaggagagctgggcggcaagctcctccactattttggctataaaagggcatggaaggctgaaggaaggggttcaacaccctgngcaagcatatttcacttaaggcgcttttgtaacgtttccgtgacaaattctttgaacgttcttcaccgttcttcatcgttcttcgttcttcttccgcttagtgcttgcttttaaggaatttgaattgatttatggacccttacgggtcctctatattgttttgtgcatcttcatctccttcttcgatcatcagtgatct

SEQ ID NO: 221038 - DNA, 226 bp, Glycine max
  unsure (1)..(226): unsure at all n locations
agcttctggtntcaattacgagcgtctcgatatattatgggactgaatcttacatccgagtcaaaagttaatttcgtttgaatntgcttagagcttatgttttcaatttcgagcgtctcgatatactacgggacacaatcggacatccgagtaaaaagatattgtcgcttgaattttctcacagctcctattttcaattacgagcgtctcgatatattacgggact

SEQ ID NO: 221039 - DNA, 431 bp, Glycine max
tatatcgagacgctcgtaattgaaaacagaagctctgagcaaattcaaacgacaataacttttgactcggatgtccgattgtgtcctgtagtatatcgagacgctcgaaattgaaaactgaagctttgagaaaaatcaaacgacaataacttttttctcggatgtccgattgagtcccataatatgtcaagacgctcgaaattgaaaacagaagctctgagcaaattcaaacgacaataactttttactcggatgtccgattgtgtcccgtagtatatcgagacgctcgaaattgaaaactgaagctctgagataaataaaacgacaataactttttactcggatgtccgatagagtcccgtaatatatcgagatgctcgtaattgaacatagaagctttgagcaaattcaaacgacaataactttttatt

SEQ ID NO: 221040 - DNA, 73 bp, Glycine max
ctctctaatttggaatgcttctatcataaggagttgattgtaatgcttttatcatgaggagtttaattctaat

SEQ ID NO: 221041 - DNA, 495 bp, Glycine max
  unsure (1)..(495): unsure at all n locations
ctaagcttattccttnntactcatatgtccaagtctctgatgccacatggttgtattattgacagcctcagtaactgctaccatatcctcatctgcaatcatgtaaagagatcctcgcttctttccacgagccacaatgagattgccttttgttaccttccaagctccatctccaaaagtggtgtgatgtccctcatcatccaactaccctatagatattaaatttctctttaaggcaagaatatgtctgacattgtgcaatgtccgtagggatccactggaggtcttgatgttgatatcacctcttccgacaatgttaagagattttccatctgcaaggtaaacttttccaaatcttccagaaacatagttagacaataaatctttagagggagtagtgtggaacgacgcacctgagtccatgatccatgaatcaataggactattccaactgcaaattaatgcatcatcaagntcatcaagtgctgcatttgc

SEQ ID NO: 221042 - DNA, 409 bp, Glycine max
  unsure (1)..(409): unsure at all n locations
agctngatcaaaacaattatttaatcattccaatctatctcaatcatacaatttctcattcaaattattctctaacactcattttataccaaacaatccactacatatcattttcaatcaattcattcttcaaacatgcttttggtacaagaaaacaactcaaagtgctgaaatttaaagaactaaaacataaaccaaactaaatactgataaactaaaatgttcatgctttgcagaaattaaactaaacacaatttaaacatcttgctcatcctaaggctgatcttcattaagatctagtgctggagctgctgatgaatcttggataggctactcaggctctgtgactagtgtagctggttgggtctccttaggaataggtgcaggagatgaatcangtatctaatct

SEQ ID NO: 221043 - DNA, 473 bp, Glycine max
  unsure (1)..(473): unsure at all n locations
ctaagctgcctgacggtagcgccacttgctttgaagtttcctttgaatcatgctaagtgcgtctgagtgctaagcccttgttgttgttgagctaagcaccctactgcgctaagctcaactctctcactgtcttttaagttttgtagtaaggctaagcgcgccttgtgcgctaagcctgagtttcgttctgttgaggctgagctaagcgcgccatgctgcgctaagctccaactctcttcggttttgacaattgtagacttaggctaagctcagctgtgcactaagcctattctgcagaaaaaatattttctgtgtctttgagctaaacgctagtctcctgcgcttagcgcctgagtaaaatttcataaggcgcgctatgctcagcctgctgcgctaagcgcccaatcaaaatttcaaatttatttttctattnttgtgaaaataacctgtactaatctttggggtttggctta

SEQ ID NO: 221044 - DNA, 403 bp, Glycine max
  unsure (1)..(403): unsure at all n locations
acaagatgaacttctttgaagaaatgccttgtaaatcctctaagagatctgttgaaatgtgtaattttatctcccacaagagtcacactagggaaacaacaagatgagtatttataataaaaaaagttataaccgccataatcgattatcaaaacttggtaatcggctatcttgtttatatacctttgctatgcatttatagatagttgtaatcgattaaaataataagaaattgattatttcaaccacatacaataattttctgattgcaataagatataatcaattgtaagaacttgctcattgattatcctgcctacaanttatcatattngcctttagtatgttgcagtaatcgattgcaacaatgtggtgatcgatccattcacacacagagagaaaa

SEQ ID NO: 221045 - DNA, 327 bp, Glycine max
cataataactctacctcttgtgttgagtatttaaagatacaaaggaaaaaatccaaacaaagaaagaaatggaagaaggatatgctaccaacaaacaatctttgttcaaaggaatcaaatatggctgctagaaggaaatgatgattgcatattcttttagttattgtacattgatatatgggttgtagtagaaaatggaaatcatattccatatgatctcgagttaaataagatcccaaccagtgaatggatggaggagtaaaaacaaagatttatgctcaactccaatgctcacaatgcattgttgtgtgctttatctgaagagga

SEQ ID NO: 221046 - DNA, 426 bp, Glycine max
cagctcgatcatgtcatctaccaacttctggcgcaacgccaaggtttattttttttttttgtgctcgccaagaagaaaaatatatagtgcatttaactaacgggacgtttggcacgaaagcactctctcatgttgggaaatcaaaatcttgagaacatattcttgaatcttagacaattcctgaaataaaaaattatgaatttttatcgataatttaatatttacccatataatttaataaaaaacaaatcgatgttcctattatagtaaaagacaaattaaattcgaaaaagtcagattcttatttcttattattagagagtctttgcgagaaattaagttctcaactcataatttctgagaaactaaacttttcgtttactaaatgactcccttgagttttaaacctatacccacacccccttc

SEQ ID NO: 221047 - DNA, 363 bp, Glycine max
cggatctctttgtgtcctgcagtatatcgacatgcttgaaattaaaagcagacgctatgagcaaaatcaaacgacaataatttttaattcggatgtccgattgagtcctgtaatatatcgagacgctcgaaactgaaaacagaagctctcagcatattcaaacaacaataaccttttactcggatgtccgattgtgtcccgtaatatatcgagtcgctcgaaattcagaataaaagctctgagaaaaatcaaacgacaataactttttattcaaatgtctgaatgaatcccgtcatatatcgagatcctcggaattgataacggaagctcgtagcaaattctaacgacaataacttttaactc

SEQ ID NO: 221048 - DNA, 199 bp, Glycine max
ttcagaaaattagagtttatctctgttatcttaaagagagtgattctcctaaattcttgagtgattcaagaacaccctggttgtattaaaggactttcacaacctttgtgttgtgcccctgctggaaaaaggagacattcttcctttatcttcaccctctggtctttaaaacacaattcacaaaattccctctggccaa

SEQ ID NO: 221049 - DNA, 394 bp, Glycine max
  unsure (1)..(394): unsure at all n locations
atcgggaatatatcgcgacgctcataatatggacttgaagctctaagaaaattgaaacgacaataactntatacacggatgtccggttgagtcccgtaatatatcgagacgctacaaaatgaaaacggaagctcttagaaaatttaaacgacaatagatatttacacggatgtctgacagagtgccgtaatatattgagacgcttcaaattgagaaaacaagctcgtaggaaattcgaacgacaatatgtttttactcggatgtccgattgagtcccgtaatataaaaagacgctcataattgagagcagaagctctgagcaatttctaaagacaataacttgttactccaatgtcctctttagtccccgaaaatattcgagatactctcaaat

SEQ ID NO: 221050 - DNA, 292 bp, Glycine max
taatgagaaggacactgcatcgcatgacgctgtgcgctatcatcacattgaagtagtgaagaccttgttatgaatggatcctgattactcctatgatgcaaataatgccgatgagactccgctttatctggcatcacaacgacaaaatcagcaagtggcggctgagatgataaactatatgatatcacccggctatggcggccccaataatataacagcattgcatgctgctgtgattaaccaagatataggtaggtaccaaacctggctatgttcatctgcgttggtattc

SEQ ID NO: 221051 - DNA, 224 bp, Glycine max
attttaataaaataaataacttcctatcccttaacgcctttctttaaactgcttctatccaaataaataattctttacttattccatgaaataaatctcattttcctcttaacaaatatcacctatatatctaacactcattctaaagttttcttcacatataaataaaccgacccattatgaaatacccatataattgacaccttgaaaaaaatcacattatc

SEQ ID NO: 221052 - DNA, 469 bp, Glycine max
  unsure (1)..(469): unsure at all n locations
catgcaagcttctgnctattagtctggatcgactaatatganttcaacaatatncttactccatggttggatggtattgttaagatatctcagctcgtttttaaagacaatgcccccccatccaccctgctgatccttataccaagactcctgcaccagcttttgatatcctttatggttgagccacaagtccagcaccctaaagggcttagggccccaataaaccacattagttttcaaaattacagggcaatggtcagaataatctctgtggagaacatgctgggatgagtcacgccatagggctagccattgatctgacactaggaatctgtcaagtctgctcttgacagaacctatgagtgattatataatanaaacactcacatgaattttatttaaattactacttttttatcattcttgatggatagtctagcattcatgagtattgactttggtttaatgg

SEQ ID NO: 221053 - DNA, 462 bp, Glycine max
  unsure (1)..(462): unsure at all n locations
agcttagtaaggtcagtatatataaggggagaacctcctaagtaagaggattgaatcattcttgaatattcactaaatatcatcaaaaactctgagtcgaactcttacttaagccgtcaagcaccttttgcagggactcccttctttcgctctttcgatcacacgcactagagacttcgacaaggaaccattagagaaaatcattcgacataagggtaagtgtctgatccatttctaataggaataacatcctttgtgcaagaataagaatcatactcattgcaattcgcagaatcggatntcatacaagtgagataagtgaagacgagagagagagagagagagaacgctgattcgaatgagaggagagacgaaatggtaaatgacttttatttctaanaaaatagataaaaatacgacatattattaaaaagtaattaataaagagatgtaaatttttat

SEQ ID NO: 221054 - DNA, 361 bp, Glycine max
  unsure (1)..(361): unsure at all n locations
aagcttttatnaaggcaccctcttggtggagaagctctttcttccatggttattccctagtggatggcgcctcctctcatctcttctgcttttctttcgctgcatctccatggtggaaaatcaccattgaaggacctcattgaagctcatagatccagtctccatagaagcttcacaagcaagcttacatcaagtggtaatcagagcacaagtgcttcaagtaggtgctccttaaacctctattaattttcagctttaccttctcctacattgttggttcttaaatattcttcaaggatctccttacatgtcttggtctaaatgttgttaacacgattctttagaatttacacccattaac

SEQ ID NO: 221055 - DNA, 364 bp, Glycine max
  unsure (1)..(364): unsure at all n locations
catgtagtgcaacatcttttgtatgggcccatgatttangcatgtgcatggcctaagacgattcatccaaagaagtaaactacatggccaatcccaattgtcaagggttccatcacagaggacctcctggctacaatcaagggggaaatttttctcaaggccaaaggtggagatcccatcatgggaataacttcaacaaggatcaaggtggcccatccatccgaccttctaatcaanggcccaacttgtatgagaggaccaccaagctagaagaccctctgactcagtttatgcaagtgtcattatcaaatcacaagagcactgagtttgccatcaagaatctagaggtgcaagtggatcaact

SEQ ID NO: 221056 - DNA, 496 bp, Glycine max
  unsure (1)..(496): unsure at all n locations
actaagctgctcgcgcaagcgctatacccctggctagttggttgaatagttcatttaagcgcacatccttgcgctaagcccaacatgttcactaaaagtgaactttgagcaatgggcttagcggagatgatgcgctaagcgccactccttctctggaaaaatttattgtagcagcgctaagcatgctgtcttgagctaagcctcatatccattctggaattgaactttcacgacttgngcttagcgacaggatgcgctaagcatcaatccctgactatnttttgaaatgcttggaagtgcacttagcgcgcttgttgcgctaagcctgaactactctctgtaagttgaagcttgattgcgcgctaagcctttcatctcaggctaaacgcatattacaaaaaaaaattgtgttgcagaaagcgttatgcgcagcctacggcgctaagccccagatcttctctggaatttgaaacttcaagttgggcttagagcgagg

SEQ ID NO: 221057 - DNA, 354 bp, Glycine max
ctgcagctgctaaaaaagactagtaggcgattttttattataagaaccttattagacactcgctcacttattttatactaaccttacatttataatgagacatttggattattgataacaactcttaattcctagataactacttatttgaagaacatctagatattcattggaagagtaccatagataagtagcaacctatagtgagaaagaatcataaattttatctatgatttgggtaaagatagcatgtcaagtggactactctgccattactatgaaattttcaaggttatccttatattccattaatggatcaaaataatcgaggttgaccaaggactatgctgtata

SEQ ID NO: 221058 - DNA, 429 bp, Glycine max
  unsure (1)..(429): unsure at all n locations
tatatcaaacatataaactcttgcaatattaaagcagatatagatagtgaaatatatatgtgtcaagtcatccattgaagatatatatgtgtcaagtcattcaaataaatacttgttgttaaaaatgtgatagagagtgctataagaatgattaataaactgatatcactttgatgtatactatttcactcaaccttagctacatccagttctcctttagtcactagtaaaggattccactaatcaaaacttgattacaaaacaagtattctaacctaccactcctggttttacaagtactcataataccacttttggtactctcttatgcccttaaacttaagaaacccaagtattgtttaacactaagcgactcttgtctntcacaaacaaaagtttgatgaatacagtattctgtaacactcatga

SEQ ID NO: 221059 - DNA, 359 bp, Glycine max
  unsure (1)..(359): unsure at all n locations
atttcttcaagaacaagccttgcctcacaatgaaaggtttcaagtcattcaaggcacatgtaatcaattaccaatacatgtaatcgantaccaatggttngaaagtgtgtaatcgattacacatcatgtaatcgattaccagagactctgaacgttgggaattcaaattttaaatgaagggtcacaactgtgtaatcgattacactaattatgtaatcgattaccagagaggattttcaaggaatatcgccaacagtcacatcttatcatttgaattttgaatggccatcaaaggcctatatatatgtgtgacttgngacaaaattgaagagagagttctgctggtccaaaatgtctta

SEQ ID NO: 221060 - DNA, 448 bp, Glycine max
  unsure (1)..(448): unsure at all n locations
acttcctgctgttattgttgactccacagtggtatctggagatatgtncgcggggtcacgagaccttgtggacgtcaggtggggtgctattgcccaaaaccaagcttgaccaatcccgaccgaacccgggcatagtcggtcagtgagaacctgtgatgtacctaaacaggcgagctcctggcagtcaacagataaaaggaacaaagaccacacatcaaggaggcttgtggtggctggccacttgtgaaacttgattgatatgtgagatatgggctctggtaatcgattaccaagggtgggtaatcgattaccaggcttaaaattgaatacaggaggctaatatggtctctggtaatcgattaccacggtgggtgatcgatttaccagcttgtatacgagggcaggaagctaatgaagcctttggtaatctgataccaaggggtgtaat

SEQ ID NO: 221061 - DNA, 394 bp, Glycine max
  unsure (1)..(394): unsure at all n locations
gctaggctaaattagtctagactgatggaagtctatttttgctgagnctagtccaacaagagggatctgaggatgaagcttantttaagttagtctaaatctaggagagctgcctaaattgagcctagtccaacaagaggaatctgattgatttagtccaactagggatcgaggtttagtaatttaggctacaacatagaacacaaaagcatgattgattagagaaatttctttatatacatcagttggtctcttagaaaggcccaacatatntacctactgtcataccctaatttcgtccggtgattattacttgatgacatgcaacctttcgctagccgctntgagatacttggcgtcctttgtcgcacaataaatgaagtcccgagacgtg

SEQ ID NO: 221062 - DNA, 426 bp, Glycine max
  unsure (1)..(426): unsure at all n locations
cgagccaaatgctggcctgngtgagtttatgtctagaaaatgaccattttgcccctttccttgtggcttttgtttctggatctaacaatcaaacatcaaccctgagcgacccttcggcattgcgctgcaactggtgccaaacaccgtaattcaattagcaatgatcaaaagatcatgtccaaatgataaaaacattatacctggatgaaattatggtctgacagttgcccctctttacttatctnttattaaaaataaaagatatagtaagacaatgacactaatttcatttgagcgtgctgactattcaaaatcagatgctagagaaaacatgagaagtgaaaactgcaaaaagacaaggacattgaagttctgtaacaccaaacaaaggaccttgtaagcctacaaaacataaaatggaggaca

SEQ ID NO: 221063 - DNA, 409 bp, Glycine max
ctagatctaggctgtatcagtgtctggtttcaaaaaataacggtggattcgagaactagggaaaaaaggaattcacaacatgtagtttttttaaaaaaaggaggagtttctttttccgacgcggcggcgccgtcacccatggtcggtcaaccactgcgccggtaaacagcttacggcggtgtgtgtttacagagagacaagagcttctgagcgtttctttagagagaggaagaagttggatttatgttattttaaggcttattttttaatttatactgctgccatgaccaatactatggtgcacgcggatctctgtgtcccatggaccataggggtgaaccgtgatacttatctacggccacgttatccctgtttgacagaacgcacacatttggtttactttgtctct

SEQ ID NO: 221064 - DNA, 417 bp, Glycine max
cagctagattatttctctgtaattggaattcctgcactgttttcttttggcttgtcgcttacttttgggattttccaagatttataagtaaaacacatggaagtttattgttgctggatcatgctgttatatatttaagtcacatatcagaagttgcactctgttgttttctatacttcataaaattgtatcactatgatcctttgctgaagtttgttttgttatgtatccagtccaaagcttgcccctctgcttttacccccataataaacttgagcctctattaagagaattgtggcatacactatcaatagtagtctaatttactggacctgaaatgaaattcttctaattaatatttgatcaccaacatattatctagctctcttcattgaatgtgtttttcacacctatgtg

SEQ ID NO: 221065 - DNA, 153 bp, Glycine max
cacaaattacggcaaaagagatgtaaggtggaagagctgaacatagagaaataggtggggagtaaaacaggggccctctgtgtcaaaaaaaaaaagaggatacctcttggaagtgaaatcaaattccctgcttaccaaaacaaaaggctggag

SEQ ID NO: 221066 - DNA, 285 bp, Glycine max
ttcgattgttaagatgtcgatgctcgatcgcatcaagaagagaacgagaatatctcttttttatttagttctggctcgatctggaaatattgtaaattctttctttcatttgttccctgaagagaatgagcaacttccattctttgtatttgaaaaacagaaaatatacatggtcaaaaaagtccagattacttagaaaagaccgctctcttttggttttggatctttgaatgaatagaattttcgatagagtgatgatggacttactcttattctctctgccca

SEQ ID NO: 221067 - DNA, 349 bp, Glycine max
  unsure (1)..(349): unsure at all n locations
gctactagataaancaaccgggcgagagagttttttccaaatctcccaccccggaaaatactcgcctatggcagaacacaagtccactggaattatcggaattacctatctccttgcagaggcaaattaaaaaaaggcagtgatcacgcagagatggacaagagcctgaagattgcaaaatgcgcactgggtaactaacttacaactgaaagaattgaggcttacaatctgcctatacataaataaaatcaatgaacaactccaaaacgccggacatgcttgattcggaaaagggaccaaaacactgcattatcggcggagacaaggggcaacaaccggcaacgtcgaa

SEQ ID NO: 221068 - DNA, 405 bp, Glycine max
  unsure (1)..(405): unsure at all n locations
tccaatcataatantnttttctcttggtaatatagtnttcatcacaaccaaatttacaaaagttaagttgctaaacaaaaatatatcatactaattaattcatggttactttattagcttgagtttcatgaacaatataatactcagtaaagtaaccaaggcaaagcaacagatagttggntctatcttttttccttgtatcaccatgattttatgtaataaaattgattcttatgtattatttaaatacactataaagctttgagtgatagttttccaatttacccagtgatctccaataattattttatataaatttatgcctagatatgtgaatgcttaaatttgttacgggtaattatttctagacataattactttttaaaaatatatactattaattat

SEQ ID NO: 221069 - DNA, 425 bp, Glycine max
  unsure (1)..(425): unsure at all n locations
ctcaagcgncnancctcagggaaaaccaacatactacgatgggaattatctttcttatgtgaccacagcataaacgagaaattaagcacaggtcaaccttattgcaattcggaataagttcctgtaacgcacgcatcttctcattgatccggcctctacgtctctgcataaataaatcccaaaattttattatcgtatacatcagaaaaagtagaaacaatatacttacaccacttaataatgaacatttgtgtattaataaaccaacactgattctgctcaccctttcagatagaatatgcacttcggctgaacagcttttcttggctacatttcagccgcgcaagaactatcttgttgacaccaactgattcttccccaacatcctaaaaacaaagggtgcactatcatacacataataaaac

SEQ ID NO: 221070 - DNA, 335 bp, Glycine max
  unsure (1)..(335): unsure at all n locations
ctatgntgttcctatgnatagaaaacagacccactatcccaattctacaagatcatattcatatgtcattgtggcatttcaccgaacacttggtgggcgcgtgtttaggcataaattgcaagagaatgggggtaatgtggtatgccccattgtttcagaataccatatatgcctaaggccatcccctacaaccctcaactctaacaaatcatgcataagagacccttatactgccccacaaatatgagcacattctcacaatttagagtgccaaaagatgaacaaaatgcaccaatggaaagctataactctaggatcgaatacttacttgctgg

SEQ ID NO: 221071 - DNA, 301 bp, Glycine max
  unsure (1)..(301): unsure at all n locations
cgacagncaccgctntaggagcgctgtacaccagcagcgcttcgaagccatcattggatggtcgtttcttcgggagcgacgcgtacatctcagggacgacgagcatactgatttacaggaggaaatagggcgccggcagtgggcaccactggttactcctatgaccaaagatgatccacgaattgtccttgagtcttatgcccatgcctggccaacagaggagggcgtgcgtgacatgagatcctgtgttaggggtcagtggatcccgttcgatgccgacgctattagccagctcctgtga

SEQ ID NO: 221072 - DNA, 383 bp, Glycine max
agcttatgcaagcagagtttgagatgagtatgttggtagaattgaagttcttccttggattttaaatcaagcaaacaaacaaaagcatatacatacatcaaaccaagtacgtgaaggaaattataaagaattttaagatggatgatgcaaagcaaaggaaaactcccatgcatccaaccattatgcttggactaaacaaagagtcaaagtaggtgggcgaaaagacatatagaggaatgataggatctcttttgtatctcactgtgtccaaacctgacattatgtttattgtatacctctgtgccaaattccaaaaggaaccaagggaagttcacctatcttctatcaaatgcatatttagatatttaattagaacttctaac

SEQ ID NO: 221073 - DNA, 379 bp, Glycine max
  unsure (1)..(379): unsure at all n locations
ccttcatctgacttatcattttattttcctaagttatcttttccattattcaatacaaaacatttacaaccaaagatatgaaggtgtgagatgtttggttttctgccattgaacaattcatatggagttttctttanaatgggtcttattaaagccctatttaaaatgtagcatgcagtgttaacgacttcagcccaaaagtattttggaagaggagtatcatttaataaagttctagcaatcttttccaaagatctatttttcctttcaacaacaccattttgttgaggggttcttggtgcagaaaagatatgctcaatcccatgcttatcacaaaataattcaaaatctttatattcaaactcacccccatgatcac

SEQ ID NO: 221074 - DNA, 344 bp, Glycine max
  unsure (1)..(344): unsure at all n locations
gatngcatcaattatcagtcaagctcaaaatttgtcagaaaattttcaatttaaatgccatttagtaaacatagtatgatgtatgaatatgatatactacacatttatgtaatttatctaaatatataattttgtataactgggttaaaaatttgtaacctggaaaacaagtggactatggtaaatttgtcaagtgaagaaaagtacctgactttgatgagttggtggacaactgagaaagaacagagaattggcgagaattggaaaataaatgtaatttagaattgttggaattgctattatgattatgataggcatacacaacgttgttgttgctgttagta

SEQ ID NO: 221075 - DNA, 140 bp, Glycine max
aattttaactttcatttataagcaggaatattgtaccaaagaaagccccttaagagtaccaccaatcgcaaaaccgaagtgcaaagatatagaatccaaatgtgcgattgactctaatttattttatacataatgaccat

SEQ ID NO: 221076 - DNA, 485 bp, Glycine max
  unsure (1)..(485): unsure at all n locations
agcttggagaggatgcttcaatggagganaatattgatggagagaaagagagaggngggagcatgaaattgaaggaataaaagagggagagaagtggaactttgaagtatgtctcacaagactctcattcatcaaagttacaataagtgttacacatgcttctatntatagactaggtagcttccttgagaagctttcttgagaaaacttccttgagaagcttctttgagaaaacttccttgagaagctagagcttagctacacacacccctctcataactaagctcacctccttgagaagcttccttaagaagattcctaaagaagcttgagcttagctacacatacctctctaatagctaagctcacctccttgagatgagaagctagagcttagctacacaccctctataatagctaagctcacncccatgacagaaaaacatgaaaatacataaaaaaagtcttactacaagactacttaa

SEQ ID NO: 221077 - DNA, 368 bp, Glycine max
  unsure (1)..(368): unsure at all n locations
actcagcttctcatagcccanatgacattccagactatgattaactctctctaacctccaaatacccctaaatccagatttggccttccaactctcaaagactcactctntttccactcataacaccatattctcactttctaaccctaggttaactctacccttcatctctaacagttttccataagcaatttcagcacaccaacatcaagagcatcatcataaaaaccctaaaactgaatgggtaagcttaactcactcaaacataacaagtttagcatgctttcgtcaaatctcttcacaaataactatcacaaagcattaaccaagcaaaactgcccatcatatctcccaaagccccataccca

SEQ ID NO: 221078 - DNA, 368 bp, Glycine max
  unsure (1)..(368): unsure at all n locations
gaagaagatacaagggtgcttttagtgttaaggaaaaacggaaaaacaaatatgaaaacatattagatgtttaaaaaacaatgctgaaaaatatgaagtatgacaatattttttacttcaaattttaaattataatgaaaatattttccaacagctatatgttggtatttattttgtcacatcaaaatagtccccgtcatgcatgaaaannnaaaatgtgccgctaacaatcacagttgattaatatgctnttttaaaaaataaatctaaaagcactgaatcccctgttctctcttccttttatctgnggntctctcccactcaaaatgatggtngttcctattaaactaccatgagcaattgagcac

SEQ ID NO: 221079 - DNA, 481 bp, Glycine max
  unsure (1)..(481): unsure at all n locations
cttaactactgctctttattatgtgtaattgattttatttcattatgactnttcaagcaagagaaagcttgtgngtacgccttaattaattttattatcgttgttacttttttataccaacatgttgcaaatggatattntccaagtatttactagctnttcaataagcttgacttctctcttattaattgttgtttaattgttatttttcattacgattaatgactcttcaaagcaagagaaagcttgttgggtacgccttaatataatttattatcgctgttacttttttataccaaaatgttgcaaatggatattttccaaatatttactagctnttcaataagcttaatttcttctcttagactgttgattgatagtagccaggtgacgtctatcttgaaacagnttactaaaaatatcttagattaattattatcatagcgaagatatatatatatatatatatctatatatatat

SEQ ID NO: 221080 - DNA, 398 bp, Glycine max
  unsure (1)..(398): unsure at all n locations
ctcaaacaaacaaatcatacgtaacaagaacattatagttgttgtttgaatacctcacccactcaagtgtatcacacaattatggcttttctctaatgaaacactcttgccttttaccactctaattccccttgagttcttaggcaattcaagagattatggccacaacaaagaacaattcaccaatatgtgtaaggtaaggctagaaagacaaggataaggttaaccaagaaaaggcttacaatgttttaggcacaaatgaaggaaaaaaattctaatttataattcaagtacaatccttatgcaacccatatattacttaaaagattttttaaagttctcagcatgaccattagccaatttttttntaatttgtttacgaatgtgttttttacaaa

SEQ ID NO: 221081 - DNA, 413 bp, Glycine max
  unsure (1)..(413): unsure at all n locations
agtacttngattcttagccttgtattttggctatattattatggcatttgaacaatatccttatttgcatggtatatggtatttaaacaatntactatttccatatttgcatggtatgtttgaacaaatattaagtttgctatttgactatatgggttttatagttaatctatttatgattgttacttcatgattcttgcttcatggtttggttgatatttttccatgaagaatgtatggatgtttaagttatatctgtacactttaagtttgatacgcactttggctttctgttgatgcccaaggtggagagaaatgagattaaatcaagaattcacatgagtaatcaactaatttctaaagataagcattaattcaataacaaagggggagaatctatgtgagtgatcgac

SEQ ID NO: 221082 - DNA, 385 bp, Glycine max
  unsure (1)..(385): unsure at all n locations
acaactcacaaggatgtcttcctcaccggagactatgattagcctgccttctaccataaactntaatctttggtggagcgttgaggggactaccctggccgagtgattccaggccgagcttaaaggcagttataggccaagttgatatccatcccttgaaaagtgatctaacatgtgtggcgtccaatctgaatttggagatcgatctctccccttacgtcccagcgactaccatcaaaagcctataccaccatggagctcggcctcatgtgtgacgtattgaaagatagtttgtccaatgtgctcttggcataacattaagtgatgagccaatggctataagaaccttgtgcatgatgtgatacaagcacttaacagacacatg

SEQ ID NO: 221083 - DNA, 491 bp, Glycine max
  unsure (1)..(491): unsure at all n locations
gcttgccacccagctcggaggaactncctggaaggcccaagagggtttggtttgttattttaccccctgnttactaaatacacnccctgcctttgtttgctgattcatagtccataacgttacgaaactttacgaattatgtaatgatacttgattccttttcgtaatgtcatgaaaccttacggattacgtaatcatcctttttttggcttccggaatattactgaacttcacggattgtgcaacaatgcttccttttaactttcggcatgtcacggaacttcacggaccgtgcaataatgctttcttttgacttctggcatgtcacagaacttcacggattgcctaacgatgggtgccaagtacctcgaagcagtcatgcaaaggttgcatgtcatcaaacattggtcctcggacgataatacggtatgacaataggtgaatgggaaacacttatcatattttatattaataccaaccctcaagagagt

SEQ ID NO: 221084 - DNA, 205 bp, Glycine max
  unsure (1)..(205): unsure at all n locations
gaaaatatcgagacgctcttaaatgaaaacagaagcactcagttaattctaacgacaataacttntgactcggatgtccgattgtgtctctgtgtatatccagacgcccgaaattgaaaactgagggcttgagaaaaatcagaggatgataactttcttctacaatgtccactggagtcccatagtaaatcgagacgctcgtaat

SEQ ID NO: 221085 - DNA, 90 bp, Glycine max
aacactcgtaacacgtaaagagacatttttttttaacgatgcgggatcctaagtcagttcctacaacaatcaaaatacagaacaagggca

SEQ ID NO: 221086 - DNA, 347 bp, Glycine max
tgcagctttatctatcaatacggaccttgtttattttttgtggccaacattcaaaatagtgaagaaagaggcctagcatggtcttattgtaactgcacaaacaaagggctcggaatggaatccaatcattcgagtgcagttatgaaggagccatattaagcattcgtagaatcctcgtggcgaagtcgtcaaatgggattctcacatgcaggtcgcaaaatatacaatcatacataaaaaacaagccatgacgctcccttttctctttatttagaatatacacaatcatcttgagggtcaacatcggtccaacatgtgggcataataagcaggcataattgacgtct

SEQ ID NO: 221087 - DNA, 251 bp, Glycine max
aacaccaaaccgcttgcaagttctatacactaagccacgcacaaaaacgtctatgcactaatccatataaaccaagtaaaacaacaatgataacatagagagaaaaaaggcaaagaagacaaagaaacgaagataaaccagtccatacaaagcctaaaacatgtataagtaggggagagcgggcatgaaccatagaacaagagaatcctcataacgaagaaataagaacaagaaattcaaaacctaataaa

SEQ ID NO: 221088 - DNA, 355 bp, Glycine max
  unsure (1)..(355): unsure at all n locations
ctttctattaattaaatatatttagttgctttgccctgttggagctagttgttttctcttttgggctctatccaatagttataataattggagtgctgctaggtgcacttaacagttttgctggtgcacccagcaattgttgggaaaagaccttttagtccttagcatttttttaaaagaaataactttcgccactctctctcccacgccgcgngcttcttcattcttctacttcttcttgagtatctgcatcttcttcattcttgcgtgaatggtgccgtgaaccttctcggacctcccaagtgaacttctcatttcggcttccaagccattggtcgccttgttgcgtttctac

SEQ ID NO: 221089 - DNA, 363 bp, Glycine max
  unsure (1)..(363): unsure at all n locations
actaagcttgcctcanagaggtccangaaggacatggcggccgattgacttttntttttccggagcacgacaggcaccgctttaggagcgctgtacaccagcagcgcttcgaagccatcaagggatggtcgttcctccgggagcgacgcgtgctgctcagggacgactagtatactgattttcacgaggaaatatggcgccggcggtgggcaccactggttactcctatggccatatttgacccagaaatagtccttgcagtttatgccattgcttggccaccacaggatggcgtgcgtgacatgacgtcctgggttacgggtcagtggatcccgttcgatgccgacgcctttatccaccttc

SEQ ID NO: 221090 - DNA, 193 bp, Glycine max
atcgagattctgaagaattccttatgatgaagaagaaacccacatgtctggtcatctcgtggagtttaccttcctcggtacacacacccctgcttatggatattcagaagcccacaatcatattgggccttccactattaacaccccagaagcctcgttgaacgaaactcatcagcagcatcaggagatatcc

SEQ ID NO: 221091 - DNA, 252 bp, Glycine max
  unsure (1)..(252): unsure at all n locations
ttatgagaggtattcactgactctctanaggctctctatctgcacctagggcgctactaagtacccttacctctcctcatgaatatcagaaatcccatctcgctttaggtcctaatacacatcccggaatttcactctatatcacactagtaacaccatgcgtcaaccatcactatactcatccaattaatcaaattattcaagcacttaacttaaattaaactctcttgaactgaattaactcagtgaaca

SEQ ID NO: 221092 - DNA, 457 bp, Glycine max
agcttaagcctgatttaagtgataaatggacattattaatattaaaaattaatacttctatattttatataattgtggcatcttatgtataggcctagcacagtggtgctgaaagatgagaaaggtataatataatgcactaatgtgttttattgacaacaaatcactttattatattattaaaagattttttaaattaatatctggcagaagaaggtgaaagaagaaaatcacagggcagaagagaagaagatccaagctgccgtgggatttcgccatgttattgatctcctttcatcagaacagaagttgatagctggttacaattgttttttatgaccaatgacattctaaattcttgacaagctatttaattttatagacactaagatgatatttaccattccatgatacagataatgctcatgtttcaccaaattatcggccctctttcggg

SEQ ID NO: 221093 - DNA, 263 bp, Glycine max
attcagtcacattcccctcacactcctcttttataacaaataaagccccaattatcccatcttatcttcatctaccttattactcaaggcaacctctaaaaggggactgaaaaaaaggggggtctacatataaagtttgttcctttgagcgaaaagaaattgaatttgtaatgaaaatcttaaattaaaatagaatttaaaaaatatatcccacgtcattttactaattaaaaataaaaaatattttcacctgtgaacttaat

SEQ ID NO: 221094 - DNA, 370 bp, Glycine max
  unsure (1)..(370): unsure at all n locations
aggcacgctaagcgcacttccaagaattctaaacccgcaagagattggtgcttagcgcttcctggcccactaagcccagcttaaaaactcaagttacaaaatggatctggggcttagcgcaagataacgctgctacaataataatttccagagaagaagtggcacttagcacatcatccacgctaagcccactggttaaagttcaattactgtanagatgtggggcttagcatagtgatgtgctcttagctgaactattcaaccaaccaatcaggggtctatgcgcttaatacgagcaagctcaggcctagcgcgtgaagactgagagcttatcgcgaggattcggctatcggatgacaattgcaaaaaa

SEQ ID NO: 221095 - DNA, 276 bp, Glycine max
  unsure (1)..(276): unsure at all n locations
gactagtacttgctcgagtgtgttctaagctttgtatttatgatcagtatacgagctattaagctncttgggtagaagtaactactgttctattttgtgagaatatatgtattagatacaaagcatttcaactgctctaagaatgaacatcagactntcacttcctctcttatgagtgtattcttattatttactaattatgtgaaactcttgtgccaacagtatccttctacaaacttaagttgaatctttacccaatgaattcttaaaaggcta

SEQ ID NO: 221096 - DNA, 345 bp, Glycine max
  unsure (1)..(345): unsure at all n locations
ctttcacattngttagttgtctgaacaaaaatgaatggcatatgctctaatccaagtctgatttgttttggtttttgacaactgagaacccgtgtgtatcatgatcttaacagtagaaagagagaatgatatgattaatttgaaaattttcaaaccatcaatgaagttgttccccccattaccaagagaaacataaatattaagtctatcagtattagctagctagttatggttggtctggcatgtcaagggttaacaaaaccatgggtagtgaactagtgatcgatggtattcttgtaataaattctgacaattggcttagctgatgagtggagatttatttgt

SEQ ID NO: 221097 - DNA, 473 bp, Glycine max
  unsure (1)..(473): unsure at all n locations
ccaaaaacnaagctttggcctcatttgaagacactctcaattctctctgttctatctgggtccgacaatgcttatgtctccagcagcttgatctcaagcattaattagctatcacgatatcttgtgaatttcgaactatgttattttcaaactttcatgtatgttagaaaggccttaatgcttcaacttgtatgttgctaaattaattggtcagcaaccaaagtcctctatagacatggaggtattcgttgcgatgcttatttctaagaacgggaattttacgtagccctattattgcatgtcagttatattcccactttatataaaagtaataaccttgcttgtaatatgccggctcgcaattttaaaaagagtgcgttgagtacaaatattaactgaacaaagtaattatttcagtaattgaatcttttatctacattcttatttgatgctttttataaaaaataatattg

SEQ ID NO: 221098 - DNA, 478 bp, Glycine max
  unsure (1)..(478): unsure at all n locations
ctggctcagtgctactctaacttctctttaataaataagctctcttcagggaagcatttgaagatttgagtccaagtaaatcacgaatgactcaattcatttgcatatttagtgcaaattatgctcatacatgattttgaatttgagattgaatatgtattacaccgaacaaaaataaataacaaaatgcagtacatatataaattcaaattaggaagaatctgatctgaataaactggaatccaatttatttttctgttcaatattgctgtttctcgtctgtatacgggttgaagattatcagtgtgatcaccctntagcatcagcaattatttgctgcaaacatttcataacataggagaaagaaggccgtctccagggttccctacagcaccagcagatagtaaatagaatgattgtaatggagtttgaaatgtcggctgcttgaataacatactatatattcagaatcaacatt

SEQ ID NO: 221099 - DNA, 412 bp, Glycine max
  unsure (1)..(412): unsure at all n locations
gtgttgaagggtgaaacttcctgttntattcgttgatcacagagtggtacctggagatatgtcgcggnggtcaggagaccttgtggacgtcaggtggggtgctattgcccaaaaccaagcttgaccaatcccgacccaacccgagcatagtcagtcagtgagaacctgtgatgtacctaagcaggcgagctcttggcagtcaacagataaaaggaacaaagaccacaaagtaaggagtcttgtggtggctggccagctgtgaaccttgattgatatgtgggttatggcctctgttaatcgattaccaagggtgggtaatcgattacaaggcttaaaaatgaagacaggaggctaagatggtctctggtaatcgattaccacgaggtgtaatcgattaccaagctttgaaacg

SEQ ID NO: 221100 - DNA, 340 bp, Glycine max
caagcattcagcatgagccttgtgcacgcaaacaaagaggcaagtcacaaccaatgaccaaaagatggatggcaggtaaacccataaatgttaacacaacacattctcaaggagtattcaacactataatcactgaaaaccacataaaagcgtgctcagactccaagaggaacctacaatggctctacagtacaattacccatactttgaacataacctatgaaacctctagtatggccacttgtcgtcacactactcttcaattgacccttctgatctaagattggtctcgaataagctccaactatagaacaaatattgagcccacacaacaaccaca

SEQ ID NO: 221101 - DNA, 389 bp, Glycine max
  unsure (1)..(389): unsure at all n locations
acaaaccactctggcctctaaacataccaataaatttgttgaagtttgantgcacacagataaagctatatcgtcttacaaatgaagatctaacttaagcgcattgtctctttttccctcaggatgtactggatgttttgagagctttttacgaacttggaatatacacaagaaagactgaaggtaaagagaataagatatctcaattcgaagtggttcttttaacttccactctgtcaaagattttggtatttatagacttcttcagcaagtattccttggctctatatggattcttgtttcgactaatctcgcttctgaagaaggtggttgttggtgcttttttacataaaaagaaatgtgtaagaatatgttattatatattctgc

SEQ ID NO: 221102 - DNA, 414 bp, Glycine max
cttgagtgaaacactgtgactcttcacttataaagttgaagtttatctttcagtgtctctgggaatcgaataccaaaacattgtaattgattacagcctttctaaaatatttggaacgctgtaaattcagtttgaaacattttcaactcattttgctactggtaatcgattacaacaatatggtaatcgattaccacatagtaaaaactctatggtaaaggttctgtcaaaaactcatgtgcttattaaagctttgacaaaactttttaatacttatcttgactgagactttactgattcttgaatcttgagacttgaatcttgatcttaattcttgagatcttgaatcttgattcttgattcatggttgtagggtttcttcttgatatttgaactcttgacttcgtcttgagt

SEQ ID NO: 221103 - DNA, 380 bp, Glycine max
agctgggataagaagccgtccctagagcttgagatgagtttgtgagtgattgtgaagttctaaatgtggaagagacatccccactactttgtatttcttgcaatcatttcatctattctctctctcttcattgtgaaggaagcttccccaggtatgggaaagctaaatcctctgttggatcttccttgtaggaacttgatgtaaatatttttttatctatttaatgatgtttagtgtgttcactgagctattagaacttgattctaccatgctcttgccttgatacatagatgcatgtgttttaggattatcaacagtgaaactggttgattctaaacttgtatgacaggctagttgtttattttatgaagatcggtgtc

SEQ ID NO: 221104 - DNA, 400 bp, Glycine max
ctaagctatgctgcaacatctacaacagacctcctcaacctcagcaacttattttgtacaacagaacaattatgacctctccagcaacaggtacaatcccagatggaggaaccatcccaaccttagatggtcaaatccttcacaacagcagcaacaacaacaacagccccaggaacaacaaacagttgaggcctctctgcaaccttcccttgaagaacttgtgaggcaaatgactatgcaaaacatgcagtttcaacaagagaccagagcctctattcagagcttaactaatcagatgggacagttgactacacagttaaatcaacaacacgcccagaatcctgatagaataccttctcaatctgtccagaattccaaaaatgtgagggacattacattg

SEQ ID NO: 221105 - DNA, 367 bp, Glycine max
aggggtaagtctcacactgcacgtgctatgcacatttgttatctcttgctatacgagacatcttggccaacaaagtcaggttcacgataactcgcctgtgcattttcttccatgctatatgtagcaaagtcattgatccaataatgtctgatgagtcggaaaatgaggcctccattatactgtgccatttggaaatgtattattcccctgctttctttgacatcttgattcacttgattgtgcttctggacagagaaatcatatgttgtggtcctttttatttaccgtggatgtacccggttgtgcgatacatgaagatcttaataggttactaagaatcttattctcccgaatcatctattgttga

SEQ ID NO: 221106 - DNA, 401 bp, Glycine max
  unsure (1)..(401): unsure at all n locations
caatgtgcctntgagatagagaagcatctacatagcctttatgaaagtgtatatattcattcatatatacaaagccacacacacaataggatgtatcatacacactataattttcaactgcattgtcaacttctcctaacagtggacctagtagttagttaagtggctattgattagcccaccacggcaataaaatgctactttatctttcatcaaagtgttaacttcagagtgaacttaattctttacatactattagccttgatataatgatcaatgaaccacaagacaattgtttatactatatttaccctattctacatataatgaatttatgtacatattccctaaaaatgcttactactgctatgccacaatatatttatgctatggatctaatg

SEQ ID NO: 221107 - DNA, 435 bp, Glycine max
  unsure (1)..(435): unsure at all n locations
ntgatgtntgtgttgaatgcattataggtagacagatcttaatctatattttangtacatatagagctacatacgtcttggaattgatacatacaaacatctgtgggccatttcatacaccttcatgaaatggtcaacaatattttatatcattcatagatgattactccagatatgcatacttgtttcttatacatgtaaagtcacaatctttgggtgtgttcaaaacatttaaagttgatgatgaatattatggcagacatgacggttcacgtgaacaacgtttggtgccttttgccaagtacctagaggaacgtggaatcgtcctacagtacaccatgcccggggtcacctagcatgaatggtgtggctaaaagacaaaacagaactcttatggatatggtaagaagcatgatttgccattcttacttaaca

SEQ ID NO: 221108 - DNA, 445 bp, Glycine max
  unsure (1)..(445): unsure at all n locations
agcttggtgtgagatagcatggaagagtcattcttctctacttttatttgnngaccacagagtggtacctggagatatgtcgcgggggtcaggagaccttggcgacgtcaggtggggtgctattgcccaaaaccaagcttggccaatcccgacccaacccgagcataatcagttagtgagaacctgtgacgtacctaagcaggcgagctcctagtagtcaaccaataaaagaacaaagtccacgaagcaaggaggcttgtgtggcggctggccagctatctatcattgggtgttatctgaataataccctctggtaatcgagtaccattcgtgggtaatcgattataaggtttaaaaactgaaacagggtgttcaatatcttctggtaatcgattaccaattgtgtttaatacaatacactgtgngatatgctactggtaatcga

SEQ ID NO: 221109 - DNA, 464 bp, Glycine max
  unsure (1)..(464): unsure at all n locations
agcttatgcgcatgtttccttacgaacgttcacttgcggaagacattctattattcgananaatgcacccatatacaatcaaggcagctttgatacctagattatttacacgtacttccaaggtgtatttgttacttacatcacacacatctccttggctaaattcacatacatgcatactccaagcattttggggtaccaaaaattgcacatgtgcatatcttggtatttctaatacctatacatacacaaacttcatgatgaatcttgactatctacacaataaggtgctacatttcatgccctttctcaagtntttgctacctaaagccgcatgcaaattcaagcatattttcctttgctgactaaaattgtattcaaattatatatatatctttcggaatatgttcttttcatacaacattcaacatactgatatatatttgtttgcgagacactttgac

SEQ ID NO: 221110 - DNA, 413 bp, Glycine max
  unsure (1)..(413): unsure at all n locations
cgcatgcaactgctacatagttggattgactttgttttnttctgnctangcccggattcaggctgtgctgtatcaccggcttcgcttccctaactgaacagaacgctgatgcggaggcattatcctctatggttctgggagttataacatgaccttcaagatggaaaccatttgatctattaaggccgatagatcggtctttttctgttcctacacgcccttttcattattcattttttctgatccagtgctataagggtgcctcggtgttttcttattatgatgatatgcctaagaaatatacaacggtgagtgtgccacccaaacatgatattgcataatgatgatcggagcacttggatccaccccaaggttgtttagataacgcaatgaggatacaacttccattttat

SEQ ID NO: 221111 - DNA, 123 bp, Glycine max
ggaaaaaatggacagtatagacttatgtgaagaatgactctagtgaaactgtataacactatttattgctttcttagctattaaacttttaaagcccattattgacacattctacatgcaatg

SEQ ID NO: 221112 - DNA, 399 bp, Glycine max
gcatgcaagcttggaaggagaggaaaagactcttgctatttgtttggaactaatatcgacaaggaagaggttggtcaaacgaacaagagtattactttcttgtaaatgtgtgagaaaatatttcgaaagattcaaatgagcaagatatccaagttgcgaaatccagctaggtattggtccttcgatcccgttgtcagatagatcaagatatattaatatggactgatttatcaagaaactaggaattcgtctcaacttacaagaagccaacattatatgcgtcatatgaggaaagggtgacaggtcatgatcatccctaaagtttatatcaactgacaaattgttatgtgagaggcctatttcaattaaataactcagcttgcgaatcttgtcaattgt

SEQ ID NO: 221113 - DNA, 415 bp, Glycine max
  unsure (1)..(415): unsure at all n locations
taaatgtacattgaagncatataagcgtcgactacaatttattatgaacataatagggatcaaatgaaagtatccaatagatattgatcccatgaagactatcactcgccaagccactaaatccagttattatnttcatcttaatatctttttgtaaaataactaaaactcttctaaacttggtatttcagtttacactaacaaatatattacttaaaaataaactagagacttaagtgtcataagcttccaatcaaacaactgagataatttatcagattaaaggtctcttaatcaccaaaataggaaaactaatttatcaagttttgaggttgagcaatccacatttataaatcatatttttgtttaagacatgcccaatatgtgctaagggaatgctcaaatgctagagttt

SEQ ID NO: 221114 - DNA, 329 bp, Glycine max
  unsure (1)..(329): unsure at all n locations
cttaggagattntgtatatcacatcttattattaatcgatatataaaggtacatgaacaattccgaatgttcttttaacatgtctaaattgttcatgtacctttatgtgatgaataatgaactattgagcattaatttcattaattntgattatttcttccatgttgtctgtactgaaggacttcaaaaggttagagaactaattgatatgggcacatcatttgatcatgcaaaaattggtatctatcatctaatgagggagggtcattcgcatcatagaaatgtgtgttgcttatactgccaacaagggataaaccaactttgccttt

SEQ ID NO: 221115 - DNA, 394 bp, Glycine max
  unsure (1)..(394): unsure at all n locations
tagagggtatccatggatcttgaagcatttttctcttgngtgtctatggatgnngcaatgagagcagaacggtctatccttgcgagtaggttttcctttggcattggattgggttacaacacaagccattttagcaggaggagcagaatttggttgaacaccaacaagcctctgagtttcatcttgaagcaataatgagaaggtctcatcaatatccagaatcggtttcatcaacaagatttgacctctagcatgggcaaaactctcgttgacacccatcagagatgacatgacaaattcctctttgatggaagcaagaagtggagcaaccccgccacaattaccactgtgaatggccttgagttcacctagctcagaccaaaggcctttgaat

SEQ ID NO: 221116 - DNA, 409 bp, Glycine max
  unsure (1)..(409): unsure at all n locations
aagaaataatgagagaaagagagaggtggggagcacgaaattgaaggaagaaaaagggagagaagttgaactttgagttgtgtctcacaagactctcattcatcaaagttacaacaagtgttacacatgcttctatttatagactaggtagcttccttgagaagctntcttgagaaaacttccttgagaagcttctctgagaaaacttccttgagaaactagagcttatctacacacacccctctcataactaagttcacctccttgagaagcttccttaagaagattcctaaagaagctagagcttatctacacacacctctctaatagctaagctcacccccatgacaaaataacatgaagatacaaaaaaatagctcttactacaaagactactcataatgctccg

SEQ ID NO: 221117 - DNA, 291 bp, Glycine max
  unsure (1)..(291): unsure at all n locations
cacttctcaatgagctggngaagaagaatgtggcatntacttggggtgaaaaacaagagcaagcctttgctttgctcacagataagcttactaaggcacctgttctagctcttactgacttttctaaaactnttgagctagaacgtgatgcctctggagtgggagttagagctgtattctttcaaagtgggcaccctattgcttattttagtgaataacttcatagtgccacccttaactaccctacctatgataaagagctttatgccttaataagatccctccaaacct

SEQ ID NO: 221118 - DNA, 426 bp, Glycine max
  unsure (1)..(426): unsure at all n locations
tatattgggaattatgaagagcgctatactaatcagcagcctgtataataaaataaagcgtggtgacctttagaataagtgagattacatgagagcagcgcgtgactcttnggcatacagaagatgcattgagcttgtggtttatacgtagcactacatattacagtgcgggttaaatcatcgatgcacccttttgtttcttccgtaaaacagttcctacttgatgaagttggcaatgaactcgaactggtccttcttactggaaagcccattgatgagaagcagggtggcggcctcaacgggcttctcctctagcaataggttacgatgccagtcctcaagactatgtgtgagatcaaagtcctataattgcttcagaccatcttatgaactcaacattcttttttcgggcctttatgctgacaa

SEQ ID NO: 221119 - DNA, 446 bp, Glycine max
  unsure (1)..(446): unsure at all n locations
ccgcgattgacgaagggcgcagattactatttagtctctgcgtgctatcaagcttttcgtcttacagatagcaaaanaagaatgtttatatggataaccactcgggtatttccgcccgtcagcgtgactcaaaagtcagtatgacagatcttgtgagggcgcagaagacgacgttagtctctgcgtgctatcaagcttttcgtcttacagatagcaaaaaaagaatgtttatatggataaccactcatgtatttccgcccgtcagtgtgactcaaatgtcagtatgacagatcttgtgagcgcggaagatgacataaatctccgcgtgacaacgggcttgtcngccgctattgaccaatgatgcataagacgacgttagtctcttggtgctatcatgcttctcgtcttacatacagcacaataatgtctatccggatcaccactct

SEQ ID NO: 221120 - DNA, 447 bp, Glycine max
  unsure (1)..(447): unsure at all n locations
catgttgtcgaagaatcactacgaggagaaaaagatattatgtctagtgggaatggagtaccaaaaaatccatgcatgtccaaatgattgcatattgtatagaaatcaatttgcagaaatgcacagttgcccaacatgtggtgtatcacactacaaaatcaaaaaccatgaatcaagtgatgatacaaccatagagaacagccatccaacaaaggttggttggtatcttgcaataataccaaggtttaagcgattgtttgctaatggacatgatgcanaacagttgatgtcgcatgttaaaggcagaaaaagtgatggattgctccgacattccgctgatagtccgcaatgcaaggcatttgattctttgtatcctgattctgggaatgaggcaagaaatctaaggcttgctcttgcttcagatggaatgaatccatttggtaactt

SEQ ID NO: 221121 - DNA, 251 bp, Glycine max
  unsure (1)..(251): unsure at all n locations
actcaagcttgcnggactctagctgccttcaatgcagctgtgtgagcttttgagatgcattgcagaaccgggggcgaagaccatcctttactgctctgatatgcacataaaaccattgttggcgagaaccactgcgcgcgctgtgaggggatatggatcactgtaccatgaccagaaatataatcacgagtgtgagagatgacatgacacccgtgctagattctggagaaagaagggactttcactgcatc

SEQ ID NO: 221122 - DNA, 415 bp, Glycine max
  unsure (1)..(415): unsure at all n locations
tgcaagctgcacgaaatattaatagcacctgctaaattactattggttttcttataaaatgtttacttagagcatcaaatatctccgtcaacttataaacatcactcacctcatacttacatagagccactcttcttgagtagttttcctttttgctcttccattggctatagtttgaagcccaacctcaagaattccaacaatgacttcctttagtggggttgtcataaaagttacactagttgtggagtctaatatcattttactttagtgaattggatgtcccaccactacttanatccatgatgcaatcatagttctaacaagactttataccactcccatgcttcatatagggaattcaccnaccctctggtggaaattgggtgatttgatcctcacccaattagtcttg

SEQ ID NO: 221123 - DNA, 449 bp, Glycine max
  unsure (1)..(449): unsure at all n locations
actcagcttctcgtgccttcctgcaaggcaacattaggaagtatgttttgtgtgacattactcttaaagcaaagatggcatataacctcctcccataaatacaaacatcaatgtaaatttagagcaagcttatgcgcatgtttccttacgaacgttcacttgcggaagatatcctattaaccgaaaaaatgcacccatatacaatcaaggcagctttgttacctagattatttacacgtacttccaaggtgtaattgttacttacatcacacacatctccttggctaaattcacatacatgcatactccaagcatttggggtaccaaaaattgcacatgtgcacatcttggtatttctaatacctatacatacacgaacttcatgatgaatcttgactatctacacaataaagtgctacatttcatgccccttttcaagnttttgctac

SEQ ID NO: 221124 - DNA, 424 bp, Glycine max
  unsure (1)..(424): unsure at all n locations
agagaatagacaacgagaatctgaatacanaagctcaagacaaaggaaactagataaagtattttatttattaagacacgttactaagtgatatttatcctttaaaagacggtccatgacaagccacattagtcaactcgtacaaaggattggacttagaaacagcattcatgaactcttcatctgattccagcgcgggcatacttttctggcgaaaggcacactctccaatcaatgctttcacctccttcacggcctgagtatgaagtcactttcccctaaaacttgttggcataaccacttcttgccggcaccgcctttcccattccaaattcatttccatacacagtgaaactgtgcgaggcacccatcattacacagttagggtcaaagaaccacaccatttgattactaaaggagactc

SEQ ID NO: 221125 - DNA, 387 bp, Glycine max
tacttatgaatgttataatatactcctcaaggcctttctttcacttgaaaaatatgatggaaatatggctctgcttctaaataatcaataattgagccacattgattgaaacacagatttccttgtgaaactcttgggctgcaagtaaaactgatcacaaattggagtgctcttctcactttgacataattttgctggatcacctcaaagacattgggtctttccctattacctcaatatttgaagacaatatgactctataattgctccattcctttatataaaagacacattacctatattgcgcacctatcttcgtggaggacaagcagataaagcggtctcttaaagaaaaccgtaagcacaccatggtggtcaggaaaataa

SEQ ID NO: 221126 - DNA, 178 bp, Glycine max
gttccaagcaagctacgataacatattcaactactgaagcataatatatagtgacaagtgaagccggtaaagaagctgtttggatgaaaaggttcatatttgaacttggtgtggttccttcaatagaagagtcggtcccattattgtgcgacaataatggggctatttgcttcaagca

SEQ ID NO: 221127 - DNA, 399 bp, Glycine max
  unsure (1)..(399): unsure at all n locations
cgtagcccaccatcttttcatattatgagatcgataatgtggttaccatcacgattatcgtctccctttccatcattgggggtaccacctgngccgccagatccctccaccttttgggcgtgttctttgaaagatccgtccccctttttgcacatgttctgtagttgcatcctatccggaatcatatcaaaattgtactgatattgcctaacaaaggcaaccattatgtccttccaagaatggactcaagaaggttccaagttagtgtaccaggtaacagctgccccagtaagactttcatggaaggaatgtatcagcaattcctcatcttttgcgtattcccccatcttctgacaatacatctttagatgggtcttggngcaagtagtccccttgtac

SEQ ID NO: 221128 - DNA, 453 bp, Glycine max
  unsure (1)..(453): unsure at all n locations
actcagcttgatggtgtgagaagaaacacatgtttgcatcatcttattgtggagaatgagaatgtatgtatacatgatnttgatgatgccaaagaagaatcaaacaaggctgcttcaaatgataagcatttgctttaagaataattcaagattgcttcaacaaacaaagccttgtttcaagattcactaaagaccaagccttgccttaaaacaaagtgctttcaagacatgcaaggctctggtaatcgattactaagaagtgtaatcgattaccacaagacagggttgagaaatagctgctgaaaaaggttttgaatttgaattttcaacatgtaatcgattaccatatgtctgtaatcgattaccagcaacgaaactttggaaattcaaattcagaagtcataacccttcagattataactgtgtaatcgattgcacaaacattggtatcga

SEQ ID NO: 221129 - DNA, 392 bp, Glycine max
  unsure (1)..(392): unsure at all n locations
ctgatttattttatgcatatgctaanaggtatcagtttgcaaaaagaaaaaagatagggaagcaggataagaagcatggaacctcaaaatatcttgggcatggcaatgaaattatacgtttgtatgtggttaagggtacacattaagcacaggccaggttatatagaagtattatttatatatccaaacagccaaagagtagactcaatgaattttcttacctttctcttccatcttttcaaaagctgaaagagcactacttgtattgacatttctcagcatctcactcaccttggttgcagtcctgaaggagcattaaccaacaaccatttctaatagagccagagaatatttatctgtacaaggcggaagtcaatgaatataagatttaa

SEQ ID NO: 221130 - DNA, 432 bp, Glycine max
  unsure (1)..(432): unsure at all n locations
caaaaactaagctagcagcacattaaagtacctgccgtacttttgtgtagtttattcaaaaganatcaacagagctcgaagtggttcaatgataaaaacaagcagctcaatactcgaaccctaatcccataatggtcactacgaaagacgtggcacagcagaatttacaagatttcataccacagatatgccagggataggtaaactaaacacaactcacataactaactaactaatgtaccccagtgcccagaggctcctcctcgctatgtgaaggaatgggagaggattattgtatgtagccttgcccttgcatatgcaaagaggctattttcgaattcgaacccatgaccaactgggtatcaaggcacaacccacatatatcacaataatcagaaagagcttcaacctagagagagagagagacatgtg

SEQ ID NO: 221131 - DNA, 411 bp, Glycine max
gacacaatcggacatccgagttaaaagttattgtcgtctgaatctgctcacagcatctgttatcaatttcgagcgtctcgatatattaacgggagtcgatccgacatccgagataaaagttattgtcgttggaatttgcccagagcttcaattttcaatttcgagcgtctcgaaatattacagcacttaattggacatcttagctaaaagatattgtcgcttgaatctgcttcgagcttctatattaagtacgagcatttctatatactactggacacaatcgaacatctgagtataagatattgtcggtgaatatgctacagcttttgtgtaattcttgagctcgatatctccggccccgtccgacattgagtaaagtattgctttcgatttcacgagctttgtttcatt

SEQ ID NO: 221132 - DNA, 342 bp, Glycine max
  unsure (1)..(342): unsure at all n locations
ctaagcttatagccgggtcngagacaaaggtaagcgttttcgatttgttatgatgatattccgagcactctgggtttggtacgaccatgccctcctgatttccagctgagaaattggcgagtggaggaacgccccggcatttgcgcaacaagcataatgtaaacctttacggttttaaaagctctatagttgggcctaggctttagagcttttccttttgttaaagctttgcgtcttttgctttgaatttataatacaagatcttgcttcatcgatcctggtctctacccattctcattcatttgcatgtttacttcttattctgaaacggcagaaccgatg

SEQ ID NO: 221133 - DNA, 406 bp, Glycine max
aacacatcaaaactccatggagaagagctaagaaatacctatatccatggatttcgaccaaacaaacacacgtagttttccttcacaactttgcatgaaagggtttttatgtgagacccacaccgttattaaagatttctctggtattccaatccgatcagattatggaagcttaatataacttaagctcgcatttctctctctttctcttcattttatcgatactttgacttccccaaatagattacttgagagtaaatatatcattgagattcatttagcacaagtctttgtatattcattgtattgcattgcatgacctacttattctatagataatttttttacaattagacaagctgggactacatatttacattttctatgcttacatcctatcaatcaa

SEQ ID NO: 221134 - DNA, 418 bp, Glycine max
  unsure (1)..(418): unsure at all n locations
aagcttgagagatgatgggacccatcttgagaggaacgtcgatatggctatgtgggacnacgcgagctcagttgaaggtgggcaactgaaaatggtgggcttatgtgtgatttgtggatgtggagagtcaacttgtaacatcacccggtcgccacctattaccacctatgaggggtaccccataatcctacgagcttgatttgataaagagtggaagagtcagtctttctacttttattcgttgaccacaaagtggcacctgtagatatgtctgatgcgtcatgagaccttggggacgtatgtggggtgctattgcccaaaccaacttgtcatctctaccaacccggcataatacgtaggagacctgtgagtcctaacagcggctctgtttctcccctaaaacacacccaacacgggc

SEQ ID NO: 221135 - DNA, 349 bp, Glycine max
agctaggagtgtcttttagtattgaatctatccttcctaagaaggagccaaaccctgtcctcctcattaagaactagctcatttcttcctctattgcctttagttgaatacacctttgtttggttctctatttggttcttaaccctctcatgcaacttctttacaaactctggcctagattccccttctttatgtataaaagaagtgtctagagggaggggaatgaggtctaagggtgttaggggattgaatccatatacaacctcaaaaggggattgcttggtggttctatgaaccccctctgtgtaggcaaattctacatgaggaagatactcatcttaagacttat

SEQ ID NO: 221136 - DNA, 359 bp, Glycine max
  unsure (1)..(359): unsure at all n locations
tgtgcagcactatccactgcagaagcataatatattgtagtttgnattattgtgtgctcaaagtctctggatgaaataacaacttgaagactttggagtaatccttgatcacattcccttgaaatgtgacaacacaagtgctatcaatctatctaaaaatcctatcatgcattctagaaccaaactcatagagataagacatcattttcttagagatcatatatcaaagggtgattggtgtattgagtttactgatagtgagcatcaactagctgacatcttcactaaacctcttgctagagataggtttttcttcattaggaatgaactatgaggtatcttacaagggtctagtattg

SEQ ID NO: 221137 - DNA, 464 bp, Glycine max
  unsure (1)..(464): unsure at all n locations
agcttgtatgagttnttcaatgttgtctttcatgttttaacaatattctctggtgtgatcgtatatgtgatggtatctgcagtatntagtcatgtccaaccctgtcctgtgaggaagtggtagaggtagttttataggtacctctgcgttaaaagcctcctcaaggattgtagtgcgattggatgtcaggggtgtgtaacactcgtacctgngtccttttgggagaggcgggcatttgtctggcttttgtcttttgtctgacttgtgtgagttagtggtggtacctccttctctcttgtcatgactttgtccagcttgtcagacctcatttctgaacttggacatctctttcatctggatgtagctntcaacttcgtcgcacaactcgtcaatgctaatatgaggtttttgcatagactgtctacaaacttatcangtcgtanggcgaggagcatggagtgtca

SEQ ID NO: 221138 - DNA, 392 bp, Glycine max
  unsure (1)..(392): unsure at all n locations
gccgaagaacatagaccacaaagtcttgcaacaggtgtagatttctaattcatggcaagctgagttactaggttgaccaaggcatcaagatttccttcaagctgtttattttcagtatatgaagatgaatccgtggccacctcatggactcctctaagaacaataacaacatttcttgcactaaattgttgggagttggaatccatcttctcaatcaaattcctagcttcagcaggggtcatatcaccaagggctccaccactggcagcattaatcatactcctctccatgtngctaagncccttctagaaatattgaagaagaagttgctcataaatatggaggtgagggcagctttgacaccatttcttgaatttttcctgtactcatac

SEQ ID NO: 221139 - DNA, 290 bp, Glycine max
  unsure (1)..(290): unsure at all n locations
aaacgtcccaactataagtcgtacttttatgccccttttcaggtttacgcagaacaatattctcagagtatatccaaagggaacacgtctcaattcctcaaattacaagccacacatanggtggacatacggagctcagatggtcgcgttcaacatgcaggttngagactagcgaatcaatattagatctttggactaatttctttatcgtgaagcaatcttacatgcctattgaaatagtataagtcgtgtgcgtacatctacattattattatgcttaatcttcaatg

SEQ ID NO: 221140 - DNA, 266 bp, Glycine max
ccacttggtgttcatggtggctccggcggacgtatcaacatagtaagcacgacatttccctacgagagaattacgagctcttggatgaacctcgtggcaatcgtcacagtattggacttagacctatggctcggacatgaccacgactaccagtaagactagatgtcacttatattgcttcacaaaatgcgaataggaatatgcctcctacacttatacatttgaataatgggtcgacgatataatcataataattatgcgactca

SEQ ID NO: 221141 - DNA, 328 bp, Glycine max
caacgaacaagcttgaccagaatacagcgctcaggactctcaatcaatgccgcgtcatttttgaactcatcccacccttgaattgacttctgtgagagcctttgcactggcaacactttcccattcataagtgtgccctgatgaataatctgctgctaatgtaaaaaaggtcttaacgagaatatgatgttcctgaaacacattcgtgatacatacctagtctactggaccacatccaccttaactgagcttatcttcggtagagaagttgtcattggccatgactacagctgacaaaacgaaagttggcaaatcatagtctcttata

SEQ ID NO: 221142 - DNA, 409 bp, Glycine max
tattacatgttattcattaagagtggagacttttgaacgatctctatagatattctattacttacatttcaatgagacttatctctacagaattgcttttgatcattaagattttatgaaattgcggattcatggtaggtgcatccacagtcaagcatagtaaggattttgcaagacatagtgaagctggttgggctctacactatgcaacataatggagattgtaagttgtgccatgctaattaagagtaaccttagcacgtgtcacaaccaggctggggcaagtacctcacttccatatatgatgctagatatcaccactcatcatattccattaactttctaaaagattatgactgactagtgcccaatcatttttctattataggatctaaattagttctctctt

SEQ ID NO: 221143 - DNA, 351 bp, Glycine max
gacagtttgagaactgaacatgagaatggggaaacttaggagcaaacttttatttggaacaagtctatatcattaggctaaacttgctcccactggttttacgacaaaaactctaccgaatcaaaatttgtctcctcaacacccaatctaccctagaaatgggtcttgccttcactttgggtcactcatttacctcctatgcacagcccaggctttcccacagttcctgatgacatttcaaactaggattacctcactctatattcccactaccactaaatccagattgtggttttcagatcctctaagcatcacacttttccactcagtacattacattctcacttttta

SEQ ID NO: 221144 - DNA, 162 bp, Glycine max
agcttaaacattatattggcttcaaacatatgacagtgagaaaacaagattaaaaccatgtaaacttttttaacataccagctgattggagtaattaccttgttacttatatagcattattaagacttaagaaaacgcgatagttcctaacattaatatttt

SEQ ID NO: 221145 - DNA, 150 bp, Glycine max
attgtcccaaggatagaaggaattgatctacctggtcctagaaaagaattgccgtccaagtccaagtaaatcaaatgctttaaatcagccacaaaaggacttatctcgtccccaaagctccgtatcctataagcttcctcatctaatgta

SEQ ID NO: 221146 - DNA, 414 bp, Glycine max
  unsure (1)..(414): unsure at all n locations
agctnttagttcccctcccattagggtctttaaataggggcattgagccaacacattacatgttgtttccttgatattgccatgcatatctttgcaatgtcatgtttgtgtgcgtctctgctatgtcattatttgatgatgttaccacatgcttgctcatataatatttttcttttcattctattgcatcgacactcatgtgttgcgttggtctcgtcattttgtcacaagaagtcggaaggtccgcatcaccttcttaaatgcatacatggggcactgtggtgatgattgtaaatgaaccatgatgcctaaatgttataagtaagaagagatgatctttcaggctctcgtgttcgtaaaatgcatttgtgtcatgcatagcataagcattccttaatgcattcatcataattc

SEQ ID NO: 221147 - DNA, 302 bp, Glycine max
gaacattaaccacaagagtctggcgacacgtgccgacttttattcatggccaattgggctaccatgttaaccaaggcaatctagttaccttcgagcttcttaatctcacctgatgaagatgaattcgaggctacttcatgcacccctctaatgacaatagcatcatttctggcgctgaaacgctgtgagtaggaagtcatcttcttaaatacaattctgggctaagcaagggtcatgtcttcaagggcttcaccaatgacagcatctatcctacttctctccatggtgctgagaccttcata

SEQ ID NO: 221148 - DNA, 405 bp, Glycine max
  unsure (1)..(405): unsure at all n locations
gcttgtgntgtgtgctgagtgagcgatttatcatgtatgtttgttgtgtggaaggttccagggaacctatattaatattacttgagcgagagtgttggtccttgtttgtaggggttgtagttgccttgtanaaaatttctgacttatagataatagttgggagcctataaataatgttagaaataaacatttgaattatagataaaggtataagatagttataccttgtagataatgtggcattatagataatttaatacccaccaatagataagatatctaaacacatttgaatattagtgaggggagagataacctgtttgttggggagcctgactattaaggctaggcgtttgcgctcctataacaaggctgatgtggagggaaacacgtgttttgagtgcc

SEQ ID NO: 221149 - DNA, 364 bp, Glycine max
  unsure (1)..(364): unsure at all n locations
gcatgcaagcttcttcatgaacagaggnggagtgttcttgcaaagacactctgatgcccaacgtatcagtataaaagtaaaaaggcatccacaattagggtggattaagagttctttaacccgaaccttgaagatccccttttatagaagtgaaaaatgatgacaaaacttcaattttccttataagacaacgtaactaggaaaaaatataattttatattttctttcctctcataacaaaaaaatatccgaatttacaggatatctttatacttctggtaaatgataaaattccttcctcccttaattaaaacaccaccatctctgtagcctgtagatgaataatcactcacccatcacaata

SEQ ID NO: 221150 - DNA, 370 bp, Glycine max
actataaatactcagctcgcacttatgacggaatgatatatgcatctaatgaaaactttttaatatttgcatagaatgacgttctttgctatatgtaaaataaatagtataaggctatggcttatggacatggtctttttgacccctaacaatcttaaaaggcaatatagaccatgtttttacgccatagccttatactattgtgatttacatattaaccaaaagaaactggaaagtctgaaagacaaatagtcaagaaagtttgtcattaagtggcaatatctttcccttctcagagcaagcttcttgcgtagccgctcttggtgcttaaaaaattccagaaacatatccctcttatactaactatttt

SEQ ID NO: 221151 - DNA, 282 bp, Glycine max
cttttgaagtatggtctcacaagacttcttattcatctaagttacaacaagtggcacacatgcttctatttatagactaagtagcttccttgagaagctctcttggaaaacttccttgagaagcttctttgagaaacttccttggaagctagacttaactacacacacccctctcataacaaactcacctattgagaagcttcttaagaagaatcctaagaagctgagctaattacactacctctctaatagctaacccacttcttgagatgaaagctcaac

SEQ ID NO: 221152 - DNA, 429 bp, Glycine max
acctataaatactcagcttggacacaggtcacccattctatctatgttgcttcctccttaagcaactgtcttctggaggaatattttggaaggcccaagtgggcctggttgctatttgcacccccatatttactaaatacaccccttgctcttattttggtgattattttcgtaacgttacgaaactttacgaatttcgtaacgatgcttgctttctttcccgaatgttacgaaaccttacagaatacggaatcatccctgttttgccttccggaacgttacagaactttacgaattgcgcactaacacttccttttatttttcggcatgtcatggaacttcacggattgtgctacaaatgctttctttttacttccggcatgttacggaacttcacaaattgtcctacgattggtgccaagtaccttg

SEQ ID NO: 221153 - DNA, 422 bp, Glycine max
gcagctagaaacttcttgttttgcatgtatggaagtgctgagacatcaaaatatgtaatgtatatatttattacgatctgaattataagaaaccaatctgattaaaggaaactaaatatcctttcattatcagtatttattggaatgaccactatataatagagcatcctgtgtgtactctgacatacagtttcagacaattatccctttatattttctcattttacaagatctaaggaaaaacttgtccctttcatatgaactttgaacacttctaagttgtttgtatgattaatcacacaaatttttgtgatcaaaagacaccttatagcctttctccaataactgagcaacacttaacaaaaatttgattaatctaaggaacaaataagatataaaaaattaatctcacacctgaatga

SEQ ID NO: 221154 - DNA, 396 bp, Glycine max
  unsure (1)..(396): unsure at all n locations
ctatgggagaaaggttatttcattnttccttctcaatctttcttctcttgcgggtgaatatagagaaacttattcaaccaggacctttgagaagaacaatacagtgtgaccaattccacaacttaagcaaaataacagagacaccctaaagtcctttgttgaattgcatcatcaatttctcaaagcaaaacctccccacgcccacaaaagtttctaatcgaagaatgcgaccacaagcacaattcaaacaaatacacacacaaaaacgaaaaaaaaaaaactgaattgaaaaagaaatataaccaacaagagagagaatataatgctcagtgagcggagtcaatcccagcacagagtatatgaattctagtcaaagcagagcctaaggagagagaa

SEQ ID NO: 221155 - DNA, 384 bp, Glycine max
ttatagtgatggctaaattttcatccgggttaagagttatgactcattgaattactcaagagcttccgatgctcaatttcgagcgtcacgatattttatgcgcctgaatcggacatcccgaggaaaagttaagactatttgaatttctcgagagctttcgttgttgaatttcgagcgtctcgatatattatgcgcctgaatctgacatccgagttaaaagctatgataattagaatttctcgagagctttcgttgtttaatttccagcgccacgatatattatgcgcctgaatcggacctccgagtgataagttatgaccattctaatttcttgagagctcccggtgtacaatctacagcgtcttgatatattatggtcctgat

SEQ ID NO: 221156 - DNA, 410 bp, Glycine max
ttactgatggcccgggtggttccattttttttatgtatggtaaactcggtgacatatactattcatacccccttttgacgtgcttaagccatttatttaagtcatttctcgcttaatctaaaaataaacataatttccaccgatcgtttgaaatgcatcatccgctaatttggtaaaatgaattccgaccgttcggtcgtgccggaaccacgttggaaataaaaaaagaggtaaaataataatttaataattcaaaaaatacccttttagttaaataatagcgagaaatcaatcggacgttttctctttgggatgtctcattcttaattgaattgactaaataactaaagggagatttaggataaaatctactcgcctagtcaagctcgtccacaaatataggatttgga

SEQ ID NO: 221157 - DNA, 452 bp, Glycine max
  unsure (1)..(452): unsure at all n locations
ctatccaactcactattaggacgcgtgtattgtgttntaagacattcctaaaacctagatattcttgtatgagaaaaatgcgtgttcttagttcatacatttttgttaaacgtgaacaacgattatgttttcatattaaggaatttggtttttcgatttttaaaaacaagtgaattttctcatctcttttaagaattcatcattgttttttatactcggaagaaattaaatctatatgtcttactttaagtttgatgattgtcgttcctttcgggtggtttttaagtgtgagtgttacattttaaaaataattaatttttagttctagttttgaaaaactttatattccagttttaaaacaagattaattctaaaataaactccttctgaaacgtttactataatattagcttaagagtgtttctgtgtggggtgaagacaatggtgatgta

SEQ ID NO: 221158 - DNA, 382 bp, Glycine max
  unsure (1)..(382): unsure at all n locations
ctagcagtctcaaatgaactcaacctaactaatatgcattaaaacaacatataatgattgagaaaggtaagaaaagttgggttgcctcccagtaagtgcttctttaacatcactagcttgacgtgtgtgccccctaagggtcatttaaatacaaaataatggttaatctctcaatgctcccaccatggtacaacttcactctttgcccattcacaatctagcttctctcaggagttgctgattgaggatctcttaactccactgctctgtacgactttacctctttgatagtaaatggtccagaccatttagccttcaattttcttgggaacaactttatccttgagtngaacaacagatctcgttggcctggttgaaagtc

SEQ ID NO: 221159 - DNA, 203 bp, Glycine max
aagatgatatcccatacagagtttttccccctacccgcagggcatgaatagaaaaccattgattgaccagaattaaaagaggcctagatctctgaccttaggaaattttgccctggctaatatagccactaatttgtctatacattaagttattattttgaccttttttaggtccaaaagtggatagtccctaaaatgagatt

SEQ ID NO: 221160 - DNA, 459 bp, Glycine max
tgatatttgtggggaagtgagatgtgcgttttttggttgtacgtgatgtggaccaagaccatacctcatagtttgatgatctatccaaccacgattataagtgtcgcagtaaggattatattgttattgttgagatctgaatggctgtccaggttgcatggtagaaacattagtagcttgttctggtttcttggaagtgtggacattgcattttgttggatgctcaggtgtacaataaatgccacacaacctttgttgattggctgccatcacattctgccgttgaccaatggctagctgtctcacaagggatgtcaattctataagtttattcttctactctgattatcaatagtcataaaaacaaaaactttacttgtagtagctctggatggtgcaacaacctagaaccaaatatttggtaatatactgccatgttggagattaattatatggcat

SEQ ID NO: 221161 - DNA, 454 bp, Glycine max
  unsure (1)..(454): unsure at all n locations
actcaagctttcacaagagaatccgattcgggcgcataagatatttagactctcgaaattgaacaacggaagctctcgagaaatttatatagtcataactgttcacaagaaaatccgattcgggcgcataatatatcgagacgctcgaaattgaacaacggaagcacttgagaaattcatatggtcataacttttaactcggatgtgagatataggcgcataatatatcgagacgctagaaattgaacaacggaagctctcgagaaattttaatagtcataacttttcacaaggatatccgattcgggcgcataatatatcgagacgctcgaaattgaaccatagaagcactcgagaaattcanatgggcataacttttcacttggatgtccgattccggcgcataatatatcgagacgctcgatattcaacaatggaagctctcgagaaattc

SEQ ID NO: 221162 - DNA, 353 bp, Glycine max
accattgttcttccttcccccgatgctatattttatgtccgccctgagtggccttattgcctaaaccatacttcccacgatttctctgggtatttatcaggctacgtttgccggcgttgtttttacctaaacccatcccgggatcataaccattccccaacataactcgggccattattaccgctgcatcggacagacaaagctgcccaaagagggagtccccgagaggaaactgctgaccactcttacaagactggaaagcagttaataaccaatctattgccgcttccacataaggcatggaggatgggcaacttaccaaatatcttcctccctgacaccagaccaagtcc

SEQ ID NO: 221163 - DNA, 428 bp, Glycine max
cacctgatgcatgcaatcttgagaaatcttagaaaccactagatataccgctatcgttgttatactaaacacgcgagcccacttagagataagggatgagtttatcgcatttggggttaaaaggaacacaaataaggatccttataggatcaaattgaggtttattttgggatgtttattctatttgaattctacctttatgattataatcacgagattgttatgtctagaagcaagctttatgatgatgaatcatgataatgaatcaagttgattccagcagttttgataatgataaaaatgatgacaacaaggctaaagaatgatttcaagattgagttaacaagttcaagatcaagattaatttctagtttcatgagaagaaatcaagaagattcaagaatcgaaagaagtttgatttcaagatt

SEQ ID NO: 221164 - DNA, 372 bp, Glycine max
cacatttctcataaacgggagagaaatgttcatctaaagcatacaatccctaaattatcaaatctaaaatttgagctcctacggagcaaaacaatgtgtgtctcctagagagggcatcagctaccaacaattgtttttcccttttttgtatttgataacatatggaaaatgctctaggtactctacccattttgcatgcctactgtttaacttgctttgccctctaatgtacttaagtgattgatgatcactatgaatgacaaattccttggaaacaaggcaatgttcccaaagttggagggctcttattaaggcataaagctctctatcataagtggggtagttgagggtggcactatgaagtttttcact

SEQ ID NO: 221165 - DNA, 446 bp, Glycine max
tgcacttgaagtagggatgatatatgctgctaatgaacaactttcttaactatttgtcattcacagttgactgtttcttttgctaatatgtaaatataaatagtataaggctatggcttatggacatggtctttttgacccctaacaatcttacaagcagatattgaccatgtttttacgccataaccttatactattgggatttacatattaacgaaaagaaacacgaaagtctgaaggacatatagctaagaaagatgttcattacgtgcaaatatctttccctcctcaagtgcaagcattctgcgtaaccgctcttggtgcttataaaatcccagaaacaaatccctcttattactagctattttgaattctttacgttctgaatgtacaaacttcaaattgatactgcgttacccttcttgatttatgcaaaaaatcaaatc

SEQ ID NO: 221166 - DNA, 336 bp, Glycine max
gcatcaagcaccccatattctttgtcgaacatactctaaccaacggtcaagcagaggcaggctataatattatcctcaaggccctgcgtactagattgaacaagcctataggtttatagaaagaggaactcccctgtatactttaagccaatcattgttctctccaaaacacaaccaacaaaactccttttcaactcatatatggcacaaacgccatgatccctatcaaaattgggaaactgtcgacaaggaggatgcttttccaggaacagaaaaacaaagaaagcccacgagctcctcaaacctaaggtcctccattaatgagtctcacatgct

SEQ ID NO: 221167 - DNA, 453 bp, Glycine max
acaagaattaagatattcgagatggatgatctttacagtctctagagtcttatatagggtatattaaataggaagggaattccaattgaagtagcaaaaagtttggccaataaatttaagttaaaaagtctttttcaacaaatttactttctggtaatcgattaccagaggatgtaatcgattaccagtggccaaaactgatttacaacagctattatagtttgaattcaaaatttgcactgtgtaatcgattacacatatatggtaatcgattaccagcagtttctgaacggtttaattcaaatattaaagcttgtgatcaattacacacatattgtaatcgattaccaaaggagttttttagaaaacattctcaatagtcacatctttttatctgaattttaagtggccatcaaaggcttatatatatgtgactagagacacgaatttgat

SEQ ID NO: 221168 - DNA, 373 bp, Glycine max
atatttcttatgtgtcacactgcgagcccaactctcttgtcactgcaatcgtatatcgcttatttaaagtataaaatgggaaagaatgtctacataaaatatgacactgatacacaacgttctgctcacaccacatactatgaaacgaacacgttggcgtaatagcacaatcacctcccacgaattgtattattctatgctgattcaatagaagtgtctctcaccttctacatctataaaccctcttcttctcccttcattttatcttcatttctatgttctgaaatgcattacatcatccttacatttccaggctacatctacagccttagctcgaattcagccttttcgcacaacaatctggtgagcggtt

SEQ ID NO: 221169 - DNA, 387 bp, Glycine max
atggccatactgaacggaccattcaatcgttggatgacctcttaagaccatgtgccttacaccagaaaggaagctgggagagttttcttccatcgaaagagttcacttataacaacagctttcattctaccattggcatggctccctatgaagccttcgatggtagaaggtgtaaaacacccctatgttggttagagctcggaaaaggcctcaccttatcaccacaagtgggacaacaaaccactgataaagataagttaattcacgacaggatgagagctgctcacatgatgcagatacactaccacgattagaggaggaaagatttggaattcgaggttggtgatcacgtattcttgagagacactccatggactgggttggtcg

SEQ ID NO: 221170 - DNA, 316 bp, Glycine max
gtatcatgtttggcgctcaactgcagggagtcggacgaccaccttctcaattaaatttctggcttcagcacgggtcatgtatcccagggctccaccactggcaccatctatcatacttctttccatattactgaggccttcataaaatattggagaagaacatgcctgaatctgaaggtggggcaactggcacaaacttctacatctctccagtactcatacaagctctctacactgaattgacaatacctgagatatccttcctgataggcgcgagcctggaagcaaggaacaaatttcctaaaatactctctta

SEQ ID NO: 221171 - DNA, 379 bp, Glycine max
  unsure (1)..(379): unsure at all n locations
agcccttgtgggcaacattggtggaggattattatatgaccatggctgcatgagagagagggagagcttctgaattttctattttgctgagtgaggagagagaacagcttttggttttttttttaaaaaaaggattttctcttttcctattattcnattataaaccatgccacatgtctccatttgagtggagcaagaagggcccactttctcttttgatggtgactcatactcagccacaaacagtgggaaacacctgacctttgaaacgctcgaatcctgcctcggtgtgcgtgccgtctctctggctctagatcctcgcattcctctgcctgcgacgaggccagattctcaaagtcatctatatatatataaaaat

SEQ ID NO: 221172 - DNA, 480 bp, Glycine max
aggacctatgatactaagcttgatccactacccgcgccaagcgcaagggtggcgctgatctcttcgtcgcgaaatcagagcctacttaaagcctgtcgtgtgcaaaaataggggacactttgacacacactattacagactcttagacaaattgtgggcagaagaaagggcatagattctagagcacaccacaatgcctattaagggaaaaaagccctagaagcatcaagaggagcaacttgtgcattgaaacctatgttttgcaagaatattattgcttggggttctttgtaatggctagctaagcaccctagttggggatttctaatgaacatctgatgtaaatacctaatatctaattgattattgtttctgagttcaaagctttcttcaattcttaatgtttgcatgctcttaggtctgatcatccattcatgtgcataggtaggtgactttagcattgggaaatgtactattgcc

SEQ ID NO: 221173 - DNA, 355 bp, Glycine max
atttttatgtacgacttctggacaaaaaagtcttatataaaactcatacttgactttctttacatatggtatattttgacttttctcctgctcttgcttgaagcagcctggttaataccataactttatggagtatgattacactgtaagtcttcacattggtcttccaaattaaaatgtctcaattttgttggattaataaagatgcttcgatgaattatatacaggtggctcatgccactgagtattcttctcataattattattgagacagctcttggatggtcacttattaaaataactatagtttctcggcaaaatcaccaaattgggtcccttctacaaattaattatc

SEQ ID NO: 221174 - DNA, 413 bp, Glycine max
acagcaaccttctatccctggtggcttcccacatagagcatgtcccaacctaaagatggtaaaagcagaaaaggagatcttggataccttcagacaagctgaggtgaacatacctctgctggatgccatcaagcagattccaagatagtgccgagattattaaggagctgtgctcccataatatgaatgtcaagggcaactaaaggattagcatgggcaaaaacgtgtcaacattgataggtaaatttgttcctctcattcttgagaaatgtaacgacccaggtactcttctgataccttgcattattgcgaacagttaatattagaatgccatgctatatctaggagcatccattaatgtcatgcctctatccatgttcaattctttatatcttggacctttgcatctacaa

SEQ ID NO: 221175 - DNA, 454 bp, Glycine max
  unsure (1)..(454): unsure at all n locations
cgaaggtgaactagatgccttggttaactggagaacccatctgaccatgaatcanaaatttgtacctgtcgcaagactctgaggtttatgctcctctaccgaccaccacacagacctttgcccttctgtacagcaatctgaaacaattgagcagcctgaagcttatgctacaaacatctacaatagacctcctcaacctcagcagcaaaatcagccacaacagaacaattatgacctctccagcaacaggtacaatcctgggtggaggaatcatcccaaccttagatggtcgagtncttcacaacagcagcaacagcaacaacaacaaccttattttcagaatgttgctggcccaagcagaccatacgttcctccaccaatccagcagcaacaacaacaacagcccacaaacaacaaacaggtgaagctcttatgcaacctatccttgaagaac

SEQ ID NO: 221176 - DNA, 415 bp, Glycine max
  unsure (1)..(415): unsure at all n locations
agcgtgatgggaactatggatttgcaaattgtgtctactntcatcccaagtctatcttcactcatccaaccgcttgctctcaatctcagtagttgcttcaagacacaatcctccaaccctcaactccttcaatcattatttgccacgttaatccgcacttagctacatgttttgattccctcttctatgttctgcctccaacctctctaataagtctgaaacagtaatggctttatccaataagccacatggaacatcatttagcattacctctacctttgcatcacttatattctcgagcaatgatcctcctttaaaaagacctcttggagccatggtttgaagtccctctctaaccttgatgacaaggttgactttccagccggggataatgatagccaccccaatatcatag

SEQ ID NO: 221177 - DNA, 362 bp, Glycine max
  unsure (1)..(362): unsure at all n locations
tttgttgacgctgacgccaaagagtcttctgagctcaaatatagttcagcccacctcttcgaaagtcttctaacatatctcacatacataccatatactgtctgtgatatggagcataacggagaatgcaatgctctatatactaagtaaggcttctcaagcgagcttagaatgcctcgatgttccataacagccacgcggatggcacgaaatctcatgacctgcggatacaacattgggtgaaaatatgacataaaaaacgatgtcacttatacaagcgaatagacctaacgaaccacatactcacattgttntatcataatccaatacctgtgaataatcacactcttacatcacactct

SEQ ID NO: 221178 - DNA, 373 bp, Glycine max
tttggtgtttttatgggaatttaattgcattttacatccctctgagagaatgggtaccaatcatagcaaatcagactctaatctgattactgaattcaagaatggctacccgacatggagggtgatgatatcccctgtgtgggcacacaggttacatggtttacgccaaatggaacctgtcgaaacaaattggataaggtgccggactctgatgcttggttagctaagtggcatgacacttctcaatttatactttcaagaaattattctgatcacttgtcctatatttatgcgaactaaaggcgttgattggggccctacacctttaaggcgctatatggttagctaatgaacaccaaatttactacgttgt

SEQ ID NO: 221179 - DNA, 437 bp, Glycine max
  unsure (1)..(437): unsure at all n locations
agcttataaataactaaataaanatttaatttatttatttgtttgataaattaaatttaaaaatataattgtcaatgatattttatatcattttatgttaaaagagataaaaatttacatgtaaattaagatattttttatttatcaatatatttataaggaatgttctaaaattagagattgaccactcaactaaagttgattaacatagagataaaagtaagtgttatgtgtacattntttaagagcaatataagaataaagtgaaattgacataataaaatagcctaagaaatatatttaatgaaagaaaaatagtcaaccataatggttaaaaacataaaaatgatgcgaataaaatactaaaaattgctcatttaaatagactttttgtatttaaactttgaagtaagatcgactcttcattagagtatgtg

SEQ ID NO: 221180 - DNA, 403 bp, Glycine max
  unsure (1)..(403): unsure at all n locations
ntagcaaggaattatacaaattttccagcagtcaggatgttttttaacacaggagaaagaaactgtcaaagcatgatgaatttcccgttggcacatagaatcatatcagatatataaacatttgcattaactgagttgagttatttcacacaagaaacttttttgagaatttcctactctaatgtttcggaaccagttaatcattctgtacaactatgtgaaaatatcttaactcatttcttctagaatttcattagccgtctcaaaaagaggtgtgggagcttttaagcttggcgattttatctctgctacgatttctcttttgttataggatcagcagncaaactgaacttctcattcttttccattcttaaaaaaattcctattattgagaaaaattaat

SEQ ID NO: 221181 - DNA, 234 bp, Glycine max
ttcctccgtgttacaacagtatataatcctcttatcctacctaagagcaatctaatcctgactataacattcaaaaatgtataacaatacaatgatgaaagcattaagaaaatcgatataacattggttgaactatattatccacgccattggaattaaaatgcgaatttggaaggtgtggctttgcacttacaggacttctactgctggtgctacggctgcactcccaatctg

SEQ ID NO: 221182 - DNA, 372 bp, Glycine max
  unsure (1)..(372): unsure at all n locations
aatactcacagatctccttttgacatataacgcttcactatcatctcattntgttgtgcatcacgttcactgattaccaaatagttctcactgctaatgatccaaataaatttctcaaaccagtagactttacgcatatgtgaaattgaggcaacagtttnttttctggaaataaaccttgataaaaataaaaaaagagaaaattacaccattaattagtagttaaataaagcaatcaagaatggacaaatcagactaagagcttgcatatcgatgtgttatattatatatacattaagaatgagaggaagttccagataagtattacgatctgataatggcataattctaaacgtgagtgcaaactgaaac

SEQ ID NO: 221183 - DNA, 408 bp, Glycine max
tgacgagcatatttctcatcgtgtgcaccacgaagaaaggtcgccgaaagacaaacatcacagcgctcatttaagaccggcctcttcacatcagagaagagagaaaactccgggtgctcttacgaaaaaaaccaacggaaagatgacgaacttacttgctacttctacaagaagttgggacacttgaagaaagattgtcccaggtaccatggacggtgtgtaaagaaaggtaaatatctcgatcttgtttgttttgaagcccatttattactcgaacatctgttccatttatgtgcctatctagtactctatttaatcccattgattgacacgatatattaccaaaataatccctattgaaaaacacatgattaaacatacatagactctcatatgatattacttatg

SEQ ID NO: 221184 - DNA, 397 bp, Glycine max
  unsure (1)..(397): unsure at all n locations
acattctatcacagccaagaaaacagagcaaaggcagaaaactctgccaaaacaccaaccaaaatcacagcttttctcacttaaagaccccagtaacaattccttcgttccagttcgttaaccgttggatcgacttgaaaattttactggaagtctctagtacataaatatacattttgaccgttgggatctactagcaaacatccagaactaattctgcactactctttccacaaccagcaaaacatagcatttttctgcacttatgcaaaattctgctgcacaatttcacagcanaattctgcataaagtgcagatttcgaaaatcacacttcctctcatccaatcttgcccaaatcaattcctaaatgtcccaaatcatgtatcaatcatgtct

SEQ ID NO: 221185 - DNA, 453 bp, Glycine max
  unsure (1)..(453): unsure at all n locations
cccaccatcttctcatagtagaacaccagtatcgtgtccactatcattgttatcatctccttcttcatcattaggggcgctacttgagatgccagatccctccacctttgggcgtattctttgaaagattcatactcctttttacacatgttttgtagctacatcctttccagagccatatcagaattgtattgatactgcctaatgaaggcaatcattaggtccttccaagaatggactcaggaaggttccaaattagtataccaggtgatggctgccccagtaagactttcttggaagaaatgcatcaataattnttcatctttggcatatgctcccattttcctgcagtactccttcaggtgattcctggggcaagtagtccccttgtacttatcgaagtccggcaccttgaactntggagggatgacgatgtcatgcactangcacaac

SEQ ID NO: 221186 - DNA, 193 bp, Glycine max
gtcacacaaatgtcaagaacttttattttcaaaacaattccccatttcttgaacatatcctataattcaaagaaaaacatgcaaagtcgtacgtgcacatgaaattgacccaaaatattaaactgaaaatccgacgaaactaacaacattaacaaattaacacaactaacaaattaacataaccaacaaaact

SEQ ID NO: 221187 - DNA, 455 bp, Glycine max
  unsure (1)..(455): unsure at all n locations
gctggaggatgatgggacccgggttgaagaaacangatatttctacgtgggagtacgtgagctcagttggaggtgggcaacaagggatggtgggtttatgcgcgaattgtggatgtggaaaacttgttgtgcaccatcgtccgaccgccacctagtaccacatgtgatgggtaccccataatcctacaagcttgagatgaagaagtgttgaagggtgaaacttcttgcttttattgttgaccacagagtggtacctggagatatgtcgcggcggtcaggagaccttgaggacgtcaggtggggtgctattgcccaaaaccaagcttgaccaatcccgacccaacccgggcatattcggtcagagagaacctgtgatgtacctaaacaggcgagctcctggctgtccacagattaaaggaacaaagaccacattgcacggatgcttgtggtggctg

SEQ ID NO: 221188 - DNA, 308 bp, Glycine max
agctgatggaaacccgtctctttgcttccgagaactgctcagctttaataaggatgtaggcaaatttggtagagaagatcccattatgttcagctccccacagtcaggtgtccttcagattgccacttattctgataactgcgatatgatcaataaaaattaaagcttcccccatctcactgtcgaacaaatttcatctccaagagaaagtccattcccacccattttcagaaaaataacccatgtcttacacaatgtgtattctttgggaagagattcggataattatggaaattgctctttaagag

SEQ ID NO: 221189 - DNA, 351 bp, Glycine max
tgtaaccttcaacataaatatatatgactattaatggttatttcaatcagatacattatgctctaaggacttttccaccattcatgtattatttaatttaatacaaaacacaattaatgtataaaatttaatgatatattttaattaataaattcatataattaaatttaattaatttcacattaatgttgggacatgtgtcaaaaaagaaaaagaaaatcatttacaagattcaagctcccttctgttgtattaccaccaaaacattttgattatattttaaaatctctctgaatagactcactacgttcctataagaagtaaatgaaattatcaagaatgatgtacaaa

SEQ ID NO: 221190 - DNA, 447 bp, Glycine max
  unsure (1)..(447): unsure at all n locations
tactaagctgtggaactaaataacatatntaacaaagaggacttaatttaccctgtttgaagcatgaataaattgaagtcaggcggattgggcaggacactcatgcatttactgtcaaagataatatttatgttaagcattaaccaaggtgattctctttcacttttttctattgaaagattttcagattgcatgttggctaaggggaatacaggtaattggattccgatatctatgggcagaaatggaccaaagatctctttttatttttttgctgatgctaaaatattggtgccagaggctttgaccatcatgtgaatgtgattaaggatacgctctcaacatctggacaaaaagttaataatattaaatccaaactttatttctttctcttgaaaatgtggatcaggtcacacatagctttctaagtaatgcattgggtttttt

SEQ ID NO: 221191 - DNA, 428 bp, Glycine max
  unsure (1)..(428): unsure at all n locations
catgcaagctttgggggggattcagactntcatatgtaatctcaaccagcaattaatgcagctggnggaattgtgtgcatatggagtgacaaaaccttttctctaaaaagtaaggtcagcggaaatggatttataatgttaacagggaagtggattaaggaagcacaatctgttcacatcatcaacatttactccccttgtgattctcaaaacaagcgggtgttatgggacaagattaagcagctgaaaagctcaaacacaggaagtttatggtgcatattgggtgacttcaacactatcagaacaccagaagaacgagtgggggtcaatcaaaggggaatgggggatagcaatatgagggagtttaatgaatggctngatgagctagagctggaggaagcgccatgggtggagaaaaacgtcacctg

SEQ ID NO: 221192 - DNA, 397 bp, Glycine max
  unsure (1)..(397): unsure at all n locations
gagaacattatttttcggtcttggacttcagacaagagcaaataaaggcttcccttattcttctgtgcagagggcatctaatcccggcatgtgcattaagaacatagtttgatttgaatccttcggggggacaatagttatcgctggactatgctggagatatatatctctatgcattctatgaatcctttgcgttgttaacgagtttgggggctaacaatattgngtcattaagtccaaccttacatttcatccaacacgttcggaatagttacatttacgcatnttgcctgtcacctctaccgggaacgttcctatnttttaatcagttaacttcttagttacctttgctaatataacctatctcacctatgcaaataaacaatctctattacac

SEQ ID NO: 221193 - DNA, 394 bp, Glycine max
acctaaccgcgaacagccaaagtctttatttataaagctctttatatattcttgcaaagattgtaaaggtctcaaaacaccttgagagaaaagactaagtgtctaaacaatatattcgcttgtaagacgactaagagttggacagtgagcaagtcaaacaaaaaaatcttttgatttctatagagccaacaatgtcttaataggacaaagaatactgggttatttcaagcttaaggtagagtttgagttgtcgagtcagaagtagcaatgacaaatacttgtaactttgtgaagtagtggaacttggcggttagccaaaaactagaagtagtcttagtggtagagatgaaccaatataaatcgttgcggcctatacactatctatctctcatct

SEQ ID NO: 221194 - DNA, 453 bp, Glycine max
  unsure (1)..(453): unsure at all n locations
gagaagaaatcanaaagcaacaagtcgaaacttcatatatgataagtattaaaagattttttcagaaaccaaatagcaccattntgttttacaaaagaattttctcaaattttctaaagttaccagagtgattactctttggtaatcgattaccagttggcagtaatcgattaccagtgaccagattggtttttaaaatgttttcaaatgatttgtaacgttccaaaattattttcaaatagtataatcgattacactatattagtaatcgattacaagtgaatctaaatgttggaattcaaatccaattgtgaagtcacaacttttcataaaatacattatgtaatcgattacaccattgtggtaattgattaccagtgaatagttttgaagaanaagttaagaagtataactcttaacatgattttctcanaagtcataactcttccaatg

SEQ ID NO: 221195 - DNA, 407 bp, Glycine max
  unsure (1)..(407): unsure at all n locations
agcttcccagntattgtttgctaaaccctctgttggatctttcttataggcacttgatgtaaatatctttctatctatttaatgatgttttgtgtgttcactgttgatgcaatcctaccccccaacatcaccaatacatatgtttttattccttttacaggtgttgaggaaagaatccatgagtttcaagaacccctggatttgaggtcaaatccttttcaagggggagggaatgatgcaatcctacccccaagggcattggatagaagactccaagaagattgggcaaaagatgcaagagaaggcactagggttctcatgagccttagggtagatttcgggcccatgggctatgtatgagcccacttatctttgtaaatattaaaataaggtttcattatttttgg

SEQ ID NO: 221196 - DNA, 455 bp, Glycine max
  unsure (1)..(455): unsure at all n locations
tgacactacctgtgagaacaacaaanattatgtttattaaacaatcaatcgacaaatgtaagacagaattcattgatactacaatatatcattgacaatntgaattaaactaacatcacccagtttcaactacatgttgatgacacagtcacaaacactaaacactcaaaggagaagcacttctcttataaaattaaagcaaattcttctcaaagaaacatcaacctaaaaaacttcagtcaattaattatcaatgatcgaaaacttgtcaatcttaacacatattcaaaatcaaccacaacattgtcaaagacctgttaactgtgtttggatttgcctcatatatcgacattttcaaatgaaattgcatcaaactgtgagatgtaatgcacaagctacacattgtatcttctgactggcgcacatctgatggcataaaaagtgataccacacat

SEQ ID NO: 221197 - DNA, 415 bp, Glycine max
agcgttgaacttcatgtttgcctccatattttatggacagaggaattgagtacttgttgaaggtacgttatcacatcaagaatggctcttgctaacccgtgtcaaacaatcggttgttattttaaataattgaatatcataagcccattaattatattaaataaaaccaaaagaaaaaggcaggttatatattatatcctttattatacttcgcatcattatatgaaacaaaatattatacttaccaaaaattgtgacataaaataatttgataattgaattctttaatcaagatctaataaaggtcagcttgaataatatgaaatcacaaatgaaaattttactttatttcaaaatagggccacccccaaataccctcttgagttattaaaatacatataatctaatatttgct

SEQ ID NO: 221198 - DNA, 230 bp, Glycine max
aagtttagaaatatgggagatcaaaaaatgtgatgtgcagtaaaccatatatgagatttcactaaaggttcaaggtgaaaatataaagtcttgcaaacaatgtatatacttactagagattttggagaacttccttaaacgtaacatgggtaggagcatataatggtttttcttcttgatcatggattcatatctttatctgagcttactttgcactctggataaaccta

SEQ ID NO: 221199 - DNA, 335 bp, Glycine max
  unsure (1)..(335): unsure at all n locations
agaaatgttgttgaactataaactgacaatataatgaaagccaactttcnttccgaagaggattacaccacttggttagcccatgtggtcttgggtgtaaaagaaactatataatatatgatgtgtgtggtttacaccatccttaacaaagtcttcccaaagatccttaccctttgtccaccattgaccagactaattaatgggggcatggagtgttagaccgttaaccttttaacacgcctccttcagcctaaataatatcagatgttatcctaatgcaaaaaagacacctacattcttgatagatccactttatgcatccgggtaagttcttt

SEQ ID NO: 221200 - DNA, 378 bp, Glycine max
  unsure (1)..(378): unsure at all n locations
ntgaagaagatnctgcgcattagatacgcctagtcattggtcttaaatatgcaagncattattaatccatggagactgctaatgtgccacaaagttgacaaattgcataactcctattttgaggccatatagtgttgtttctttcctgaggtgactacaaacgcttgtgcggtataaaacagacttcccaggctttgctcctgtgctgtacatagatgtcaaattgggcacacagcaatattttgtatccatggtttcatgcaacattaatgtgtgaagtaacccttgtacttccatatgctacttgatgatgataatcattcgccataccatatatggtacctaaagttttaaaactctaaatatttggcaatatta

SEQ ID NO: 221201 - DNA, 370 bp, Glycine max
  unsure (1)..(370): unsure at all n locations
taaatcatgtgagacctgcttaanaagttaacaattaattttgttgtattttataatttagatatttaattgactttcattctgcaattattctcctcaactaagttttaaaggttttaattctgattttggttccgtttaatttaaattataaaaatttcttgttgccgctttctttcctctcagataaagagaggatacgtgtatgatgtatctctgttgcaaaaaaagtaggtcctttaaatttatttatatatacacgtgagcgaaataaatgaacattaagatcataaacttacataatgctggagtctggaatgcggcaacacgttcaagtggaacgtggtggtaactctcatggtagatggaa

SEQ ID NO: 221202 - DNA, 428 bp, Glycine max
tgtacacatggtaaggtttcttctgattatcaaatccagctgctcgcatcacataaaccttttcatttataaatccattcagaaacacactctttataatagaaagagagtggtccaaaattaccatgaatgtaggccaaagggaattgttcgtcagttaatggctctctaggagctgcccttttgaacttataaaggtgtaatggaaagggaggtggatgcggttgtggagttggtgcacacttgcacagtggtgtgtgaggagtgtcatcaatggattcatcttcaaatgaggaaaaggctagatctttcttgtttctggtgaaggaaactacccattctttgtccctaatcttttggttggcctttgtagcccttgtcttgactcgtcagggaatggacaaaggaagagtgaatgcacgcgattc

SEQ ID NO: 221203 - DNA, 375 bp, Glycine max
ggcatgggggtgatatgaccaagaatgcttaccaccatgccaactcttgacaaataacaccctgcatttgatggggccctttcctatttagccataggaaatgggtcattgggttgaacttgacccacagactcaacatgtccccttgtgaccctttgggcatgtcaaggggaataggagttttgaacttttgataactatccatccatcaaatagtgatttcaatgatatgttttctccttttctgcatgtgtttgttttaacccttgaaagtgattatattggttttatcattatccttgtgtgtttgggtctatggccatatcatatgacattacttgtaaattgtcatcaatttatatgtagcgaaattta

SEQ ID NO: 221204 - DNA, 372 bp, Glycine max
ccccacaagcaggaggcaagaaagttctggtactctgccgcccccaattttgcacttgcaatcttcttcttcttatcaacaattcttgcccccttcctttgcagtgtcaagtggagacgatgagatccctgaatccttggaagctttgctcacctttatccctgcaaccaaaattcatcactgagacttgaattcataatatgaactgacccaactttaattggatatcaaagaggtaccatcacattttgataaagcgactcttcaattcaaatggatattggtcgtaatttgaagtgtcataaatatccatgattttgcttttaaatttgaactgacacgaggctgtttcttaccaagcatgggacaaac

SEQ ID NO: 221205 - DNA, 351 bp, Glycine max
cactaaaaaccatgtggctgagataccaaaatgcctagctcgcctgaagaaagcatgagtaagtgcccgggctctaagcgagctacgggcactaagcaccccttcgcacgacaacagaatatgcaagctgtgacttcaagctaagcgacaaccctgccactaagcgacaacagatcgctacgcgagcctggcgcgctaagcgcgaatctttaggcatcaacatctcgtactatcccttgcccggattcctacaaaagaaagaccaccaaagtaatatgaagtaacagttgaagacacctattgcacagaaactcacaggatgccaaaattcaatgattcccaccagaagaa

SEQ ID NO: 221206 - DNA, 340 bp, Glycine max
agcgccataatgaaccgcctacgcgcataaagaaattggactaacgcggcttatctcactcagcggatggacagaaacggcgcgcttaacgggatgaccctccctacatcgaacatgcacaacacatccttcttccagatactttctcgggcccacccgaggataggagcgctcagcatatggctagtaagccaggagaaaggctaacgagagggcgaaaatcaacatttccaaaatcggctaactaacctgtaatagagagaaaaatgattatcaaacacactgaatggatatactaagtacccattacctatctgtaacaaaaaggaatgacacacta

SEQ ID NO: 221207 - DNA, 356 bp, Glycine max
tatacggtgaccacagagtggtacctggagatatgtcgcgggggtcatgagaccttggggacgtcaggtggggtgctattgcccaaaaccaagcttgaccaatcccgacccaacccgggcatagtcagtcagtgagaacctgtgatgtacctaaacaggcaagctcctggcagtcaatagataaaaggaacaaataccataaagcatggaggcttgtgtggtggctggccagctgtgaactttgattgatatatgggatatgggctctggtaatcgattaccaagggtgggtaatcgattacaaggcttaaaaataaagacaggaggctaagatggtctctggtaatcgattacca

SEQ ID NO: 221208 - DNA, 462 bp, Glycine max
  unsure (1)..(462): unsure at all n locations
gcagatcaaggtanatcaaaatctatgtatctaanacctattaatctagtggattctcaatgtttgagaagcgaaaatgagaattggttaattcttgggtaatctctcatctcaaacaagtctataacattgatttcgacttgctcaaactggttttacagagaaaactccaccgattcaaaatttgacccctcaacacccaatttatcctagaaatggctcttgctttcatctttgtcactcatttttctcatttgctctgcccaagccttcctacaagtcctaattgaaattctaaactagaatcaattcactttagactccaatttccattaaccccaaatatggcttctctaaccctcaaaatctcacactnttctacctacaacattgtcattctcacatttaaccctaaattaaccttcctcgtcatctctaccagttatctatcaacacatttca

SEQ ID NO: 221209 - DNA, 367 bp, Glycine max
  unsure (1)..(367): unsure at all n locations
agcttgagnttttgaaaccaaatcacattcttaattgagtctcagttgagctataacgccctataccaacactcgacttcatttctaggtcctaattattaaatgaacattgggcatcggggtctctaacacattaaccagaagcagggtggagtccttaattagtgttttctatacacaactattattttatatgctctttgcatttagtaagcctaggtcatccaccatcagaaagtaaccaacactagataaaccttgaaatattatcaagcgcagggaaaagaacttgttgcgtgaaacaattggatagggtgaaacctatggaaaaaaggtgagcttataaaacttttacctgtaaacgagg

SEQ ID NO: 221210 - DNA, 333 bp, Glycine max
aaccaagagagagaaagagatagatgatagagacgaggagatgtataaacgctatgatggagagagatagatactaaatgctgctgcatgagacgctggatgaataacacaactcttatagctaatcctgacatgaagatttcccatgtcttgagattagcatcatagttcctcaaagaaattagcctcaagcacaaaacatgtggagatgtggttagcggatgattatttgaagtctcactcacctatacactttcactgtctataatcttttatgtcgtaaaagacacattgcctatgctataccacgaataacatttacacctatgactt

SEQ ID NO: 221211 - DNA, 306 bp, Glycine max
ctattggaacgattctttaaaacatgcctaaaaaccttttgcttggaggtgaattgcgactgatttatacccagccatcttatactagtctggaaagaacccccggtatatattatatacatgacaatttcttttaaaactgagctaaactacacaaggtattgttgccacttaccactgcaccattctctaattatctcgtctatttatttgtcaacagaaaaatatcattgtatgctttgccgaggctgaaaatccccactcttaatcttttttagtacctggacaaaccccccgacatttaaa

SEQ ID NO: 221212 - DNA, 426 bp, Glycine max
  unsure (1)..(426): unsure at all n locations
tggtccccatagctctgcncaagcacgtgacaaatctacatttttatctacgancactatcacataccatgctacatggcacaccatgcatactgacaatctcacttatatacagggaggtcactcctcaacgaaaatatgatattaataggaatgaagtgagcagacttatcctatcaacaattacccacatagaatctaaacctctaggggtcctaagtagcgccaccacaaaatccatggaaatactgtcccacttccacaggggaatacttaaaggcttgaacttccctgaacgtccctgatgtactatactagccttctgacacaccaggtatgcaaagacaaactcactaacctctctcttaatgtcggccaccaaaacattatcttcacacctgatacatctcggtaacaccaacatgg

SEQ ID NO: 221213 - DNA, 367 bp, Glycine max
tctcgacacactgctaatccctatgttctcttcatcctaacatgagaaaaattttatctctagcttcctggacttatgtaagacctcatggtacaagcataccggttatatttgagtgagtgcacaagaagttgtctgactatggcaggatgaaactctgcggataatgatgattctcggcctgctttattttgatgctcagaagcattctacttgttcatccatgcctggtggttgatatcaggtatgttctacctttgacaccttgacactactgtggaggattgagtttatatgctacaatattgcatgaattctgaaggtattatctagacgacataatattagatgtcccccgtatgttaaa

SEQ ID NO: 221214 - DNA, 447 bp, Glycine max
ttgaaaaccctaaatcttcatctggtccaaccctgagaatattttcttacacacaacctcctctactggcacaccagacaaaaagacttacataggagacatataatgaatggaaaaagttgataaaatcagctttcccagagaaatttcattccacaactatcatatccttttatacacatgttaagggtataatattatgtgagtcaaggccaaaaccgtacaagactccatgaaatctacataaataaaatatgatgggctacatggatacctttctagcaagttgcttcctctgatttgcacgcttcttgatttcatccataaatggggaaaatgcttcaggaggcaacatctcactcaaatcaacttcacaaagctgaaaaattagcaaacatctattatgaatcatccaaaaatatcttggaagtataaaactcttttaac

SEQ ID NO: 221215 - DNA, 302 bp, Glycine max
agcctccactatcgtggagattatttcactaccaccgtttggttttaagtaactcgaagatcctggagaatttccccccctataaattgaggagaatattctcaagggataattgcgtacactcgaacaaaagatccatatggaaaaaaaaaattattcttctagatcactagacgacgaaaaaaacaaggagaaactctttccactgatctggaggagtgggaaagagtggaaataaataaataaattgtgtaaaaaattgtctactgaacaaatttatttttccctccagtctttttttt

SEQ ID NO: 221216 - DNA, 414 bp, Glycine max
tcacgtgccaatatgcactcattgttaacaaaaatgaatataagttaacgggtggactaaattgtcggaacatatggatatttgtggactaaattgttcatttccatggtacacgaatgaaattgtcaccaagcaaaaattataagaacgaaattgattatttatccattttaaaaatatccttactatttttgagtttgaggattttttaaacttttttacaagatttaaaaaggtgaggtttttttaatgacctaatctgataaccaactcaattcaatccaattaaagatggatttgaggtggattaaattggaaaataaaaaagtaaactcaactcaatctaatccacattaagtttaattagattagggtaaaaaatagacaaagttcaatataacccataccacttac

SEQ ID NO: 221217 - DNA, 277 bp, Glycine max
attcgcgttaagcacgtgcccttctaccgacgctggacttttgtgtatttacatgcccagcttttctatgctatgagccagactatgcagctgactacagatatacgcatcgacctacgacccttactacaatctcttgcttaaagacatttactactggcaactggtacgagatacactttatattgaacctctacggatgtccctcctatcagttgaaaaaactgttgattaaactggtatgccgtcgtaaagctgtaaacaaatgttttgtata

SEQ ID NO: 221218 - DNA, 446 bp, Glycine max
gcttgtacctcatcactttcttgcgaagctttattctcattgtctctcacagtctttagatttgggagccaatccaatccttgtgtccggactctcagccacttatgatagccgccgatgatcccattactgcttcccctaagctctctgttctttcttcacgccgcatcccatgccttgcgaactccttggagtaccctcgcattgtggtcactgaaaccccatgcgatgaaaggcgcgatgctctcgtctgatggcactcctctcatggggtagccaagctgtcttatggcgaggatgggattatatttaatacaaccccttgttcccatcaagggaacatttggacatccttcgcatgaagatagaatcctgattcttccttccttctagcgagggaaccaattaacagatgcccctccatgctagccaagagttggtcccaa

SEQ ID NO: 221219 - DNA, 438 bp, Glycine max
acctgtggcatgcaagcttcatatagcagaccatttattttggagacagttttttttatacagaagattagattctatctcttttatcttagtgagagtgattctcctaaattcttggagtgattccagaaccaccttggctgtatcaaaggactttcacaacctttgtgttgtgccctcgctggaaagagagatactttccttcctttcatcttcaccctgggtctttcaaaccacaatttcagaaaatccacctctgcctagaattatcctcgggccataactcccattttacgcacttcaattaagtgattcttgagcctaaattgaatttcaaaacgagaccttttcacctcgttgggaatcacctcatttggagccttgtaggttcagatattgccatttctatatttctgtccagccaccacttaacctacg

SEQ ID NO: 221220 - DNA, 396 bp, Glycine max
ctgttgcaagagtttgcggctatgttctctgcacacaccatttagatccttgtccttctttgcagcaatctggagtcaatgagaaacctgaagcttatgctacaaacatttataatagacctccacagcagcaaaaccaacaacagcaaaataattatgaccttctaagccacagatacaatccagcgtggaggaatcatctaaatctaatatggacaagccctccacaacaacaatagtctatccctccttttcagaatgttgctggtccaagcaagccatatgttcctcctccaatgcagcaacaacaacaacagcagcagcaacaacaaagacaacaagcaactgaggcccctcctcaaccttccttagaagagttagtgaggcaaatgacca

SEQ ID NO: 221221 - DNA, 399 bp, Glycine max
  unsure (1)..(399): unsure at all n locations
ttaattggagcgtctcttttattacgggtctattattacatgcgagaaaaaagttattgtcgtttgaattggctcatagcttcaacattcaatttttagcgtctcgatatgttacgggactcaatcagacatccgagaaaaaagttattgtcgtttgaattggctcagagctncaacattcaatttcgagcgtctcgatatgttacgggactcaatcacacatccgagaaaaaagttattgtcgtttgaattagctaagaggttcaacattcaatttcgagcgtctcaatatattacgggactcaatcagacattcgaaaaaaaagttattgtcgtttgaattggctcagagcttcaacattaaatatcgagcgtctcgaatgttacggcactctatca

SEQ ID NO: 221222 - DNA, 431 bp, Glycine max
  unsure (1)..(431): unsure at all n locations
cgagagcgngacgcccaatgcgagcatgtgttacaaaccctttaggaaaagcagacgactgcacttgtcgtaattttgcctaacccaagagaaccctttgatatgtaattgtgatgcatcaaagatggttttatgatgagctttgatgctaaatgaccacccacgttcctatacttctatatagctcaagactcatgagaggaattatcccacctattatctggagtgagctgttgtagttttcatctttaagaggtggaggcattacctatttggctccaagataaaagtgcttagtgatcataagatccttatgtcctgtttagctaaaaagagatgagcatgcatttcacgaaatgcgtataaattcttaacgataatagatttgagcttacatatcatcttggcaagccaaagtattgctgatacct

SEQ ID NO: 221223 - DNA, 275 bp, Glycine max
attctgtacactattggattcatcgtgcaagcgcgacccaacgtctaaactgcgatctggactttatgacagcgtactatatacataataacacgcatatttgctgtaacacatccgctataataaaattaagacctaactgcatttcttcacagaatttgttttccaataaagtaacatgacgtatgatactatcaaagattttaaaaaaagcgacaactaaaacttatatcattgaactgatggaacatactaacataagcataaaagttaag

SEQ ID NO: 221224 - DNA, 247 bp, Glycine max
ccattgaagaagaacatcctaagcctaccagcgccaatgaatctgcactcaaaagacatgctattatacactctccatgccagggcaaagaaaccattgcaagagctatgacccttgaaacaaccacgtctaaagctaaaaccctaactctttctttacactacgcactggaatcgattaccacaacggcgcaatcgagtacacaaagcgattcaagaaaagatgtgactcatcacaattgaatcag

SEQ ID NO: 221225 - DNA, 400 bp, Glycine max
gtctcactcattcatcgtcacaactctctacttcttctccttcgccaccttacctaggtatgtttcgtctaatcctgtataaatatttgattgcattcatctattgcacacttagtgaagtagacatggctaggctatctcatatttaacgcaatatcccttacccttactgtgttcttgtataagaggtgcaccccgtagggcattggatagttgatcgtgcgggtgcgattaggctaagatctagtagggacctccaatgtgtttaaatccacttctatgagcagcaaactgtatgagaattccatatttttgtgcatgagacttggatttgtgaataactgtatgagcaaaaaactgcatacttaatgttaatatgccctaatacattcttctctaa

SEQ ID NO: 221226 - DNA, 450 bp, Glycine max
  unsure (1)..(450): unsure at all n locations
tatggggtatccatcacatgtggtactatgtggttgtcgggcgatggtgcatgtcaactctccacatccacagatcacacataaacccaccatccccagttgcccaccttcactgagctcacatactcctacgtagcccttatcctcgttcctctcaacactgggtccccatcaatctctccaagcttccacaacatccaagcaattcaacatcccaaacatcatgaactatcaaaaccaaggaaaacagggcagaggcagaaaactctgcccaacacaaaccaatatcacaacttttctcacttaaaaaccccagtaacattctcctcgttccaattcgttaaccgttggatcgactcgaaaattttactggaagtctctagcacataagtctacattgtgaccgttgggatctgctagaaaacgtncagaacccaatctgtactactc

SEQ ID NO: 221227 - DNA, 323 bp, Glycine max
cacccatctaataactaagcttcacctccctgagaagcctccttgagaagcttgagcttatctactcacacccctctaataactaagctcacgtccttgagaagaaaagctagagcttacctacacacccctatattagcttagctcacccccatgacaaaatacatgaaaatacaaaaaaaaagtccctactacaaagactactcaaaatgccctgaaatacaaggctaaaaccctatactactaaaatggccacaatacaatgccctaaagaagaaaaaaaaaacctattttaatatgtacaaagaagagtggacccaacc

SEQ ID NO: 221228 - DNA, 402 bp, Glycine max
ctcgcaatatatcgagacgctcgaaattgaatgttgaagctctgagccaatataaacgacaatgaccttttactcggatgattgattgagacccgtaacatatcgagacactcgaaattgaatgttgaacctctgtgcatattcaaacgacaataaattattactcagatgtctgattgagtcccgcaacttatctagacgctcgaaattgaacgttgaagctctgagccaatacaaacgaccataactgtttactcggatgtctgattgaggcctcgaatatatcgagacgctcgaaattgaatgttgaacctctgtgccaattcaaacgacaataacgttttactcggatgtctgattgattcccgctacatcttgagacgctcgaaattgaatgttgaa

SEQ ID NO: 221229 - DNA, 408 bp, Glycine max
  unsure (1)..(408): unsure at all n locations
agcttaagaactttatgttgcctaaattttcttttcatcggaagnngatcttgacatatattgagtnttttattaaaccaaattttatttctaatttggacaaattcagttattgttgttcaattataaataataaagttagtctctcttatgattcaaatgttgcaagttatgagttcttttatggatatttgagtgtttctatcgtaaacaattttgggtggtacgaaacttaaaatttaatgagaatttcgttactttataacataagagcttaagtcatatttcttaatagagaatttggacgcttgtgttataggaaattctggatcatttatattggttggaccttatagtctatattgagtatataaagggaaaataaaccaacaacaaggaattcaagtg

SEQ ID NO: 221230 - DNA, 302 bp, Glycine max
aattgttttttaagccatatcaggtaatatccaattattcatgcaatgctcaagatgtttctcatttcccttcaggtcatgaatctggacaataataaccatcaattatttattattcttagagtaatttaaccagttttttttttattaaagtttcctttgaagaatgggagaaagcaaaagctgaaatactatatatgaagcaacatttgaatgaatctatacaacaaacatttatcttataaagaaagagtggcccgcccaaattgatggtgctgccaagaatgttgcaactgggacat

SEQ ID NO: 221231 - DNA, 315 bp, Glycine max
gagcaaactctcacctccactaggctatacatcaatctacacatgctcaaacgggttatgcgcctaaaattccaccgcatcataatgtgaccctttcacaccccatgtaccctataaatggctctagatgttactctggtcactcattttcttcatttgtgaagtctaagctgtcccataagtcctaaatgacacttatagaatcgatatactccatgtagttctcaactaccgcatattacgcaactaacttttcggaccctcaaagccacacacatttgcactcatatcactacattgctactttataaccct

SEQ ID NO: 221232 - DNA, 416 bp, Glycine max
caacatggagagaatgtgtttattctgagttcagactatctatttagtatatatcattagtgggcggggatagcgttactcgatcaacaattatttttaagaaaaaacaattatatttccttaaattcatttctaaaataatctaatatcttatgaattatagaaatttttatcgtttgaaatagaaacttttcggtgatagaaatttctcaactactttcttcagaaaaagttagcaattacgacaaaattatttaatacatttatgagtggggcaaaattataaacaacttttgaggcaaaagtaaccttcataaaaccttgtaaattggaatagaaaaagctaaaaatagtagggcatgcaatagatagagctccaggcccttcccgttgaatggcaagaaagccaacgcatg

SEQ ID NO: 221233 - DNA, 367 bp, Glycine max
actttttataggcgatgaagtgaacttggatctgcggactacgcgcttaacatgctctgctcgcttaacgcgggggcctgtattcacacttaaaccatgctgcttgcttaacgagggtggatgtattcccgctgagcgagcgtctccctcgctaaacaccaatgcttggactgcactgagcgcgatctgtgcgccgagcgcgaattgggctaggcctatttcaactatttgcctatctcttcaagcttcaggcctctaatctctctttattatatctacaggtcatgaatacgacaaacatcacttcttaacaatcaagagagaagaacttccaaataatcattctttaaagatattctcaccccac

SEQ ID NO: 221234 - DNA, 416 bp, Glycine max
attcataaaagatcgtgagaacaaaataatgattatatgattaaccaaataacgaacttaagaatttagctggttcaatacttcttgtttatctctatggaaccgtctcaaaaatatttatcatcacatatgattataagactgtaacgaaccctaaattgtgtatcactcaacaaacctcaaacctcaaacctcgggtatcttcctcaataattacaaaaaatgataatactttcacacaaaaatatttttcttacgacaaagtaagtgagtttgtttcataaactctctcttcacacactttatctttatgtgtatcttctccactaattcattcttctatatataataaagattgtcatcaacttcttataaattgaaacaaaattacatttaacgattctttcaaataatct

SEQ ID NO: 221235 - DNA, 244 bp, Glycine max
  unsure (1)..(244): unsure at all n locations
tttgcaaatgaaatttattgcaagggaaaaatcgctatagcattttgacggattagcaagaaagattcgtaacacatagtgaggaatattcattctaaatcatctatcttatgaggaaatttttgaaggagttgcaagggaaatcatgagatcagcgagggaatattttcctcactagttatcaacctaaatttagtgacaccgacttctctcanaaattcatggcacacttttgcgaggtatt

SEQ ID NO: 221236 - DNA, 399 bp, Glycine max
  unsure (1)..(399): unsure at all n locations
cacattcggataccttcccctcttctgatatgcacgacgcacgttgactcatatgtggcggagcacatgagtcaggctattatatctcccacgaagaagcaacacgtgaagtgaactatatggggaaccaacccagaccaaatttcaatgcaagcgggcattctggatctcaatatggccagcaatatcattcacagcagggacagtggagaaatcaccctcgagatcaatttaataaagaccagggtggtccatctaacaagccacaacaacaagggcctaatctttatgatcgaacaacgaagctgggagagacntttactcagttcatgcaagttgcatagtcaaatcataagggcacagagtcagccattaagaatctggaagtccaagtgggac

SEQ ID NO: 221237 - DNA, 444 bp, Glycine max
ccagctatgtatggaggagataagagaggcaaattttttgttccttcaagtcacgatgaactctttctgcgactttcagatgatgagaggtatgagcctccgtaaagcgacacataactcccaccgcatatagaatatcgggccttgtattggatagataccttaaactccccacaaagactctcgaagaccgtggagtctaccttctttccttcatcaaactttgataacctcaagccaccttccataagtgtgttcacgggattgcaatcacacatattaaattccctcaacacttctttgtgtagctttttgtgagacaaagaaccattctccgtgtgcttacttccattcccaacaatatgacatgagtcccatatctgtcatatcaacatcacaaaacatggactccttcgaagccttaaaccaatttgcgctattgcc

SEQ ID NO: 221238 - DNA, 411 bp, Glycine max
  unsure (1)..(411): unsure at all n locations
agcttccatcangttttatataacacattatcttcnagnaggcgctccttaaacctccattaatattttgctttaccttctcttccattgttgtttcttcattttttctccatgtatctcctcacatgtcttgtgctaaatttttttaacatgattctttagagtttccaccgattaaacttgctatagaagctagatttgtatttttatggttcaaatttcttgttcttgttcttgaaccatgaattgtgttgagtttaggttcctttgagttttgtcttgttatttattgtggctgaaacctaaatcataaaattcttacaaaaatattaaagtagaagaaaacctctaaaatctagagtgacttgttcacctattgcagttctgtcatagaagtcatgtctagtcatg

SEQ ID NO: 221239 - DNA, 446 bp, Glycine max
  unsure (1)..(446): unsure at all n locations
ctgaggaaattcanacgacaataactgatgactcggatgtcttattgtgtcccgnantatctctagacgctccaaattcaaaacagaagctatcagaaaaatctatggacgataactctttacacggatgtcccattgagtcccataatatatcgagacgctcgaaattgaaaacagaagctcttagcaaattcaaacgacaataagttttgactcggatgtccgattgagtcccgcaatatatcgagacgctcgaaattgaaaactgaagctctgagaaaaatcaaacgacaataacttttaactcgggtgtccgagtgtctcccgtagtataccgagacgctcataattgaacatgaacgctctgaggaaagtctaatgacaattactttgacatagatgccaattgtgcccgtgtatatcagacgctcgaactgtaacataaa

SEQ ID NO: 221240 - DNA, 336 bp, Glycine max
ctgaaatgatctgccccgtttcaaaggttcctagctatatagggtcgggcgttatatagattctattgttctcgcagttcagaacaaatcgaaatctctcaaaacttatatacgatgacattctggcatgtgcagatacccgtgccagaccccacttgctttacatggcgttgggagattcttagtgcacgtaatttctttaagatgattatctgggacaattgatctccctcgctgttgttgcaataaacagtggtgtctccgtggccctctatggcgaaatttccatttccctcccacgcatatgttgttctccctgacagtcggaatacctat

SEQ ID NO: 221241 - DNA, 401 bp, Glycine max
  unsure (1)..(401): unsure at all n locations
tattttattgagaaaactcttatttccccaagaaaataggggtagaaaggagaaatgttgttgaagcagaaactgacaaattattgaaagccaacatcattcgcgaagtggattacaccacttggttagccaatgtgggcatggtataaaaagaaactagaaaataaatgatgtgtgtggcttacaccaaccttaacaaagtcttcccaaagatccttaccctttgtctagcattgacagactagttaatgggggcatgtgggtttagactgctcaattttttagatgcctactcgagctanaatcagatcaagatgtatccactaatgcaataaatgacaacatacattattgatagagccaatttatgctacaaggtaatgtcctttggactaaaaatg

SEQ ID NO: 221242 - DNA, 272 bp, Glycine max
  unsure (1)..(272): unsure at all n locations
atgttatagtatcttgcagaggaacagtaaaaaacgccaaagaactgatggtgctttttgcgaagcgtgaagactcatttggacaaattattagtagaaagaaatccatttntcttttatcatggacatcaaccaaagacagattccacccatcactgatggtgctaggtaggcatggcaatggggtgggttagggccacgtttggtttacccgcctctagaccctgagtatcaaatgggggggtggattatcctcattgataggctatgag

SEQ ID NO: 221243 - DNA, 369 bp, Glycine max
gatcgctggcctttgctcatgttaaacaaggaaaactggatcaagggcttgtaagtgcgttttcattggctatcctaaaggagttaaagggtacaagctgtggaaattaaaaccgggtgagacaagatgtatcatcagcagggatgtgacctttgatgagagcataatgacaatgctaaataaagagcaaaaggataacagctcaagtggtaagagtaccaattttgaggtagagcattctaaaattttagatcatggcagtggagatgctattgatctcactgatcaaggagaagctggagataatgaagagctggatactcagcatgacttgtccaattatcaattgactaaagataaagaaaaaag

SEQ ID NO: 221244 - DNA, 460 bp, Glycine max
gcttcattctctcaatcccacaagtgtctcagttataagtgtttctattacaacaaccgaatattaaagctcccaactttgcacgtcatctctgtctatgcaatcctacatgcataatgtggatcactaaggactttatcaagcttgtaacgtggctaggctaacaaagaaataatggcttttcttggatttgaggcttaagatctaggaaagcattcattcccccaactcttgacaaaccataactcataattttttcaacacaccaaccttattggtttgctactcttttcagcacaaccactttattggtcataacttaccccagcttttttttcttcaaaatgataagaattttttaaattaaaaggtaatagacattaatactgtgttggaggaataccatatattgtgactcacgttaacttgtgttatttatttatatacatgcaataaatat

SEQ ID NO: 221245 - DNA, 420 bp, Glycine max
  unsure (1)..(420): unsure at all n locations
ngaccaagcctatgcatatgtatctaagcagagagatagaatattgatttataaactaagaaatgaataagaagttggagagtcacatactttgaatctacttcattcaatccaacaactcaaagtttagctacaatggatcaaaataaacacaaaatgaaaattgcaatggaaaacaatgaacaaaagtgacaaaaggtccctgaaattatgttacaagctcttttaatgagagcttctactatatttttttcctaccatgccagcatcttattgcagcgaggataactatcactacaacgagtcttcactctttccaaaggacctcttgatgcaagctccattggagcttgtaggcctaagatcttcttcatcaatggattcttttgcttcttggaagataaatggcaccggaatgga

SEQ ID NO: 221246 - DNA, 444 bp, Glycine max
  unsure (1)..(444): unsure at all n locations
acctgcatgcatgcaagcttcacaaaatanaataagcaaaacattatcgactattgactgtggactgcaacattcaagtggactcgtcatgttcatcccatatgggctccttcctgaagatgatctcccacacatgttcgttaggccggtaatagaagacaacctcatctccacccatcaagtcattgtccgttaagaatctgtgccaagggtcatccacatattgttcaccattatgcatggagatggtccatatgtgacgaacgccactcgtatgttgcacagtcatacatggtcttgaagcatcaacaaaatcgatagcctcagtaggcaacaactacaggacaacaaaggaagtcacatttcatactattgttgacaacaaactacgacaacttcatcatatgcataaggtctggccaatgctgtaggtttggagatgat

SEQ ID NO: 221247 - DNA, 320 bp, Glycine max
ataaagtccctatatccattgtgaagtaccaaaagtaaaccactctttctgtgaagaaataccatcaacttgagggagagacttatacaagacaatttattatttgaattttaatatctttctttaaaaatattagtaacaaaggaaaaaatatatcacccacacaaataaaacttattaattcattaaaaattattgaaaataaaaaaattaattttatgatagaggccatataaaattaagaattattaaataataaacataaaaattaaatatttattagagattaaaaatagtttgttagtcaaataatattgtat

SEQ ID NO: 221248 - DNA, 372 bp, Glycine max
  unsure (1)..(372): unsure at all n locations
tgttaaagaacttagaatatatcaagaacaagcttgntcgcacatcattcacatgtatgatatccactcgacaaggtttgaagtataggagaccttctatcctataacgcaacgtggcggacaaaaatgggcaggtaacttgaatggccattattgtcaatgcggaaagtattctgcgcttcactatccatgttcacacattaatatttcttccttgtcagtctttggaaggtcacactaaaattgaaaaaaaaacttaaagtaccaaattgaaaaataccacttattgaaccaaaatgaacaaaaatattcctgcataaacttgaaaaaatgccaactctggaactgaaataataaaaacttaagacctaa

SEQ ID NO: 221249 - DNA, 434 bp, Glycine max
  unsure (1)..(434): unsure at all n locations
tatatccgccaatggtattatcgatatacgtgtgtatatatatatgccgtctcgggttaaaaatttgtgagtattgagtgttgagtattcacggtttcagtttaaaaattttctgagaaagctttagcttgaaaatttatgagtattaagtgttaagtgtttgtatttttaaagctcgtctctgaatcaataagcaatatttttcttctctagtattgctcttatttatttaaagtaattattttgagtttcaactgacattaattttatttatttatttttctgtcattgttttattttatttatttgaagcttgaaataaaatttgagtnttgagtatttttttgtataaatttttctagtttgatgttattaattctaacattaattatctataatagccactaacatggtgtagttgaaagttttatatt

SEQ ID NO: 221250 - DNA, 327 bp, Glycine max
  unsure (1)..(327): unsure at all n locations
agcttatgtttncaatttcgagcgtctctttttcctacgggacacaatgggactttcgactgaaaagttattgtcctttgaatatgtttaaatctttgtgttggccattacaaccgcttgtgtatggtacaagacaatacttccaaatccgagttaaaagttatcgtccctcattttttctggttgcttcacggagacttaaaagattcttcatgtacggaagttctctttcggccaacggtggagaaccctcctcgcgaataacatttctaaaaataaaggagatccatttaaatcggtcttcccaataaatgcgtctgatttata

SEQ ID NO: 221251 - DNA, 395 bp, Glycine max
  unsure (1)..(395): unsure at all n locations
tgtatgagtatggngtacccatcacatgtggtactaagtgtcggtcgggcgatggtgcacaacaagctatacacaatctaatgcgcgcataaacccaccatcccctgttgcccacctccatctgagctcacgtactcccacgtagcccatatactcgtttctctcaacaccgggtccccatcaatcctcccaagcttgcacaacattcaagctaaacaacattcaaatagcacaatctatcacagccaagcaaaacagagcaaaggcagaaaactctgcctaaacaccaacgaaaatcacagcttttctcacttaaagaccccagtaacaatatctttgtccaattcggtacccgtggatcgactcaaaattttactggaagtctctagtactta

SEQ ID NO: 221252 - DNA, 451 bp, Glycine max
ggatcttaagtcacctgctggcatgcatgcttattctttagaactcatggcttcagataacatttcaagatcatttttggctccaatgttatattctgattcttacaaataaacttaaaaatcactaagaattgctgaccttttgactctaatagatcttcttaatgttgtatcattatcttgttgaagaactttttgttcaaccgattgttcaacattgacttgttgttccttgttaacaactagatatacatgattatcttcaacgacttgtgaaacttcaactattggttgtctaacacccacttgaacttgagggggatgaatgactaccaatgtgttacttgatccaaagggttaagcctcatagtgatccttttcaaaagcaatgtcttgaaatcgatcacacctactgatcaagtcattttcaagaaattttccatttcttgat

SEQ ID NO: 221253 - DNA, 418 bp, Glycine max
  unsure (1)..(418): unsure at all n locations
cccttcatttaactgtctctgggcttggcggccacgctcaaaaaagtactttcgacacctactgtacgttgatttgaccaatgctgttatgggaatgttgcgacaatccttcaaaaccttattgatacattctgagaggttggttgtcatgtggtcatatcgacgtccttctctatcataagccatcgtccatttttcctttgaaatgcgatcaatccatgttgctatggctggactaagttcacgaaatttttctaaattttgatcaaaaatgtgcttgcaaggagtgtaggctgcataaaattagttatgaataacaattttaagtatatatgaaagttaaataaacgtgaccatcaaatatgaaatcttacccaatttcttcaacatttctttttgttntgcattattgaatttc

SEQ ID NO: 221254 - DNA, 437 bp, Glycine max
cttaagccacgtgctgcagcttaaatgatatattacatactttgtgacaactttgccatgacattcacagaagcagataaacaaaataagcataagccatgtagctgaaagaataaatgaattgaagtaattcaaaaacttgacaaagaacagcatgccaaatactttgttgtaatgaagagactggcttaacagcaacacatcaacatttttccataaactatttattatccctctccaaaagctgtgtaggactgcctaaccatgtgccaggctggaaatgtttaagtaagataaagaaataaccaaccaatatcttctctgcaatatataactgagtgaagatctcaggagatcaaacaagtttattacagtagacagaatatggaagcatttcatatatatgtatggttaagcacttaagattttctgagaca

SEQ ID NO: 221255 - DNA, 447 bp, Glycine max
  unsure (1)..(447): unsure at all n locations
ctcgcccaggcgagctaggttgcttcctccataattcaccgccttctggtagaacttcctggaaggcccaagtgggcctgattactatttgtaccccctgtttactaaatacatccccttgccttttntgctgattctttttccgtaatgttacggaactttacgaatttcgtaaagatacttgttttctttccgtaatgttatggaaccttacaaattacgtaatcatcccttttttggcttccagaatgttacggaacctcacgaattgtgcaacaatgcttccatttgactttcggcatgttacgaaacctcacagattgtgcaacgatgcttccttttgacttccagcatgttacggaacttcacggattgcctaacgatgggtgccaagtacctcgaagtggtcaaacgagggtcgcatcccaacaaatggatggtccctgg

SEQ ID NO: 221256 - DNA, 343 bp, Glycine max
gatgcccgagtcatcctccctatgagatggtggtgagttttggcgagcgaaatgctcttccttggattaccgagaagaaccaaactcatgctttcacaaaacggaacatgaagtcgaggtggaagatggaagttatcgtcttgcgaacagggggccaaagatgaatcgagacacatcactgcatggattactgcacccgctacatatgactgactatgcacttgttacttccagatccaccttgacaaagaagctatgtaccatgttgaaactttgaagagagttttccccatactctgcgaaagatttgacattgatttaagttgacatcattctcatacat

SEQ ID NO: 221257 - DNA, 417 bp, Glycine max
  unsure (1)..(417): unsure at all n locations
agcttgtanggcgtttatcttcttcattattggagtcattngctacttgaagatcatggcagcggaatagagaaggaagaaagatgattgtgagaccccacttcaaggagatgatgagtcaagaagaagcctaccaccacaggaagccatggataagagcttgaaggaaggcgaacatgagtggagggagagggagagaaggggcacgaaattttatgcctcaaatgaggtctgaactttgaagtgtaattctcaaatgatcaaagttcaaaaaatgcacacacatggcctctatttatagcctaagtgtcacacaaaattggagagaaatttgaatttctattcaaaattcacttgaatttgaaattgaatttgtggagcccaaatttcaataattatgattaatgaaacttagat

SEQ ID NO: 221258 - DNA, 450 bp, Glycine max
  unsure (1)..(450): unsure at all n locations
tctagaggttgggcttatctaccncatcttcgatagtgcttggagtaagcctagtttaggtggtaccgaagaaaggtggcatgacagtcattctacctgcatgcataggatacttttagaggatggagctaatgcagtgaggcagccacagcggtgactcaaccccgtcattctagatgtggtgaaaaggaagtgaccaagctcttacaagctggaatcatctaccccatttctgacagccaatgggtgagtctagtccaagtggttcctaagaagacaagcctctcagtgattaagaatataagggataagcttatccccataagagtgcagaacagctggcgagtcagcattgattataggaggctaatccaggtaaccaaaaaagatcattttcccctgccattcattgatcaaatgcttgagcgcttggcaagtatgtctcattac

SEQ ID NO: 221259 - DNA, 398 bp, Glycine max
  unsure (1)..(398): unsure at all n locations
tcagaccagagcaactcataatctatgtatctaaacccctcattagtggatttcaagggttgagaagtgaaaatgagaatggggtaaatttggagcaaactctcaccttacacaagtctataacattaatctaaacttgctcanactggttttacgcctaaaattccacccgatcaaaatttgacctttcaacaccccatttaccctataaaatggctcttggttttactctggtcactcattttcttcatttgttcagtctaagctttcccataagtnctaaatgacatttaaaactaagattaactcactttaatcttcaactaccactaaatccaaatttagctttttcaacccctcaaagcatcacactttttcactcatatcactacattctc

SEQ ID NO: 221260 - DNA, 385 bp, Glycine max
aagaattgggtgttgaaaattcacaacaagactttctatgattggtttaaagatacaatctttgcagatgagaatgctttaaaaacattaagaaagctagcagatgggcctaaaagaaatgttataacctggcaaggatacgacataaataagtattcattttacacaaaagcacaagatgaaaaaagtacaatgcagaacagcggggtcatcctaagggctgaatctcaacacttcacaagtgtgaatgacgccaatccatgtgtagcttccatcccttactttgggttcattaatgaaatttgggagcttaactatgtgaaatttactgtttgtgttttcaaatgtaaatgggtagatagcaacaccagtgtgcgcaccgatg

SEQ ID NO: 221261 - DNA, 351 bp, Glycine max
  unsure (1)..(351): unsure at all n locations
aatgccaaaggaaatcgtgggaacgtatgtggttagagctataaagcccactcaggcagatgtaatgagaagcatcgcgggaaggaagagcggtattcaaagctcgcggttgagcaagaaagtgatagaagctcgccctgccacataagtaaaagctttataagcgcgggtctgggggactaatgtcaagtggtcgcaatatacgaagatgatgttccgagtacattggatgtggnacgaccatgccctcctgattacagttgggaaattggcgagtggaggaacggcccgacatttacgcaacgagcataatgtaaacctttacggttttaaaactctataggtaagcct

SEQ ID NO: 221262 - DNA, 378 bp, Glycine max
tgcttttaattgtgaccacagagaggtacctggagatatgtcgcgggggtcaagagaccttggggacgtcaggtggggtgctattgcccaaaaccaaacttgaccaatcccgacccaacccgggcatagtcggtcagtgagaacctgtgatgtacctaagcaggcgagctcctggcagtcaacagataaaaggaaaacaagaccacaaagcaaggaggcttgtggtggctggccaactgtgaattttgtgtaatatgtggatggtggcctctggtaatcgattaccaagggtgggtaatcgattacaaggcttaaaattgaggacaggaggctaagatggtctctggtaatcgattaccaaggggtgtaatcgattac

SEQ ID NO: 221263 - DNA, 432 bp, Glycine max
  unsure (1)..(432): unsure at all n locations
taatgatatcattgatttctttatatctaaggaacatactgtttatcagtgtatgtatctaatggtcactgggagtaaggttattttctaattttgtatattgatgatatcttgtttgcaattaacgatcttgatcttcttcatgagaccaagaaatttctctctagaaactttgaagtgaaagatatgagtgaggtaagctatgtgatagggataaaatattttgtaaatagatcacaaggattgttagacttatctcaganagcgtatatcaacaaagtactatagagattcaagatggaaaggtgtttaacatcacctattctaatttagaaatgagacaacagtattctcgcacaatgtcctaaaaatgatatggaacaaaaacaaatgaaagtaattttgtatgcatcacgatgtggtgcatctgag

SEQ ID NO: 221264 - DNA, 430 bp, Glycine max
  unsure (1)..(430): unsure at all n locations
agcttccgttcccaagagcatctnttatttaagcacttcagcctttgctttcgtgtagcttaagaaaaatggcatttcttcttctttctttcttccaaagccatttctaaagtttcaagcactttctccatcacccacagccaccattagcctccacaaaccatcattgttctccattgaaaacccacactgagaggaacccttcaaccgaaacagaatcttccaacttggcttgcggtttcggtagaggacgaaaaccctaatctgacctttcattttctttcgagggaaccatggttctatgcttgcttcttgttagttacatcttgtctttgcatcttttctgactttggaaccgccattgcatgtcttatgcttcttttgaaaaaccttagagaaagagactttgtaaacgttatcctttcatgaa

SEQ ID NO: 221265 - DNA, 296 bp, Glycine max
ggctcgccccctctcgcactgtcatacttcataaatacgcacccaaaacctgtatcccactttaacatacatgacctcgcttttcctaacactaccgcacgattctcgagtgattgctaatgttttaccgtcttaggcgtaccattctacttcatgatgctaaacttcatgtgtaaaaaccttgcaccaggctctcattatcattctctgctcaccgcgtggtacgccttgcgtttgtgggttctttcttacaatcgcatatgagattttatacaccgtgtgacgtgccttactca

SEQ ID NO: 221266 - DNA, 309 bp, Glycine max
cctcctaacgttgccctaataggcttaacacaccttccatattatagagaaggctggtctcatatcttgtgactccatattggaattatggcgttacaaacatttaggacaatacctggcccttataagaataaattagtctcatgccattcttgaaaaaaggaaaaaaaagcaccaattcctacataaacacctgtatttttccaagacatcacaccgagtgcgttacagaatatgtgtaccacataacacattggctgagaggttcacttggctttgtaccactaaatggacaccctttaccccaat

SEQ ID NO: 221267 - DNA, 317 bp, Glycine max
  unsure (1)..(317): unsure at all n locations
tgtgacagagattntgatgttgtgaaaaacatacatagtatgtctgttaatgacgggattagcttatgccttccaccactaacaacatatcttattccatatcatgccagtttatgtgactaacataaatagcctattggaaggaagtttcaaaaaaaggaaggagatanaagactctttttgtgttccaagtataacagaagaaattgttgattaaaaaactgtcaggggaacacagttttagaaaactgctttatctgcgactcgacatattagtccttttacaatttaaaagagaaagaaggtaattcccaatt

SEQ ID NO: 221268 - DNA, 427 bp, Glycine max
  unsure (1)..(427): unsure at all n locations
tctaaggaagntntcttaagatagcttctcaaggaagctatctagtctataaatagaagcatgtgtaacacttgtgctaactttgatgaatgtgagtcttgtgagacacaactcaaagttcaacttctctcccccttttcctccttcagtttcgtgctccccctctctctttcttttcctccattgaagcatcctctccaagctttttatccaaggcacattcttggtggtgaagctccttcttccatggcttattccctagtggatggcgccttctctcaccttttctcctttgtcttccgctgcatctccatggtgtaaaatcaccattgaaggacctcattgaagcccaaagatccagcctccatagaagctccacaagtaagctttcatcaagtggtaatcagagcacataagcttcaagtag

SEQ ID NO: 221269 - DNA, 51 bp, Glycine max
  unsure (1)..(51): unsure at all n locations
tgtcgggttcagtntcatttaagcgctcgtggcatcccatggactgagcca

SEQ ID NO: 221270 - DNA, 425 bp, Glycine max
  unsure (1)..(425): unsure at all n locations
agcttctaaactntatacaagaatgaagctctgatactacttgttggacaagtggcctcagatatcttaagaagaggggttgaattaagatattgcaaactatttccccaattaaaattctattttaatttcatgcaagttacaagttcccttaaaaatgaactcttaaataatgattcaaacaaaacaatctgaatataaatgctaagcaataataaataaaagagtttaagggaagagaaagtgcacactcagatttatactggttcggccatacccttgtgcctacgttcagtccccaagcaacccgcttgagagtttcactattntgtaaaatccctttacaagttctgaacacagaaggacaatcctctctttgtgtttagatatctttacaacaagagactctcgatctctcaatccct

SEQ ID NO: 221271 - DNA, 458 bp, Glycine max
tcgacatcaacctgattttaattttttttgtagcccactgtctgaaataaacaatctcctacgagtctttgcttttatcagaagatgaggagcatgactgatttacataaaaggttacacccttacacattatcatacccctatcataggatttgttgcctattatacctattgtggacaccacataatacacaacgttttaagttcttattgaccaaacaccttatacaccacttcccttacttgaagaataaccctcagctcaagaggtatagcatctgtaacggatgtctcccttaataggagaaagtagaatgattgtttaaaatgaatgctcttgtgatatcacactttgatgcaaaaatggttccctctctaacaatcttcttggaggaatcctttcctctgtgtctgtccttgcctttgaaacatgccttctatcctcctttattagcttt

SEQ ID NO: 221272 - DNA, 406 bp, Glycine max
  unsure (1)..(406): unsure at all n locations
ctaacccaacatgagggatatgaggacgaagaccgcattgattcgatctaactatggattgagagggattactttaagctatagctcnaacacataagcttgattgagtacagaaacatcatgatatacatcacctggcgtggtggaaagacccaacacttttagctactactgacaatcttacttacttgcatctttactgccgttagcccaaacttagtttaatactgttccacatcatcaactatcaatgatcgtttcacaatgccttattatgaatatatccctatctaaactacaccctgattggatgcttggatatccgcctaatgttaatacttgatgaccgggctctttcggaaactggattctcttgacctattttatatagaaaatggccgaaata

SEQ ID NO: 221273 - DNA, 343 bp, Glycine max
aatcattcacatctgaaatgggcatgtcctcctcaacaataacggcctatcccttctttccataatgatgcttgtatcaaaaggccatatgttaatcctccaattcggttgcttcgacaacttttacaacatgcttctttggccactccttaacctttcttagaagacgtagtgagacaaatgaccatccataatatgcaatttcagcgggagacaagagccttcatttagagcctaacacatcagatggtgcagatggctactcagttgaatacacctcattccatatatctaacaaattgactggcaaactatgcatatcctgataatgtgagtgccctca

SEQ ID NO: 221274 - DNA, 470 bp, Glycine max
  unsure (1)..(470): unsure at all n locations
agcttcctttacaacanagagaagagaagaatgattgattgaatatatacaagtagtagggatgtctcctctacctctagaacctcacaatcactcacagactcatctcatgctcccaggattgcttcctcttctgctcagttctctgccaatcttctcacagcaaaagctctcaaaactctttagaacttggacctttctctctctagaaatctctaaacatgcaagagcttcgagaatttcccaaactcctctctaaaatctgatttcaggcttaaataggtgcctttgtttgtgctagcgcgcttagcgcaactatggaccgcttagcgtgcattagtggatttcggcttaacgcgtgcttttctcgctcaggggatggaccaaagcagtgcgcttagtaggatgacccttcactcagcgcaaatgcacaactcatccttcttccagattcttcctcgcgctcagtc

SEQ ID NO: 221275 - DNA, 361 bp, Glycine max
gatcctaatgatcctaatccacttaaagatttattacaactacgtgatcaacttttgagcaagcttaaaggtaatttactaaaggctcaactatatatgaagatgcaagctgataagaaaagaaaaaatttgcaatttatggttggtgatctggttttaattaaactacaaccctatatgaaacattcagtggctgtgatgaagcatcaaaagctatgcatgtgctattttggtccattcccggtgattgaaataattggtactgttgcatataaagtacagctgccagagtctgctaaaatacatactgtatttcatatggttcttctgaaaccattgcatggcaaaagttctcaccata

SEQ ID NO: 221276 - DNA, 424 bp, Glycine max
  unsure (1)..(424): unsure at all n locations
agcttanataaancttattcaactctataattctattctctcaggnagnctctggatacctacggtatcgtgatttgtgagtcacggcatgtacgatgattatatcttgttgttccaatattatcattacaatctcacatggaataaatcagaacttactatttaagctttttcacattgtattatcatattatcacatttggcacactctcctcgtgtatatataaatgtataagattacttgccttctcattgagctactctttcttatattcactggaatattcttttcacacgaaatggaatacttcacactcttctctcttatcatgtgtatctttttgtaactctccctatcatttctcttatatacaagggtggaaatacattcatggatattttaaatggcgatcttcgatatatc

SEQ ID NO: 221277 - DNA, 460 bp, Glycine max
agcttagcttgatgtcctgaacaacagtaaagatactttgtcatacatacttaagcaggaagctttagtccaacataataatccataaatgtcacagaattgggtgttgaaaaatcacaacaagactttctatgttggtttaaagatacaatctttgcagatgagaatgctttagaaacattaagaaagctacctgatgggcctaaaagaaatgttataacctggcaaggatgcgacataaataagttttcattttacacaaaagcacacgatgaataaagtacattgcagaacagcggggtcatcctaagggctgaatctcaacacttcacaagtgtgaatgacgccaatccatgtgtagctcccatcccttactttgggttcattaatgaaatatgggagcttaactatgtgaaatatactgtctgtgttttcaaatgtaaatgggccgatagcaaca

SEQ ID NO: 221278 - DNA, 364 bp, Glycine max
ttttcacctgactacacgcattctgtagcggatgatatcgccatacacattgcatatctgaagatgtataaaacccacctagaacatgaagacatccatcagcagctgcaagagctcaaccacaaaagggcatgtcatccaatgcattcttctggacaagcagacctctaataataccaacagttctgataccttttaccatgttccacattcaaagcccagaagaacccttctgggaatcatcctcatcaacaacactaagcataataggaacgctctgccatattcgagaacggaggtctagagcatgccataagagtttattatggtcaatcctaaccaacagatatagccactcttcagt

SEQ ID NO: 221279 - DNA, 399 bp, Glycine max
  unsure (1)..(399): unsure at all n locations
agctngnanagnttatacctagaaagattgtttatgacattntcgangagganaaatccaaccactgaatccactggtgatcctttccatcgagaaaatcgtctatctcctattgaatatgatttatatgatatatgaactcactgcaagaagctcttattgtctgaagttttttattattcatggagtagattttttgcacattgttttttatttaggataaaatggcaattattttattctcttctaatttgtaacaatatcttgatgacatagtttcattacaatattttagtaagtgctacatgtatcttactcaaattagattgggtcattgaggtctatgtacattacacctcgaaaaatatttatggagtaaataggccttcctcttcccga

SEQ ID NO: 221280 - DNA, 458 bp, Glycine max
tcatgatgatgaatcaggatgattcaagttgttttgtttatgacaaaaagcccaaaaagaatgatgtcatgattgagtcaacaagttcaagatcatgattaaagaatagacatcaagaagaatcaagattcaagagaagatgaattcaagattcaagagaagaaaccaaaaagcaacaagtcaagacttcataagggaagtattgaaattttttttttcaaaaaccaaacatagcacaattttgttttacaagaaaagtttttccaaattgttctaagttaccagagtatttactctctagtaatcgattaccaattacctgtaatcggttaccagtggtaaagtttgatttcaaaagcttttaactgaatgtgcaacgttccaaatggtttttatatggtgggaatcgattatcagtgtatctgaacgttgaattcaattcaatgtgaagagcacat

SEQ ID NO: 221281 - DNA, 292 bp, Glycine max
gcacacctcctactccatgaatccactcccttcctagtagtcaagtaaacaaagcctacactggctcaccaggaaaagagttggtcgaaccatactgcctacaacaacatctacttgaatggctcccaaataacagccagtattaccctcataattcgaaagcaccatgttgggggcagatagatcaccgtcatgttcccgatcttgttgagcatagatcgaggcttactctgacagccgttcctccatgcatgagcactttgttgatacaacattctcaactcttgctctg

SEQ ID NO: 221282 - DNA, 450 bp, Glycine max
  unsure (1)..(450): unsure at all n locations
tctcaaggacgtgagcttaaattttagatgggtgtttgtatctaaactctancttctcaaggaagatttctcaaagaagcttcttaatgaaattttcttaataaagcttctcacagaagccacctactctataaatagaagcatgtcgtacacttgttgtaactctgatgaatgaaagtcttataagatacatttcaaagtttcacttctttccctcttgtattccttcaatttcgtgctccccccttctctctttcttttcctgcattaaagcatcctcttcaagcttcttatccaaagcaattcttggtggtgaagctccttcttccttggcttattccctaatggatagtgcctcccctctcctcttctcctttaccttacgctgcatctccatggttgtatatcaccattatagaacctcattacagctcaaagatctagcttcca

SEQ ID NO: 221283 - DNA, 469 bp, Glycine max
agcttagcaaggctgcgcttagcgggaccatattatttataaatttcactaagtatgtgggcttagcaagctaggctcgcttagcacaatggctgccgcaatgaaatgagcttagcctagataggttggcttatcgcgcagcgttcaacaaaaatttgactaagttacctggccttagtgaatcagccccgcttagccacagtcaactcatcagggagatgaatgttcatccacaaaagatgaactcgcttagcgtcgtaggcgcgcttagcgagttcgtctgaaaatgcatatattcaagcaatattgatgaactcgcttaatgcaacatgcacgcttagcgaattcatcgcattttccagaaaaaacgcagaaaacgaagttcactttcttctctttttttggcctctttaaggcatatcaagcttgcaaaacaaccaaaactatatgcacagcacaatcattcaca

SEQ ID NO: 221284 - DNA, 462 bp, Glycine max
  unsure (1)..(462): unsure at all n locations
tctgaaggtgccctattgtgtgcccttgaatggattcttgtcccaatattctggttccatttgtaagacattgaagaatttgtttttggaaataacaccccagacacggatacgattccttgtgcacaatatataccaaggcacaatcatcccaatagaaagatcaatagagtttgccagcaaattccctgaccaaatcttggataagacccaattacaacgatttctggggtgcctaaattatgtaggagaatttgtcccctatctaaacaatattgtcaaaccattacatgataggctgaanaagaatctgcctccttggtctgacctccatactcaaacagttaaagaaatcaaagtcaaagtccaatccataaaatgtctatatcttcccattccacaggcattcaaaattgtcgaaactgatgcatcagacatcggttatggtggcatcctcaaaca

SEQ ID NO: 221285 - DNA, 462 bp, Glycine max
  unsure (1)..(462): unsure at all n locations
agcttaaaagactaaagaaaatgcttatttatattaaaaacaaacttaataaaaataaagagtcttagtaaaaacaattttactaaagttaaaacaagcctagacttaaaaaacacttaataaaaataaaacaaacttagtaaaaataaaaacacacaaatacaatataaaaaacacacttagtaaagacacactaaaaagaaaaaacacacaacacaaatcacacaaacccatggtagacaaactttcctcaccaatatgccccgaatatggatatatggatattaacaggtggatatacacgaaaggtactacccatcatacgtattgatgtcgttgctattctaactcaccattatgtcanttttgtctcaatatnttttgttcaagatgaatcattgattcttnttacttatttgcgcataaattctttggttagtttttctcaacctaatttctttt

SEQ ID NO: 221286 - DNA, 457 bp, Glycine max
  unsure (1)..(457): unsure at all n locations
tattccgttaatgctcagacgttgaaaactttcctcttttacctgtcatcacccagagggggagcagtatcctacctactcccagtacctccacacatatcccaaccaccaagccatcgtggccaagctatacacaccgagcaagcagttcattttgaacactgacaggaattcgtggaagattctatggaagcaccttaccacccaggccaagacgtggagcattctcagctacttcaacctcactcctacctctcacacctttaacctcaatgtcgatcgtgcttgactcatttatgggttggtgatgaagatggacatggacctgtgcagcctcatttcttcccagattacccagattgcccaatccattacatctcggctcggcttccctgccctaataacgatgctntgtgataccaagggggtcacttctgactcactatcttatgattcg

SEQ ID NO: 221287 - DNA, 338 bp, Glycine max
aaacatgcctagtaaactaacatgtggtcccaaatgtgacctatcatgcttaccttatgcattggttttcattttgtatccaatgtgtgcgtcttgtatgaaagaatgacgtaaagcacccacagatactatcgacatttgtcttactagttgtaacgcggtcaagttggtttatgacaataatgatattcactatcttataacatatattgggctcgctctaagattttataacgatttttataatcgaggtaattatatttttacatgtatttgataattgactttatgtttcagatgctcgtggtcgtgcggcgtacgtgatatattctttctta

SEQ ID NO: 221288 - DNA, 453 bp, Glycine max
  unsure (1)..(453): unsure at all n locations
ggatcaaaacaattatctaatcattccaattcatacaattgctcattcaaatcattctcaaacactcatttcatacaaaaataaccactgcatatcattttcaatcagttcactattcaaacacactttttgtacaagcaaacaactcaaagtgctgaaatttaaataactgaaatttaaagaactgaaacataaaactgatattaaaataactgaaaataaatcataaaataactgagaaataaactaaaatgttcaaaatgcacaaatttaaatgtcctgctcctgtggttactcctttgtatgctcattaagatctaacacctgagcagtcggtgaatcctgaaggataggctgctctatctcatatgcttgtgcagatggtataacatcatcangtatgggtactggggatggctccgggatctggtctgtggaagtctcctcctcgtg

SEQ ID NO: 221289 - DNA, 379 bp, Glycine max
  unsure (1)..(379): unsure at all n locations
ggagagaaatgatcatctaaagcatacaagtccctcatattatcaaatcctataatttgagctcctatggagcaaaacaatgtgtgtctcctatagaaggcattatctaccacatttgtttttccctttttgtatttgataacatatggaaatttctctacgtactctacccattttgcatgcctcttgtttaacttgcttttccctctaatgtacttaaatgattgatgatcactatgaatgacaaattccttggaaacaagggaatgttcccaagtttgtatggctcttattaacgcataaagctctctatcatagatggggtagttgagggtgcactatgaagttnttactaaaataagcgataggttcccatctt

SEQ ID NO: 221290 - DNA, 439 bp, Glycine max
  unsure (1)..(439): unsure at all n locations
agctagctaacatctacattaataagaggaggcttacttgtttatctcccgaggancaagaagaagaacagactagggccttcagatcatgaggaaggacaatcctcagagagaggatgatgctatcctaccccgaagggcattgaatagaagactccatgtagattgcaccatagatgtaagagaaggccctacgattctcatgagccatatggtagattctgggcccatgggctaaatataagcccactcatctttgtacatattagatgagagggtcattattttggaccatttatttagggctccatagtgtaggaagagtaccctacaaaagtatgattctttggcccttgtattttactggacctacactaatatttgtcttaagggtatgtttataattccacatgcattatgtgaatatttgatgtgtgtg

SEQ ID NO: 221291 - DNA, 416 bp, Glycine max
ctctttccacttctatgcataaaacaaaatgatgcgggcacttaacacatactttcctgctcaaccccatttaaaaggctcatcttacataatgaatctggtgcttagcacacgatggcgcgcttagcgcacctataataaatctcacaaagaggaagtggcacttagcgcatcatccacgctaagcctactgtctaaagtgcaacttataatgaagatgttgggcttagcgcaccgaagtgcgcttaactgaaccattcaatcaatcaatcatgggtctttgcgcttatcgcgagcaagctcggcttaacgtgtgaagagatgacgcttagcgcacggtttgcagctattagataagcaatttgaaaattgtctatatcatttcctgcttatctcctcacacataattctaacaa

SEQ ID NO: 221292 - DNA, 457 bp, Glycine max
  unsure (1)..(457): unsure at all n locations
agctggtgtgaagagatagatagacaaagactcttatattttttttcaatngcctatccactaagcacagaccttgcgctaagtgctcaaccttcacgttctaagccgagcttgctggcgctaatcgcacaaacccgtgattggttggctgaatagttcagctaagcgcacatcactgcgcgaagccctacatctttacgataattgaaccttaaccagtgggcttagcgtggatgatgtgctcagagccacttcttctctggagaattgtcattgtagcagcgctaagcgcgctatcctgcactaagccctacatacattttgtaacttgagtttgtaagctgggcttattggggcaggaagtgctaagcgccaatctcttacaggttttgaattcttagaagtgcgcctatcgcgcctgttgtgctaacactgaactactctgtgaagatgatgc

SEQ ID NO: 221293 - DNA, 406 bp, Glycine max
  unsure (1)..(406): unsure at all n locations
gactttcatttttccctaaaaaagagtacacgtnacatatggtgacaacaacaactgaaacatcactggagttcattaaataggcatgaattcctctactcctattgaatatgtgttactagtacaaggtctaaagcatagcttattaagcgctattcaattatgtgatagaggatataaagtatctctcgattctgaaaaatgtgttatctagcatgagcatgacaaagatattgaacatatacgttgcaatgaatataatgtttacatgattgatctataacaaaaatctgaaaatgatacctcgctctctaattaaagatcatgacacatggctatggctgaacagacttgctcatattaacactggatcatctcaatagaataaatttcacaacatctaatt

SEQ ID NO: 221294 - DNA, 361 bp, Glycine max
gatggacacatatggtgaggtgattattaaaccacatcctatttgtaaattggacaaattcagttattgatgtactattacaataacacagtaagtctctcttatgatacaaatgatgcaagttatgagttcatttatggataatcgagtgttgctctcgtacacaagtttgggtggaacggaacttaaaattgactgagaattgcgctactttataacataagagcttaagtcatatttcctcataaagaagttggacgctcgcgctatacgaaaatcatgagcatctatattgaacggaccctaaaatctatattgagtacataggcggaaaataaaccaagcgaaaggaattcgggtg

SEQ ID NO: 221295 - DNA, 230 bp, Glycine max
ctcacaattgagtcttaatgcaaaacggccgagtagcatgctatacttatacaatcccccgactcttgagagaaattatcccacctatgatctggatatacctgatgcaccctccggccttaacacgatgaggcatcaccctattggctcaaaagttaacgtgttcagtgatcataataacctcaagtacctgttgatctacaataagacgagcatcctttaacgaaatg

SEQ ID NO: 221296 - DNA, 360 bp, Glycine max
ctttattaaagagcttttaaaagcttgaggtgaccttatggaaacaaaccaagtcgagccgagcctacatagaccgagccaaaccctcgataagctgctcactcatttcacccctagacgtaaccaataaaagttcaagatgtattgaataataataaagcatcactgaagtttggctattatttgagaatacacaccaaattaatcaattcaattataagcattagtcaatttaatcaaattcaataaaattattaaaaaattatctaaattttaaatattcaaaatatattaaataaaataatattaaaaaatatataaaatattttagataaataaaaaaaaacttcgtaccccatt

SEQ ID NO: 221297 - DNA, 403 bp, Glycine max
ctgcccatgggtttctaatgcatgggacaactatgtttacgatgaatggctcgaagaatatgcatactactacgagcaatggtaattgtatggccataatgttggaattttctattccaataattaatgtgggctaatattataagacaattatattagctatttatcattagtgggttttattttatgtgatcaaattaagtgagcccattagacaactaaatcagatgatatgaacataaatgagtagatgtcagtgttagcccattatgggataatggaaaccctattatgttaacacgctataagaatgctatggtccacaatctatcgagctgtcacacagtttctcttctctccatctgaagagttacaaaggtcctattgaggaataaagaagtct

SEQ ID NO: 221298 - DNA, 436 bp, Glycine max
  unsure (1)..(436): unsure at all n locations
cccaactggccatgaatcaaaaatctgcacctgtcgccagactctgtggtttatgctcctctgctgaccaccacacagacctttgccccttgtgcaataatctgaagcaattgaacagcctgaagcatatgctgcaaacatctacaatagacttcctcaacctcagtagcaaaatcagccacaacagaacaattatgacctctccagcaacaggtacaatcccgggtggaggaatcatcccaaccttagatggtcgaatccttcacaacagcagcagcaacaacaacaaccttattttcaaaatgttgctagcccaagaagaccatacgttcctccaccaatccagtagcaacaacagcaacagccccagaaacagcaaacagttaaggcccctctgcaaccttcccttgaagaacttatgaggcanatgactatg

SEQ ID NO: 221299 - DNA, 429 bp, Glycine max
  unsure (1)..(429): unsure at all n locations
ctaagcttgattttatctacaaanaccatggggtttatatctgtatcatcgttgttctccnttttttttcacaacccaaaagcttaaattttttgggtgtcctggctttatattatttttccctttaacactagctgaagttatttcaatgggttatatttctatatctgtcctgtcccttttagttagacacttacagctctgatttttaaatatatgacatgctctattatcacatttatgacattctttgcctatgtcttatctttattatcaaacatatgtcatcctttatttatatggtcagatgattgaatatagtagttttggacttctttgattatggttctttttgggtacagggaattcaatatacattttgatgcagaggctctcaacattcgcaacttgaatatatttattgattat

SEQ ID NO: 221300 - DNA, 418 bp, Glycine max
tccatcaagtggtaatcagagcacaagagctttatgtattcgtctccttaacctccattaatgttttactttaccttctcttccattgtcgtttcttcatttttctccatgtatctcctcacatgtcttgtgctaaatgtgtttaacatgattttttagagtttccaccgattaaacttgctatagaagccatatctgatattctatggttcaaacctctcgttcttgttcttgaaccatgaattgtgttaactttatgttcctttgagtcttgtcttgttattttctatggctcgaacctacactataaaactcttaccaaaacattaaattagaaataacctcgaaaatatagagtgacttgctcatctattgaagcttttcatacaatcatgtctagtcatgaactcgtcacata

SEQ ID NO: 221301 - DNA, 385 bp, Glycine max
gaccacagagtggtacctggagatatgtcgcgggagtcaagagaccttgtggacgtcaggtggggtgctatttcccaaaccaagcttgaccaatcccgacccaacccgggcatagtcaatcagtgagaacctgtgatgtacctaaacaggcgagctcctgtcagtcaacagataataaaacaaagaccacaaagcacggaggcttgtgtggcagctggccacctgtgagctttgagtgctacatgggatatggcctctggtaatctattaccaagggtgggttatcgcatatcaagcttataagtgaagacaggaagctaatatggcctttggttatcgattaccaaagggtgttatccgctaccacgcttaaaaaccagatcac

SEQ ID NO: 221302 - DNA, 375 bp, Glycine max
atttatgttttatggaagtctaatctaatcaacgtctgagagaccatacaattctcctaacgatttctaactatgtgggccattaagactatcatatgctgactataaccgagaaacccatgaatctcttcaggggcggagaatgtgtctgccatcgacttgtccttggctaacaagcggggaagttcttgacttccgttcaatgtaagagcaaaccggtccatccacatggttgcctcttggagtaaagaaacgatcacccttcctctatcctctttttacgatatacttgagcatactcatccgcgattctatgctcgtgggccatggctagacctaactcttcttggtacttggcgatgatactagcatgtt

SEQ ID NO: 221303 - DNA, 409 bp, Glycine max
  unsure (1)..(409): unsure at all n locations
agcttcttgcgtagacgatcgtagggctcattttatcctcaaaacaaatccctcttattactagctantttgaattctttagttcctgaatgtacaaccttcaaattgttgctcgttcccctctttctttctgcaaaaaagaaaatcaaatgctgtcaaaacatggatgaagtcctaagaaaatcaatatcaaagaaaacatggatgaaatcataattaaaaagcacaactacctatctttcaaagacctttggttaatttgtcttgtctccttatgtaggggggttttgtttaataatcttatacttttgccttccataaaaaacttatcaataatcctcttttcattaatccaattttgtatgttataggataaaagatcatgggttcttcacctggctccactact

SEQ ID NO: 221304 - DNA, 383 bp, Glycine max
cctcaaagccaaatgaaagaaggacggtgccatccatggtgacctatgctctatcaaagttactaacatcaccacatatgcggtgcgacccatagtgggagagtctcatgtcacctgacccattggtgcgatccacggacgccaagggaatagtgaaggtggtcatgtgaaatagatacacagtcaaccccattctggatgaggatgtcccgaccgggagattctctgagaacgaacgagacttctccggaaagaacgttttctagtaaaacggtatatttcctttgatcatttcacaaccgattcaagtatttgtctgctaacaagacccagtagggctccctggtgagctactatgagtccgacctcatcgacctgtggtt

SEQ ID NO: 221305 - DNA, 492 bp, Glycine max
  unsure (1)..(492): unsure at all n locations
taagcacctgagctgcagctngatctaaagaaatggtgtgtcctctattatctgatatanagtactcaatattgttccattagaatataattatacatttattttggagtaaaatggcagcaataagattataagattgcatgtaaatatgcaaagatccatcaatagaccaatccttgtgagttggaatctaatgatacataaattcttttaaaaataaattagtttctgatgaatttttcccctccttatttcacatttaatttgctttaaaaatctacttggtggacttcaataaaaaatgtaaaatcgacgtacttctattggtctactaagacataaaacgcagtacataatatctatatgcttatatccacctaataatttattccaaagaagaatgatctttagaaattatcaacaacttatatatgcatataatgatagatatataaagtcagacaaaaatagattcgcatattatattagact

SEQ ID NO: 221306 - DNA, 415 bp, Glycine max
  unsure (1)..(415): unsure at all n locations
ttctctatttttaccatatagagaacgggtttaagggggatcgaactacataaaatagaggaaaaaacgcagaaggaaaaggaaaagaagaaaagtaaagtcaaagcgttgtagaattatgactgtggatcatttcctttgtcatttctcttgttagtcttgtgccctgcgcaacgattagttagttttttttttttgaaggatcaggtgtaatctttgtacccttgtgtatccctcttgatattatatatgtaatcttttctactcaaatatcacttgagatcttttcaaggtccaacgccctaacgactctttgtttgcaattaatataaatcttaaacaaacatanaatcaatgtaacacacaaacatttatactttaagaactacgtangttcgattttctcatcgcatct

SEQ ID NO: 221307 - DNA, 311 bp, Glycine max
atggtattcctacaggaggcgcctctctacctctgtacttgtcttacgatgatcttcatggggaaataccataaagacctcattgagctcaagatccgccccgagaagccctcaacagcttcattaagggtttagacacaagacttcagagggctctaaaccccataaaattcgtgaccgtactccatgtttcctcattttctcagtatccccaaagcttggctaatttgaaactctttttaacttcactataatctgtataaactaattatttttatgcaaacactgtctgttataacatgaatggtgat

SEQ ID NO: 221308 - DNA, 374 bp, Glycine max
  unsure (1)..(374): unsure at all n locations
ttccatggcttattccctagaggatgatgcctcctctcacctcttctactttatctttcgctgcatatccattgttgaaaatcaccatcgaaggacctcattgaagctcaaagatccagcctccatataagcttctcaagcaagcttccctcaaatggtaattagagcacaagagcntcaagtatgtgctctttaaacctccattaattttaagctctaccttctcctccattgttgttacttcagtttttctccatgtatctcctcacatgtcttgtgctaaatgttgttaacatgaatatttagaatctccacctatttaacttgctatagaacctagatctgactctctatgcgtcaaatatcttgttctt

SEQ ID NO: 221309 - DNA, 463 bp, Glycine max
actgcagcatgcagcttgccacagaccctcggtaagagaggcttatttatttgcattatcgaccaacatatttagacacctaagctcagtccgtacatccctcttgtaagactaaacttcagtcctgcttctatcaattctaaggtaacaatacatttcccaatgctaaagtcacctaactatacacacaagtgggtgatcagactaacaacatgcaaaaattaagcatataaagaagcatttgacacataaaacataatctatcatatattatagtaattacatcagttgttccttagacatccccaacaagggtgtttagccaaccattacagaaaaaccctatcacaattgagatagagagtacacaataatttgttcttacacaagaagggggatccctcctcctcttttaacatcttgcagcactctacaacttttaattctctccaattgaaaacct

SEQ ID NO: 221310 - DNA, 463 bp, Glycine max
  unsure (1)..(463): unsure at all n locations
cttctacacttgtacaacaatgaagctatgataccacttgttatatttttggncttatatatcttaagataggggtggttgaattatgatattacaaactctctcccctaattaaaaatctatcttactttttacttaatctatgaattcccttaatgacaatcctcttaattattaattcaaatgaagcaaccttgaatatgaatattaagcaataataaataaatgagattaagggaagagataatgcaaactcagttgtatactggttcggccacacccttgtgcctacgttcagtccccaagctacccgcttgagagttccactaacttgtaaattcctcttacaagttctaaacacacaaggacaacccttcctttgtgttagaagattcttacaacaagagactcacagtctctattcccttagagaatggaagatgacatgaacaatctctcttga

SEQ ID NO: 221311 - DNA, 465 bp, Glycine max
  unsure (1)..(465): unsure at all n locations
ttaagtnacctgaggcatgcaagcttcttccgcagatccgtatagagagactaggtcttatcttatacaacattatcatcacaacatatgtagaaaaccaaaaccccacaatccatccctggtaatgtagttatttagtcctgcttctatcaagatcaaggcaacagtacattttccaatgctaaagccacctaacagtacatacaactgggtgatcagaccaagagcatgcaataattaagcattgaaaggagcattgaacacancaaacacaattaattatatatgaaaagataattacatccactgttcattatagatccccaactagggtttttagccagccatacaaggaaaccctaacacaaatgagatatagagtacaaaataattgttacttacacaagaagggggatccctcctcctctttttgcacctacaatcactcaaacactctctaatatc

SEQ ID NO: 221312 - DNA, 474 bp, Glycine max
tactcaagcgtggtcaagaacttagaaaaaatcaagaacaagcgtgttctctcatttttcgcgtgtatgatatccactccacatagtttgaagtaaaggagagcttcaacccctatacgcaacgtggcggacaatagtgggcagtaaacctgaatggtcgtcattgtcaatgcggaatgtattctgcgcttcactatccatgttcacacattattgcagcttgtggttacgtgagcatgaactactaccaatatatatatgttgtttacacatacgaacacatcttaaaagcttactccgcacaatggtggcctcttgggaatgaaacggctattcctccttctaatgacgcatggacacttatccctgacccatctacaatccgtgcgaatagtcggccataatctataaagataacgaatgagatggattgtgtcgaaccatctgagcaccgacataatgttgtagatgtgg

SEQ ID NO: 221313 - DNA, 301 bp, Glycine max
  unsure (1)..(301): unsure at all n locations
aagagatagatagagagagacttataatattttttgcaatngnccatccaccaagcacagaccttgcgctaagtgctcagtcttcaccgcccaagccgagcttgctggcgctaagcgcacaaaccctgattggttggctgaatagttcagctaagcgcacatcactgcgcgaagccctacatcttcacgataattgaaccttaaccaatgggctcaccgaggatgatgagctcagcgccacttcttctctggaaaactcntattggagcagcgctaagcgcgctatcctgcactaagccct

SEQ ID NO: 221314 - DNA, 347 bp, Glycine max
ttaacacgcgagcacttaagagaaagaaatttgtttttcagaccaaaagcggcgaggaaggcatgacctgccaaaacaagcctctgggaattccaaagagctttcggggctgaccaaccgaaagggtttcctgccacaaaggttccggtcatatcctagtcactgcaactgccaactcggatagacttctagggacagtttggaggcatataccagacttcgacaaaaggtcttcagatagtttaattagtcaataaccaattggagggtcctataccaaaaggcttaagcaacaaggatccaagctcattagctggtatgttaatagtcactctctgtctttcacc

SEQ ID NO: 221315 - DNA, 285 bp, Glycine max
ctaaatcagagggtaaacagacaaaactatctgatataacttaatgagttaataactcacaactccactggaaatcttttcatactaacgctcgataatcataaacagtactctgctggcgaatctcaaaaactttgcctgacgattggtgaacgaagaaaggccaaatctacacatccaaggctctagtaaaagtataccaatccgacagtgggcaggtgtgagacgctcatctgaaccatctgatagccttacctgccaagtttatgtggatagacgtcaaaa

SEQ ID NO: 221316 - DNA, 460 bp, Glycine max
  unsure (1)..(460): unsure at all n locations
acttgntgagtactgggaaagatgtaagaaattgtgtgcaagctcgcctcaccaccagatttctgagcaactccttcaatatttctatgagggacttagcaacatggagaggagtatgattgatgctccaatggtggagctcttggtgatatgacccctgttgaggctaggaatttgattgagaagatgacttccaactcccaacaattcagtgcaagaaatgatgctattgttcttagaggagtccatgagatggccacgaattcatcttcatctactgaaaataaaaagcttgaaggaaaacttgatgccttggtcaacctggtaactcagctttccatgaataaaaaatctacacctgttgcaagtgtctgtggtctatgttcttttgcagatcaccatacagatctctgtccttctttacagcaatctggagtcaatgagcaacctgaagcttatg

SEQ ID NO: 221317 - DNA, 451 bp, Glycine max
tgtagtgaaagaatgtgactcttcatattcgaatttgtgtttcaacgttcacgcacactggtaatcgattaccaaaacattgtaatcgattacagcattttgaaatcaattggaacgttgtaaattcagttgaaagctgtttgaaaaccattttgctactagtagtcgattacaaaaatctggtgatcaattaccatagagtgaaaactctttggtaaacatgttttgagaaaaatccatgtgctactcagtttttgaaaaaactttttcatacttatcttaattaattcttctcttgattcttgaatcttgagtcttgaatcttgatcttgattcttggaagcttgaaccttgaatctcgattcttgattctcgacatcaaatttcctcttgaaccttgaagtgttcatgattcaatcttaaacatcttgaactcattctttgattattg

SEQ ID NO: 221318 - DNA, 450 bp, Glycine max
  unsure (1)..(450): unsure at all n locations
agctaggacangataagcacgtagtgaatgctcttcttactttntacataaatatgagcactttagcccactattatttatcacaagatttaactcatttatgtaaatatgatgtatgaatacgataaattctgatattatgatttgcttctccaggtaaaaaaaaaattaagctacaactattattttataatgacaagtgattttgaactcgagttctgaatgggtaattatttaaaatatctataataaaaaatctatcacctataataataatcttatttaactaattttctcttaaaaaatacatgtaatttgtagtcaaaacacgaaatatctacaatagtatatgatacaacttcttttcacaacacatttggaaagacataaatttctatatagctatatgcacacatacactattagaaagtgccattaccctggtattat

SEQ ID NO: 221319 - DNA, 388 bp, Glycine max
actcacgcttatcacggagaaaccgagagacacagagatgctccatattttgaccaatgtcatatcccagctttgacatcaagcacctataaacgccatctttcaaacatccatgctcataccctcgatctacatttctaagacttaacctatcatataaaatagaatataccacacttaattgtcgtgagaaaaaataaacatccatgataaaaaaatatgtgtaattactatttcagtccctatattgggaagatatgttattttatcctctgaattctttttaattcctgaattttgataaatctctctcttagtttctaatataataaattatcattttatgatgatgtctctagcatcttttgataatttaatatacaaattc

SEQ ID NO: 221320 - DNA, 441 bp, Glycine max
  unsure (1)..(441): unsure at all n locations
agcttnccaagcaagttaaggatcgagggcaccttatattaattgatgtcgattccctcaacaccgtgttggagactccagtggctatggagcaaggagagagctaccctcttactccaggtttnctaaatgaggcctgatcctcaggagcttgcagcccggctatgtatccctgggacgggatttgtacttaatgttgagggtttgccgtggaagttcttgaggaaagatcttaccactctggcccaaacctggagtgtattatcttattctaacttagccccgacatcccatacttctgatcttaatctggatagggccaagttaatctacgggcttgtaatgaagatgaacatgaactcatgatcacttatttctggatagatctcgctcattgctcaatcgaactcctcgaagctgggaattccaaccctgatgact

SEQ ID NO: 221321 - DNA, 494 bp, Glycine max
  unsure (1)..(494): unsure at all n locations
tatgctgcaaatatttacaatagaccgtactctatctcattcttctaaatcttccatcagcagagcaatcatgaacctctccatcaacaatatacaattcctgcgatggagtgaatcaccactatacctcatatgtgtccagtacctcatcaatcaacatacaagcaggactgcgtacttcactgtacatatatgactgcgtggcccaatgcatgaccattacatgtcccttcaccatatccatgctacaagcaatctacgcccatgaatacatgcctacatgttgatggcccactccacaacacttcatctcgaataaacttgtgagggcagatgactatgcattaacatgcatgttgcagcatgagaccagagcctccattcagagcttaaccaatcagatgggacantcggctacccaattgaatcaacaacagtcccataattctgacatgctgccttctcaagctgtccaaaatcacaaaaatgtcagt

SEQ ID NO: 221322 - DNA, 414 bp, Glycine max
  unsure (1)..(414): unsure at all n locations
agctngccactgatgattgatagaagatactgttgtatggtaaccttggtatttcgatatcaaatgatacatcaaggacaaggaatacccacccgaggcctcttacaataacaagaggacgttgtgatgttggcagccagtttcctcctgagtggggatgtcccatataaaagaaaccatgatatggtattgctttagtgtgtgaatgcaaatgaggcccaacagatactattaaaggtgcatgaagtatcctttggcacccatgccaatgggcatgtcatggnctgaaagattctgatagccgggtattactggatcatcatggagagtgattgttgtgttcatgtgagaaagagccacaagtgccaaacctttgtagataatgttaatgctccacctgtgtcactgaatgtg

SEQ ID NO: 221323 - DNA, 454 bp, Glycine max
  unsure (1)..(454): unsure at all n locations
ggtgcaaatcaagtcactcccgcatgatatctctagctttcgnttgatgtnggncncgncctttgtcacgggaagccggaaggtccatatcaccttcttaattgtacacatggggcactgcgcccccaaatgcgcaagtaagaagagaataatttccgggctctcgtgtccgtaaaatgcattcatatcatgcaccgcataaatatctcttcagcatcataatgaacatatcgttcctgcatttgtccgttatcacattcccatcttgcatgagtcattgcatcatcatatgcgttcaacatactctgtgtgtgctcatacatgatccttgtattgttctctacataacaaaaacaaataaaaaaaggcggaagtacgaaaattcatgcttagttgcatatattccggtaccttgagccaaccatgtngtgatcataaacccatctcacaaaac

SEQ ID NO: 221324 - DNA, 461 bp, Glycine max
  unsure (1)..(461): unsure at all n locations
atccttagagncacctgcggcatcaagctagctgaattaactcgaattgatttgttctttcttaaccttggctagctcagcagaaataatcaacctcaggtaccagggttgtgcgctaagcgcttgaaactcctggcttagcgcatgacgatcatgcgcttagcgagaaacaggcgcttagcgaaaggactaattttcaaaaagattttctaagttttaaacttagtcctttcccaagaaattgaaacccttaattttaccattcaaagggaggttgatatgctccaatgttcagattatacagcaagttcccaatgatcaaatgcatgataaaccaaaaataacacaaattgaaactgggtttcctcccagggagtgcttctttaacatcattatcttgacgcatagcttactacctgtcataccctaatttcgtccggggattattacttgatgacatg

SEQ ID NO: 221325 - DNA, 441 bp, Glycine max
  unsure (1)..(441): unsure at all n locations
tgcttctagacaaaaaaattctttccaaatttcanagtcttactatgaaaaccacctaagcaaagttttaaaaaataggacaataatacttgaaaaaaaaaacttagttaacgactaatttttggagtttgggagatcccaaccagctaaagcgggttgtcacagtctggaaattttgtttctaccccacatgcatatataataatagtcattctgatacccagagcaaaagttatggttgttttaagttttactaaaaacaagtttccaaaatttttgtctctctcaaatactgtcacaccaagtgctcctggtattgttcacacaaaatatggatcaaaagaagctaccacacaaaaaatcagccataaataacaactctaaacatcataacaaaaatcgctaattatatggaaaaattcagcgctaatcactgttcat

SEQ ID NO: 221326 - DNA, 462 bp, Glycine max
agcttacctctaatcaactcaacatcacagctacttatactcacatgacgacgaagcttgatgggctcctccagaaaatggccattttggaaaccaatcaacactcaccttcgtcttcctccgctatcctcattctccacctccttcctcacatcctcaccgtatgaagatggatgtgctgcgatttgatgggacagatccctccagttggatctttaagataacacagttttttgactatcattccaccctggactaaaatcgattgaccatagcctccttctatatggagagactgactttggcttggttccaatggatgactcgagatggcctcgattcgtcgtggccaggccttctccaggctctagaggtccgatttgttccttctcagtatgaggatcccatcggaactcttgttaaatcgacacgaggtatagttcatgactttgttgcaaaact

SEQ ID NO: 221327 - DNA, 412 bp, Glycine max
gtttattatttgttgtctgatattggtttacagaggctagaaaatgattgtgatgtgttgtctatgtgcaaaattgggcttgttgatccagaaaaaataagtgcatgtatacttaaaacatgttaagccagatggggggtcctattaatgaaattgggccagagattgaagtaaatgcattgcctctaaattacagtgtagaaaaagtggttgaggttgttcctgaggactctactgaaaatggtattgaagatatggatgttgatggtgctaatggtgtgggtaaagggtcgtcaaatgctgaagctgaagttgttggagttgaaactataccaaatgtacaagatgttgaaactgggctctgttgagttgtaacagaacctggtgtacaaatgcaaaactggaattgttg

SEQ ID NO: 221328 - DNA, 402 bp, Glycine max
  unsure (1)..(402): unsure at all n locations
attatgacgcatgatggtggaagggatcacattcctgtcgtcatttaggttctaatactatgtgaataacttcctccccaaaattttaagttgtaggtggaaagacttgagtgggtatatatctntaatacatgacattatattttactctgcttctgttatttataactttatgatcttgggggtctctctcattttctgtatctatctgccttaatcctttatcctctgcctcaacttgtgtattctatttctgcttgacatgtatttcttttctatatctatgacttacctctggcagtaagacaatcagcaacatattgaactctcaggctaagtctgctgtaccaaagagttcaacactaatgatacctaccgatagtcaattggccaagcaaaatc

SEQ ID NO: 221329 - DNA, 80 bp, Glycine max
aagaggctacgagaatggaagcaatatcaagctgctcacaaatataagcttgcggtaagaaggggggaagacctgaggcc

SEQ ID NO: 221330 - DNA, 471 bp, Glycine max
  unsure (1)..(471): unsure at all n locations
gctgggagaggatgcttcaatggaggagaagttatggtatagaaagagagagaggggggngggggagcacaaaattgaaggaagaaaaaagggagagaagttgaactttgagttgagtctcacaagactctattcatcaaagttcctacaagtgttacacatgcttgtatttatagactaggtagctttcttgagaaaacttccttgagaagcttctttgagaaaactctcttgagaagctagagcttagctacacacacccctctcataactaagctcacctccttgagaatcttccataagaagattcctaaagaagctagagcttagctacacacacctctctaataactaagctcacctccttgagatgagaagctagagcttagctacacacctcctataatagctaagctcaccccatgacaaaatacatganaataccacaaatctcctttacaaagaatactc

SEQ ID NO: 221331 - DNA, 422 bp, Glycine max
  unsure (1)..(422): unsure at all n locations
tttcttttcttttctgaagattcatttgtaaaacttaatcaagtgcttattcttgaaactaaaagtatacattatataatattaattaatatactatttttagcagtaatttatttatgaaatgatgtaaaatctctcacggtactagaaaatctactgtaaccaaatagcttacaatttggtttggataatattaatagattgggacttgtttatggtggatatttaagttattagttaaagaattaaataacaaaatatttattatcaaaatcataaaaaacacgtaaaanatcatgaatcatataatcttatgaatcttaagaaaaaaattatgttttaattctgtaaccaatatcttaaanatactcgtgagcttttgctaaaaataaagatganacttactaataattttgtcattt

SEQ ID NO: 221332 - DNA, 474 bp, Glycine max
  unsure (1)..(474): unsure at all n locations
agcttgtacagntaaacattgtgcatgctctcactcattntacttctnggagagcattataaggcctaataaaattaagattattttctggtacattcaaactatgattttgcgctaaaatagaattaaccatggcaagatattctgctgacccaatcaatatattattttatgtattgatttgaatatgatataattcatcataattcctttctctataataaaataattctttatttcacggntaaggattagttcctttgagaaggttcttaaaaaggatataatctttntttttcattttacattgacttgttttattttttaatataatataattaaaatatgggatgtattttttttttttagagattataggtattctccacagaagctgggtaagatctctaaaacgctgagatgaacaaggttaatgctgaagatgagaaacgcagtccacacctttgacatcag

SEQ ID NO: 221333 - DNA, 403 bp, Glycine max
  unsure (1)..(403): unsure at all n locations
aacgaaggagacttagtatggattttttatttcatagctagttacagagctctgggtcaaacacccacattactacatgatagagctaagagtatttcgggttttacaaaggaacgtaatttggaaattccgaccacgccaatgtgaccggtgttcagtgtaggttacaaaaataacatgtatttcatgaaaggataacgtttacaaagtctctttctctaaggtttttcaaaggaagcataagacatgcaatggcggttgcaaagttagaaaagatgcaaagagaagatggaactaacaagaaacaagcatagaaccatggttacctcgaaagaaaacaaaagatcagattanggttttcattctctaccgaaaccgcaagccaagttggaaattctgcttc

SEQ ID NO: 221334 - DNA, 424 bp, Glycine max
ctgcaagcttgcttagggctagacctcatactatcttcctaagctttaacctcattgtctctcacagtctttaaatttgggagccaatccaatccttgtgtctggactctcagccacttatgatagctctttgtctaagctctttgtcctttcttcacgccgcatcccatgccttgcgaactacttggagtaccctcgcattgtggtcactgaaaccctgtgcgatgaaaggcatgatgctttcgtctgatgacactcctctcatggggtagccaagctgtcttatggcgaggacgggattataattaatacaaccccttgttcccatcaagggaacatttggacatccttcgcatgaagatagaatcctgatacttccttccttctagcgagggaaccaattaacagacgccccttcatgcta

SEQ ID NO: 221335 - DNA, 382 bp, Glycine max
tcacaaaaatgatagccttttcctgtgggaacccaagattactactcaaactgttaatagattggcaagtgtaccaattttattacaagtagtaaagattaaacaaaagtccgagtgtagagtccacaaaaactttgtttgtacttgcattgggaaatacccaatttgtaagcaatagaagatggagtataatagaaataaaaggaaagcatataaatgtaaaaagacaagaataataaacaagaagaatacaaagatgattaaaaaatgatattagaatgcaattatgtgtgggcctatcatgcctaactacccttgatgcaatattaatggtgttctctattaactactttcccaatttccacccacatctactaatatg

SEQ ID NO: 221336 - DNA, 408 bp, Glycine max
  unsure (1)..(408): unsure at all n locations
gttgacttcactgaaacaaagaggtaagaaagaactttctgactcggaattatatgaactttgtgtgtcataatgcctagaaaaaaaaaaagagggcacggcaatgaaaaagaaatataaagaaaataaccattacattcttttgtttgcttttttatattttgaggctacgtttttcttccattgcatagaggtaaaaaaaaaaaaaaaatagtacaacagaaatgtgggtcatcaatcgatgccgcaaggaagtttaaaggaaaaataccttttctttatttcatctttccaattgtgtgcaagagatagaaacttctactaacaccatcttttcttttattaaaccacctctaatattctatagntgtatctttctgtgttccttattgtcataaacaaagtaat

SEQ ID NO: 221337 - DNA, 466 bp, Glycine max
  unsure (1)..(466): unsure at all n locations
catgcaagcttctcccccaatatatgtataagaatgtttgtatttgaagcngaaaaggggtcagccccttaggacactttctgtcttctcaatctgcttgcaaaaattgtctccgtgaagaacatccaagccgagggcttccgaaacgtttccgtaacatttccgtgaggaatttcgcgaaggtttcgatcgttcttcgacgttcttcattcgttcttcatcgttcttcaatcatcaacgggtaagtacctcgaaccaagcttttcgattcattctatgtacccgaggtggtccacattgcgtttcgcgtatttatattctcgttacattaacttgtataccccccttttgacgtgcttaagtcattttaattaagtcattcctcgcttaacctaaaaataaaataaattccacccgatcgttgaattgtattatccgtaacttcggtaaaatgattttgaccgtc

SEQ ID NO: 221338 - DNA, 416 bp, Glycine max
  unsure (1)..(416): unsure at all n locations
actcaagctgtaccctgatgcanaagtcacaattggggcttgtattgtttttgggttatactatgactttgatatagagctcttgactaataaagatttgaagagaattaagaaatagatggtgagcagagacagtccattaaatcttttctatttttttttatgggcaaatgttaattgttaatttgttagctttttgttacaagaaagatccaacccgtaacctttccccttttttaagcagccaaccattcttatatctccttaaaaaaatcttctctgttctggggccttttttatttttcttttcatgcttcgcaagataattatgcactgcgcagcgtactacaggaatgcatttgtaatgtcacatgttgtatgcaagattgaattattggaagatattgccactcgta

SEQ ID NO: 221339 - DNA, 464 bp, Glycine max
  unsure (1)..(464): unsure at all n locations
ctaataatatgacataaagaaccgccattgtttgttacgctacagccacgcacaataaagggaacaaaagagcaggatagggttaatcatgagaaaatgaaccaaaagatacatattcacaatcggggcatcaatataccaatagaattcgtgagtctcaaattcattttcattcatcatgcccaaacttctatacactgcanagtcatatctaagcaccttgaaagtcaaagcatctatataattcatcagctgtagaggtaacgaaatgtaactcaaaaaatttgattacttttttacaacatccttgaatgaaactggccaaaccctgcacgttcctcaatgacaaaatacctgcattatacaatacccataattatggaaagataaacatgaaggtaactcatgaacatcgaacagtaagatagttcaaacctagattagaaggatgaggttcctattga

SEQ ID NO: 221340 - DNA, 356 bp, Glycine max
atcatatctgacagagagtgttgctctgcctgatagatacatatctcgctagatatacttcccaaatcctaaatttatggcaatgaattctgaatccttcttcgtaatgtctctctacttgctattaatagtggcaatttcttctaatctttaaatgccactctcttttgatttgcggcttgtcgaaataccattgtggttgtgatgttcatgatttcatgtggagaaattattattacctttgtaaacatattttttatttcattttaaccctcctggcatgattgtaaaaataaaaataaaaccttcttttgttttgcaaaccggccaaaaaaggttccttttaatttttccct

SEQ ID NO: 221341 - DNA, 499 bp, Glycine max
  unsure (1)..(499): unsure at all n locations
atcttaagtcacctgcggcatgcaagcttcatgcttaactatgtatgacanatctttattactgttgntcaagacatacaagtgatcttgtaacaaatcttctacactgggagtgatcacctgcagtcctcttgaacccttaccacccactctgcatcatgccgacactcaggaagcccaacagctttagccttctctaagtattctgaacaaaattcaatggcttcttctgcaatgtacctctcaacaatagatgcttccggacgatatagattctttgtataccctcttaagatcttcatgtatcgctcaaccgggtacatccaccgtagataaataggaccatacgcattgatttctctgaccagatgcacaatcaagtgaatcatgatgtcaaagaaagcatggggaaaatacatctccaactggcatagtataattgcggcctcattnntcaactcatcaaacattactggatcaatcaccttgctacatatag

SEQ ID NO: 221342 - DNA, 458 bp, Glycine max
tctgagcgctaacgaatgttgagacctcgagtttcttgttatgctccctcgacaactgcctgctcggcctctagtgtcactttaatatctggatcttgtacaagatcttgaaggttagttatctttcttttcatgtgtgcgccaatttcttacattaacttatgcatttatcacttgtgttattttgtaagaatcatgactcaagctaatgctaacatgaatgcattctgcctggcctgtaagaatcatattgttgtcagcaaaggtcctctaaatcctcatctcaatcgaacatcggggccatgcgacgcaccaactgatgtggtgcctcctcccggtaaagaccccatggggaagcataagcacaataagaggagtcactgtgaccaccaaagtggctcggggaaagcttctggtcataaggaaaggagctcccgagagaaataaagtcaagcaac

SEQ ID NO: 221343 - DNA, 469 bp, Glycine max
  unsure (1)..(469): unsure at all n locations
agcttgtccatcaaacaactaggaacagtatggtgtctattcaatcaatncatatttcattgttgcttatccactttggacttnttcttttgtggccttttagagggaaatgcagaaaggattttcctgtcactagtgaagaaagaagcatattctcaactcaactacccaacaaaagggataagagactgtccgttgagacttgagaaggttctttctattgcatttttcctaccctgaatttttctatgattaccacgttacctttgcctctttgaagagcccaagcctggagagggaaaatgtcatttaacttaacccatgccttacatgataggtcacaaaattcctataggccattatacaatgagactttatgcacaatagaataatcaactaaccaatatcacacacacattgacgttcttctcttaaggggataacaaaactatgacattaactctatcgc

SEQ ID NO: 221344 - DNA, 432 bp, Glycine max
  unsure (1)..(432): unsure at all n locations
ngatcacaacaattatctaatcatgtccaatccactcatatcatacaattgcttattcaaatcattctcaatacattcatttatgcaaaacaatccactgcatatcattttcaatcaattcactattcaaacacgctttatgttcaatcaaacaactcaaagtgctgaaatttaaataactgaaattaaaataactgacatatgacaacgaaatcagctggaaatataaggtgtttaaccttcaccaaaacatcttcaatgactccatatggccttgtgatggagcggtcaactaactggatggtcatgcgtgtgggcattatctctatctctccaagtcgctgacacatggaaagaggcattaaatcgatactagctcccaagtctatgagaagcttgtctacaacaacctcaccaatataacacggtatc

SEQ ID NO: 221345 - DNA, 439 bp, Glycine max
  unsure (1)..(439): unsure at all n locations
ctgcagcttaactgtgaaaggaggagtattagatttctatattnggcgcanccgcatcccactgttatgactattcatactaaagatttccaagtggtacaatcatcacaaattcagaattaaacattttaagttgagttaaagctcagttacttaccataagcttggatgcaaaccctccgttataatcccttgacgagggcaccccttccatcagcccaggaactgggttgtaagcatcactgtaatcaatgcaacttcaacatattattttgataatctaaataccaaaactttaaccttctaaaaatttccttaacagttgtgaactaagctatatatggaaggtttattgctggaacaggaagcatatttttgttatcaagagaaaactacaagggtctcatagtatacaacaagacaacaaatatgaggacag

SEQ ID NO: 221346 - DNA, 472 bp, Glycine max
  unsure (1)..(472): unsure at all n locations
agcttcgtctgcagatccctcatttaagactattgttatactaaacaacattattgtaaaaacaaaattaaaaccaaaacttaatccgcagatccctcatttaagactaagtttcgatcctgcttaatcaagttctaaggtaacagtacatttcccaatgctaaagtcacctaactgtgcacacaaatgggtgatcataccaaaagcatacaaacatcaagcatcgaatgaagcattgaacacaggaaacacaatcaattagattttatgtatttacatcaattgttcattagaaatccccaactagggtgtttagccagccattacaaagaaatcctaacaataaatgagattaaaacagagaatgatagtttcttacacaagaaggaggattcctcctccccttctcagcatctcacactcactctctactcaataatctctctcanatgacaaaacctaggcttcaatg

SEQ ID NO: 221347 - DNA, 454 bp, Glycine max
  unsure (1)..(454): unsure at all n locations
actcagctttatcctatggacttaccttgacttatattccttgatatcccttctgagccttgtttccctttccttgttttgaagcgcactacaagccttaagtgaataaccatgatatcaccatatccttaatgaattttggagctttggaattgttttgggaataagtgtgggggtttttgtttcattggataacatgttttgttggccatgcttcatgatatattttgagccatacttgatatacattgcatattggttaaatgttggacatgttgaatatgatgttgtttctcataaggctatagagcaaaaaaaaaatcgaataagacaaagaaaaatagtaaagttgagtgaataagaaaagaatgatgagactctcggntctactctttatgtttaaattttatatttacttctttttatgtgcttatgttgtcttaatatgcactta

SEQ ID NO: 221348 - DNA, 467 bp, Glycine max
  unsure (1)..(467): unsure at all n locations
ctgcagctaagctcttaactgcacaagctctttttatttaagagnnatcctgnggaaccttcacccgacgaagacactgacaaaaacttatcttctccttcttggacaaagtatggcaggctggggcaagtaaattttcttcgcatcagaccttggatgcaactgtgatcttatacccatatcagctagatcttgacgggtattcaagccatccttcgtcttgccttgaatgttaaggagcgttccaatcacactgtcacaaacatttttctccacatgcataacatcaatacaatgtctaacgtcaagatcacaccagtacagaggatcaaagaaaatggacctctttttccatatgcaactctgacttttatccttcttttgggtcttcccaaatacagtgttcaggtgttgaacccgctgatatacctgctcaccagcgaacggtattggcgcaatatcatact

SEQ ID NO: 221349 - DNA, 408 bp, Glycine max
  unsure (1)..(408): unsure at all n locations
attcagaaaattagagcntatctcttttatcttagtgagagtgattctcctaaattcttgagtgattcaagaacaccctggctgtatcaaaggactttcacaacctttgtgtgttgccctcgctggaaagagtgattctttccttcctttcatcttcacccttgttctttcaaaccacaattccagaaaatccacctctgcccagaattatctcgtggccataactcccattttacgcactcaaattaagtgattcttgagcctaaattgaatttcaaaatgagacctttcacctcgttttggaatcacctcatttggagccctgtaacttcagttattgtcatttctatatttctgtccagccaccacttaacctacgttgtaccatgccattcatgcattttatgc

SEQ ID NO: 221350 - DNA, 415 bp, Glycine max
  unsure (1)..(415): unsure at all n locations
agatgatgaccaaaagcccaaagaatgatttcaagattcagtcaacaagttcaagatcaagataaatntcaagtttcatgagagaaatcaagaagattcaagattcaaggaagtttgatttcaagattcaagagaagatgaattcaagattcaagagaagaaatcaggaagacttcacacgggaagtattgaaaagaattttcaaaaaacaaacatagcacagttttgtttttcaaaagagtttttctcataattttctaagttaccagagtttttactctctggtaatcgattaccagtttcctgtaatcgattaccagtagcaaagtttgatttcaaaagctttcaactgaatntgcaacgttccaattgatttcaaaatggtgtaatcgattacaagatattggtaatcgat

SEQ ID NO: 221351 - DNA, 400 bp, Glycine max
  unsure (1)..(400): unsure at all n locations
gtatgacatcacttatggaatgcatactacatcaattttagaactcatgttgttcaacacaatgttaaatatatgcatatatttaacatcgatatgatttcaaatcaatgtagaaccctaataacatttaacattggttccccttgattttgatgtatgaaatgacacgccctgcatgagtcaagtcacatcttacatcatttattgacataaccgatgttgaaagtttcgcttactacattgatnttagcaaaaaccaatgcaaaatgtatgttttttaataaaaaagttagcatcttgatatgtattcattgttccatgtcttatatttgtgattatgcatcttatatattaatacactattacctatatgctatcaaggttattctttttttatttt

SEQ ID NO: 221352 - DNA, 495 bp, Glycine max
  unsure (1)..(495): unsure at all n locations
cctctgagtcacctgcggcatgcaagctnggatctcctctatgccaaactctcactgtggagttccctctgctccttcaatctggaggcaagaagtttctggtactctgctgcctcagatattgcctctgcaattctcttcttcttatcaacaattctgcccgcttcctttgcagtgtcagtggagtgatgagtcgctgaatctttggagctttgctcacctttttccctgcaaccaanaatccatcactgagacttgaattcataatatgaactgatccaattttaattggatatcaaagaggtaacatcacactttgattaaagcgactcttcaattcaaatggattttggtcgtaatttgaagtgtcataaatatccatgattttgcttttaaatttgaattgacaggaggcttgttcttaacagagcatgggatatactggtgtttcccaaagaacgaagtctcaagcagcataatgatcattttntatga

SEQ ID NO: 221353 - DNA, 464 bp, Glycine max
  unsure (1)..(464): unsure at all n locations
tagagctctattcttatctgaacacgaacaaccgcttttctctttatgnttttcacttaataaccatcttgagcttgagatttcgcaaatatgcactaagctcgcctgcatgataagcatgagtaagtgcccgggctctaaacgtgctacgggcactaagcaccccttcgcatgacttcagattctccaagctgtgtcttcaagctaagcgaataccttcccactaagcgacaacagatcgctacgcgagcctggcgcgctaatcgtgaatctttaggcttcaacttctcttactatcccttgcctgtattcctacaatatataaaccaccataataatatgaattaacaggttaagacacctattgcacaaaaactcagatgatgccgaaattcaatgattcacacaaaaagatgcaataaaatgggagaatatngtaactcttatatgtataattaataatc

SEQ ID NO: 221354 - DNA, 272 bp, Glycine max
tatgatgaactaatggacgtcaatatggccaccgataaaccttggaatgagaaaccaaaataggccgaaaggaagaacatgaccaaaacaattttgatgggctttataaggcaacaatagtgagctcaaactccgaagatggaaaggaatcattacgggtcataggcatgatctggatgacgagctaaggcttgcttagtcgaaaagaatttgccaacagttaagtagactgagggaattgggccatcaccgtgatgcaagaaactaattac

SEQ ID NO: 221355 - DNA, 461 bp, Glycine max
  unsure (1)..(461): unsure at all n locations
agcttaaattagntcattaactatgtgtgcttttatattttcacatgaacactttngtactgctgctggtttccaactatgttgataacttcttgataatcccatttcctttaaaaatcaaacaagaaatatatttttctggatgatggcttgttgagtgcttaattttgcctaagttataaaatatacatgtggattagagaggtgtagtatacatgtaacaagtaatanttataggaggaagatctacatatatatcattattctttaatgtggattgagcaaaaaccttgacacattcttataaagaaaatggtgcatgacaactatgtcatcctatttttcacttttaagagatagaaacatgatccggtaagaaaaagggtagagaaacaataatttcgagtgtctattaggcatacatacttngcagatggtcatgtattattactcatactcat

SEQ ID NO: 221356 - DNA, 384 bp, Glycine max
  unsure (1)..(384): unsure at all n locations
tgcgggtctgggagacgaatgtcaagtgtntgctatatgtgaagatgatgttccaagtacttcggatttggtccgaccatgccctcctgatttccagctgggaaattggcgagtggaggaacgccccggcatttacgcaacaagcataatgtaaacctttacgggtttaaaagctctatatttgggcctatgctctatagttttcattttgttaaagctttgagtcttttgtctttgaatttataatacaaggatctttcttcatctgttcctggtctctacccattctcattcatttgcatgtttacttcttttctgaaacggcagattcgatggcgagtcctccgaatgtactaatacctgcgacccgtctatctacttcga

SEQ ID NO: 221357 - DNA, 439 bp, Glycine max
  unsure (1)..(439): unsure at all n locations
cccatctcatgtgttactaggnggcggncgagcgatggngcacaacaagttttccacatccacaaagcgcgcataaacccaccatcccctgtggcccacctccaactagctcacgtactcccacgtagcccataaccttgtttctctcaacaccgggtccccatcaatcctcccaagcttccccaacatcaaagtaaatcaacattcaaacagcacaaattaccacagccaagaaaacagggcaaaggcagaaaactctgcccaaaacaccaaccaaaatcacagcttttctcacttaaagaccccagtaacaattccttcgatccaattcgttaaccgttggatcgactccaaaattttactggaagtctatagtacataagcctacantttgaccgttgggatctactagcaaacatncagaactcattctgcacta

SEQ ID NO: 221358 - DNA, 401 bp, Glycine max
tcattaatatgcttcctccagaagcttcattatgagacttctatcacactccatacatcttcgcatagatcccaacggtgagatcatggacaagtgtcttgtgaagttgcagaccatatttcgagaagatccaacggttaatgaaggctggaaagcgttgttaccgaggaagcttcatgtagctttttctagaagcttcattaagaggcttcctccagaagcttcctcgtggcttctttgaaaagctttctcaagaagcttctttgagaagctagatccttatctatccacacccctctattaactaaattaacttccttaaaaataattacggatgaaaataacgcaacaaatattcaaacatcaaacataattactaatagtatatagatatatatata

SEQ ID NO: 221359 - DNA, 459 bp, Glycine max
  unsure (1)..(459): unsure at all n locations
actggacgcattggtgaacttggtttcccagctggccntgaaccanaaatctgtacctgtcgcaagggtctgtggattgtgctcctctgctgaccaccatacaaacctttgccctccatgcagcaacctggagcaattgagcagcccgaagcttatgctgcaaatatttacaatagacctcctcaacctcagcagcaaaatcaaccacagcagaacaattatgacctctccaacaacagatacaaccctggatggaggaatcaccctaatctcagatggtctagccctcagcaacaacaacagcagcctgctccttccttccaaaatgctgctggcccaagcagaccatacattcctccaccaatccaacaacagcaacagcctcagaaacagtcaacagttgaggcccctccacaaccttccctcgaagaacttgtgaagcagatgactatgcagaac

SEQ ID NO: 221360 - DNA, 407 bp, Glycine max
  unsure (1)..(407): unsure at all n locations
tgtanggttntagtctcacgattgtcacgtgctcatgctacaattgttatccgtggctatacgagacatcttgccaaacatantcatgttaacgataactcgcctgtgctgtttcttccatgctatatgtagcaaagtcattgatccagtcatgtttgatgagttggaaaatgaagccgcaattatactgtgccagttggagatgtattttccccctattttctttgacatcatgattcacttgattgtgcatctggtcacagaaatcatatgttgtggttctgtgtatctacggtggatgtacccggttgagcaatacatgaagatcttaaaagggtatacaaagaatctatatcgtccagaagcatctattgttgagaggtacattgcagaagaagccattgaat

SEQ ID NO: 221361 - DNA, 306 bp, Glycine max
  unsure (1)..(306): unsure at all n locations
tctttgaagcatagnttatagattcggttcaaccaggatccgatgggtaaccgggtcggtctggttattggaccacgcatgcatttggcccggtataactcgaccgattttgtgcaaactcagagacctagctcgtttttaaaaccctgaggtttcgcataataaaaagttacaaaatgacatcattttgaagaaacctaaataatctcagaccttctctcgacccttcttttcattctcagaattctctagtattccccttctgactggtgcttcactctctcctttcaagatattcagacaaaa

SEQ ID NO: 221362 - DNA, 442 bp, Glycine max
  unsure (1)..(442): unsure at all n locations
tacaactgcaatgtagattttataccaaagaatagttgtttcacacataatccaagagttgtgntgtctctacccaaccaccttacacactcctaatcatgaatcatcaattcctacccatctccatcatgtgcttgagggatagaaggggggagtcatatcataatcaaaacatagtaacaatgtaatgtaagtatggccactggtcataaccaccataaaactgcagtggcacagaaatgcactgagaatcagttgttgagagagaacaaaatcactcatcacccacccaccaaactaccagtgttgtcttgtcatgcttctcactgaacaaaatcagttatgggctattaaagaaattgatcattgggcatgggttctattgaaacatgcttgtctttgttcttttgcaaaacaataacacgaagattttacactcaac

SEQ ID NO: 221363 - DNA, 382 bp, Glycine max
  unsure (1)..(382): unsure at all n locations
actttgttttctagccgtgtatttggctatattatgacatttgaacaatttagtgatgcaatctccctaggaagggaccaatcactacaaccatgagcaagaggctcctagaaaaatgggctagagctgctgaagaaggccctanggttctcatgaaccttatgatagatttctgagcccatgggccacggtcgggtccaattatctttggacatattagactaggatgtcattatatttggtcctttgttttagggctccatattgtaagtagggcaccctacaaatataaggattttcagcccttgtatttttgggcacctcgactattttttgtattatgggtagttctgtatttcacatgccctaatggatattgatg

SEQ ID NO: 221364 - DNA, 279 bp, Glycine max
gtgggctgcgaacaaaatccatatggaagtctattctgttaattcagctccagcctctgcctatataacgcaaggacgcccttgataacaaaaaggcgctgtcacttgtgtattgcatcagtaataaaaaacgttattgtgtctctaccctggatgtaaccttaaggaaaggtgaaccacataaatctgtgtgtgctttctcatctctctctacctttcattgtgctgcaacgtctgtgtactgacatttcagtctgttgcatctcctgtgtgacttgt

SEQ ID NO: 221365 - DNA, 472 bp, Glycine max
cttaagtcaccgcggctgcagcttctgaaagcagagcgagctcacttttttcctaataactaagcttacctccttgagaagcttccttgagaaacttccttgagaagattcctagataagctagagcttatctacacacactctctaatagctaagctcacctccttgagatgagaaactggagcttatctacacaccccctataatagctaagctcaccccatgacaaaatacatgaaaatacaaaagtccctactacagagactacttaaaatgccctgaaatacaaggctaaaaccctatactactagaatggccaaaatacaaggcctaaaagaaggaaaaacctattctaatattttcaaagaagagtggacccaaccttggcccatgggctcagaaatctaccctgagggtcatgagaaccctagggccttctttagtagctctagcccaatcctcctggattctt

SEQ ID NO: 221366 - DNA, 462 bp, Glycine max
  unsure (1)..(462): unsure at all n locations
tgagtctggctttnttgaataaactaaagcatgatctttatcttgaatggtttaactcatttaaaatatgattattttgtaacttgcaaaaaaattattaaatcattgtttaactgtcaatttattatttaataaaatattttaatactatgtaataatctacaaataaaatatgtgttaaacatatgatatgatattgtagaatctatgtaattttaatttttatattctatttataaacaagctatttatgagttatttatgtcaagcttgtaaaacttacgcttagcttgagtctgtttatttcattaaacaaacgagtttgatggagcatttatcaagttgaactcgagaagttcacgaataacttgactcatttacatctctatctagaaatactgtgtgaattgtaattaagcgtcccattatatatagatcggtaacatagtggtaataaatgac

SEQ ID NO: 221367 - DNA, 455 bp, Glycine max
  unsure (1)..(455): unsure at all n locations
agctngatgattacattctccccgtttctcttgcttattcttcttgatatcatcaaaatcttcatgatttacagtgcgtgatgacatgatgcagatgcgaaaaagggtaacaaggagatgtaccatcatgtcaatatccacaaataatcatacaacaaaggtgtacatgacatttaagttatatgcatggtagtgtttaaaaggcatgtagcgtgttcgcttcgtgcccctattttatgtccctaaatgggaggaactaaaaaagcttttagtgataattcccaaggtggtcatatctcttttgatggtttctagagttatcatccccttcgacaaacatactgcggcagtagggactaccagcaacaatatgttatcaaagagaaaaactctagatgaaggttcacttgttataagcaagtcggagacccaacatgaccacagaattacctcca

SEQ ID NO: 221368 - DNA, 461 bp, Glycine max
ctcagcttaccatttaagaatcttatgttattacttgaacgactcttatgaatcccaagataagaagaagactttggttttgacaactctggtttcaaatgcgtcgaatgcggatttgttttacaagctaagggttgatgattcttctagaactatcatgggattgtattttttgaaagagaatatttttggaaaataaatcgaaaaggatagtagataaggaaagaaagggaatagatatagcaattgtgaaaaccatacatattgacccatatatattgacccatatatatgttattaagcccaatgcttcactcgggtgtagaacttggcaattacttaacgcactactaccaatgtgtgatcaccaccttctccctaaacctgcggccaccaccactcatcccctcttttctccgtgtgtgttgccacaccgctaccacccaaacgcatctcactca

SEQ ID NO: 221369 - DNA, 477 bp, Glycine max
atcttaagtcgacgcggctgcagctataacattgaagctgaccgtcttttgtgttagccgcgcgctgttatcaccgtataaatccgggctaacctgctatcatgcacatgaagtcattacaatttacaatcatagttcttagcaaagacaggtacttagatcgcacacttggtatgaatgaaataatgactattatttcttagtacctgccagccagcttcgatgctgttaagatcttgaccaaatgagcctcctaatatccaaagctgagacaagctgaactcattagtctgctgaatcttgggttcccacacatttatagtggctgttgctccataatacttgtctccttcaacatatgctattgtatgctgattaacaacaacacacaaaaacaccttaggaaattggccaaggctactacttaaaacagatagcattacaggcacttgaaacagttttacctgagaccatttg

SEQ ID NO: 221370 - DNA, 352 bp, Glycine max
tgatcgaatcggaaattgggcatacaaacgccccatccggaaatttaatccatatcgctggggcggcgtatgattcccatcacgggtattgagccgagtgtgaatttcactgcttaagcgatttactaaacaaatttgtatgacaacttattactactgtaacttgtacttcttttagaaaactataatatggcgcaggaccatttattgcttctgtagcaataagccaaatatattattgcagctgcttttatcctctgatacactattctgctattcgcaccaaatctatagtattggtttttagcaagcttatacgaatctcttgcccagtgcactgtgggctcaacag

SEQ ID NO: 221371 - DNA, 412 bp, Glycine max
  unsure (1)..(412): unsure at all n locations
gacttangacgcatcaacaagaatcaagccaaggctattgtgcaagcaatcaatggggcagaacacaccagatgattataatgatggtggctcaaattctcacaaaagtaaaatcatcactttcaaattgagctttcaaaactatcatgacttgtagaaaagaatcaaggatttcaagtcacaaaatgtcaaaaacttttatcttcaaaacaattacccatttcttgaacatatcctataattcacagaaaaacatgcaaagtcgtacgtgcacacaatattgacccataatattaaactaaaaatccgacgaaactaacaacattaacaaattaacacaactaacatattatcaaaaccatcaaaactagcaaaaccaaagaacactcccccccatacttaaacaacacat

SEQ ID NO: 221372 - DNA, 381 bp, Glycine max
gagctcctcggtcatctgatcttgagtctctttgtacagttcctatacctcgtcaagtcccttctgacagttcttatgaatataacaaatgctttaccagccaggatagaaatatccatacgcgaatttaagattgagaaccaatgaactcgggaaccctgcatcttgaaataagcatcccaacgtgatggccatcttatatcacttttcacaaattcaacctcatatgtgaacgatatactttcccgctcttttatcacttgatacttgtcaagctcagccgtgcagcttatatgagaaagagtatcatacctgttgtgctttgtcatgacttcaggatcatatctaatactacaaggtacaacctgaaaaccaactatt

SEQ ID NO: 221373 - DNA, 477 bp, Glycine max
  unsure (1)..(477): unsure at all n locations
agcttncttgagaagctagagcttagctacacactcctataatagctaagctcaccccatgacaaaaaataacatgaatatacaaaaaatatcctactacaaagactactcataatgccctgaaatacaaggctaaaccctatactactagaatggccaaaatacaaggcccaaaagaagaaaacaacatantttactatttacaaagaaaagtggacccaaccttggcccatgggctcaaaaatctaccctaaggttcatgagaaccctaaggccttctttatcaactctagcccaatcgtcttggagcctcttgctcatggctctggtaactggtcctttcctagggaggattgcatcactccctcccccttgaagaggatttgacctcaaatctgttggttcctcctcctctatatcagctccacctgtaaaaggaattacatcagaaatattaaaagtggtgctaactccata

SEQ ID NO: 221374 - DNA, 361 bp, Glycine max
tatttaaataaagaggaaaaggatcatcgagatttcttcttcatgtacgattatataatttgggacctacacataatgattctgtttgacgacttcacgatggggtgctctggatcttaatcatggcacccttctaacttcatccaaacgattgggcagcaattctaccgttcggagccctctgtctgcacacctatgttaaggtcactctcgatctactccttcattatttttggtgtcggccaaagaacaaagcataatcgggttttctttttgtttggatcccaacatggccttgtttcgaactttcacaacatcttataagaaatttaagacaaactactttaaaatggtaataaaa

SEQ ID NO: 221375 - DNA, 399 bp, Glycine max
gctgagttttctcacagagaggacatgcatgtatttctttaacataggatccacttaaatatcatatgctataaagacattaataatacaaaacaccattgaccgtaacctaaacatttgctgcaaattccatcccacacatcaaccccctctttccacaattttttcaagtcttcgattactggactgaggtacacatcaatgtcattccctggctgccttggaccccgtatcatcatacacaggataatgtattttcacaaaatacacaaccaaggagggaggttgtaaatgttggatcgagtggcctgataataattaagaaggggggttgaattaattaattctaaacctttaccaattaaaaaattacccttctaaggctttactatattatta

SEQ ID NO: 221376 - DNA, 368 bp, Glycine max
ttactagtactctgcactctagccgcgtatgtggctatattatgacatttggataatctatgacctctttatttgcatggtgcgaatgaacaattatgaattatatcacatgactatgtgggttgtttatatattcaatctattcatgtttcttgcttcatgattgggttatattcttcaatgtatgccttgtgaatgattaatattatatgtgtgtcttatacttgctacgcactttggctatctgttgatgccaaagggggagagaaatacggaataaatcaagaactcacacaagtaatgaacttaatctcaactgaagcatacgctcaaaaacaaatggggagaatggatattgatgtgagtca

SEQ ID NO: 221377 - DNA, 363 bp, Glycine max
  unsure (1)..(363): unsure at all n locations
catttagcgcacagccgcgcttagcgagtcaatatgacatttatagttaaagcccatgctcttagcaccacctccgcgttaagccgaattcaaaaatnttcaaattccagagaggatctggggcttatcgcaacaagctgcgcttagcgctttctacaacacaaaaattttctgcaatatgcgcttagcctgagatgtaaggcttagcacacaatcaagcttcaacttacagagagtagttcatgcttagcgcaacaagcgcgctaagcgcacttcaagcatttcaaaaatagtaagggattggtgcttagtgcatcctgccgctaagcccaactcgtgaaagttcaattccagaatggatat

SEQ ID NO: 221378 - DNA, 466 bp, Glycine max
  unsure (1)..(466): unsure at all n locations
tactcaagcttgccacccagctcgcccaggcgagcgacgttgctgtcttctaatcatccgccttctggaggaattttctgaaaggcccatgtgggcctggttgctatttgcacccccatttttactaattacaccccctaccttcttttggtgattcttttttcgtaacgttacgaaaccttacggattacgtaatcatccactttttgccttctggagtgttacagaactttacggattgcgcactaacacttccttttaatttccggcatgtcgcgaaacttcacggattgtgctacaatgctctcttttgactntcggcacgtcacggaacttcacgaattgcctaacgatgggtgccaagttcctcgaagtggtcaaaagaaggtcgatcccacaacggatggtccccgacgaaataatgtatgaccaagtcacttaaaattggactttggaaaaaaattcg

SEQ ID NO: 221379 - DNA, 481 bp, Glycine max
  unsure (1)..(481): unsure at all n locations
taagtcacctgcggcatgccaagcttaaagaaggagaatatagacgcctatgttttgtaaanntcaaccncaccactaaaaagaaactttgttccgacggccaaaatccatcgctaactggaattttntgacagacaaaaatcccgtaaaaaatggtcataggaaattttcgactaatgtcttccatcagaaatttctgacggattttttctgacggaaaatccatcaaaaaatcttattttataaataatttattatttaaattgtttttcttgtttatcatttatcactgacaatttaacaattattttatgtatttatattacttaccatacacatttgaattaatacatacttataattaagaaatagtgaaattgataaatccaaaacatagacttaaataaatcattaagctaaattgaaaacaaatgtaaaagaataacacaatgtaaaatgtcaatgtcgattatcaatagta

SEQ ID NO: 221380 - DNA, 455 bp, Glycine max
  unsure (1)..(455): unsure at all n locations
tagnaagcatcttattcctatgagtaagatttattttttaataactgacttctgcgtacataagaaatactataattattattatttgctcaccgtttttaaacaacttttttttgctgcaacactattcttcttcattgttttgaccacaatttatatacattttttcccaatttctctttgcacattattaaaaacttcttggtgctttacatttaaaatgtataatgatacatgtcatatggttaattatatcaattgtacatgtttggttatatatagttggagtcaaagttttaattctgtcattcaatatatatgatgcatttattattttttcccaacatcatgacttctaattagactgatagtggcattgttatcgactaaatatttatcctgaaagttataatgtgtttcatgatttacatagatatagtcaatagtaatactag

SEQ ID NO: 221381 - DNA, 444 bp, Glycine max
  unsure (1)..(444): unsure at all n locations
agctnanggggaagataggtgaagacatagttttttgtgataacaatgacgacgacaaaagatgatgactaatgtgatgacaaaaagctcacagatcaatcaaagaataactcaagagaatccaagtcaatcaagaacaattcacgagttcaagatgagaatcaagaagaattcaagactcatgatgatagtctagagacaagaatcaagattcaaggatcaagatcaagattcaagaatgaagagaagactccatcaagactcagtttaaaaagtttttcaaaactttgaatagcacatgagtttttgacaaacctttactaaagagttttactctctggaatcgataccatattgtcgaatcgattaccagaggcaaattgtgtgaaaagtttcaaatgatttcaacgtccaattatttcaaagctgatcgatacatgtttg

SEQ ID NO: 221382 - DNA, 327 bp, Glycine max
tttgacctgtgatccactctattggcatcacgatcccacaaccatcaaacgtggagaaaccaccgtctgagttcttacggaaaatgaacaataggtatatacatatagagcgtattagactattatgtgaaaatttaaacttagataaatactctaagaaataaattattttcactctagatttttcctaccaaacaatcaaataattttcatctttctttgtccttccaatttcttaattatcaaatgttgaagtgttacctaagaatctcaattaatatattatatgaaatgcattattcatgatagatatatttcattcattct

SEQ ID NO: 221383 - DNA, 421 bp, Glycine max
  unsure (1)..(421): unsure at all n locations
accaaacaacattcatttaacaacatacttaaaaccataacctaatccctagatccctcttgtaagactaagtatcaattctgctgtattcaattctaaggaaacaatacatgttccaatgttaaagtcaccttactaggcacacaaatggttgatcagaccaagagcatacaaaatttaaccactaatgaagcattgtacacaagaaacaaaatcaattacatttgagaataattacttcagttgctcattagaaatacccatcaagggtatttatccagccattatagacgaaaccctaacaatgataagcttacaaaacctaggtatctctgcaaaagcatgctctcttgtacctccaaagctctatcctcnaaataggccttatggcgtgccttggaatgtaggtaaaatctgctgt

SEQ ID NO: 221384 - DNA, 382 bp, Glycine max
  unsure (1)..(382): unsure at all n locations
tgtaatcgatacacaatactgagagagattcatttcttantacaaaaatattctcaacaatcacatctttgtgtgtggctcttgaatggctatcaaatgcctatatatatatgtgtgacttgcgacacgaatttgctaagagttttaaagaacaaaaaggtcttattctcttaaacagataaattgttttatcctcttacaaattacttggccaaaacacttgtgattcaataaggaattatctgagtgctcaaattgttcaatctatctctttcatgaaaaattcttcttatcttcttcttcattctgaaaagggattaagagaccgatggtctcttgttgtgaaagatatctaaacacataggaaggattgtccttgtgt

SEQ ID NO: 221385 - DNA, 408 bp, Glycine max
  unsure (1)..(408): unsure at all n locations
aacaacaacaaacacagaatcctntccattcttggttttgggcagccccaaaacatagtccatatatatgtcagtcaaggatatttaggaacaggcaaaggagtatacaatccatgaggtttaaccttaagattagcttgtttacacacaatgcaatgaccacaaaacttatgcacatcacgcctcatatgaggccaaaagaaatgatcttgcagaatatccagggtcttttgaaccaccaagtgtcccatcaacccccccttatgtgatcactcacaagcaactttcttatggaacacttatgcacacatatattatttgctttaaacaagaatccattatgctatagtncaattttcagaaacttttccatgcagcaaaatttctacaagtcacatcatcacatac

SEQ ID NO: 221386 - DNA, 449 bp, Glycine max
tgtgtcatcacctaaaaaccatgttaaggtccaacgccttgatatgatcctctttgcttttattaaacgcggacttttaaaagcctaaagtcaacatataactttgtcacctctttcaaaaaaaaaccaagagatcattaatggtccaatgccttaatgttttctctcctttcaaaagaattgaaagatcgtttaacggtccaacgccttaaaacgaccttttgttcagtcaaaatatatcttgcaaaaaagataaaagattacttaaccaacgtttagttctcgataaactacgtatgtctgatttccttaccataattgaggaatacgtaggagcaagggaaacacccttgtcgaccacataaagatataaaataccattggcatacaaagacatatatacgtcaaatggaaatacaacatattgaagtcatatttgcacacttgat

SEQ ID NO: 221387 - DNA, 407 bp, Glycine max
  unsure (1)..(407): unsure at all n locations
agctngctngtggagcatctatagaggctggttttttgagcttcaatgaagtcctacaatggtgattttccaccatggagatgcatcggaaggcaaaggagaagaggagaggggaggcaccatccactaggaataagccatggaagaaggagtttcaccaccaagactgtgccttggataagaagcttgaagaggatgctttaatggagaaaaagaaagagagagcgggggggggggggggagctcgaaattgaaggaataatagagggaaagaagtggaactttgatagtgggcttcataaactttcattcatcatagttataacaaggcgttacacatgcttcttattataaactagtgagcctccttgagaagctttcttgaaaaacttccttgagaagctttt

SEQ ID NO: 221388 - DNA, 398 bp, Glycine max
  unsure (1)..(398): unsure at all n locations
tcccaagttntaagttcttactcaaaactgtcctaatcttatttcccaaagtcctattaacaacttccgtttgaccatcggtttgtgggtgacaagtggttgaaaataacaatttagtgcccaacttgctccacaaagtcctccaaaaatggcttaggaacttagagtccctatcactaacaatgctccttggcaaaccatggaatctcacaatctccttgaaaaacaaatcagccacatgggaagcatcatcaacttttttacctggaataaaatgagccattttagaaaacctatcaacaaccacaaaaatggaatctctaccattgcttgtttttgtgcagcctataacaaaatccatggataaatcaatccaaggatactctggaattggcaat

SEQ ID NO: 221389 - DNA, 384 bp, Glycine max
  unsure (1)..(384): unsure at all n locations
cccgcttaagagtgagatgagagttatctatttttttatgatcagcnattcgggcaaacaatacttctttctatgtgaatctgtccaacattactactctcaaatataattaatagaatgaagacagattatataatcatcatttctaaatctattggccatatactcactgtcccttattttggctgcccatggccactgtagatgtacattggtagacatcatgttctataatatctccaaatgaaggactatacgacagagaatgtggagaaagaaatggaaaacaataatcttatactatatggaaccttataatgtccttttctttctctttctttcagataaaatgtcattttctataaatcgaaatcgttgtcctca

SEQ ID NO: 221390 - DNA, 444 bp, Glycine max
  unsure (1)..(444): unsure at all n locations
cagctgaatggacacacatatgttctactcacattttctcttttttacaaancatccgtgctacacctataccgaccactcctttcacaaccaattatcacaaatgaactccttcctctactagactgtgtgacaaacctcataatcactacaacaaatccattctcatgagcatatgatcgagcccactacaaaacatcatcttgggtaccaaacacctacaacacaacccaaacaatttaagtgttctacaacacatacatttttatcaaatcactcacaataatgaacattaatacctgagaagtatgatacgcatatgaacaatcaacatgtggatcattcacgccacattcttgatcattttgataatccatatcaacttcttcaacattacactgtcataaatccattgttctttatccattcttacaacaaatcaaa

SEQ ID NO: 221391 - DNA, 419 bp, Glycine max
agctagcgcaacaagatagaatcgagtcttattttgcattaaccattcagatgctggttctgttccctctcatactcacaagtctagaaccattgaacccaactactacacaaaccaaattactctctgctctgttcctataaagttacatccaataaataaatggcccaactcctgtttccccccgttaattaacctttgttattattagtacgtggtacactcaaattttctttctcgtaaaagataaaaactgacaaaggcattgaaccctcaagcaagttagtcccttcaccatttatacccttgtggtcgcttccttctctctcaactctcaagtctcaatgcatcagtgtccttttgaagctttatacgaacaatgataggtccttctcgtcataataacactttgtctgact

SEQ ID NO: 221392 - DNA, 447 bp, Glycine max
tactaagctgggttggtagtaaataattttgagctaaatatgtctgggtggacaaatggttgaaagacacccatatgctattttacacctaaatagagaaagaataaaatatgagaagaacatatcaatataaatataatatgatttatgatgtgatagaaatgaacaagaaagaaatgataaatgttagcaacatgtttaaaatgaagaataattcacatatcattattctctgggttaaatcaaaatatataatgttgaatctagattctactagttcagccatactttatattggggtaatcaaagttgaacgattttaacactcatatgcataacagtataatatacaatcaatgttaagagttataacttttcttatgtttgacacacagctcaactaattctttgttttagaaagctcaactattctttgtgatagaagct

SEQ ID NO: 221393 - DNA, 409 bp, Glycine max
  unsure (1)..(409): unsure at all n locations
cagctnntttgcgagccgctctaggtgctcagattatctttatatcaaacncctcttattactagctatgttgaattctntaattcctgaatgtacaaccttcaaattgttgctcgttcccctctttcttttctgaaaaaagaaaatcaaatgctgtcaaaacatggatgaagtcctaagaaaatcaatatcaaagaaaacatggatgaaatcacaattaataagcacaactacctatctttcagagtcctttggttaatttgtcttgtctccttatgtggtggggttgtgtttaataatcttatacttttgccttccaaaaaaaacttatcactaatcctcttttcattaatccaattgtgtatggtatagtataaaagatcatgggttcttcacctgcctccactcc

SEQ ID NO: 221394 - DNA, 270 bp, Glycine max
tgtgggcctcctataagggcatctactttcacacttgttttccctttttgtatttgataacatgtggaaattgctctaggtactctacccattttgcatgccttttgtttaacttgctttgccttctaatgtacttaagtgatttatgatcactatgaatgaaaaattccttggaaacaaggtaatgatcccaaggttgaggtatcttatataacataaagctttttatcataagtggtgtagttgaaggtggcaccatgaagtttgcac

SEQ ID NO: 221395 - DNA, 457 bp, Glycine max
agcttactaacccttacaagagaacaaagatgttatactctaattctcctaaaagcagggttccgcataggaagagccctttgggcttacagcatggactaagccattttgccttgtgccgaaattcaacttattattggaaaaaaattgaactatgaggctctaataccattttatgaccaactctactaaaagcttaagctattagcttaaatatcaacaggggttttatatcttttaaatataaggtgaatacactctgcaaaaggaagcacctcttagtaatattccaaggctgtctcccaacttaaacccttgacatccaccaatatcctaattagctcaggaatgcagagagacagttgagtatcattcatttgcaccaccaatttatctgggagagtgtcccaattttctctctttcccgatctctctttaaagtgtgcgatgatatcct

SEQ ID NO: 221396 - DNA, 445 bp, Glycine max
atgctagtgtgtatgcataatgaacatgtaacctttctaccttacccatagctgcagcctatgctggggtgagaagatatccaacttaataaaggattagaccatgggcacatatacatgcaattatctagaaaatcatgtctctatctttaccaatgttctctagcccaaactgaataaattcatgtgtatatttaattatctaaaatatcatttcatattctttctagagaaatttatttgacataattcattgtacccaactaaaatgaaattcaatttaatttatttttcattgtattttggttcttggtaaaccttcaagtaactatttttgttctgccatcttgtaagtcaatataacataatgaattgagcttggatggctcttgacctctttgaaccatttcatattgtgacctacaatgaagagctgttaacttaa

SEQ ID NO: 221397 - DNA, 404 bp, Glycine max
  unsure (1)..(404): unsure at all n locations
aaccatgctatntattgggtattaaaattttcttttgtatgcaggacaaaccacatactcccagtgggcaatctgaaaatagatatgtcagttttcaactccctgtgcaaagattgcaaagggtaaagcacccgaaaggcgaggatttctcatttcttctgtagatattctccctgcatactttgaccaataacaaaatcctgttatgagcctatcttgttggcctgacttgatttattgcccactttctatgcgccattttttttctctgctgaagatgggaatcactcacaataacttccacatagcaggggtgtcacactcgcttttttttcttccctctactcttgaagcagttcgttcccacattgtatattggcttgcaaggtatcacacattccact

SEQ ID NO: 221398 - DNA, 377 bp, Glycine max
  unsure (1)..(377): unsure at all n locations
tctgacanggatcgtggttagtattatgctcacataaacacaggacatgattgattagagaaatatatttatatgcatcaccttgcttgtaaaaagacctaacatttctacctactgctgtcacttttacttaccttgcattttatagtgtttagcatataggtttaatttaaattctgcttgaaattatcaatcatacatgttctctcaacaaatgcttcatttctgaacttaactcacgctaacattagttccctgtgttcgatactcggattcattcgttttaattttttaaatacttgacaatttggtgcgctgtccgacaaaccggatttcccttgaatatatatgtacgaagaaaaagtggaacaaatagt

SEQ ID NO: 221399 - DNA, 315 bp, Glycine max
ataacggaataaacttgcatatgaattatagtcacaactcaacaaatcaccaccttgaactaacattcatataaaatcaaactgactcctccaaacacacatgatcttaacccccacaatctaaattgagcacgcttaagcagcgatcaaacttgctctttggaactggctatgtgaacatatcaacaagactgcgcagagtgctaatattatgaactttgattcttctttctgaccgaatgaagtgatatctaacatctatatgcttggatctatcataatgaaccttatcctcggtcgagcatatagcactaa

SEQ ID NO: 221400 - DNA, 357 bp, Glycine max
tctttaatggagagggttaccaccactggataataccgatgcaaatcttcatctgagcaatatacttcaatatctgggaagccatcgaaatagggccttatatacccaccacagtacaaagagtttcaatagatggttgctcatctagtgaaagcatatccatagaaaaacctacatatttatggtctgaacatgatagaatactatttcaatacaacctaaaatcccaaaacataataacatctgccctaagaatggatgaatatgccagactttcatattgcaagagtggtaatgatatgtgtgacactctgtcactacacatgatggaacaacatatgttaaaagatctatgat

SEQ ID NO: 221401 - DNA, 314 bp, Glycine max
acttaaaagagaagagtgtttttttaaccaacccactaaaaaattttcgacgcaaaccagctatgaatttgcagacaaatcgtaaaaaggatagaatttcactaatgctcataaatttgaggattttctgaggaaatctcaaaattattataatatatattaaatttttctttatattatactgaattacaatatttattttattattacctacaattgaatatctctatataaaatggaaatgataatcaacaaactaataacatataaatgaacatgtaaaaacacatgaatgcaatgcattaaataagtgg

SEQ ID NO: 221402 - DNA, 460 bp, Glycine max
tatagatactcacagcgtagaatcatgttattcctatgatgaatatataattttatctactgacttctgcgtacatcagaaatactataattattaatatttgctcaccggttttaaacaactatttgttgctgcaacactattcttcttcattggattgaccacaatttatatacattttttcccaatttctatttgcacattgttaaaaaactttgtgttgctttacatttaaaatgtataatgatacatgtcatatggttaattatatcaattgtacatgtttggatatatatagttggagtcaaagctttaattctgtcattcaatatatatgatgcatttattattttttccacaaatcatgctttctaattagactgatagtgtcatttatatggactaaatatttatcatgaaagctataatgtctttcattgattaacatagatatacgcat

SEQ ID NO: 221403 - DNA, 491 bp, Glycine max
  unsure (1)..(491): unsure at all n locations
ttaagtcacctgcggcatgcaagcttgtccaccatagcctaggccttatttactttcttttntctttcttacaaatacatgttgtctgtaacaacaataaacaaaaaaaacaaacctatctgtctgcctgttngtgcttttcattatttattttttttcaagaaagcataaattggtcatattatataaattatacaatttatatgactttcattgatttgatgcaacaaactaatatttccttaatatatttacaaatgtgtttatcaaatccatttcattgattacaaaggtacgaaggtttcctagaatgagcataaaagtttataacagcgttcattgccaccaaaatcacctcacaaaaaaggtggtaaagggtatccaacagttttttttataactagttttcaggtttccaacaattgctgctatganacgagtgcacaaatttgatatggaatactttgtttaagatcaagtttgaatatgga

SEQ ID NO: 221404 - DNA, 365 bp, Glycine max
tatctaataaacataacgacatgtattggcagggtctaccttgcagagcatgtctgttgtgttgtagtaaactcttcaaaaaagtcttcaacatattgtgttgtagtaaactctgcaaaaagttggtgtgatcatgttgttacaaaatagactgttgttaaaaagtctacaactagaagatacattattattatcaataggatttaatgtcctgatcaattgtataaagactataaaagattagcacatactacaaattttgaaatacttccttgaaaaccacattggtagttatattttgtggtttacattttttgcatgaataaaaatttcaataacttttactttacctcttgaaatgccca

SEQ ID NO: 221405 - DNA, 462 bp, Glycine max
agcttcaggctcacgaacttgggcttcctcgttttctttctgttcccacgccggtgcagcttaaacgacgtcgtcgaggaagaagaagaagaggatgaagaagagttatgataataccttctattcggctccgcgtcctcttcataatagaggttgtttgaatgtccgaagaagaaggactgttcttgttgcacatcactcactgaatgaatgcgcaaacacacacaccaacacaaaaaaaaaacacacactcactctttggagagtcttttctttgttggagtttcggtttcttctggcttaagaggggagaagagagaaagaaaaagtgagcaaaaaggtgaggacttttctcgtggggtgggacacggacgcatgaagggatgatgtgacgtgttgcccgtctaccacgtggagggttttgattggatgggagagtggattccaatgttatctggattt

SEQ ID NO: 221406 - DNA, 461 bp, Glycine max
  unsure (1)..(461): unsure at all n locations
tgttagaatatggggtacccgtcatatgtggtactaggtggcgatcgggcgatggtgcaaatcaactctcccacatccacaaatcatacatgaacccaccatccccagttgcccaccttcaactgagctcacgtactccaacgtagcccttatcctcgttcctctcagcaccgggtccccatcaacccttccaagcttgcataatatccaagcaaatcaattccaactatctgaaactaccctcaaccaagaaaacagagtagaggcagaaaaatctgcccataacacattcacatattacagctttccttactcaaataccccagtaacattctcttcgttccgactcgttcaccgttggatcgacttgaaaattatactggagtttcctagtacataattctacattntaaccgttgggatctgctacaaaatgtccagaacccaatatgtactacctt

SEQ ID NO: 221407 - DNA, 420 bp, Glycine max
ttcaaaaaaatgtcaaacttgctcacaaaatctgtattcaagcttaaataggttggttggtccgcgctcgcgttcttagcgcacatcggatcgcttagcatgcataagtggattatggcttagcgcgcttctctcgcttagtggatgagctgaagcggtgcgcttgatgacctggagcggtctgctcagtgaacctgacaactcatcttcttctggattcttcctaacacttagccactgagtatcgcacttaacgaatgctcgcgaagccagcagattggcttaacgagaaggtgaaaacaacacttttgccaatttgcctaattaacctgagattgagagaaattgattatttaacacacacaaccaaagtattaattatctattacctatatttaacatagagtacttataatatta

SEQ ID NO: 221408 - DNA, 449 bp, Glycine max
  unsure (1)..(449): unsure at all n locations
gccgattatggctaatgaagatcacgacgcgtctttgatctatngatggtaatcctaaatgccagggacatcaagtcaacaagcctattggcatcaatcaatctactgcattatctggtactatctttttattttattttcagattctatcaagatcagcaatccggattatttttaaaatgctttccgtgctctttttttattagattattattggagttgggtatgtgttttattgtcaaataatctattcgtcttatgtatgtgctattgtggtattatgatatcatcatccaagaatcatgtttaactgtatctttaaatggactatcattgcgataatgatgagggatggtgagaatacctcgcactcatgtttaatcgattcatgctgcacattctatgtatatgacatatatctaagtgtctgtttggaccattccaatttc

SEQ ID NO: 221409 - DNA, 319 bp, Glycine max
atatgcatgaatctgaaatccggtttctagaagttacaaaattcatacatgtacaggaaaaaagttcagaaagtgtagaaaacatatggtgttgaattttgcattggtagtgttcatacatgtaagggttataaatgtgtgtatatgtataagtgggactcctctcaactagttttttcgcacacatcaaaatgtagtagatcctatggtagaactgatggctctagaagacaagtcatatttttttttttattctacaaaacgtgttatttctctgttgccacaattgcatctatgttggtctttccaaaaggaacat

SEQ ID NO: 221410 - DNA, 435 bp, Glycine max
  unsure (1)..(435): unsure at all n locations
tccaagcttgcagaagaatcaaatggtgctccgntgctctctgtaactaaatctcggagnttctcatagcaagtgaataatgatgtgtcacgtgacaacactggattcaagaggatgatattcctggcatggactgcggcaatgatacagtaaccaatgatgatgattggcaactcttataaatgtgattgccggactatgacatggatacaaagtacaagtcaataatttgttgcttgattctcatgggcctaattgccactgcaagtttgtgtgatccctgtcatggggattccactcttcaaacattggttaatagtcgtatagaaatgaattcaaatacattatgattcattggcttaacatcatttgctcatatgatcatatagctaaccaggtatatgttgtacattacaacggctactttgatcatat

SEQ ID NO: 221411 - DNA, 462 bp, Glycine max
  unsure (1)..(462): unsure at all n locations
agctnacaaacttaagtgtgagttatacttatgtttgcaaaagcaacccaagtcttccttttgcanaactaagtttcaagtcaaaattctcatttgcaaatacactgttggggctaaccaaacatgtactaaaatgagttaattctccaaaacgttcagcacccaaaattactttttcaattgataaccaaatatgctctaactctttcatctaattttaaaatttaagtatttaagttaattttcattcctgaaaaagtttaatttattttttctttttaattcttatagtcttgttagcgatcagtgagaaatntatttaaacaagtccttggtatgataagaataactnggcatctttctataaccttctttctggttctttctgtnttgcagatggttgagtgtaggtttccaataatggggcctctgtacggaaatcaaaggccaacaatgtaccta

SEQ ID NO: 221412 - DNA, 406 bp, Glycine max
gggagtagatagaggatacaaacatggaaccttgttgcttagtgatcaagtcatgctgaagttgaaaaattaaaggacaatttcgttgctcgaaacgttcttgaagatcatcccagattgctttggcagaagaacaatgttagatacttacttacatttctttggataaagaattaaggagccaggaagaaacgatactattgttgcgatgccacaaagcatgagttgagtgacccatagcatgttcaggaattgaaccatcgacaaacccatatttgttcttcccatgaagagccatgcacattactttcttccaagaattatagttttcactggtaagaggatgagaaactaatgcaatgccaggatcgtcagaagaatgaagaatgatagggttagaatcatc

SEQ ID NO: 221413 - DNA, 259 bp, Glycine max
tcttccatggcttattccctagaggatggtgcctcccctctcctcttctccttttacttctgtcgcaacgtgccctcttgggcgagcagggcgaggctcacgggtgcgctttccaaaggaggaaagatgcgcggattcgccaccaacgctctattgtgtgaaacgttagaataaccgaaggaaaccggccagatgaaaattctacgttgggagttgatttacgtttgaggaatgtattatcacctctcacgttggtctc

SEQ ID NO: 221414 - DNA, 438 bp, Glycine max
  unsure (1)..(438): unsure at all n locations
tatcatgtgagtgtcagacgacatctcccaactcaattttttntctctcccaacacacatcaaatagtgcactgtatgcatgtgaaattataaaactaccgctaatacaaaactaccccaaatataatgaaaccctaatctaatatgtacaaagataagtgggctcatacttagcccatgggccaaaattctaccctaaggccttcttcaacagctctagcccaatattcttggagtcttctatccaatacccttggagggtaggattacatcatatgaggatattattcttgatagcttaatttgccaatgatggacaaagtcttccaaaggggactcaattttgcctgatagattgaatcaaatagattcaaatgtcatgatagatggtcgctttgctggcaattttgccattgctcataagctttgtctaatttc

SEQ ID NO: 221415 - DNA, 467 bp, Glycine max
  unsure (1)..(467): unsure at all n locations
gcttattctttaaaactcatggcttcagaaaacatttctagatcatctttggctccaatgttatattctgattcttacaaataaacttaaaaatcactaagaattgctgaccttttgactctaatagatcttttaatgttgtatcattatcttgttgaagaactttttgttcaaccgattgttcaacattgacttgttgttccttgttaacaactagatatacatgattatcttcaacgacttgtgaaacttcaactattggttgtctaacacccacttgaacttgagggggatgaatgactaccaatgtgttacttgatccagagggttaagcctcatagtgatccttttcaaaagcaatgtcttgaaatcgatcacacctactgatcaagtcattttcaagaaattntccatttcttgattccacaattctagtgtngtgaaatggacaatagaatctataacct

SEQ ID NO: 221416 - DNA, 420 bp, Glycine max
  unsure (1)..(420): unsure at all n locations
tatacttgcccttcatttaactgtctctgggcttggcggccacgctcaataaagtactttcgacacctactgtacgttgatttgaccaatgctgttatgggaatgttgcgacaatccttcaaaaccttattgatacattctgagaagttggttgtcatgtggtcatatcgacgtccttctctatcataagccatcgtccatttttcctttgaaatgcgatcaatccatgttgctatggctggactaagttcacgaaatgtttctaaattttgatcaaaaatgtgcttgcaaggagtgtaggctgcataaaattagttatgaataacaattttaagtatatatgaaagttaaataaacgtgaccatcaaatatgaaatcttacccaatttcttcaacatttctttntggtttgcattattg

SEQ ID NO: 221417 - DNA, 305 bp, Glycine max
tacgtctctgaatgatacaagaattgcattctgcctatctcatttttagctgcataccgctcactgtgtgagagtgaaaagaatgtgttgctgctgcacatcaacattattccataaacattctcttacttctatactgatgcggagcatgactgcctaaccatgggcctcatcttgttttgtggtatagtgaagatagaaagcgccactttatgttgtctgcgatgcttctgtgagaggacattgtttgtgatctaacaactttattgcagtggcactcacatggatgcgtattctatactata

SEQ ID NO: 221418 - DNA, 470 bp, Glycine max
  unsure (1)..(470): unsure at all n locations
cctgagctgcagctttagaccctgaatcctccatgaagatggctatgtatattaaccaagccccacagggatctntgatttttatgagtacattcgcaggcctgattctgatattntgcttccaaggaccccggttgtgtgaaaccctttcaagatgcatttgataaggttttcgatatggcagatattgaccctcaaagaacagtaagatcactaatccttctttggccatggattttcccttttgtctctaattctaattaacccttgtcatgatgatcttgcaatttgtgtcttttgtaacaatgaataccaattatcatttttttcttgattatgtgcatttttgtgacaaattaagttatttatctccagttattcttcgatgacagtctccgcaatttacaaacgggaagatcctttgcctccaccagtcatggtaataacaaatatattcataaaacttattt

SEQ ID NO: 221419 - DNA, 460 bp, Glycine max
  unsure (1)..(460): unsure at all n locations
tactcaagcttatattgttattattattacttaagtgtctgcgccacggatcatatatatnaattttataaaatattgtcacatacttatattagtgtgtcatagttttagagactaaagtaatgaggtacaaatttaatgactaaattgatcatttactaaaaaaaattgctctatccaaattataaatttaaaatttaagagatttgaattgttttatccaaacaaaaaatttagaaaatataagagatttagttaaaagatgtgtgaattctaagtattttaagattgtgaggataaagttcttgaaagaagagatattatcaaacaaagtttctgattttttttacgttgaactttatttaatgtttaactgttaagtttataaacatattttaatgtttagaagtttagaacgtaanaaaaaatataaaaagtataacttanaagcataaattat

SEQ ID NO: 221420 - DNA, 495 bp, Glycine max
  unsure (1)..(495): unsure at all n locations
cttgagtcacctgcggcatgcaagcttgcaatatagntgtcccttgcttaaaacttatttgtctttnntgtttctttctaaattntaaggatatgaatttaagtatcacacattcattacatgttaacattttctatatatgaaaaatatatcagggatgagagtataacaaaagagctaataggaggaaaacaaagcatttccataatttcttgcaacttagcttgtttttttgttatgtttctcctcatcaaaacttgtatgctgccaatggaagtagctcaagcttaatggtggctgtggattgagatggaatacatctgatgtggccaatgcatggttttaaattaatcagtgttagttttaacaaagtcatagaaataacaaagtcaaagttagatcttcagagttaaaacctgataaataagaaacaattaaactgatcaaattgtaatttaagtaggaaaaatattgaaacaaactaaatatgagctc

SEQ ID NO: 221421 - DNA, 467 bp, Glycine max
gtgttaaagaacttatgaaaaatcaagaacaagcatgttctcacatcgttcgcgtgtatgatatccactcgacaaggtttgaagtagaggagaccttcaatcctataacgcaacgtggcgaacaaaagtgggcagttaacttcaatggccattatcgtcaatgcggaaggtattttgcgcttcactatccatgttcacacattattgcagcttgtggttacgtgagcatgaactgctatcaatatatagatgttgtttacacgaatgagcacatcttataagcatactccgcacagtggtggcctcttgggaatgaagcggcaattcctccttctgatgatgcatggacacttatccctgacccaactacaattcatgtgaaaggttggccaaaatcaacaaggataaggaatgagaatggatggctggaaccatctgaccaccgacaaaaatgtattagatgtgga

SEQ ID NO: 221422 - DNA, 468 bp, Glycine max
  unsure (1)..(468): unsure at all n locations
ggcagcaagcttgaggatgatggagtacccatctcttgttgtactaggnnggcggcgggcgatggtgcacaacaagttttccacatccacaatgcacgcataaacccaccatcccctgttgcccacctacactgaactcacgtactcccacgtagcccatatcctcgtgtctctcaacatcgggtccccatcaatcctcccaagcttccacaacatccaagcaaaacaacattcaaacagcacaagctatcacagccaagcaaaacagggcaaaggcagataactctgctcaacacactaaccaaaatcacagcttttctcacttaaagaccccagtaacatttccttcgatccaattcgttaaccgttggatcgactccaaaattttactggaagtctatagtgaataagcctacattgtgacccgtgggatctactagcanacatccagaactcattctgcactac

SEQ ID NO: 221423 - DNA, 430 bp, Glycine max
tcaccttctggtcctcctcattgttgttgcatgagaaaacatgctctattttcatctcccactccaagtatgcctccggatcattctttcctttaaatggaggaatgttgagtttaataccatcaattcggttttgtctatgaacaccatcattccctcttctcctcctttcttcttcattatgatctctattctccatttgatccaacctctcatggagcgcatcatctcgttgtttcattaacctctccaaatgttgcatcaaagcttgcatttggaattgcgaaagccccactccatcattatgattagtacctgacatctcatacaaacaaatcaaacgtaacaagacaattatagttggtgtttgaatacctcacccactcaagtgtatcacacaattatggcttttctctatgaaacactcttg

SEQ ID NO: 221424 - DNA, 455 bp, Glycine max
catgcaagctggccacccagctagcccaggcgagcatggttgcttcctccagaagcaacagcctgttggaggaatcttctggagggcccaagtgggcctggttgctatttgcactcccatttttactaagtacacccctgccttttttttggtgattcttttttcgtaaagttacggaaacttacgaatttcgtaacgatacttgttttctttccgtaatgttacggaaccttgcggattacataatcatcccctttttgacttacggaatgttacggaacctcactaattgtgcaacgatgcttccatttgatttctggtgtgtcacggaaccttacggattgtgcatcaatattttcttttgttttccggcatgtcccggaatttcacatatggcctaatgatgggtgccaagcacctcacaaggaccaaacataagttgcatgtcatcaagc

SEQ ID NO: 221425 - DNA, 439 bp, Glycine max
tgctctaaatgtacattgatgtctgtatttatggtatgttgttgcatgtcattattgtctgaagaatagtattcccactggttaaactaactttccaaatgtttgccttcgcatgatatggccccgatgaagcttgcctctaataggtccatgaatgacaaggcatcagaaggaactatttccgctccggagtatgatagtcaccgctttaagagcgcggtacaccatcatcgcttcgaagccatcaaggggtggtcgtttctccgggagcgacgcgtccagctcatggacgacgagtatactgatttccaagatgaaatagggcgccggcggtgggcaccactggttactcccatggccaagtttgatccataaatattccttgtattttatgccaatgcttggcccacagatgaaggcgtgcgtgacatgagatcct

SEQ ID NO: 221426 - DNA, 472 bp, Glycine max
  unsure (1)..(472): unsure at all n locations
gcttgttacacatggaaaacccaccttcacatattattacgcacaggaacgagggtgaacttaaggattaattgagacaaattgaaattgggatgcctatgtacaaaaagagatttagcttaagaaatattaggacgaaattaaagttattgatattttaacaagtacacttccgtgtactgcttcttagacaaatcaatacataagggtaataattatgagtcatttccgaaaactgttggtattttggtttatttatattggattaagggattcacatggtacaaatgctgaagcttcagatacgtggtctcttgtaaaaacccaacaagttttcctgtcatgtaatatgcatacactgtttattatgctattgtttacatggtgacacagcaaagtcatataattaactctaccaaagaaatcttttcgagctatatacagaaccggatacttattnttagcaacaatg

SEQ ID NO: 221427 - DNA, 431 bp, Glycine max
tgtgtataatttatcccagatagaatgactagaacatctggatttgctgcatgaacagcttctgctcccttcaccatgtaccttcaattcagaataacaacttaattatcatctacacaggatttttctctctttcttgtctttttttttttttttactacatagtccattacataatacatacaaggaacttaaattgtatttactcaaacgcatctgtaaaccatcaaataaaaaaaagtgaaatgtatatattagatatgaaatcaatattttttttcttctgattttgctatgcatatattgttcaacctatcaatgattgtggatatttagatatttgttaagctaatatgagacgagtattataactaaacggttaaatttaatgggttaaatatgatccatccctgtgatttccacgtataaca

SEQ ID NO: 221428 - DNA, 218 bp, Glycine max
attctgactcaacatggtgcatgcaaaatacgccatccacacagaggattggtcattcatttcaacctcaatgtgtctcaacattctcatttgttccaaccggtagatatcttcaaaaaggaaacccaattgggtcatagactgatttgtcatctcaatttcatacgactcatacactcgcacaaatactatggtgaacggctaccctactgaatatt

SEQ ID NO: 221429 - DNA, 393 bp, Glycine max
agcttgtcaacttgaagcacctcacttatgtcttgtcaccaaatagaatccctcacaacaatcctatcactaaccaaccctctccaccctccatgtctagaggttaggaccttttcccgtaaggcattttctcatagaagagactccatctccatttacctaacaacgcttcattgaagcattgaagacaatgatatttctgatacctcatccccccccccaagaagagtctatcttttttgcaactgttttgggtatcctaaagaaaaaaagatagaataaaaggagagaagttattatcgaattgatgagacacacgcaacctgcaagagagaggttcttatgttgccaactagatagcctcttctaaatcttcctaatcattgactccca

SEQ ID NO: 221430 - DNA, 458 bp, Glycine max
  unsure (1)..(458): unsure at all n locations
tgcaacatgagtggttgagatatgggttatttactgcttcttcanattaagactacatgtgtttgttaattattgtgcgcaaaattatattaacagtgtaagagtttgatgttactcattgaataaattatatgactaagtaaattcaactgatattttgatgcatcaatgcttatcaacctcgaggtttcaattttacatcgaatgcatgtatacttcatgcaatgtttatacttagtgccataagtagatgtgatgtaactcaagtttagtgtgactgtgtattaaattctctgttgtggntaaatgatatgatagtgtaatggtgaaacccttaattttgaatcatgataatcaacttctaatgctattatctataaggtgtcatcaatttgcatgtgtgatattttgaacataacaagcttcatgtaactgagtatattatgatggctatatgt

SEQ ID NO: 221431 - DNA, 470 bp, Glycine max
  unsure (1)..(470): unsure at all n locations
agctngactntgcgagttgattntagccttagtttcactntagttattagtcaattcaattaagaaagagaaagcccaaagagaaaagtccgatttgattctttcggtttattttactaaaagatattttttgattattatattattattttaccgctttttggtttccaacgtggttacgacatgactgaacggtcggatttcattttaacagaaattaacggatattaccattcaaatgatcggtggaaatttattttattttttgattaggcgagaaaatgacttaagtaaatgactaaagcacgtcaaaagggggtacgaaaagttaataaaacgaatataaatgtacgcgaaaaaaatggggaccaccacgggtacatagaattaattgaaaagttcgatttcgggaacttaccggttgaagaccgaagaacgacgaagaacgaacgactagcgacgaagaacgg

SEQ ID NO: 221432 - DNA, 377 bp, Glycine max
gaataatatctagataagatcgacatgaaagaatatctacacatgaacgaatcttgataagtaagataagacaagatctagatgagataatatctagatgagatcaaatctagatgatatctagatgagataagataagatgtggttgaataaaatagtttgctctctttaaggccaagctcaattctggatccaagcccaattgcctataattctcctgaaattaaattcaaaacacaaaattaatcaagtacgccccaatgataaaaccgcataattacattgacaattaaggctgatcagcgattaaaacggggacaaacaggggtaagacatatgagataatgaagacacatcagtcatgttgactctgtact

SEQ ID NO: 221433 - DNA, 368 bp, Glycine max
ttaatcatgattccatcaccaccatatattccaacataaaattttatgcaatattaccaatctctttctactatatttttcatcaatcccttcctacattttcaccgccactaccaatcaacaccaccatcttcggctaagagatttgcagtagattctttcatgtattcaaggacggatacaaatatgtatgggggcggccggggaaaatcttgttggctcaattatttaaatatttaatatttattgctcgaagaaaattaagtatacaatgactcgatatccttcttctattgtatcttatcttcctctcatatatagaaagaatcttgaagcctgatgacgggaggggcgctacaactataaca

SEQ ID NO: 221434 - DNA, 356 bp, Glycine max
gacggtcacaccacttaacacattcatcataccacctatcatagggatttggtgcctcataatacctattttggacaccaaataaaacacaaggatttaagttcttatgaaccaaacccttatccaacaattcctttacttgaggaataacctcaagctcaagaggtatagcagtgttaagggatgtttcccttaatatgaaaaggtagaaggattgtttaagaaggagtgctcttttgatatcaccttttgttgcaaaatggtttcccttcttaacaatcttcttggaggaatccttttcctctttttccttttccttggcctttgaagacaatgccttactatcctttctttta

SEQ ID NO: 221435 - DNA, 284 bp, Glycine max
  unsure (1)..(284): unsure at all n locations
aatcaaaaaatgcgaaaaaggatgacccttaggctgcaaactcgtcaatcccgtgggtatggcttttgaaaggggnggaaaaaagtttttgaatgcaaaaacgtcccccctttcgtcattcttaataattggtgcaggggtggctcgcctangcnanctcancttncctatgctagcttacctgcattntttttttaaagaggaacattaaccatgtaccctccttccttttaacgtcttgcttaacttgaacttacttaagatagagatacgcattgattact

SEQ ID NO: 221436 - DNA, 466 bp, Glycine max
  unsure (1)..(466): unsure at all n locations
taagaggtatggcagtgctaagggatgtntccctcgatttgtagtttgtagaaatattgtttaagatggagtgctcttttgatatcaccttttgttgcaaaacaattttccttcttaacaatcttcttagaggaatcattttcctctttttccttccccttagactttgaagacaaggccttactatccttctttttcttttgtttttcttcctcatccctcttatctttcatagatagttgatcttttgccacctgtgaaggtgtttaaggatgcaacacaaattttgtgccaagataggtgagggtaatctcattggttaggcaattgcaaacgatcttcctatcaaattgccatggccttcctaaaagaatatgtcctgcctccacgggaactatatcacaattaacttcatccttatatgtcccaatggagaaaggtaccttcacttggtggttaactatca

SEQ ID NO: 221437 - DNA, 400 bp, Glycine max
caaatccactcgacaagggtttgaagtgaggaaaccttcaatcctattacgcaacgtggcggacaaaaatgggtagttaacttgaatggcattattgcaatgcggaaggtattctgcgcttcactatccgcgttcacacattattgcagcttgtggttacgtgagcatgaactactaccaatatatagatgttgtttacaccaatgaacacatcttataagcatactccgcacagtggtggcctcttgggaatgaagcggcaattcctccttctgatgaggcatggacactaatccctgacccaactacaattcgtgcgaaaggtcggccaaaatcaacaaagataaggaatgagatggaatgggtcgaccatctgaccccgacaaaatgtatagatggg

SEQ ID NO: 221438 - DNA, 348 bp, Glycine max
atgcctgattcttcgtgtacgggagactatatgtcagcctacagatacttacggcgtgaggtttaccttatataacggacctcatggttccttgtggcaaaactaacaccattcgtacagttgataacatcaccgtccgctgagaaactcaccttgtcctcaaggcgatgatgactgcgaatatgctcccagttttcccaagatgagtcctcaagtggtaaaccctcccattgtataatgactgagcgagtaaggggagacgtggaggtatccagtcgcgacttgaagatagtaagtggcttcaatagaggttgattgtggaccagatctggtggtaaccgagatgtt

SEQ ID NO: 221439 - DNA, 387 bp, Glycine max
  unsure (1)..(387): unsure at all n locations
tcatgatgatgaatcaaggatgattcaagtagttttgtttatgacaaanagcccaaaaagaatgatgtcatgattgagtcaacaagttcaagatcaagattaaagaaaagacatcaagaagaatcaagattcaagagaagatgaattcaagattcaagagaagaaaccaaaaagcaacaagtcaagacttcataagggaagtattgaaattttttttttcaaaaaccaaacatagcacaattttgttttacaagaaaagtttttccaaatttttctaagttaccagagtatttactctctagtaatcgattaccaattacctgtaatcggttaccagtggtaaagtttgatttcaaaagcttttaactgaatttgcaacggtccaaa

SEQ ID NO: 221440 - DNA, 366 bp, Glycine max
  unsure (1)..(366): unsure at all n locations
tganatgaggaagtgtggaagggtgagacttccttcttttattgttgaccacagagtggtacctggagatatgtcgcgggggtcaggagaccttggggacgtcaggtggggtgctattgcccaaaaccaagcttgaccaatcccgacccaacccgggcatagtcagtcagtgagaacctgtgatgtacctaagcaggcgagctcctggcagtcaacagataaaaggaactaagaccacaaaacaaggaggcttgtgtggtggctggccagttgtgaaacttgattgatatatgggatgtggcctctggtaatcgattaccaagggtgggtaatcgattacaaggcttaaaagtgaagacaggaagc

SEQ ID NO: 221441 - DNA, 79 bp, Glycine max
ggtacctggagatatgtcgcggtggtcaggagaactttgggacctcaggtggggtgctattgcccaaaaccaaacttga

SEQ ID NO: 221442 - DNA, 452 bp, Glycine max
tgtagggttaaagtctcacgattgtcacgtgctcatgctttaattgttagccgtggctatacgagacatcttgccaaacaaagtcaggttcaccataactcacctgtgctttttcttccatgctatatgtagcaaagtgattgatccagtaatgtttgatgagttggaaaatgaggccgcaattatactgtgccagttggagatgtattttccccctgctttctttgacatcatgattcacttgattgtgcatctggtcagagaaatcaaatgttgtggtcctgtttatctacggtggatgtacccgattgagcgatacatgaagatcttaaaagggtatactaagaatctatatcgtccggaagcatctattgttaagaggtacattgcagaaaaagccattgaattttgttcagaatacttataaaaggctaaagctgttgggcttcctg

SEQ ID NO: 221443 - DNA, 386 bp, Glycine max
atgtggtctggccagcagcccgaccttcgttagtgggggacatacgaaagtcctacatcccatgcacctcaacagcagtgatctataaccacaaaatgatagctcatctgaagcacaccatctctggagctgcagattgtaaaacacataatagtatagacgagatccggtgaggcttctcatgatggaccaccgcccgcgtcacctgatgcaccatttgcaggagcggatccatcttcacctcgacacgcgaccaacttcttacgttcttgtcttagagatacatgaggggcagaccataccagttctgccttaggacacgattattcacctactccagtatggcgatctacaggatagcacgatgttaatattcacgacaatca

SEQ ID NO: 221444 - DNA, 421 bp, Glycine max
caatagacctccaatctttaatggagagggttaccactactggaaaacccgaatgcaaatttttatcgaggcaatagatctaaatatctgggaagccatagaaatagggccttatatacccaccacagtagaaagagtctcaatagatggtagttcatcaagtgaaagcataaccatagaaaaacctacagatagatggtctgaagaggatagaaaacgagtacaatacaacttaaaaaccaaaaacataataacatctgccctaagaatggatgaatatttcagggtttcaaattgtaagagtgctaacgaaatgtgggacactcttcgattaacacatgaacgaactacagatggtaacagatctaggataaatgcactaactcatgagtatgaattatttacaacgaatgcgaatgaa

SEQ ID NO: 221445 - DNA, 459 bp, Glycine max
ccttcccttactgtgagtgattcaagcttagcgcgactacttattttatcgcactttcttgacttcaaaacaaaatgtatgtggcacttatcacatcctttactgctaaacccagcttataagctcaacttacagaatgaatctggggcttagcgcacgatggcgcgcttagcgcacctataataaatttcacagagaggaagtggctcttagcgcatcatacactcttagcctactgcttaaggagcaacttataatgaagatgttgggcttatcgcagcgatcgtgcgcttagctgaaccattcagccaatcaatcaggggtctttgggcttagcgcgagcaatctcagcttatcgtgtgaagagatgactcttatcgcaaggattgcgcttattagataaccaatttgaacatcttcctaatcattttctgctatttcttcacactaattctacca

SEQ ID NO: 221446 - DNA, 366 bp, Glycine max
  unsure (1)..(366): unsure at all n locations
tgctcttacacatatgacaggagatgtatcatgctttacaaccttttttcgctataanagtggacacgtggacatactggtgacaacaacaattgagagagcgttggagcaaataaatatgtacgagctactctactactattgtgaatgtgatactactagaaagatgaaagcatagctaagtaaccgatagtcacttgtgagatagacgatataaagtatctttggattctcaaaaatgtgttatcaagcatgagcatgacaaagatattgaacatctatgtgtcaaggaagataatgtctacattattgatgtagcacatacatctgcctatgattcactgcttctaactaaagattatgatc

SEQ ID NO: 221447 - DNA, 441 bp, Glycine max
  unsure (1)..(441): unsure at all n locations
tgatttagtttttgctttattgtatgtttacaagttcttgttgagatcntactttctgaagntcggngtaaatttttttgtttgcttgttgttgtcactgaacttacaccaatgagttctttgtgtgggaaaagtacaaatagttggtgctttgaagatcccacaaggatttcaaatcccacttgaccaagtggttgcaattacatgaaccgttgggtgctggtttggtgtgaaaattataaccctgtctgaattgcattttggagaacttcaattcttaaatgatctaacatttggaaattggaatggacctttgggagtttgggtgaaacttgggtatgatgtgcacatgatacgaagcatttcttatcttgttaatgatttaaagctttggagtgagaaagtgaagagtgttgggcaccaaatatgtcttataaaatg

SEQ ID NO: 221448 - DNA, 472 bp, Glycine max
  unsure (1)..(472): unsure at all n locations
accgcttatcaaaccanagcaacttctatctagaacaacttgaattctatattagaagaaatttcaattgttgaaatgtatagtaagtcggtcatctagtgacagcataacaaagtcacaaatactagtactaagttgaagaacatattgcagtatcgagtgtttgctggttacatattttcaggttatatacctggaggagttccacaacacatattgcggtcatcaatatgctcaacttcaagaccaatgaaccatgcaccaagtgagacatcttcattagcatatttatgcaaaatcggcctgcaatcataattagactccacatgaaatttctatatgtaagagaatattctatgagaaacatggactgatccccgaactgagatttcctattaggaaaattntaagtttatgaaaaaaaaagtttcttattttaatcaaatcttgcaaaatgagtattttgctttga

SEQ ID NO: 221449 - DNA, 401 bp, Glycine max
actaccttgctacccagatcctaggaaatacttgtgtataagccatgagggggctcatgggcccttgggatcacaagaccgcgtctactcatagaaagtttattggcccatatgaagaagatgtccataagcattgcactagatgtgcgacttgtttcaagccaagctaacggtgagcctcatgggctatcacacccttacccatccatctgcaccttggtagacattagtatggactttgtcttgggctcctagaacccgagaggtgtaacttattttgggggggatcgttagcagaggccacttatccatgcccaagggagagcttctatatctaaacttttttaggagtggagactctggttgctagaccatggtaatagaatgctatccttaccctt

SEQ ID NO: 221450 - DNA, 459 bp, Glycine max
  unsure (1)..(459): unsure at all n locations
tcacccctggcttcagatctcaaggtggagagtgctgatgaacaactctcttcanaagttttttctggaccctttgcgattgcctatcaccttatttcttcttgggccttctcagatcaaaatgtagtaaacggtgctgaatgcaattcaaaaaacccatcggatctatgacaaattcgcacattttctttttcaaggaatctctggagataaaaattatgttggtagtgttatatatctctttcatctccaataatgtgaaggggttctgtgccagagatggaattttcccatcaactcttgattttgcattattcattcatgtacaactcaaattctttattaacaacaaacttataaatattatgcaagaccatctgctgtctgtatggctacatgctggtccttgataacctgaattgacttaatcttgtatataccacagtcttgaggtatatt

SEQ ID NO: 221451 - DNA, 430 bp, Glycine max
tatgcgcacacttctttacgaacgttcacttgctttagtcattcttataacttagaaaaatgcacccatatacaatcaaggcaccttcgttacctagattattcacatgtacttccaaggtgtatttgttacctacatcacacacatttcctttgctaaattcacatacatgcatactctaagcactttggctatcaaaaattgcatacgtgcacatcttggtatttctcatacctatacatacacaaacttcatgatgaatcttgactatctacacaataaggtgctacatttcatgcttttttcaagtgtttttactacctaaagccgcatgcaaattgaagtatcatttcttttgcttactaaaattgtattcaaattaaaaagtatttttgtaatggattttctttacatacatgcaacaatttat

SEQ ID NO: 221452 - DNA, 315 bp, Glycine max
  unsure (1)..(315): unsure at all n locations
taatagcttactatatatataattaaatgattatatnttttattattaacacattttaattaaattcataaaaaataatttgacaatatgcctacagctcaattggttaagttgcaaaacatgaacattaactgtgatcattgtgtgaatttgatctaccaccttatacttcatctttttctcattctttntgtaaggtgtactactatctctttcttgacaaaaaggttgtcaattataattttaaaaatcatttttaattcatctgcataactggccggaaaaaaacacaaatttacaaaagctttttttggg

SEQ ID NO: 221453 - DNA, 474 bp, Glycine max
  unsure (1)..(474): unsure at all n locations
taagaaatcagctcgcctgggtgagcttcccctacaccatatggttttctctataaataaccatatagagaaggggtttaagggggatcgaactaaagaaaatagaggaaaaaacgcagaaggaaaaggagaagaagaaaagtaaagtcaaggcgttgtagaattatgactgtggatcatttcctttgtcatttctcttgttagtcttgtgccctgcgcaacgattagttagttttttttttttgaaggatcaggtgtaatctttgtacccttgtgtatccctcttgatattatatatgtaatcttttctactcaaatatcacttgagatcttttcaaggtccaacgccctaacgactctttgtttgcaattaaaataaatcttaaaaaaacataataatcaattaacacacaaacatttagactntaagaactacgtaggtttgattttctcattgcatctgggaatacgtaa

SEQ ID NO: 221454 - DNA, 325 bp, Glycine max
tgctctgtaagcttattaatcaaaggatgctctgggcggtgaatctcctccatccatggcgcataccgtagtggatgaagccttctactcacctctactactttatactacgctgcataatcagtggtgaaaatcaccattggacgacctcactgaagcctaaagatccagcctgcatagaatcttttcaagccagctttcctcaagaggacattatagcacaagagcttcatgtaagtagctctttaacactcattaatctcaagcactagcggcgtcctcaaaggtgtgactacaaacattctccatcgtattccgtacatgt

SEQ ID NO: 221455 - DNA, 384 bp, Glycine max
aagctctcgtgagagtgaaaaggtcttatcttttcacactgttgtgcgcttctggcgaatcacatatagcgacactcgatattgtacaccggaagctctcgagaatgtcaaaaaggtcatgacctatttcacacgtgatgtagagattaaggcgcatcactatatagagacgctctataatgaacaaccgaagctctcgtgaaattcaaatggtcataaccttttacactgaggacgaattctggctataatatattgatatcctcgaaattaaacatcggaagctctcgataaattcaaatggtcataacttttcacactgatgtacgattccggcgcataatatgtagagaggctcgatattgaacccccgaagctctcgat

SEQ ID NO: 221456 - DNA, 442 bp, Glycine max
tttattcaaggctcatcttggaggagaagctgcagcttctctgttcttattccctatggatggcacctactctcacctcttctcctttgtcttccgctgcatctccatggaggataatcaccattataggaccccattgaagctcatagatccatccttcatagaagccccacaagcaagctgtcatcatcctctcacctcttctcctttgtcttccactgcatctccatggtggaaaatcaccattaaaggaccccattgaagctcaaagatccagccttcatagaagccccactagcaagcttccatcatcctctcacctcttttcctttgtcttccactgcatctccatggtggaaaatcaccattataggaccccattgaagcttacagatccaacctccatagaagccccacaagcccacaaagcaaccttcatcaa

SEQ ID NO: 221457 - DNA, 457 bp, Glycine max
  unsure (1)..(457): unsure at all n locations
actcacgcttgacgacaaagctcgaaaatgtgtctgtgtaggagaatttatttatctaaagcatattattnatctaatccactaacaaagaagatcgttaccactacaaaagttattttttatgaaaacaacacatgggactggaatgagtagcaacccaattcaattattgtcgaccatgaacatgttaaagaattgctattacccgtatacactggcttaacatctcctaatgcatctcaaatagctcctgagacagagatttcaacaacatcaaatgttggaacaatagacgcaacaattgtagctcaatctatatgtcttcgaaggaggccagcatggatggcatattataaagtaactgggattgaccaaattgaagaatctatcaactcctttgccttatatttagatcgtgaccctaccacatttgggaggcgctggctaagaaggaaaa

SEQ ID NO: 221458 - DNA, 59 bp, Glycine max
tgctggcgatcgaatataacttgtataaccgatcttgtacaattattactcatagctcg

SEQ ID NO: 221459 - DNA, 435 bp, Glycine max
  unsure (1)..(435): unsure at all n locations
tctttgttagacctcgatcggtcatctttccaggccgttgtcgaccgtcatttttttcgatccatttcggtgaataatattcttttgccgagatgggctaatgttttcctggccgaataaatgggaaaatgccagtttcggccgaaacgaaaagtcggttgagctcgcacaaaaaaacctagccgacctacattntaaatttttcatgcaaccccaaaacaagaaaacttcctgtgccgtaaaaaaaaaaaaaacattacatgacagcgagcgctttgaaaaacaaaattgcgcaacgtcggctgaaatatatcagtcggggcttcttcacgaccgatgtcggctatagagttttcaattcaatccgcgaacgaaatttgcttgatgtctgttaggaaatgttcgatcggcatcattctgtgaagtttctttttt

SEQ ID NO: 221460 - DNA, 279 bp, Glycine max
  unsure (1)..(279): unsure at all n locations
actacgcttcattgccctttcttgatagttatagctgcattgttgcttaactgttgccgaccatggtgtaaacagaaagttgttgtgcatactttacggatcacctgatccgtaantaccgtccaaatgtcttatttcttcttagcttcatagcttactgcgatatataacaattatcttcaacttcaccttcgtctatattgctcaacttcactagttttcaacttatcatcttaatgtaatatggatgttattactatcatgtacccaataatctat

SEQ ID NO: 221461 - DNA, 419 bp, Glycine max
  unsure (1)..(419): unsure at all n locations
tgcttctacaaatatacgaatcatagtgatagantctcttataacgaagaatatcatctatgtattacaatatgcttaatatcccaagcaatatactcaaagtggtaataaaacttatgaataaactcactgtttattcttggtccaaaacataattttttctcaaataaatcaatgtgcacctaaatatgataaaatatcacaatataaaagtttcaactctaacctatatgtatacaatcataaagtggaaccaagntccattctttctacatgatccttgaacttaaacggtggcatgcccttagttaaaggatcaacagtcatcaactcagtgcttatatgctcaatgatcacttatcttgcttttactctttctctaatgactaaatacttaatgttgatgtgcttactttgac

SEQ ID NO: 221462 - DNA, 435 bp, Glycine max
  unsure (1)..(435): unsure at all n locations
tgngctatattgaaagcaatgtaatggatagcanaactttcatgatgaatgttgtttctgaagtggactgcatcaaggtagaagcagatggagttctacatggatgcaaaggtgttttagattttattgtactatcactaaatgtaaagtcagcctatctcattatctaaactttttggtgagttgtgcgaggccactaacaaattatgttgttgacaccttcttgttaggacatcaagattttatgctagtagtcatacttctttattagggcatcaagattttatgatagtactcatacttttaatcatatattaagtatggcatttcttctcttatcttgatgaaattagtaaagtcttttactttttaaaacaaagcaaaaatgaatgctataattaaaatgattaataatctgcctatctttttttttga

SEQ ID NO: 221463 - DNA, 471 bp, Glycine max
  unsure (1)..(471): unsure at all n locations
ctcaagcttattaacataagtttaaaaaagctcacctaaaggttaataaggttttactaaatgaaaacttattgataggctcttcaaaatttattggaatgatttatttttaaaaaaatcgtaaatttctttgtgaagcttactaatataagtctaaaaaagcttacgtaaaggcgtaaaggttataagctatttttataaattcaaataagctgttctcttgtcatagaaaacatgttctaaaaggatatgctataagacgcaataaaatgtatctactcaacagcttttatcttatgcctccaatataaattttattgagacctatgttttcttttgcgaataaataaataagtaatacgagtgcatacaaataaacactactatcgcgtcccttatctacattcatatttaagaaatagaatttatcatgggaattgactacggaattacttaacattntcataaaat

SEQ ID NO: 221464 - DNA, 338 bp, Glycine max
tgtaccgtgccaaggcgaccgagacttagtatggatttaagatatcactgctagtatttgcgctctgggacaaacaccgccattactacatgatagagctaatattctttaagggtttacaaaggaacgtagtttggaaatatcgaccaagccaatgtgaccggcgtttattgtaggttacaaatataacatgtatctcatgataagataacgtttacagaggatctttctctaatgtttttcaaacgaagcataggacatgcgatgagctgtgcagagtgtcaagagatgctgagagaatatggtgctgtcatgatacacgcatacaaccttggtta

SEQ ID NO: 221465 - DNA, 434 bp, Glycine max
ctgttacacattgaatgaatgagtcgaatgtgcataaatattgtttgctagaattagtgaaatgatgataattaattaaattgcaaaatgtgtgttatatatataatttgttactattgtttagatgaactagaagtattttaagctatatcattttacttagattttataatttaagattgatttagtaaactttataataaaggatcttgtttgttacattataataaacgaatctatacagttaactttaataaaattatacggtatacggcacacaatgaacaatgatttcaaaaggcaaatttcgtaatagaaaactatattcaaatcaaagttgaaactgtaaagaaaagttggaagcaagaacgagaatatatattacattataattgacaggaaaaataaggtttactgattaataaaactaaaag

SEQ ID NO: 221466 - DNA, 480 bp, Glycine max
  unsure (1)..(480): unsure at all n locations
actcttaaactacgcttctaagaaagaacatgtgtacacttgttgaactctgatgaatgagaatcttgtgagacacaactcanagttcaacttctctccctttntcttacttcaatttcgtgctcccccctctctctttctctacctctttcttttcctccattggagcatgctcaccaagcttcttatccaaggctcatcttggtggtgaagctccttctgccatggcttattccctaatgtatggtgcctcctctcacctgctctcctttgtcttccacagcatctccatggtggaaactcaccattaaggacctcattgaagctcacatatccagcctccatagaagccccacaagcaagcttccatcaagtggtatcagagcacaagagcttcatgtaggtgctccttaaacctacattattatttttgctttaccttatcttccattggatgttcttcatatttctccatgtatc

SEQ ID NO: 221467 - DNA, 351 bp, Glycine max
gaccacagagtggtacctggagatatgtagcgggggtcaagagaccttggggacgtcatgtggggtgctattgcccaaaaccaagcttgaccaatcccgacccatcccgggcatagtcggtcagtgagaacctgtgatgtacctaagcaggcgagctcctggcagtcaacagattaaaggaaaacaagaccacatagcaaggaggcttgtggtggctggccagctgtgaattctgtataatatgtggattgtggcctctggtaatcgattactaatggtgggtaatcgattacaaggcttaaaattgaatacaggaggctaagatggtctctggtaatcgattaccacggg

SEQ ID NO: 221468 - DNA, 465 bp, Glycine max
  unsure (1)..(465): unsure at all n locations
taaggggctaaatnngaatatttgttaacaaagggaccatattaaaccaattaaataaaaaaaaaggaccaaacaagtaatttagccctttaatttaaacaaaactttatatcacaatttaaactattatcacaaattaaaaatataatttatgtatttaaaaatagttatttattatgaattataattctataaaaataaatatttatcttataaaaagcacttgcaaaggtaatagttaaaccatattagtggaacttgatcgttcgtcaagagctggatgtagtcttggtggttgagataaatcatgttgattgttagatgatggacaatagagatagggtcgaagattgtgttggtcgtctagttgagtactcttgtcttctatattggacgttcaatcttctataatgtagtggaatgtctagtcacgaagaagggagtctctagtctgatggttcatta

SEQ ID NO: 221469 - DNA, 449 bp, Glycine max
  unsure (1)..(449): unsure at all n locations
tgtgatataacaaatcatattacatgatgggtagtggcttattgctgcngagcaaggaaactatcaatgtgtccccttcattcagaatataaactatatccacaggaatacaaatgttatttgaatttttttaactcggtacaaaagtctacattgcaaaagcaaagtttaaaggtttaaagctgtgtacctgagcatacttgcaatagagatgcacccaccttctggatggcactttcagctttcttaatttcatcctatccagattcatcatgtaggaaatagaagagaaatagatgattaacaacttcaaaatcctatccagattcatcatgtaggaaatcgatgagaaatagatgattaacaacttcaaaagttcaaaaccatgggacatgaatagaaaagctacacaataatgcagcttgatttacaatgtacttcgtacccca

SEQ ID NO: 221470 - DNA, 452 bp, Glycine max
  unsure (1)..(452): unsure at all n locations
tctatgtctcaagtctcttggcactgcttcactttttatacatcttgagtacttgcgttgcttttggtgaatgttcaagcttctatttttatttacttttgaaatgttaggccttgaataaaatctccacatatcttttggctnttcacgtgaattgacccttgtccataaattgaatttctgaattagacttcttatttaagtatttgtatcaaccatgtggctctcagtgttaggcaatttatttttcctagttctcttttgccctactttctctacatgtccttattctataatttataataatcattatcaatgcatattttcttcanatcaataatcgcaaaaaaaatgtttatctccaaatcaatactgaagcaatgtttatacacatgccttaattttgaaatcaagaacacataattaagttaaaattcccatacaaagaatga

SEQ ID NO: 221471 - DNA, 314 bp, Glycine max
agctgtagtatgcacagagagcaaatgctcttgcctaggagcttcttacaatgcctgatgctggcaaaggaacccccgctcgctggactacccactctctgtggagatcacacgctgccctccggtggacccacaccgagagggaagcctctaccgcagggactatttctagaaccatgaccgttcgtacatctatgtgcggactggacaccgcgatgctaggactcctttacaaaaaacactttcactgcgacgccaagcgatacacgctttccaagtcagtgcttactgatagcaagatatatatgtactgc

SEQ ID NO: 221472 - DNA, 462 bp, Glycine max
  unsure (1)..(462): unsure at all n locations
gatgtngactattgccaataatatcccacgaagcactactacatcaaagttgtatgacatcacttatggaatgcatactacatcaattttagaactcatgttgttcaacacaatgttaaatatatgcatatatttaacatcgatatgatttcaaatcaatgtagaaccctaataacatttaacattggttccccttgattttgatgtaggaagtgacacgccctgcatgagtcaagtcacatcttacatcatttattgacataaccgatgttgaaagtttcgcttactacattgattttagcaaaaaccaatgcaaaatgtattttttttaataaaaaagttagcattttgatatgtattcattgttccatgttntatatttgtgattatgcatcttatatattaatacactattacctatatgctatcaaagttatttnttttttaattttggttcaacca

SEQ ID NO: 221473 - DNA, 469 bp, Glycine max
  unsure (1)..(469): unsure at all n locations
ntagagctctattcttatctgaacacaaacaaccctnnttctctttatgtttttcacttaaaaaccatcttgagcttgagatttcgcaaatatgcactaagctcgcctgcatgataagcatgagtaagtgcccgggctctaagcgtgctacgggcactaagcaccccttcgcatgacttcagattctccaagctgtttcttcaagctaagcgaaaaccttcccactaagcgacaacagatcgctacgcgagcctggcgcgctaagcgtgaatctttaggcttcaacttctcttcctatcccttgcctgtattcctacaaaataaaaaccaccaaaataatatgaattaacagtttaagacacctattgcacaaaaactcagaggatgccaaaattcaatgattcacacanaaagaagcaataaaaatgggagaatattgctaattcttatatggtataattatataatc

SEQ ID NO: 221474 - DNA, 458 bp, Glycine max
tcatgatgaatcaagaatgattcacagaagttgtgatgatgacttatgtgatgacaataagctcaaagatcaagaacaattcatgataacaaagatgatgatctcaagaatcaaagaatgagttcaagattgaatcaagaacacttcaaggttcaagaggaaatttgatttcaagaatcaagaatcaagtttcaagattcaagcttccaagaattaagatcaagattcattcaagaatcaagagaagacttaatcaagataagtattaaaaagttttttcaaaaactgagtagcacatgaatttttctcataaccttttaccaaagagtttttactctctggtaatcgattaccagtagcaaaatggttttcaaaatgctttcaactgaatttacaacgttccaattgatttcaaaatgttgtaatggattacaatgttttggtaatcgattaccagt

SEQ ID NO: 221475 - DNA, 421 bp, Glycine max
aagcttcagaaatgaacccttccaaccctatggatcaatccactgcagtagctccaatgagaaaagctcgcgtatcagttcgtgcccgatcagaagctcccatggtacgtattataattatactatgtatattacatcgtttcattaatcaattaagcaattctcaaactaaattatctgatttattattgttgcagatcagtgatggatgccaatggagaaaatatggacaaaaaatggccaaggggaatccatgccctctagcatactacagatgcactatggcagttggtttgccaattcgcaaacgagtgagttattctgattgatcaacgcatataattaataataagtagtatctattcaagtatcaacaatataagccatatattgcttgggtaaagctaatcgatattaattt

SEQ ID NO: 221476 - DNA, 276 bp, Glycine max
agcagcaagaattacatccacacaaaagcgttgagaataaacaaaaagggcgcgcgctgccattgaagataagaaaaagctaagcgcaaaaaggcaagcaatagaactggaacaaaaagaaaaagggcgagatatggaagaacgcactctgaaaacctaagcatatgcaacctagaaaaaccatgaatcgacagcaggccagcctcgctacaagcccagagaaggacttcggatgcagcatgtgcgctcccgactggatgacatgagataaaccgc

SEQ ID NO: 221477 - DNA, 419 bp, Glycine max
  unsure (1)..(419): unsure at all n locations
gctcnctactaagaccatcaacgccagcagcaagtattgtagttatgcccaagtattgataggcagaaccatcaaatgatttcatctcaaagctgctcactacaccatcatgagttgcatgaggaaacgtagctgccaatggagcctccttatttccgatcccccagaaaagggatgcaccactccatgtgctgggttgtaatcgatcataactcccatgaatttgaataacaaagtatgaaaacataagcgcgtagttgttagagtgacaaataagagaagctcaaaagatggtctctatctgatgtgttactactttttaactctagattaacaaatgtgtgaatgccacatttgtattctactataatgcttgttagaggggaaaaaaattctatgctttcacgtaacagcttaag

SEQ ID NO: 221478 - DNA, 443 bp, Glycine max
  unsure (1)..(443): unsure at all n locations
gaatggctagacatgatacatgtagnggttgtttttgttaaggataaaagggatgccccacattatttccatgacacaaatgtaaaaatgatgattgggaaattttatgcaaaactggtcatgcatgcacctatgcggacactcaagtgtcaaatttttatggtcatgtgatgctagggctcangattcatttcctctattttagtcaacccaatgtttccaaaatatgttggtttttcagctagacaacttatttttctttttccatctttttccttacttgctctcttttttctcatttcctctcttttccatttcatttattttttctttgctatatttaattctatcatgaatttcgttggtttacatatgattttttttgacgatgtcttaaaccaagaactctcacggttcagaatttaaacatcttgatataatga

SEQ ID NO: 221479 - DNA, 449 bp, Glycine max
ctattgttacactctcaccacactgcatgttcttgcttcggaaatttataaataatattatgcacatgctccaaatgaatgtgtcacgtttctttttccattctcacaagttatgtggatttatacccaaaagaaaaaaggaaaagtaagttggatcatggtatgcataattgaatcaattgggcaaaaattgacaacgcgacatgtgatcaataatgttttgttaaactatgaaaaagaaaggttttgttaaccggggcataaggagttctgctctcagaatctactactatttcttctgatttcagaaacagaaccataaaggctacaaacaaacacagctagttaaccatacagcttgcttcaattcctcatctcatatggacccatcagccatctcacataatgctttgccattaaaaaattgagaagcaatagatctaaataag

SEQ ID NO: 221480 - DNA, 464 bp, Glycine max
  unsure (1)..(464): unsure at all n locations
ntatgattctattcggttgttaaaatctatcgatatggttgtaaaaacttattatatcgaacaaaaaaagcttattaaacctcaatttgattttattttttttatcagtcaaaatctcacgttgattgagaaggaagaaggttaagaaatgggtacaaaaaggaaacttgataatacacatatatatatagagagagaaagagatagataactagtctttatataatattaagttatcgattaagagatatctacaattaaagagaaaaagagaggtatgacttttttttggatcattatgattttattgtatactttgcatagacaaatattataatatccgttttttacaggattaaaatatcaagttgttaaaaatataagtggcattatttgattcattctacaaaatcctattttgtttataagccattctaccgaatctattcttttaattactccat

SEQ ID NO: 221481 - DNA, 417 bp, Glycine max
tgtaagctaaagttgcaacttacagtgaacgtgagttgttactgggcagttaagtctcgatatttagttgtcaaagtgatgagctcattccaacaatatgatggtcctgaggactccaaccttcaccatcaaaatccataaatacaataaaatgtcagtgtaatattattatggcatagctgattgagtaacaaatatgaggtatcaagagaaaacatccgaaaattaattttaaaaaagcaaaagaaagtagttataaaagagaaaaatcagcaaaagaaatctcaagccatgataattattttattcagtaatcagtacatcagttgaaactagcaaggtaaattttatactaaaaagtcgagtcatgtgagaagtatatatctgcaaatagctcaattaaattaaaaataaaat

SEQ ID NO: 221482 - DNA, 451 bp, Glycine max
  unsure (1)..(451): unsure at all n locations
ttaaactcaccttgagcaattcnacgacataacttgtagtcggatgtctgtttggtcccgtattatatcgagactctcaaaatggaatttcgaagctctgagcaaattcaaacgacaatatcttnttactcgtatgtctgattgagtcctgcattatattgagaccctcgaaattgaataccgaagctctgatccaatttaaacgacaataactttttactcggatgtctgattgagtcccgtaatatatcgagacgctcgaatttgaatattgaagctctgaacaaattcaaattacaataactttatactcggatgtctgattcagtctcgtaatatatcgagacgcttggactagaatgccgaagctctgagcaaattctaacgacaataactttttactctgatgtctgattgagttccgtaatatatcgagacgctcgaaatggaa

SEQ ID NO: 221483 - DNA, 367 bp, Glycine max
ttgctcaatctctctaaggacatgttggatgatgtggatccttttggaccttgtattattaaataaagaggaaaacgatcatcgagatctcttcttcatgtacgattatataatttgggacctacacataaggattctgtttgacgactacactatggggtgctttggatcttaatcatggcacccttctaacttcatccaaacgattgggcagcaatttaaccgttcggagccctctgtctgcacacctatgttaaggtcactctcgatctactacttcattatttttgttgtcggccaaagaacaaggcataatgggtatctttttttgtttggatcccaacttggcctttgttcgaactttcac

SEQ ID NO: 221484 - DNA, 483 bp, Glycine max
  unsure (1)..(483): unsure at all n locations
ggacctataaaactaagcttagaccaagcactcaaatcttgtatgtaaacccctctatttagtggatnttcaaggtttgagaagtgaaaatgagaatagagtaaatttggagcaaactctcacctcacacaagtctataacatcaatctaaacttgctcaaactggttttgcacctaaaattccaacgaatcaaaatttgactcctcaacacccaatcttaccctagaaatggctcttgccttcactttggtcatttgtttttctctcttgcacaacccaagctttctcataagtcctaaatgacatttcaaactaggattaactccctttaacctccaaataccactaaatccagatttggccttcccactctcanagcctcacttttttccactcgaaacaccatattctcactttctaaccctaggttaactctacccttcatctctaacagttttccataagcaatntcaacacataaa

SEQ ID NO: 221485 - DNA, 428 bp, Glycine max
  unsure (1)..(428): unsure at all n locations
ggaccttaaatctcagcttagaattcatttctagcgtctcaatagattacgggactcaatcttacatccgagcaaaacgntattgtcgnttggattagttcaaagcttcataattcaatttcgatcgtctcgatatattacgggtctcaatcagacatctgaggaaaaaagttattgtcgtttgaatttgctgagagcttcaacattcaattttgagcgcctcgatgtattacgggactttatcagacatccgagttaaaagttattggtgtttgaatttactgagagcttcaacattcaatttcgagcgtctcgatttttactggactcaatccgacatcccagcaaaaagttattggcatttgaattacctcacagattcaaaattcaatttccatcggcttggttttttacagtaatccatctga

SEQ ID NO: 221486 - DNA, 471 bp, Glycine max
ctataaaactcaagctttacaacaaggtgatgctagaaatataacagattctattaagccttcctaagcatagagaaattaaaggaacatagcttcctccctattacatgacacactagcagcaaataaccaaagtttgatgtgacaaaatgagaaattgataagaaatatactccctgtatgttctataccacccagcaataagtgacacaagttccccttaattacaaggtgccatactccctgtatgttctatacaaaacgagaaataagtgacataagttccccttaattataacgtgccataaaccaagaccaagatcttatattaattagctaatataactattttttattctctgtgatttgcgtattggcagctgtatgttggtaagctagtcactgactttaaataccttgtaccattgctagtcaaattaggattgggactcaagagccaaaagtgtctat

SEQ ID NO: 221487 - DNA, 451 bp, Glycine max
  unsure (1)..(451): unsure at all n locations
tgcttgagaagcttctatggaggctggatctttgagcttcaatgaggtccttctatggtgattttccaccatggagatgcagaggatgataaaggagaagaggtgagaggaggtgccatccactatggaataagccatggaaggagaagcttcaccaccaagagagtgccttggataagaaacttagagaggaagcttcaatggaggaaaagaatgagagaggggggggggggagcgtttacattcctctcattgttgtccttctcagttgaattcgcacatctttcttcgcgtgctannnnnctctatctatcatatacctctctttctcgtcttgtatctctctccactctcctcttccttttccactctcatcatctacttattacttattacttagaatcacatcaacgaagagatgttaatttttcactatccactagacttgtct

SEQ ID NO: 221488 - DNA, 467 bp, Glycine max
  unsure (1)..(467): unsure at all n locations
tcagcttatataagtccgganaagggatatgtgatccttgctatgtatagctctatgtctagttaatattgaaaaaggtcccatctcatacatgttaccaggatagttaatagatttaacggtgtcttgacagtagtcttggtcccatctcatacaagcctataagcttgaaatgtgctactaataactaataagtattggcagaagatgagagtgctgggtttgactgcacatgactggggaaaaaatggactgcaattgtcatgtgaagacaggagagggaggaatgcttgaacagagcccacatccgcagtctgttatatcctagagcttgttaggtgttacccctcctgtctttgacactgacaatgacctttaattttttagcttcagcttgccttattagaatccagtgtgcctttcgattgcttacacataggctggtagtgttaaaagatgaaaacact

SEQ ID NO: 221489 - DNA, 429 bp, Glycine max
  unsure (1)..(429): unsure at all n locations
actaagctaaaaatagtagtgcaccttctatgaacgttggttatgttcaaattgaaactaggtttggtaatgttttttatcctactgttgtaagggcaaaaggatctagccaagtggtaaccaatcagtctagtaggcgtaagaggattcaaacatgtaggcagtgtggtggtactggccacaacaaaaggtcttgcatgtttgcatcttataatggtggcattacaggagcaacctcttttgttcacataacacagcanatcaacaattccccaaacatggatgacaattataactatcaatgggtattgatatttttttaccatagttctcatattttactatcatcgttaactagtaataagaccagcatgttattgactataaccgtttgtagtgtatagtacatggaccattcataaactttta

SEQ ID NO: 221490 - DNA, 439 bp, Glycine max
  unsure (1)..(439): unsure at all n locations
tgagcttctgtattactctatgtttgttgtataggaattctaaattnttaaccaatacttatntctacaaaatgtctatagcaatttttagttacaaactcgagtgtttggatctttgttctcattactattaggtaggcttatttttccttaaggagtttcaagtgggtcagctcgtcaacaaaatggacaagatcaattgagtttcagttgttttgcatttttgtaacacatgttcaagttgattgcttcatttcaattttgcaaattggagtattataatccattataagtcaactttgatccttaattgtattgtgtgtgttggcaaatggcaatcttgattagattatcgctggttatagctaagttgcattatttgttgttgtagttttactctcacctatctgctcaattgatcaagctaagagtggtgctg

SEQ ID NO: 221491 - DNA, 423 bp, Glycine max
  unsure (1)..(423): unsure at all n locations
cgcttggagtttccaagtgccaattcgtcctcttctttagttcagtcttcttctggcttcaattcatcagtgggctttccttctgtgtccagcatcttgggatgttcccagcctttgatgacagctttccaggttctgctatccagtganttgaggaaggccaccattcttgctttccagtattcatagttgcttccatcaagaattggtggtctgttcactggtcctccttctttctccatgttcatcagaatttatctccccagatctcactctgtgatttcgagtgttggctctgataccaattgaaattctgataccaggggacagatgtcgtacaggatgtcacgacatcacgcttcagaacatgcagattgtatgtgtccgtatgaacagattaaacaagtaaataacacaagagaa

SEQ ID NO: 221492 - DNA, 458 bp, Glycine max
  unsure (1)..(458): unsure at all n locations
ngctgaagcagaatgcgttcggtctgataaatgttgaagatttatgacatatatagatgaaattaagttttttttttcaagttgagaaaaaataatgaaaatcagatttaaatatattttttaaattaggttaatactaggtactttttaataggattgaaacaccgattaagacaaaaaataattaataaaaagtttgtgatattgaagatgctatatggaggcaattttttaagatactaaataatcaatgtagtgtattactataataatgtatataaagttatgtattataatatgagaaatattatcaatatattttttaacatgctttttgactaaaatttattaaaaataatataattttattggtttcacttttaatgtaatgagtcttgttaatacatttataatttttataacattcaataaacaataggatgtgttaacaaatatgt

SEQ ID NO: 221493 - DNA, 465 bp, Glycine max
  unsure (1)..(465): unsure at all n locations
ctatcaaatggatgtaaanagtgcattcttaaatggctntatctcttaggaagtatatgttgatcaaccccctgtatttgaaaactcagacaagcctaatcatgcttttaaattaaaaaaggctctatatggcttaaagcaagcccctaggggaaaattagatactactcttttcataaagagaaaatcacatgatattttattggttcaaatttatgttgatgatattatctttggatctactaatgaattattgtgcaaggaattctctcatgacatgcaaagtgacgttgaaatgtcaatgatgggagaacttaatttctttcttggattacaaattaaacaaaccaaggatggtatttttgttaatcaaaccaagtacttgcaaaagttaattcacagatttgacatggaaaatgctaagcacatggctacaccaatgagcacttgcttgttattagataa

SEQ ID NO: 221494 - DNA, 462 bp, Glycine max
taatggtatacattacggggtttggatatgagactcttattaatagacacatcagtttattcgaagttggcttttaattcttgtagcttatgtgttagaattggcacaatttttactctgctatttgacaatgtatctcgggcactacttgtgcttctagaacttactttaataaaatttacctttagcttttttctgaaaaaagagattgacactctatcaaatgagagaatgactaaaacaatgtcaatcacttaaacaaaaacaatgcttactcaatattggtatatgctcttatctaacattgtgttttcacataattcacggataaaagtgaacaaatttaagacctaactgccatcaatctataatactatacattgtgttagaactaggcatggtctcagtcattctcgggctaccgtcgcacagaatgatctcatttatggcggatacaatctc

SEQ ID NO: 221495 - DNA, 391 bp, Glycine max
tgtcactattgaatggggatttgtgtgtcatagccataaagaatgaggtctcgggcttacgtctattgttcttatcaataatgcggcctcccttaaactttgctaaaattatgtccatgcagatgaagaatggacgcattttctgcaggccaattttctcaaaaacacaaaccatctatccttttacaagaaatcctcgctgtggccttccctcaataggcactttgaggaggtttgctccaatattggttgggtccttagtgcaggagctttaactaacttttggaacaattattggtgctcgctctctcctttgtttgcagctctttaacctcccgcccctcggtcagcaagttgttatcctcctcgaacaggattttagattacaaag

SEQ ID NO: 221496 - DNA, 436 bp, Glycine max
tcctcaacttttgtggatagatgctattaagactgctgtgtatatattaaaccgagttccaaccaaggctgtctcaaagacaccttttgaattattcaagggttggaaaccaagtttgcgacatatacgcgattggggatgcccgtctgaagtaagaatctataatccacaagagaagaaactagaccctaagactattactgggtatttcattggatatgctgaaaggtctaaagggtataggttctattgtccatcccacaacactaggattgtggaatcaaggaatgcaaagcttcttgaaaatgacttgatcagtgggagtgatcaatttcagaacatttcttctgacagggatcactgtgaagctgaaccttctgggacaagtaataagttggtagtcattcccacacctcaagttaaatgggtgttagac

SEQ ID NO: 221497 - DNA, 460 bp, Glycine max
  unsure (1)..(460): unsure at all n locations
nnggaagtttgcttccacgcaggtgaactatgctaccacgtgtaaaagaaatactggcaattctctatgcatttgaaaagttcagatcttatttggtaggctcaaaagttatcatttacaccgatcatgcagctacttaaatattgatcaacaaggctgattccaaacccagattgataagatggatcttgctgctgcaagaatttgatttggtagttcgggataaaaagggatcggaaaacgttgtagctgaccatttttctagattggtgaataaagaagtcacatcgaaagaagctgaagttagagatgaattccctgatgaatcattattcttggtgagtgagagaccttggtttgccgatttggccaacttcaaagctgccagaatcatcccaaaggacttaacttggcagcagacgaagaaatttctacatgatgctcgattttatatctggga

SEQ ID NO: 221498 - DNA, 465 bp, Glycine max
  unsure (1)..(465): unsure at all n locations
tcaccaccttgaggacaatgtgctatgtgaaggttatgttgagtgttacnagtaatggagaagggttgcatgaagtaaatgggcagctacgtgaagagaggcccaagatgaaaacaaaagctccaacgtacatggaggattatgtgcgaatcgggtagagctttgcatggagtgggaagcagataatcacttctgttagagagtgtagaatattctagaatcagttagaatatgcttgtacacaactaattccgttagatctcactctcaggaggtataaaagcttgtatagaataagcaaaatataatttcctctttttctctccttcttctctctattacggaggcatcatggtcctcgaagtccaagtcataacaatttgtcatccagtccgagaagaacaaaggcaccttttccttcctcttatatattagccactgccatgaataagatccgattgtctc

SEQ ID NO: 221499 - DNA, 178 bp, Glycine max
aatggaaaaacaaaagccggggacgacgaagacgcgaataagaagtcagaaacgagaggacacacactaaagctgcaaatcgagaggatggctcactgaagccgaactggcattaacaggcgaagcgagaaatgcacgacagtcgtgaagggacgcaagaggccctctatcccaagtg

SEQ ID NO: 221500 - DNA, 303 bp, Glycine max
ctcagcttagtgtgctcatgaagattagtcttagttagatctgttgtgtcagaacgtcagagagcccctttgcttcctcacacagatgatgatctttcaagttggggttcatcgtatgagtccttgccacaagatgagaaggatcttggctttcttccaggaggccccattgatgggaagactttagttgatggtgaaaccagtaataacacacggcatctttgtgctatttgctttgatgctccgagggactgcttcttccttccatgtggacactgtgtggcttgctttgcttgtggaact

SEQ ID NO: 221501 - DNA, 434 bp, Glycine max
  unsure (1)..(434): unsure at all n locations
tccattggtggttgttttgcttcccatgttgcactntaattcactccttacaggtaagtgcactcccncttaattctttggccctccatcgatgtgttttagtgccttagtggttcaatctttgccaatttcatgagataatgtatgcttcgatttacgcttgtctgaattggagggttgtagggggtggccttangcctaggttgtgttctgaaatgattgggcaagccacattgcccccattcccttcctgtttatacccaaaagtgcgtccaccaagtgttcggtgaaatgcctcaatggcattcgcgcataaatttgtgaattttgcttatggaattggtttgtgcatacatggttgccattnttggacacgcgggcagcttgcggaagttagggtaaatgcccaattgtgacttagtcatatgaagtcg

SEQ ID NO: 221502 - DNA, 466 bp, Glycine max
  unsure (1)..(466): unsure at all n locations
ngattcanaagaatttccctttttctcgccttttgacttgcttctatccatattaatggtccatgttccttctacctatttatattttttaattggaatggtagttttcgagttaattatatgtttaataatgactataacaaatgtattttcttttttcctgttgtaagaagggggaaaatgcacctctagcttgngtgataaggttttgaattgttgtttacgatggaatttcgtttgagtaataaaaaataaatatattgatcttccacttttgattttaatcaaccataaataatttattttatttaatgggacaaaattgtaattatgcatagttctttctggttaaattagtagtgttttaacttcaaactagtagaacaatgatattaatttataaaactattagaacaagtaacaatggattcaaaatgttatgtaaagttaaaatatcttcaaaagt

SEQ ID NO: 221503 - DNA, 462 bp, Glycine max
  unsure (1)..(462): unsure at all n locations
tctaaactntgtacaagaatgaagctctgataccacttgttggactagtggccttagatatcttaagaaggggggggggggtgaattaagatatcacaaactattccctaattaaaaattctactttgattctaacccaagtcccaagattccttttaaaatgaattcctaaataataattcaaattaaacttactgaatagaaacaataagcagtaataaataaaagagtttaagggaagagaaagtgcaaacacacattttatactgtgtcggcaaagtccgttgcctatgttcagtccccaagaaatccgcttgcgagttccactatctcacaaatcctttacaccttctgaaacacacaaggacaacccttcctttgtgctcacgtgctttacaacaagagactcacagtctctgtgccgcttttcagaagtaagaagaagatgaagagatgatctct

SEQ ID NO: 221504 - DNA, 411 bp, Glycine max
  unsure (1)..(411): unsure at all n locations
tatnnngttattattattacttaagttgtctgcgccagtgttcttattgagaataccataaaatattgtcacatactcatatgaatttttcataggcatagagactaaagtgatgacgtacgaatttaatgactaaatagatcattgacataaaaaaattgctctatgcaaatcttaaatttaaaattcaagagatctgaattggtttatccataccaaaaatttagacaatataagaaatntatgccaatagatgtttgaattctaagtattctaagattgtgaggataaagtttttgatagaagagatattatcaaacaaagtttctgagtntttttacgttgaactttatttaatgtttaactgtttagttcaaaacatattttaatgattagaactttagaagtaaa

SEQ ID NO: 221505 - DNA, 466 bp, Glycine max
  unsure (1)..(466): unsure at all n locations
ntaactatttggaaaacgtcatatctaaactaaatcatgtttgtgttaataagatttgtcttagaccagtacaatcatattcatcaaagtttgaaagctttcataaaacatgaaaatgattttgtgcatgaaaagttggaaacaacgtgttgaacaaaaactttctaaacatagcatcctagacaatgtcattttgagtaacaacattctgagtactgtagtcaacacaacaactttctaagtgttgatttatcattacataataactaaaatatatatttatttatgtgatgatcttctaaacatgagcaaatgcacattgacattaggttttcataatcatatccaacatttaataatgagtgttgtgactaagctaaccacttaaaaagtcaaacttccgtagtgcttggacctttgtgtaaaactttctaaacaccaagtaatcttgagtaaaagtcaaaag

SEQ ID NO: 221506 - DNA, 242 bp, Glycine max
  unsure (1)..(242): unsure at all n locations
cttcctcaagttcctctgcttgatttccaagngctaattataaggagatgggattaaagccttcatgtcactgtctctatgcgagggacatttctctcaccacaaatattattctacatattccaacggtggggatgtgtgataatgagtttccaacctggtgttcgaatattatgatgattcaacagttaatgaatttgggaccgttgttttatcgggacaagcttgggtgtatgcgggaa

SEQ ID NO: 221507 - DNA, 318 bp, Glycine max
ctgcagctatctcatcacaccacttgcagggtgctggaactactgtttatggacttgatgggacctatgcaagcgaaagccttggaggaaagaggtatgcctatgttgttgtggctgatttctccagacttacctgggccaactctatcacagaataatcatacacctttgacgtattctaggaggtgagtcttatacttctaagagaaaaagtctgcgtcatcaatagaatcaggagtgaccatggctgagagtctgacacctgctagtgtactgacttctgctcatctgatcgcctcactcatgactgctctgctg

SEQ ID NO: 221508 - DNA, 431 bp, Glycine max
tatcccgcacgcctgtccaacatatggtgcatgaaatcttaatgaaaatgatctttccttgtggcttcgtagagctcgcagtaatcgatgcatattctctacccagtgacagcccttggtgggattatgtcattcatttcattctgaatggttgtcatgccccctttctttggtaccacatgaactgggcttacccaatcactgtcgcggaaatggggtagataagcccaacctctagaagctgaagcacttctttcctcccctcttccttcattgatgggttgagccttctatggggctcgctgactggactatagtcttcttccattatcatcttgtgcatgcacaaggcatggatgattcctgtatgatctgatatgtgtcacccaattgcttgcctgtgcctcttgaagacctctaccaacttgtac

SEQ ID NO: 221509 - DNA, 393 bp, Glycine max
cctcatcggctctcacagagctttagatatgtgagctcatccaatccttgtgttcggactctcagccacttatgatagccgccgatgatcccattactgcttcgcctaagctctctgtcctttcttcacaccgcatcacatgccttgcgaacttcttggagtacctttgcattggggtcactgaaaccccgtgtaatgaaaggcgtgatgctttcgtctaatggcgcttctctcatggggtagccaagctgtcttatggcgaggacaggattataatttatacaaccccttgttcccattaagggaacatttggaaatccttcgcatgaagatagaatcctgattcttccttccttctagcgagggaaccaattaacagacgcccctctatgc

SEQ ID NO: 221510 - DNA, 462 bp, Glycine max
  unsure (1)..(462): unsure at all n locations
tgagctatcagaagacttgcttattcatttagtgctaatttatctaccttgacagtttagtcagtttaagatctcttataattgtaaaaaggagatgtctattaatgagctcatttcatactgtgtgcaagaagagcaaagcaaaggctgaagcaagaaaggactaaaagtgctcatgttgtaagtacctctaaagacaagagcaaaagaaaaaaaaagaactaagagcccaagaatgaagctgctaagggtccaacacaaaagaaacaaaatcaaggtgacaactgtttcttttgcagtaagcctagacatgtaaaaaagaaatgtaccaaatatcatgcttggcatgcaaagaaaggtatgtttcttagtttggtctgttctaaggtcaatttagcttcagtccctagaaacacttggtggttagattatggtgccactactaacatncagtgttcaatg

SEQ ID NO: 221511 - DNA, 442 bp, Glycine max
tctagaagttggaatcttcattgtgatgaaattataagtatttttggattcataaagaacgaagatgaaccttgtgtctacaagaaggttagggggagtaggggtgttcatggtgtggtttggttcggtttttaagcaaaaagtcatccaaacccaacataaaataaagatgtgttttggtttggctcactttaaatataacatcaaatctaaacaaaaccaaaccaatcatatttcagttttgcggctttttattttttgaatctattatcctaatttaaatctggcaactaaacttacataattattatatatgccatattaatgttacgaatgagatttatttttattaaatttggttaaaaggtttaactaaaaatattctcccttcttattagactggtataaatattttcccacctcttttgaaaaaaaaaaataa

SEQ ID NO: 221512 - DNA, 231 bp, Glycine max
tcaccttctggtcctcctcatagttgttgcatgagaaaacatgctctattttcatctcccactccaagtaggcctccggatcattctttcctttaaatggaggaatgttgagtttaataccatcaattcggttttgtctaagaacaccatcattccctcttctcctcctttcttcttcattatgagctctattcttcatatgatccaacctctcatggagcgcatcatctc

SEQ ID NO: 221513 - DNA, 304 bp, Glycine max
  unsure (1)..(304): unsure at all n locations
tgaaactctgataccgcttggtggacaagtggcctcacatatcctataaacacgggttgaattaatatatttgcaactatttccccaattaaaagtctattttaatttcaatgccagttacaagttcccttaacaatgaactctttaatcatgactcctacaacacaatctgaatatcaatgcccagcactaataaataaaacagtctaagggaagagacagtgcaaactcagatntatactggttctgccatacccttgtgcctacgtccagctctcaagcaacccgcttgagagttcactat

SEQ ID NO: 221514 - DNA, 258 bp, Glycine max
  unsure (1)..(258): unsure at all n locations
acacccgaagtctctgagcaaactcaaacgacaataagcttttactcggatgtcagattgagttcagacaattgtcgagatgctcgagattgaagaccaaagctctgagcaaattcacacgacatgtgacgttttactccgatgtgcgactgagtcncgtaatatatcgagacgctcggaattgaatatcgcagctctgagcanaatcaaacgacaataacgttttactctgatgtctgattgagtcccgtatgtata

SEQ ID NO: 221515 - DNA, 185 bp, Glycine max
cacaagtagcatggatgtctcctctacccctagaacctcacaaccactcacagactcatctcatgctcccaggaccgcttcctcttctcgctcagctctctgccaatctttcacagcacaagctctcaaaactctttacaacttggacccttctctctctagaaatctctaaacatgcaagagct

SEQ ID NO: 221516 - DNA, 259 bp, Glycine max
acattcttttgcttgattcctttcagaaattttggttcaatggcattgacaacaagtattttgttctcagttatctcttatatattagttattgttaagagatctcacaaatttgtaagtgactaatatgctatccgctaaatgaaatgcacattttttaactacaagtatacatcatctttattatagcgctattattgtatgattatacttgacggactcaccaaatgtgttgcgttttagtttatctcaatatatg

SEQ ID NO: 221517 - DNA, 325 bp, Glycine max
  unsure (1)..(325): unsure at all n locations
caatagttcttcaatcacaggaattggaaacttgttccgtctcactactttgttgagggccctataatcaacacacatccttcaagtctcgtccttcttctttaccagatctcatgacttgagaatgcgctctggctatgttgaattgccccgaactaaagcaactcacgcacttgtttctcaatttcattttcgtgacggtgtggatattgatagggccttacattcgctgtcctctaaccttccaacaaggtgatggcatgctccttgctcctccttacgggtagtccgtgagggtctttgaatacctcctcanatccttgca

SEQ ID NO: 221518 - DNA, 288 bp, Glycine max
ttaactattcacacccttctaataacctcaccttgaaataaaacatggataaaacaacacactcaatacaatcaaacatccattatcattaataatatttcacggtgttacacctacacggcttcccaaacattgtcgttctgcacaagtacctttggcgagaagacgagaacaccatccttgtccttgagttcctcacaaccaactcggccaccatcatcgtcgacactgctcaggttaactagaaccttcctgctggcgagctcaagcattggatgattcacattc

SEQ ID NO: 221519 - DNA, 258 bp, Glycine max
  unsure (1)..(258): unsure at all n locations
agtgaacgactatcttttaccaatggccctctgcataatctctggaatctacaatgaaatgtatgaatgaggacatgatgaacgccatgattgtgtatatacaagccaatngaccaaaaagcctaccttgaattataattgtatcctttgcacgctctgacagctgaattacattttcaataattgaaccttgaacttaactaataaccttggataccctcgttagactctatgagagcatatgggttaaagcaaact

SEQ ID NO: 221520 - DNA, 217 bp, Glycine max
aacatgcaagagctctcagaatttcccacaactcctcttctaataattctgattcaggcttaaataggtgcctttgcttgtgctagcgcgcttaacgcaactatggaccgcttagcgtgcattagtggatatcggcttatcgcgtgcttttctcgctcacgggatggaccacagcagtgcgcctagtacgatgacccttcactcagcgcaaatgcac

SEQ ID NO: 221521 - DNA, 115 bp, Glycine max
atcgaaacgctcgagaataaacatgcgaaactctccggaaaatcaaatagtcataactattcacaccgatgtgcgattcgggcgcataatatgtctagaggatcgaaattgaaca

SEQ ID NO: 221522 - DNA, 401 bp, Glycine max
agcttttttattgttgcccacattctccaagatgcttgatcacgggacattccctgccactgaacaagcacttcccaagtgttattggctcttcgataactgacgatagcaagaggagtactactgggatgctatcaacgaactgtgaaggcagagaagtaatgtcaagttgtgtccgagtccctcggaaaggtttaagccacgaacaatgcaagacaggatgtatcttagctccctcacgtaattcaagtcgatatgctcgcaccccaattcgttctatgactctgaatgggccacaatatccgttggccagcttaccggaagctccttgagatcctctcgccgtgactatttatggcgtcgaagtctgaccaagacccaatcattgacctcataagtga

SEQ ID NO: 221523 - DNA, 271 bp, Glycine max
tataccagccactggagacaaaaaatgatagtttcttttatcattgacaaaaaaacggactacaacctcaggaaaaagacttgtgccaatatgacaggatttggtttaatgcacgtgcaatcattcacatctcatcattcaatgaacccagaatttgaatcaccacaatctaatataactacaataatgccatcagtgtgaatctaccagtttacacttctcatattaatttcttatcttcatacacaatgtttacggtgcatttctacta

SEQ ID NO: 221524 - DNA, 305 bp, Glycine max
  unsure (1)..(305): unsure at all n locations
actcgacccgggatctctaagtcgactgtatgtatgcaagcttattatatatcgatacgctcgaaattaaacatcggagactctcgggaaattcaaatagtcataactattcacacggatgtccgattcgggcgcataatatgtcgagaggatcgaaattgaacaacggaagctcttgagaaattcaaactggtttactttttacaccgatgtccgaattacgcgaaatacatattcatacacttaaaattgaacaactgaagctcttgagaaattcaaatggacataacctntaactctaatgt

SEQ ID NO: 221525 - DNA, 449 bp, Glycine max
  unsure (1)..(449): unsure at all n locations
tcatcaagcgagaagtctcacgagatcgaatgaaggtcatttgtatcatgaagttaatgtttccctctgaagacctcaaccttagcaagttgaaagggcatcaagaagtcctcacttagaagatatattagaggctacagtgagtagacaacattagaatgaacttaacttagagtctacctcaaaatggtgtattaaaggactttgagcatgaaaacatcataatgatgttatgaagctaaaccataatcaagacaggagaggttgagataaatacatcagaatgatgtgctacagttaaactaaaggcaataccttgaacgatctatgcatcanaatggtgaagtaacaacatgtccttcatatgattcacacacaatacggtttcatgacccgactagagttagtaactcgggaatggtgcatgaagcaacatcatatcttcatat

SEQ ID NO: 221526 - DNA, 173 bp, Glycine max
tcactcgacccggatcttaagtgaccgcagatgcaagctaattttttttcttaacatatattctgtgggtaggatcgtggagtgctaaaaaccgtatgcctttctttgtgatgcagacttttggacggatttacatcctaacacaaattacatcatttcctataataccagta

SEQ ID NO: 221527 - DNA, 447 bp, Glycine max
  unsure (1)..(447): unsure at all n locations
agctcggacccgggatccttagagtcacctgaggatgcagcttgttatctttatctcttgcctggcacttcagaaccttgtggttgggtcatatagatgtcttcctctaaatccccatgcaagaatgcagttttaacatctaactgctccaagtgaagattctctgcagctactatgctcaaaataactctgatggtagtcatctttacaactggagagaagatctctatgaaatcaattccttgtttctgctgaaaccctctcaccacaagtctcgccttgtatcttcatctaccgtcagattcttcctttagcctatagacccacctattctgtaacgccttctttccttctggcaatntagttaaagaccacgtcttattcttctgaagggatgccatctcatctttcatcgctagctcccactcaatagtgtcattcccctgt

SEQ ID NO: 221528 - DNA, 229 bp, Glycine max
ttgcattgttatctcactgccgagactgactttcttgcaatggcttaccatcttatttgtcagccacgaaaaaatccctactgttttaatgcaagtcctttaaacatgtgtcatgatccttataatttctatttttgctactattatcatcatggtgataactactttgacgcttactattgaataacctccatctgcgttactgcaaaatttgtactccatatcatat

SEQ ID NO: 221529 - DNA, 197 bp, Glycine max
caacgtaagggaacttcatatgccatctaccattctaacataggaagacacaactgccatgattaatcgattatgctgtcaacaaaaatactgtctgcatgaacctttatagacttaatactagtgattaccacattgttgtttaggggttaatcatttctaacggctatataagctcctacagttaatatagacag

SEQ ID NO: 221530 - DNA, 469 bp, Glycine max
  unsure (1)..(469): unsure at all n locations
agcttatatattatacaaaccaaatatattatgtgaaaggctagcaactaatatgagacaatgtgagatagggtcacgaaaaggataaagcatcttttactagccactctaactaaatagcccacctgtgacagaagcctccaaatcagaactaatgccacatgtcacaattcacaattgatggataatacagaaaaatcaaagccacagattaaaatatgtattgctatcacttcaaataccagacaattgacatgcaaccttgattggcagttgttacatctgatttacagctatgatttattattactcagtaaaatttcagtatatatatgaccccattaaaagagtcaagtgtaacaagaggtctacattcacaagtatacgacaaatatgggaacatccaagaagaaaccatgaccaaccccagannatggataactaagagttgatcacatgacatgtatca

SEQ ID NO: 221531 - DNA, 173 bp, Glycine max
cgtgattgtcaacatccttaacagcaagatctacaattacttcctctatccatagccagttatagcgattatgtgtattttcaactgtgtgcggaggtagcatcatgaaacccatgtctcgatgttgagatgagagttggatccgcgcaatgtgctgcgcatacatgcttctc

SEQ ID NO: 221532 - DNA, 181 bp, Glycine max
ctggaaacctcttcatcccgcatatctgctagccaaaactctattcaaacaactagatcccactaaaacaattcttttaaggatccagtatcccctgagaataagcccagaactacttctcaccaaccacctggacactggtaagtgcggcctacggtgcatcaatccaagtctatgtcct

SEQ ID NO: 221533 - DNA, 388 bp, Glycine max
  unsure (1)..(388): unsure at all n locations
gacccggatcctaagcgcctgaagctgttcttttattaaaaaaaccacaaaaccgaatactatgaaagcaattaatgacgaaagaaagctattaagaacaagactattgcgaagcatggctattacgaacaaaatattatgaaaggttctaataagtaccactcggatacttgatattgttagctagtaacatctcttttgaatgcaatactattntactttgcaagggatttggagaaaaataataatatgttttttggtggggacanattaagtaagatctataatgttggtaattaaaaatataataacaaatattacatcataaaagaccctggcgctatttcacatttttaattctctcaaatatgattctactttatcttat

SEQ ID NO: 221534 - DNA, 53 bp, Glycine max
ggggggcccccccccccccagggagagggggaagagggaaaagacgaaggaca

SEQ ID NO: 221535 - DNA, 387 bp, Glycine max
  unsure (1)..(387): unsure at all n locations
cctgagaatgggagaaaatgtctattaaccacacacaatggatgtactaagtatttattacctatacttaacagacaatacttatcacacattggaagagtntgatacaatttacacaagttttatacacacaagttagtcgtattcactgactaagaacttccccaaatttacagttntgcttgtcctcaagcaaaaagagaacaacttacttgtgcttaagtgacaacgacatgcagtgactatgtacgaaggtgtatgcaacacaagttactgatcgcatgataagagaaaggagtaaaatgccataatcacttggctcgctcactctcattcgntttagaacttgttacatcagcacacttttgttctctctcttttacatac

SEQ ID NO: 221536 - DNA, 289 bp, Glycine max
  unsure (1)..(289): unsure at all n locations
accttctatgaatctccggtaatatcctgctaagccgagacaactcttaatctcaaaaacagacttacgactctcccacttaagaacagactctatnttagagggatccacagctatacccccttgagatatcacatgcnctaggaaactaactttctccaagcagaactcacactcggaccacttggcatagagttgttggtccttaatggtatgccatacaatcctcagatgttcttcatgttcctctctagccttggagtatacccaaatatcatctatgaatact

SEQ ID NO: 221537 - DNA, 471 bp, Glycine max
  unsure (1)..(471): unsure at all n locations
agcttgcattttttgtaatggcgcgtcctctattatctgatataaagtactcaatattgttccattacaatataattatacatttattttggagtaaaatggccgcaataagattataagattgcatgtaaattatgcaaagatccatcaatagaccaatccttgtgagtcggaatctaatgatacataaattcttttaaaaataaattagtttctgatgaatntttcccctccttatttcacatttaatttgctctaaaaatctacttggtggacttcaataaaaaatgtaaaatcgacgtacttctattggtctactaagacatacaacgcagtacataatatctatatgcttatatncacctaataatttattccanagaagaatgatctttagaatctatcaacaacttatatatgcatataatgatagatatataaagtcagacccacatagaatcgcatattata

SEQ ID NO: 221538 - DNA, 438 bp, Glycine max
  unsure (1)..(438): unsure at all n locations
gacaacgcggccgaacgaactagtttcgctcctgagtatgacagtcaccgctttacgagcgctgtacaccagcagcgcttcgaggccatcaatggatggtcgtttctccatgagcgacgcgttcagctcanggacgacgagtatactgatttccaagaggaaatanggcgtcggcggtggacatcactggttacttccatggccaagttcgatccagaaatagtccttgagttttatgccaatgcttggtcaacagaggagggcgtgcgtgacatgagatcctgtgtaaggcgtcagtggatcccgtttgatgccgacgctatcagccagctcctgagatatccagtggtgttggaagagggccaggaatgcgagtatggccagaggaggaaccggtctgatgggttcgatgaagacgccatcgcccacctgctatgt

SEQ ID NO: 221539 - DNA, 205 bp, Glycine max
acagattctatcttacagggatccacacctatacccccttgagatatcacatgccctatgaaactaactctctccaaccagaactcacacttggacaacttggcatacagctgttggtccctaacggtatgcaatacaatcctcagatgttcttcatgtgcctctctagtcttggagtatcaccaaatatcatctatgaatacta

SEQ ID NO: 221540 - DNA, 428 bp, Glycine max
  unsure (1)..(428): unsure at all n locations
aactaaattttctttgcgggaaattatccatgtctggttgacatggtcaacaaacattggttatgctgaacaaacaatttcaaacttcttaaggcaatcatccaaatgatgcttagaaggacaatcaaccaaactcccccagacatgcatcacataatcccatgcattcttttcgacaactagagatttacattttaccttgacattcttgtcaatgtgaaacctacacaacaagctggtacacccaccgaatacagttttcactacattcatcaacgctaggtctctatccgcaaccataactccaaggaggacatcacatcttacaaaaagacattgaaaccgttctagagatcaaaccatattacttagacgttctccctccaatangcaaaccaacagagaatgtcattccacctggtatacac

SEQ ID NO: 221541 - DNA, 309 bp, Glycine max
  unsure (1)..(309): unsure at all n locations
tgaatactccgatatcgatggcccggatccattttcagcactgccagttcttagacaagtgttcagaccacaaattagcaccccagtagacgtcttcaggtatattcaaactttagattcttttccaaatatctacatngcatatatgatgttatggacaactcctgtaacagatgctactgctgaaagaagcttttctaaactcaaactgcttaattatatctcaaatcaacatatcactagatagattgaatgtgttagctactttatctcttcaaagacagcggagcattactcgatataaaactc

SEQ ID NO: 221542 - DNA, 76 bp, Glycine max
tgggttcaacatggatggaccaatcactctcactatgagctagatcattcaataagagtttggcgagagacttaat

SEQ ID NO: 221543 - DNA, 344 bp, Glycine max
  unsure (1)..(344): unsure at all n locations
agcttctttctcattaaatgatagaggactatccaaggaagaagagtttggcttgngtgggttcaacatggatggaccaatccacttagctacgagtaagatatttcaataagagtttggcgagagactaaatctctcatggacgaaagagaagaagaagtgcagctcataaattacatgatcttatttcacttttaattgtatttcgggcctatttttggacttgcaatgggctgctacctttntattgttatttttaagtcttttaattattaaattagctattacgccttgcgcctaatttacggttattagtaggagttataaatagtctccttacacac

SEQ ID NO: 221544 - DNA, 336 bp, Glycine max
ttttttttcttgggaaatatcatgttggtgaattgtcaaaacattgttatctgaacaacaattcaacttcttatgcatcatccaatgatcttaaaagacaatcaccaactcctcaaaatccatacataatccatcattttttgaccactaagattacatttacctgacatcttgcaatgtaaacctaccaaaagttgtacaccacgaatcagtttcactacatcataacgtaggtcttatggaacataactcagagactacatttaacaaacatgaacgtctaaataacctatattaacgttcctcaatagcaacacaaatgcatcattgataaca

SEQ ID NO: 221545 - DNA, 174 bp, Glycine max
gacttacataatcctaagcaactttagcaaatgctctttcttctctatttatctcacttatctgtcatgggacttctacattctatgctcaatttcttctttctattaacaggatgaaaacagccaccctgtctagtctgctcaaactgatagcacttctgagacatcattatc

SEQ ID NO: 221546 - DNA, 218 bp, Glycine max
  unsure (1)..(218): unsure at all n locations
actttctcaagacgcttctctgagaagctagatccttatctatccacacccctctattaactaaattaactctcttaataataattatggatgaaaataacgcaacacataatcaaacatcaaatactcatactcanaananatatanannnngggggagagacacaaatatatatatacatatatatatatatatatatatatatcagggtgtctcg

SEQ ID NO: 221547 - DNA, 198 bp, Glycine max
  unsure (1)..(198): unsure at all n locations
accggacctaagaacttttattttntttttcgagaccgcaggataggtttccgtagaccactcggacaataaattaatgatcatgcacaacctatacaatcatatataaaaacattggacaattacaagatggtgtcaaccattaaatcagattctaggaggaatgataagaacaacactttgtcctcaacttccgag

SEQ ID NO: 221548 - DNA, 226 bp, Glycine max
  unsure (1)..(226): unsure at all n locations
ttaggagtgccgcctttatctcctttacaatggaaatttttttaacactacaagtagaccagccctcactatatggcctatttaataatctataacattatcttatttcaggtctcattctccactttttntccttaatatctagctaaattccaacttctatttcgtttcatatacctcacgcatctaacgagtcacagattgtggaatctatgatcaaagaaaa

SEQ ID NO: 221549 - DNA, 365 bp, Glycine max
  unsure (1)..(365): unsure at all n locations
aatcgtatgcaaaaataactgatgattccacttatgctttgaaaggtgtggcaacaaaaattgtggatgaatgtaaaggattgcctattgcaattgtgacagtgggaagcacgttaagggaaaaaactttaaaagactggaagttagctctgtcaagactacaagattccaaaccactggttattccaaaaggcctaagaagtcctaacgcctttcttcaattaagttatgataatttgaaagatgaattagccaagtcctttttcttgttgtgttccatatttccagaggattatgaaattgatctggaagatatatttcgatttggaaggggactaagaataactgngactcttgaaacaata

SEQ ID NO: 221550 - DNA, 413 bp, Glycine max
agcattagtttgttatctcgctaagcacaaatcttacgctaagcgccaagtcttcacgcgctaagtgggcccttgcttgcgctaagcgcttagacccctgactagtggctggatggtagcgctaagcgcgcttcactgtgctaagcccaaatacctcctaggatttaatttctcgtattgggcttaaccaagtgatgcgctaagcgcaattccctctctggtttgaaattctttggaatagcgctaagcgctatcaacgcgctaagcgccagccatcactgcattgaggagcatgtttatgcgctaagccccacctttggtggtaagcacacattgcaagccaatttgagctgccgaagcgctagtgatattctcacctcagcctaaaacctcttaaattaaaaatgtaatac

SEQ ID NO: 221551 - DNA, 357 bp, Glycine max
  unsure (1)..(357): unsure at all n locations
cgacaggataactttctgaataaatgagttatcccacctcttactccaaaatcangcgaataagtcactccccattttatctctgcaggcattgatgttggtctcacctctgtacgggaagccggaaggccatatcacctcttactgtacacatggggcactgtcccccaaatgccaagctagaagaataatcttctggctctcatttcataatgcattatatatgcatcgataacatctctcgggctcatataacatatattccgcattgctgtataatatccacctacatttgatagcatgcgcatatcatatcgtcaacaactttgctcaactgatccttcgttcatgtcctat

SEQ ID NO: 221552 - DNA, 356 bp, Glycine max
  unsure (1)..(356): unsure at all n locations
aacctctagatggtagcatcttggtctctcatttgaacaaatcataactagttctctttgaataatattgagcttgacatggtgctctacataaaattttcttttttatattatctttttgtactattgtgctttggtggtggatcaacgctattgcctacagctgtttctcccattattaattagaattgatatttgagtgacctcacaactagaatatggcttcttacattattcaactctactatatgccatataagctaatgtgagtcaccttatcaatctatatacaatgntgcctggcctaagctaacatacaagactcacaatattttgacactcatatagtacataca

SEQ ID NO: 221553 - DNA, 252 bp, Glycine max
ccgggccaagggggggaacaacacaggacggcccgcgccagcaagcaaccaacccggaacaaaaaacagcaggagaaacagccgggaactcggaaatctaaaaggcctgaacgaactaagccccccaggacgagacgaacacaacaggcaaagccgcaggcagagcagaccaacaacaaatctccaagaaccaccactcccaacaaactcacaaagccaaaccggcgcgagaacgagcacagacaccccccc

SEQ ID NO: 221554 - DNA, 433 bp, Glycine max
agcttctctcgctaagctcccaacacttactagaattgttgaagagttggtgccgctaagcacagtctttaaggagcttagcgccaatccttgcggcacatgttcagcttagcaggcgctttcctgctaagccaattctgcagaatctaaaaattctgcaactttcgttaagcggctccacatgtcgctaagcgatagtgctttttttacaaaggccagctaagcggatcatgtctccctaagcggccagtgtctttttcagctctattcttcagcttttaaaatttgaataattgtgtcccgatccaatgtttgattcctttgtctgcagatgtcttccacaacaagaaagagcattggtgcaacgcccacaactcaatatgacacaagaagattccacttcttcgaggcctgtaccagatacacagataat

SEQ ID NO: 221555 - DNA, 160 bp, Glycine max
acttgatgtattctattaaaagattaataagctgtgcatagtgttttgcatgatatatgcgtgattagctaaccagtttcaataagaatatgggtggtgcatatggcctaatctaaaactctgaaaattatctcccttttaattttcttaggtctaactt

SEQ ID NO: 221556 - DNA, 450 bp, Glycine max
  unsure (1)..(450): unsure at all n locations
agcttgtattgtcactcacatcttgactagttataactgtctgaataaaatgagtttatcccacgtttttactccaaaaatcagtgcgaatcaagtcactcccgcattttatctctagcaggcattgtatgttggtctcagcctttgtcacgggaagccggaaggtccatatcaccttcttaactgtacacatggggcactgcgcncncaaatgcgcaagtaagaagagataatctttcgggctctcatttccataaatgcattcatatcatgcatcgcataagcatctcttcgtggcatcataatgaacatatcacttctgcatttgtctgttataatattccagcctcacattctgcatgagtcatcgcgtcatcatgcatatgcgctcaacatactttttgttctacacactgcataccttttgctctcatgttcgctcatgcgtga

SEQ ID NO: 221557 - DNA, 465 bp, Glycine max
agctttgtatatttttcttttcctttgcggaacttctagatggtaccatcttggtctttcatttgaacaaatcacaactagttctctttgaataatattgagcttgacatggtgctctacataaaattttcttttttatattatctttttgtactattgtgttttggtggtggatcaacgcttttgcctacagctgtttctcccattattaattagaattgatatttgagtgacctcacaactagaatatggcttcttacattattcaactttactatatgccatataagctaatgtgagtcaccttactcatctatatacaatttggctcggccctaagctaacatacaagactcacaatattctgacactcacatagtacatacaccctttgatttctctttatcattctatcatatcataccattaatcaattcagtcatttatctctacatctctgagtgc

SEQ ID NO: 221558 - DNA, 414 bp, Glycine max
  unsure (1)..(414): unsure at all n locations
tcctactctagagnnctacaggacgttctagaaaattctacacttttctagaaagctctagaatattctagaacctctccaattaaggagggatctcaacaaatcttcccctcctgacttaattggggggtagtagcaaaccggcaccttgacagcaatcttcaaacttctntttcgctagtactttggtcatcatgtctaaccagttctcatctgtgtgaaccttgtcaagatgtactctctttttctcgacgacatctcggacccaatgataccttatgtcaatgtgctttgtgtgagaatgaaatgttgagttctttgccaagtcaatcgcacttttgatatcacancttaacacatacctatcttgatctatttctagctcttgcaacatgttcttcatncacaacatct

SEQ ID NO: 221559 - DNA, 390 bp, Glycine max
cccacatgttagctatcatcgcccagtacgaagaatagttaggtctatccactgcccacgagcctacaatcgcggatgagtacgctcaaccatatgcggaaaaagaagctagaggaacggtgatcgactctttacaccaatacgccaccatgtggatggatcggcttgctcttaccttgaacgggagtcaagaactctcccgattgttagctaacgccaacgcgatggcagacacctactccgtccccaagagattcatgggctcctcggctattgtcacgatatgatagacttaatggcccacataactagaaatcgctaggaaactcgtatggtctcttatacattgctagatatgactccctcttttgaataaatgagttgtcccat

SEQ ID NO: 221560 - DNA, 433 bp, Glycine max
  unsure (1)..(433): unsure at all n locations
tctctaagtcacctgcatcatgcaagctntatataaggtatgcctttaactccaagctcatcttggctttatttctaagcttctctgccttcaacgaaagacaattataatattttggctttatttttaagctttcttgttgcctctaagtttgtctttaattattacttcatacaccgtgcaagtcatgaaatgaaacacaagacataatacactgattacagcttattaggttatctggtcatttgcgtcaacggttgttcgtcttaaattaaaaatagaggtgtgccccaggcttgacgcaattgcagaagtcaccatctgagctagctgctagtgtcatgtaagctatgcatgacgtatgcatgcttgatcattatgtcttacattcacatgaagcccatctccattcgnatatgtacgctgcattact

SEQ ID NO: 221561 - DNA, 433 bp, Glycine max
  unsure (1)..(433): unsure at all n locations
agcttgtctcagtgtttatgcgagacagagaccaacatgttagctatcatcgccaagtacgaagaagagttaggtctagccacggcccacgagcatagaatcgcggatgagtacgctcaagtatatgcggaaaaagaagctagaggaagggtgatcgactctntacaccaagaggcaaccatgtggatggatcggtttgctcttaccttgaacgggagtcaagaacttccccgattgttagctaaggccaaggcgatggcagacacctactccgcccccgaagagattcatgggcttctcggctatcgtcagcatatgatagacttaatggcccacataattagaaatcgttaggaaacttgtatggtctcttagaccttgactagatatgactctctctttgaaatanaatgagttggctccatgtttctac

SEQ ID NO: 221562 - DNA, 122 bp, Glycine max
  unsure (1)..(122): unsure at all n locations
ggggggggngggaagcgggagtgtgggttgattacncgacgaaaagggggggcgggcgcccccccccccccccccacgaaagaagagagcgcacgacacaacgcaagacggcacgaaggaac

SEQ ID NO: 221563 - DNA, 408 bp, Glycine max
agctgttcatagcaccactaattgctctccttttgaagttgtttatggctttaacccactaacctctcttgatcctttgcctatgcctaatgtttcttgttttaagcataaagaaggtcaagcaaaggcggactatgtgaagaaacttcatgagagagtcaaagaacaaattgagaggagaaataacagctatgctcaacaagccaacaaaaggagaaagaaggttgtcttccaacctcgagattgtgttcggtgcacatgagaaaagaaacgtttcccgaacaaatgacatcaaagcttccaccaatgtgagatggaccatttcaagtgcttgaaagaatcaatgacaatgcttacatagctgagctgtcccgtgagtatattgtagttccacatcaatgctctgat

SEQ ID NO: 221564 - DNA, 398 bp, Glycine max
gtctgatgcctgaaatgtcttttctgatcgcagcggtcctacatgtatggaagaatttctccaagaacaccctcttaacgtcatcccagcggaaaatagacctacgagcaaggcagtatagcccatctttctgccactcctccacagaatgaggaaaagcctttagaaagatatgatcttcttggaccatacggggcttcatggtgaaacaaacaatatggaactccttaagatgcttataaggatcctcacctacaagatcatgacacttgtgcagcaaatgtattagtccagtcttgacaacatatggaacaccctcattacgatattgaatgcacaacctctcataagtgacactacgtgcacgcatctccctaagagtcctctcacgacgtgga

SEQ ID NO: 221565 - DNA, 388 bp, Glycine max
cagcttgagatgattaagtgttgaagggtgaaactctctgctcttattgttgaccacagagtggtacctggagatatgtcgccggggtcacgagaccttgggaacgtcaggtggggtgctattgctcaaaaccaagcttgaccaatcccgacccaacccgggcatagtcggtcagtgagaacctgtgatgtacctaagcacgcgagctcctggcagtccacacataaaaggaacaaagaccacacagccatgaggcttgtggtggctggccagctgtgaaacttgattgatatgtgagatatggtctctggtaatcgattaccaacggtgggtaatccattacaacgcttaaacatgaagacagggggctaacatggtctctggtaat

SEQ ID NO: 221566 - DNA, 149 bp, Glycine max
  unsure (1)..(149): unsure at all n locations
gaagtatacaccgagattgacaataaaattcgcagtatggtgagtatgattttgaagaagcctctgtgcctgaagctgatgaagatgttctcacatctttccactcctaatgtnnctatgcctgatgttgagaaagatgttgcaacatc

SEQ ID NO: 221567 - DNA, 291 bp, Glycine max
  unsure (1)..(291): unsure at all n locations
cactttatttgcttctcctaatctctcttttcgctcactcccttcgtttcttcgcttcgcttcaggatgactcctacgtcgacagctacctaagtactatcggatttgatctcgtaattatcaattctcttctctttgctattcctatttatggcctaacactcatttntattctgttttagaacatagaaccgtggagctggacggaaaaccctcagctgcgatcggagtttatacttaccgcacgaataatgtctttatcgactactcattataatgctagaagcatga

SEQ ID NO: 221568 - DNA, 434 bp, Glycine max
  unsure (1)..(434): unsure at all n locations
agcttgtttatccccatgttgaatntgcttacaatagagctgttcatagcaccactaattgttctccttttgaagtcgtctatggttntaacccactaactcctcttgatcttttgcctatgcctaatgtttctgtttttaagcataaagaaggtcaagcacaggcggactatgtgaagaagcttcatgagagagtcaaagatcaaattgagaggaaaaataaaagctatgctaaacaagccaacaaagggagaaagaaggttgtcttccaacccggagattgcgtttgggtgcacatgagacaagaaaggtttccggaacaaaggaaatcaaagcttcaaccaatgcgagatggaccatttcaagtgcttgaaagaatcaatgacaatgcttacaaagttgagcctgcccgtgagtataatcgtagttccacc

SEQ ID NO: 221569 - DNA, 264 bp, Glycine max
gattgggtaccaacttctgattcggatccatgggactatcacttggtctacaatctgacataccaatttctttaagcatgcctaacacatactccctttgtgagatgataatcccatcttttgactgagcaactctcattcccagataatatttaagtttctccacatccttactctgaaaatgactaaataaatgttccctctagctgaacaattccttccttggtcatttcctgtgatgactatatcatctacatacaccac

SEQ ID NO: 221570 - DNA, 339 bp, Glycine max
actggactcaagcgatcatcaccaccacacattattggcgctagaattcgcttatagcttctatttccaataagagcgtcttgctatattacgggtcttcatccgacattcgtgtcaaaaattattgtggctcgaatttgcaacgagcttacaatttcaatctctagcgtctcgatatattaccggactcaatcggacatctcagacaaaaattattgtcagctgcaattgctaccagcttcccgtttcgatctggagcgtctcaatatattacaggactctattgtaccttcgaataataagttattgtctgttgaatatgctcacagcatcaaatct

SEQ ID NO: 221571 - DNA, 330 bp, Glycine max
  unsure (1)..(330): unsure at all n locations
ctagagagagaaaggtccatgttccagagagtttgagagattttgctgcgtgaagagctgttgagaaccgagcttgaagaggaagtcgtcctgagaacttaatatgagtttgtgagtgattgtgatgttctagaggtggaggagacatccccaccactcggatttcttcaatccttcatctctctctnctctttgttgtaaaggaagctttccacgtatggaaagctaaatcctctgttggctcttccttgtaggtactcgatgtaaatacctgtatattcatttaatgatgctctgtcgtgtcactgtgctatcatcaacttcattcta

SEQ ID NO: 221572 - DNA, 143 bp, Glycine max
aaagggaaggggaggggaaaacaaccacagagaagaaggagaagaaaaaggaaaagagggaagaagaaaaaaagaagagaaaggggagaggaaggaggagaaaagaagggagaggagaaagaggaagaaaagggaaaagaaaa

SEQ ID NO: 221573 - DNA, 364 bp, Glycine max
  unsure (1)..(364): unsure at all n locations
ctccatacctgaaacaagaaatagaggtactagtcatgttgcttgaggtancaatcccagaaagagatatgaacagcaatctagacgagtttgtgtgaggagctgataaacactaacctagaatatattggttcgccagaatgactcagaacacaacaatgcttcttccttttcctccatgaaatggaagcatcatcctgcactttattcattaatcaaacagaatatgatattacagcctttacagatatcttcagtgtaatgccctcatattgcttgaatttaaaacataaacgtctgtatcagacaatataaagtacttcactggaatntccacatatctcataatattcacaacaacagc

SEQ ID NO: 221574 - DNA, 434 bp, Glycine max
  unsure (1)..(434): unsure at all n locations
atgcaagcttatatttttcttgttcgcgaaatgttacactatgttttgttcccaaaaaatgtaaattcaccactcgccattctaacatgaaataatgcaaaatattcatcaattctattaatgattaatatttatcttagtgttcatcatttttaccacaactttcttaactaatctattcaagtcttaatttcactctgaccatgttgatgtttaaactctctaattgttactcttttaattgattgatatctgtcattcaatgtcaaatgttcacttcattaacgcgtcatatctcataaccaattcgatcatacgttgtatattctgagtactaatttgaccttaagttaccaanaatatggctcaattatgttgaagtcttctattccaatcatcaatatatatcaactatctatcattaatgagcttta

SEQ ID NO: 221575 - DNA, 208 bp, Glycine max
tacgtgtgcgttcttataactctcttgggcctcatagaattaccattgtcatctgctattgtggcctcgctatcatgtacatgtgcataccattcaaagaaaaaagcctaacggatcaggaatatcgtggttgttgcctgtcttataagacacacatgaaatcgtcatgctatggtctaatgtcttttgagagcatatacatggctga

SEQ ID NO: 221576 - DNA, 350 bp, Glycine max
  unsure (1)..(350): unsure at all n locations
tagctcgcttctatttatctgacgccttatttcatggtggctcgtgccttcgacggcagccatcgagaggtaacgggagagatcgacctcccagtacagatagggcctcacatcctgccagttacattccaagtnatggatatcaacccagcctatagctgtctgttggggcgtccatggatctactcaccgcgaacatttggaaattcgggttaggctacacacctacatatgctgacgtaaggagaaacgtctcggacaggaagaacagatgccaacgcccatggtcacgaccacaagccccagaggtcccattgtaccacaacactagaagcttcgcgagtgtgggt

SEQ ID NO: 221577 - DNA, 223 bp, Glycine max
agatgatgagatccacttaataagtcaatgttctgcatattctaaatcgctatccttgaatgttgataatgctgcaattatatcccaagaaccagacgcttatcatgacattgatattggtttaaagaccatatgatattgtgtccccaactaagtaaattctttctccacataacttggatttccttcaatgtaacatgaaaagggagaattcagctgaaca

SEQ ID NO: 221578 - DNA, 311 bp, Glycine max
tagaatgatggccagagttatgttgtggaaaggttactaaattggaaggcggttaggcaaagacaacggcggcataactagtctgataatgcaaaggaaataggggaagtatggttagtataagttataggagattaagaaagattggggaggaagagggtagtaaagttatgttgaaaataaagtgaagaagttacctgtaataagaggagcttatagtggggttggggagaagtaagtgtgtattagaaatatgtcgataatgattggagacatgctctaatttggtggaatggatggaaaagtggatt

SEQ ID NO: 221579 - DNA, 329 bp, Glycine max
tagaatagttgtctcaacgagctggtacacaacaaattgcacggcaaaatcacttgtcatcaaaaggttctactctcagcttcttagcccatgttctatatatcattaacaactatctataaaccgagcaaaacaaagaagatgcacatggatatttcgttagaactgtaaaaagcaatcgcacggcaacatcacttataggacaaacgttacagtctcatgctcgcgaatatatgattccacctagctggaagactttacaacatgcttgggaatcttcctcaagtcattgtatctttgtataaacaagttaacagacatttctatca

SEQ ID NO: 221580 - DNA, 162 bp, Glycine max
catattctataattgaattttcagggtcaccctgcggattttgacatctccttcatctcggactcatgcactgcccgtgaccgaaaatatgatcataccaaaggggatggttaatataactaaaatattaattttttccaaactatcacttgaacatataga

SEQ ID NO: 221581 - DNA, 372 bp, Glycine max
  unsure (1)..(372): unsure at all n locations
gaagtcangtgcagccatctccctaagagttctctcacgaggtggagggtgaaccatgtnctcactatgaaaattagcagtcgaatgctcaaaatcagaatgttcagaatcaccagccacaaaatgctcaaaatgcacagaataatctggatgcacactatgcgtaactaatctatgaaagggtctatctatttcaagatcaaaggattgtaaatcacctggattgcctctagtcatgcactatatggagcaatcatgtatttctcaaacaagcaccacgggtaaaaaaggggttaatagaaaaaaggcaaactacgggtaaactagactatactaacaatatcaaatgagctgataatttgagcacaccta

SEQ ID NO: 221582 - DNA, 396 bp, Glycine max
  unsure (1)..(396): unsure at all n locations
ataatagaacacagttgatatgtctactaccattgtgataatctctttctctatcgatgagagaaacacttgggttgccaggtccctccacctttgggcgtactctttgaaagattcgtgcccctctcttgcacatatattgtagttgcatcctatccgaagtcattatactgacaccgtctaatgaaggcaaccattatgtcctcccaagaatggactccggaaggttccaagctagtgtaccatgttacagctaccccagtcagactcttctggaaggaattgttaagcaatntctcatctctggcgtatgctcccatctatcgacaatacgtctttagatgggtcttgtagagagagtactcttgtcttgcaaagtccacaccttgacttgga

SEQ ID NO: 221583 - DNA, 429 bp, Glycine max
  unsure (1)..(429): unsure at all n locations
agcttnttgttatatcctcattccagcgatcagtttggtgtgtgcgtaagagcttgaacaacggctcacaaatggcggtgagctgcgatatgaatctggcaatatcattcaagcgtcccatgatacctgagacttgcctctctgtaccgggttctggcatctcaaggatagccttcaccttttctggcgtctaccctctatccccttcttggcttacaatgaaaccaagcaatttccctgatttgaccccaaaggtacacttggcggcgtcacacttaatagatatttgttaaccctatgcaacaacctccgcaggatgactatgtgttctctctcggatncagacatggcaattatgtcgtccacgtagacctcgatctcttgatgcatcatatcatggaacagagctaccatggcccgccgataagt

SEQ ID NO: 221584 - DNA, 256 bp, Glycine max
acaacggattaatactatgcctacctaggcacaaaaaaatttggtgaggacgaaatggcacaagtaccccacagccaaatacccattggtccaaggtatgcagtgcatggcctatacatgataactatagctttatgaaacaaaatattgtagcactaaagatggatataacacaaacttaatgaaaaggggattatcttcattggataaaatacactgatttgctgaatggtcgtcaaaagcatatggaactctg

SEQ ID NO: 221585 - DNA, 380 bp, Glycine max
  unsure (1)..(380): unsure at all n locations
tatgtctactaccattgtgataatctctttctctatcattgagagaaacacttgggttgccaggtccctccacctttgggcgtactctttgaaagatccgtgccccttttttgcacatattttgtagtcgcatcctatccgaagtcattatactgacaccgcctaatgaaggcaaccattatgtccttccaagaatggactcgggaaggttccaagctagtgtaccacgtaacagctaccccagtaagactntcttggaacgaatgtataagcaatttctcatcttttgcgtatgcccncatcttccgacaatacgtctttagatggctcttgcggaaagtacgtcccttgtacttgtcaaagtccaacaccttgaactt

SEQ ID NO: 221586 - DNA, 410 bp, Glycine max
  unsure (1)..(410): unsure at all n locations
tgactcactaacctagaattaaaataacttaatgccattaacctanggaattaaaaaaaaaacttaatggctgagtgtaactgaaatagtggcaaccaaaagtcanccccaacagccaacaagtcagccaccatctggtctcccagagggctaatgcctangttgccaattgggcccttattacaacttgaactaaacctactaaagcctttttagttgattaacccaaaacatatttttggtcagccaactttacaaggattgggccattatttagacaaactaaacactctaaaattgagacaaagtggtgccatctagtcctcctccatttgggccatgatacaactcacaaccttggacttttcgccttgaaacttgcgcttgtattcaaatagtatggacatcac

SEQ ID NO: 221587 - DNA, 262 bp, Glycine max
tactgagacattgggttatatgaaactgaatattagaatctaaagttattatggaattgttaatgcttggtgatttgacttatagttactgcatatatgtgtttatgttattgtagaatggttgatattgaagttcaaactcaatcacaagtgatacacgctaatagcgagggtgaggctgatcctacttattcacctatatatctaagtggggatgaccatatatacttggatgatgagactctatcatcgtctatgtcta

SEQ ID NO: 221588 - DNA, 160 bp, Glycine max
  unsure (1)..(160): unsure at all n locations
agcttanctttttcatatcgaatcaatgttagcctagctcaagcttggccagattagcggacccaatcatcctcagatgcaagggttaggcgttaagcgcttaagacttgcagtttaccgcatgaacaaagatacacttagcgcgagggtagcgcttagc

SEQ ID NO: 221589 - DNA, 290 bp, Glycine max
  unsure (1)..(290): unsure at all n locations
cggacatgcagagggcaancggcgtaagtgaccacacgctaaacctccaaatgcgcgcgtaacgcacatccacgatnaatctgacttacagcttggcttcttgcactaagcatgcactggcgcgctgagtgtgctgctccaagtctttatacatcttccattcttctgttgatgcatctaacaattctacataatcaaacaaaacatctgtaaagtaccaactntagcattcttaagataaaaactgcaaaaaaatctaaattcctatcttgttaagtcaaaagaagtat

SEQ ID NO: 221590 - DNA, 205 bp, Glycine max
tgcagttatttttatacctgataatcttgagcctttggctgttccttcggttgagctatcagcttaggaaacatgaatacattcttagaatttgactttaatgttggaaatatggggttgttatgacaatgttgtggttgtcagagattggctactgagcatgaatggaaatgactctgaagaagtgttaagcctaaaaaaaaat

SEQ ID NO: 221591 - DNA, 354 bp, Glycine max
cattaaacagcaccctcaaatcctgtccaacatctggccttattttgctatctgtgtcacattactcatgttgaaattactgctaagtcaattatttgatattgtaccactttagggtaaccagctcaatactaagcctgtactacgaatagaaatcaaagccagtcattgatgaataactcttatccttactactctaaacatgactgcaacgcaagactatattcatcgaccactacctttactataaatcaaaatcttgtattctggaggtgcaaaagccgcacaatcactgcttcatattaagtctcctgctgtcaccaccaacggtagaagaacattctctcatgaata

SEQ ID NO: 221592 - DNA, 294 bp, Glycine max
  unsure (1)..(294): unsure at all n locations
gcttgtttatttggttcattttcttcttcactgagacagtgggctatatgaagctgaatattaaatctaaaagttattatggaactgttaatgcttgtgattctgacttatagctactgcatatatgcgtctatgttattgtacaatggctgatcttgaagttcacactcactcacaagtgatacaagctaatactgagggtgaggctgatcctacttattcaccttcatatttaagcggggatgacgatatatacttcgatgatgagactctancatcgcttatgtctaaaaa

SEQ ID NO: 221593 - DNA, 398 bp, Glycine max
  unsure (1)..(398): unsure at all n locations
ttacctntcagttttggatctgccaaagaacatgcttactggaatgatacccaaaacatatcttgagatagaagcattggtgactatgaattttaatggcaatcaattggacggacaattacctctgtctgttgtcaagtgttaacagctaaaagttttggaccctggagaaaatacatacaagatacattttcaacttttctagagtcacttcaacagctgcaagttcttgttttacgtgctaatacgatcaatggttccatcaattgtttgaaattgaagaatgttcttcccatgttgcgggtctttgacatcctccacaatcaatttagtggcatctgccaacgcttgatagacacttcatgaaagatggtgatgtcatatgtgctgatatatga

SEQ ID NO: 221594 - DNA, 297 bp, Glycine max
gcttgatatgctgcagtatagataggcgaaacttcctgctcttattccgttgacacagagtggtacctggagatatgtcgcgggggtcaggagaccttgcggacgtcacgtggggtgctattgcccaaacacacagcttgaccacatcccgacccaacccgggcatagtccgtcagtgagaacctgtgatgtcactaagcacgcgagctcctggcacgtcacagataaaaggaacacagaccaccaagcacggacgcttgtggtggcctggccactgtgaatcttgtgtgatatatg

SEQ ID NO: 221595 - DNA, 347 bp, Glycine max
  unsure (1)..(347): unsure at all n locations
cccaacagcagcagcgaccttagagacttgccttaacaccttgtctccgagactgagaataattgcattgtatgccttctgcaatagtgctttcttattcccatcagccatcatctattcgagggtgatatctccatcaagtgcttgcaccaagccctgctgaacaagaagagctcttatcttcaatcagcataggccaaaatcatntcgccctgtgaatntttcaacctcatacttggccgagcccagtttttgaatcacactcaaaatcgctccacgctcaccgcaccaatttgttgtgccagatcagattttacttacacaagaatgaatttcttgtatgaaca

SEQ ID NO: 221596 - DNA, 320 bp, Glycine max
  unsure (1)..(320): unsure at all n locations
catgattgatacatgatttgcgccacattggatgacgggaagtgatcctatcctactccgcaagggcattgggtacaagactccccgtagattgggctacagatccaangaaaggccctagggttctcatgagccttanggtagatctcgagcccatgggctcactatgagcccgcttatctctgtcaatattacaatacgtatttccttcgtctgggccttgtattttggccattctagtaatatacggttctagccttgtattttgcggcattctaagtagtctctgtagtaacgactttattctgtatcttcatgtt

SEQ ID NO: 221597 - DNA, 156 bp, Glycine max
ttttagaatagatctatcttccaccctcataactaataactcctaaaatattccgcgaaatatgcacaatatcaacatcacataatactataattatgatttatatcagggtaaccctcgcgggattcttacactctccgttcatctcccattcat

SEQ ID NO: 221598 - DNA, 246 bp, Glycine max
  unsure (1)..(246): unsure at all n locations
attggaaataatttgtttatggtaccgttttttaaacatttcatgaatttatgataaatctggcattttacgtgaaaagagctcatttttaattgcacaatgtagtagttaggctaagctcagcaattgcgctaagcacatatccaccactaagtgcaactttaatgcgcttagcgcanaggagaatctggcagagcatcaacatcaaagtcgcgcactatgcgcgagatcagtgcgctaagcgta

SEQ ID NO: 221599 - DNA, 328 bp, Glycine max
acctttggtgggtatataatgtctcctctaatcccatgcagaatcagttttacatctaactgtccaaggaagattcttgagctctatgctcaaatactatgaggagtatcttacactgggagaaatctctggaataattcctgttctctgaaccctttacccaagttcccttgttctttttaccgcaatcttcttacctataaccaccttctgtaccttcttccttctacattattaaaccacttatttttaaaggagtattatttctcgtactccatcatatgattccctggtgctactgacatctgctaccactagtacacaatat

SEQ ID NO: 221600 - DNA, 464 bp, Glycine max
  unsure (1)..(464): unsure at all n locations
agcttatttgtaattttatcgaattattgnnagcttagctcaaccttggccagattagcggaccaaatcagcctcagatgcaagggttaggcgttaagcgcttaagacttgcagtttaccgcatgaacaaagatacacttagcgcgaggctagcgcttagcgaaaggaatgttttttagaaaatattttctaagttatctttcaatccttttttcatgaaattgaaacccttatgttaagcattcaaagattggctcatataatcctatgtacagattacatagcaagttccaaatgatttaaatgcataaaacaaaacacaaataatagaatcttaaactgggttgcctcccaggaagcgcttctttaacgtcattagctngacgcttttacctcactaggtgatcttatngtttggttcctaccttcagaacctcttgacctccttccattacctgtaagct

SEQ ID NO: 221601 - DNA, 358 bp, Glycine max
  unsure (1)..(358): unsure at all n locations
tgggaccaactcattgtatttcgaaaaggaagtcatatctagtcaacgtctgagagaccatacaagtttcctaacgatttctaattatgtgggccattaagtctatcatatgctgacaatagccgagaagcccatgaatctctttcggggcggagtaggtgtctgccatcgctttggccttggctaacaatcggggaagttcttgactcccattcaatggtagagcaaaccgatccatccacatggttgcctcttggtgtaaagagtcngatcacccttctctagcctctttttccgcgtatacttgggcatattcgtccgcaatcctatgcgtcgtggcccgtgctagacctaactc

SEQ ID NO: 221602 - DNA, 393 bp, Glycine max
  unsure (1)..(393): unsure at all n locations
tgtatcaacattggaagactacaatatcaagttcaatgcatattatataattgaattaaaaatgcttcatgttttttgctcttgattccagatcttttagttgaatcggaaattgcgaaatatgatctattgcaagtttacataacccgtgaaagcctactatatcagtaaatgcctcaatttaactgtcatatattggcaaaagtagtaatgaactatgagatcaagaagaagacattgatactgcagtaatagacagtattttcagagaacataagatcatcacattacaattccactcatatatagacagatattcatcagattcttgtcaaagataactgctagaaaacatntctataagaatatgtcatatatttctgcatgtgaaca

SEQ ID NO: 221603 - DNA, 337 bp, Glycine max
  unsure (1)..(337): unsure at all n locations
acttacatgnaagcggctgcttcgttcatcttcggtctttccgcttcaaaactcaaacgtcccaccaatacagaatatttttatgcaagaaaaattgttttagggggctgggggatcagggatccattctcacctatctcatgaactaataaactaattaatttcagttatatctnttatttggatcactaattaactttgctcttacgcaactattaattgtgacaaaaggataaaaaatatctattattatgaaataaaaatcttatttgtgagcaaaaactaacaatatcattttcatactcactatcacactcatattaatgactcattcatg

SEQ ID NO: 221604 - DNA, 379 bp, Glycine max
  unsure (1)..(379): unsure at all n locations
cttaaccacctgagcatgcacttttttatattccctttttggacttcaaactttggtgggtatatacatgtcttctcacatcccatgccagaatacagntttaacatctaactgctccaagtgaagattctctgcagctactatgctcagaataactatgatggcagccatctctaccactggagagaagatctctgtgaaattaagtccttgtttctactgaaaccctctcaccacaagtctcgccttgtatgttcttctaccgccaaattctctctttagcctactaacgcagctattctcgaacgctctctttccttctagcaatttacttcaagaccacgtctgattctttcaagggatgtcatctcatctttca

SEQ ID NO: 221605 - DNA, 333 bp, Glycine max
  unsure (1)..(333): unsure at all n locations
tatgtcatattnttcaattgagcaaatactcactctacttgactgtccaacacgattagaatattacacattagctttttcttaaaaaaattaaactaaaatagtttctagtaaagcataaaatataattgtcatatctatggaagaacacaaaaggatgaatntgatatctattttgcatatgtaacagtctaatttaataaaaaaacatatataaaaaaaacttatgaattcattagcatgcactgagactctaaactgtttttcttatattattgtctaatcataaaaggtcctatatgactaggaatattattctcttgcataattaat

SEQ ID NO: 221606 - DNA, 347 bp, Glycine max
  unsure (1)..(347): unsure at all n locations
tatctagtcaaggtctgagagaccatacaagtttcctaacgatttctaattatgtgggccattaagtctatcatatgctgacaatagccgagaagcccatgaatctcttctggggcggagtaggtgtctgccatcgctttggccttggctaacaatcggggaagttcttgactcccattcaaggtaagagcaaaccgatccatccacatggttgcctcttggtgtaaagagtcgatcacccttcctctagcctctctttccgcgtatactngggcatattcgtccgcaatcctatgctcgtgggccgtggctagacctaactcttctttgcgatgatagctagcatg

SEQ ID NO: 221607 - DNA, 288 bp, Glycine max
  unsure (1)..(288): unsure at all n locations
gagcttgaacaaccgctcacaaatggcggtgagctgcgatatgaatctggcaatataattcaagcgttccaggaaacctcggactagcctctctgtacggtggtctggcatctcaatgatagccttcaccttttcggggtctacctctattcctttctggcttacaatgaaaccaagcaatttccctgatatgaccccaaaagtacacttggcggtgttcaaccttaattgatatttcttatgcctttctaacaacttccgcaggttgactangtgttcttcctcgga

SEQ ID NO: 221608 - DNA, 251 bp, Glycine max
  unsure (1)..(251): unsure at all n locations
atgtctcctctacctctanaacctaccatcactcatagactcatctcatgctcccaggattgcttctctatctcgatcagttcttcgcaatcttctcacagaaatgctntcaaaactcttctaaaactggagctttctctctctagaatctctaaacatgcaagagctccgacaacttctcaaactcctcttcacatctgatctacgcttaaataggtgcctctgtttgagtaactgcgttatcgcaacta

SEQ ID NO: 221609 - DNA, 302 bp, Glycine max
  unsure (1)..(302): unsure at all n locations
tctagaagctttctcngggcttctttgagaagctttctcaacaagcctctttgagaagttagatccttatctatccacacccctctattaactaaattaacttccttaaaaataattaccgatgaaaataatgcaacaaataatcaaacatcaaacataattactaataatatatagatatatatatcagggtgttacacccctcgccgcggatctctcggaccactcctccctctccattctcgccatctccaatgcctacctcgccaccgatgaccactgaataaagatgatggaattca

SEQ ID NO: 221610 - DNA, 362 bp, Glycine max
  unsure (1)..(362): unsure at all n locations
catgagtgcagccatagaagaaatacgtgagcttacctgcggaacatgattgcacgagctaaaatatatatattcttaagatgcatctgaacctcgctcatgtcacaggctccataccatgtattctttttgtatagattagttcttaaactcattaagagatagcaagggacttaaattggctacttccagatgttttttttgtgacatttatgccttacctgaatctgaaataaaaattacatggcctggatatgcgtctctattgtgtattntttggagcgacaattaaatagtgagagagaaaaacttattcagtttcagcattaccatctatttgcttcccctgttttgaacatcat

SEQ ID NO: 221611 - DNA, 465 bp, Glycine max
tatcatcactaacagcagcccatcaagactagccgcgactggatcttctcaacaaggtattcacagccttgcatctggcacagtattaccattcatacaacacattgctaaccacaaaacataatatcttattacatcatctacacggaggattcatgctatgacacataacatactaccgctccagatgctagccaactctttatgcgccaaagatagaaatggtttgatcaactctcaacccggattaccaaagccattaaagtggattaaaatttaaaaatggacaggactggtccagtaaaagataagtttgggtcaaatggatttttgacccatacttaggaagaagaatatgtacacaaggtgaactgaggttacctcttcgtttgacctcaactgatggctctgctgtagcccgcctcatcaactcaagtgctccattgaagattttatacttcaact

SEQ ID NO: 221612 - DNA, 184 bp, Glycine max
agcttctagccaaatggacttaccttgaatatatttctttgatagcccctttgagcctatatttccctttctttgttttgaagctcattacaagccttaagtgaaaaaccatgatctcaccttaaccttaaggaattttggagctttggaattgttttgggaataagtgtgggggggggggggg

SEQ ID NO: 221613 - DNA, 464 bp, Glycine max
  unsure (1)..(464): unsure at all n locations
tcgagaatggcccanactccnctttccattgctgatgttagacttaaataggtggccttggtggtgcttgcacgcttagcgcgaatctggaccgcttagcgcgcattagtgaatttcgacttagtgcgcgtcttctcgctcagcggatggactcaagcggtgcacttagcaggatgacacctcgctcagtgaacatgcacaactcatccttcttccagattcttcctcgcgctcagccaaaggagtgctgcgctcagcggatggctcgctaagccagcaaattggcttagcgagcatatgaaaattaggcttcacaaacttgcctaattaactcgaaattgagagagaatgattattaattacacaaaatagcagtactaagtatttattaccaatatttaaccaaaaagtaattacaacactatcaaaagaccataaatttgaggagtttgatacaatttaca

SEQ ID NO: 221614 - DNA, 428 bp, Glycine max
  unsure (1)..(428): unsure at all n locations
agctntcctacaagtcctaattgacattntatactaggatcaactcactttagactccaatttacaataaacccaaatttagtttctctaaccctcaaaatctcacacttttctacctacaacattgtcatcctcacatttaacccctaagttaactttccccctcatccataccagttttctatcaacaatttcagcacacaaacatcacaaagcatcatcataaaaccctaaaacagaatgggtaaatttggctcacatcaaacatgtcaagtttagcatgctttcaacaaattccttcacaaataactaccataaggcataaacctagtagaactacccatcatatctcccataaacccaatacccacgaaattcatgtgagaagaagtctacccaaacctgaaattcgaagtcccacaacgtag

SEQ ID NO: 221615 - DNA, 473 bp, Glycine max
  unsure (1)..(473): unsure at all n locations
tactcagcttaacatcagaccacttccagggtgctggaactacttcacatggatttgatggngcctatgcaggttgaaagccttggaggaaagaggtatgcctatgttgttgtggatgatttctccagatttacctgngtcaactttatcagagagaaatcagaaacctttgaagtattcaaggagttgagtctaagactctaaagagaaaatgactgtgtcatcaagagaatcacgagtgaccatggcagagaatttgaaaacagcaggttcactgaattctgcacatctgaaggcatcactcatgagttctctgcagccattaccccacaacagaatggcatagttgaaaggaaaaacaggactttacaagaggttgctagggtcatgctccatgccaaagaacttccctataatctctgggctgaagccatgaacacagcatgctacatccacaacagagtcacactgag

SEQ ID NO: 221616 - DNA, 417 bp, Glycine max
agcttgttgggagtgactgaaactccatataattggcaaaggcccgttataaagcaagaaaccccagggccctattggacttctctgggtccactgggtgtctaggaggtgtgatccctgcaaattgatatatagcgtttgagatcagctgggccatatggatactcacctgagttaggatggcatagaccagctgacactttggcaggtcgaggtctgaattatggtcgctagagagaatgttgttgagcagcaacgtcatcccaatctgcgtaagggtagttatattagtgcacatgatccacacctgtctccctgccacgctccgagaaaagtcctgccccaaaatgcacaacagctggctgatggcctccttatcgaaccccgaggcctgactcctcctctggctaaactcat

SEQ ID NO: 221617 - DNA, 462 bp, Glycine max
  unsure (1)..(462): unsure at all n locations
tggagaggatgcttcaatggaggaaaagaaagagggagagatagatagatgtgggagcacgaaattgaaggaagaanaagggagagaagttgaactttgagttgtgtctcacaagactctcattcatcaaagttacaacaagtgttacacatgcttctatttatagactatgtagcttccttgagaagctaaagcttagctacacacacccctctcataactaagctcaccttcttgagaagcttccttaagaagattcctaaagaagctagagcttagctacacatacctctctaatagctaagctcacctccttgagatgagaagctagaacttagctacacaccccttataatagcttagcttacccccatgacaacaaacatgaaaatacaaataaaagtccttactacaaagactactcaaaatgccgcgaaatacaaggctaaaaccctatactac

SEQ ID NO: 221618 - DNA, 294 bp, Glycine max
gattcgccgtccagaccagatcgttcctgattcttagaagaaatcctgaagattccggattcctgataagttgatttctagattcaagagaagacatctagaagaatctagattcatgagaagattaattctagattcatgagaagaaatcaagacgcaccctagtcaagacttcacaagggaagtattgaaaaggatttttcaaaaaccaaacatagcacaattttgttgtacaaaagagtcttctcaaattgttctaagttaccagagtatttactctctggtaatccgata

SEQ ID NO: 221619 - DNA, 376 bp, Glycine max
cccagagcctataacccagatatgataatacatgaatagtctcatgactataatattatttgacctttccatttgtcaaatacacccacgccaatgttcacatcagttaaatcctttcatattacaacaataacaactctttacgtaatttattttgaagattccatatcgattattgaaccaatacagatcttgttaatgtaaaaggtgaaatgttttaacattgaacttttaactaatttagaaagccactttccacatatagaaaggtatatcttactttattaattcagactttaaccagggtaaaaatgactttctaagttaatgttagaatgaatgtaagtgatgaatggatattaagtgaaaatgaaac

SEQ ID NO: 221620 - DNA, 387 bp, Glycine max
  unsure (1)..(387): unsure at all n locations
ctgatggtacgctcagcctcacatgtcaggctatgcgcatattacanaaaatcntgggttgcagaaagagctaaacgcaaactgctacgctaagaccgagatgctcactggacctgatgcaaacctaccccccaagggcattggatagaagactccaagaagattgggccaaagatgcaagagaaagccctagggttctcatgagccttaaggtaaatttcgagcccatgggctaagtatgagcccacttatctttgtaaatgttagattaaggcttcattaattttggaccttgtatttatggctccataatgtaagtagggtaccctacacatgtaagatnttccagcccttgtattttagggtaccaagactagtttttgtatt

SEQ ID NO: 221621 - DNA, 418 bp, Glycine max
tcaagcttgcacaataagtaactaaatctgttttttacaaaattatttaactaactaacttccactaatatatagagtgaatactcaaaaggaagggatgggccttgattaggcccatctaatctacctaattaaactaattacacaaaacacaacccaaactcgtagccctattattcaagtacatagcttctatcttccaagcccaatttgattctcgaaatggaagaattggcctaatcttattattgcaaaattgaagatccttttcttatctttccagggactactcacatgctccatttggagttttgtagtgtcctataagccttgcacaactcagctaggtcaagtaagtacaaaaatccgaaaataagccacaattattaattaagctcaatcatttgcctaagacaaa

SEQ ID NO: 221622 - DNA, 409 bp, Glycine max
  unsure (1)..(409): unsure at all n locations
tctggtgggacatcttgacttgctttgcgatctgacattctccacagattctgccttcntctattttcagattgggaatgcctctaacagcacctttgccaatgattttcttcatgcctcttaagagcagatgtccaaatctttgatgccatatgttgacttcatcttctttggaggatagacacgtggaggagtaactggattcttgaggtgcccatacgtaacaagatgtcctttgatctgctgcccttcattagaacttcactcttatcatttgtcaccaaacattctgactttgtgaagtttacattgaatccttcatacacaactgactgatgctgatcaagtttgcagtcaatccctttaccagcagtactttgttcagactttgaagtccttcatggactaa

SEQ ID NO: 221623 - DNA, 413 bp, Glycine max
  unsure (1)..(413): unsure at all n locations
agcttcnattatgtatcttttaggacgatctattaacgtcattatatctcgtatttgaccgtcttagaaacacttttttctagtagtgacactactaaaaaattggatacaatgtcagtttagcaatacaaagacagtatgttgtggaaagtgaatacttttcacaacgaatctcttaccgtctttgtataggcataggtctatgacggttttttaactaaaccatcttagaataatttttttttataaaaaatacttgtatttaagatggttttttataggaacaccgtcttagaaattacaatttctaagatgattttaacctaaaatcgtcttagaatttataattttttaaaaaatggaaacaatcttttctaagatggtatgtgtagaaaactgtcctagaaagcatt

SEQ ID NO: 221624 - DNA, 440 bp, Glycine max
cgaaatgctgagagaagtgctctaaggtgaggtgtgtcgtttcccttggactacctctctatttatagctactgaagagagctttgggccttcgaaagcgcgcttagcgcgacacctcgcgcttaacgcgttcagatcgtgagcttagcgcgtgttgtaagcttagtgtgtgtttctgttggatcgcacgcttagcatgtggctcgcgcttagcgcgcgtaacggattctgcatcttcgagcttaacatctcgcttagcgcctatgctgctttgctcgcttagcgcgcgtgttgggctgggcctgctttaaactccttctttttcttccctttctggtgcctttttgcttaatgtaacttcaattttcggatctgcaaccaaaaattcaatttaattaattatctaacttctaatcacaaatgactgctaaataatttat

SEQ ID NO: 221625 - DNA, 324 bp, Glycine max
aatcttgaagctggcagggcagtatttatctaactttacagtcttcacaacattcttaatggtatcatacggtgcttgccatatttggctggcagcacctggcacaattcaagggcttgagtttgtttggtttgacttaccagattctattggtgaatttgttgtgtgtattgccttggttcttcaaggtgaaagagtgctgggtttaatctcacgcttcatgcaggccagagccagagcacgaaagggtaatcccttacttgcctttattttttaatgatcctttaatttcagaattcgcttaatttttaccactatctgact

SEQ ID NO: 221626 - DNA, 385 bp, Glycine max
tgaaaatgattcatgtgaggacacatatgtggttcaagtacttacaatacaaatgtacacgtctcttctccacaaacaaaagagagtgatcttcaatgctttcttactcatggctatgttttctttcagttggatcctgcacgatggctgcccaagtgctttgtcaatcgaattaacacaaaactggttatgatcatcgaaaaccttataaaattagcccaagcatgtcctattgaacgtgaaatttgattactttgtatagtttgagagaaagcgatcgagtgtaaccaagtatagtattaatgcccatcattgatatttacctactaataaaataaataacttcggcattcaagataaagaattaaattcctaacttacatat

SEQ ID NO: 221627 - DNA, 333 bp, Glycine max
aaggatgagttaaacatcaaaatcttcaactgtcttacaagaacttgggaaccaaaaatcaccacgattaaggaatccaaggacttggcatcaatgtcgatggaagctctcttcggaaaattgcttgcgtatgaacatgagttggttcaacaatctcatgcagaaaatacaaaaaagaaaaggaaacggattgctctcaactagttccttaaaggaagaccacaaagaagactctattgatgatgaagatggagagaatttgaatttgaatgacaagaagtttggcaaattcctcaaaaggtacaaagacaaaaaattatctaaaccttcaaa

SEQ ID NO: 221628 - DNA, 435 bp, Glycine max
tcccataaccactacatgcaattaaaaggtgtgccttaatgcttttctcctctggtaatcgaatacacagcattggtaatggattactagagatcaaacacgagttacacagcttcagaacatgaaaacctgcaatatgcactgtgtaatcgattacacataactggtaatcgattaccagtggcctgttactctgtgtaatcgattacacaatattggtaatcgattactagaggcctccacaacatactgtctccatttctaagcttggtaatcgattacacaacattggtaatcgattaccagaagccctctcacgttcctgatcccatttctaggcctggtaatcgattacacatccttggtaatcgattaccagaggccatcttaacttcctggcttcatttttaaaccttggaatcgattacccaccct

SEQ ID NO: 221629 - DNA, 368 bp, Glycine max
  unsure (1)..(368): unsure at all n locations
tatggtctgtcatctgacgggcttatatgagctcgacttctctcatgtctnctgtcatacaaaacttcgctcttacttgagacaagcttagagaataatcttggggagtatgttactatgagactctacttaatattgtctaatactgatctgcttatatccactttacacatcgtgtggctgcttatagcgaagaagctacctttctctgattttgctacttcgccggagttctaacgaatatgatcaattgcgcttactatgaaggttgttgcttattctatacgatgctgcctcgactacaacatgagctcatgggacagctctctctctgtattatcaacgaccaatgcttgtccttcttcact

SEQ ID NO: 221630 - DNA, 399 bp, Glycine max
  unsure (1)..(399): unsure at all n locations
agctttggtanagattgctgtcggacttatttattacatactaatgtttattgctaattactgaaaacctaatagtgatttatgaaatcgcctaaacatacatgttttaccatattttactacaattaatttttttacatgaagcctgtgggccatacttttaatatcaagcctattgctgaacttattgataatatggcaaagctctctatgacatgtgaagcatcataaccattttgaaagagtgatgatattagacaatatattgtattcataggctggataaagatacacacataaagggtaacggatactaaatgtggttaccaaataatcctatattttttaccctaactattttgtattcatgcgggatatattgacttgcgtagaactttc

SEQ ID NO: 221631 - DNA, 385 bp, Glycine max
atgcataagcatcaggcacaactccactaggcttcatattctcatacattgaaaacccttccctttgaatgccttgcttgaaaaagccgttcattaacacaccacaactatggtggttggcaaccaaacccaacctattcattgtgcaaaacaacttctttgacagactaacatcttcactcttgcaacacccataaatcaacgtagtgtatataacaacattcacagagaaaccaaactcttccaacatggtcaaaagccgaaaccctttcatcatgtcaccagcttcacaacgacccttgatataatcccaaactgtggcatcataacacattaccttgaatcattaatacccacaagcatatcaaacaattgactatatgat

SEQ ID NO: 221632 - DNA, 241 bp, Glycine max
attcgcattcttttctttctacatttggacctcagttttttgctctttaataaacgactcattattaagtatttttcatcgggctttgctttcactatgcattcaaacaaggggagctcttgattctcactataaggaatccaaggacttggcatcaacgtcgatggaagctctctttcgaaaaatgcttgcgtatgaacatgaattggggcaacaatcctcatcggagaatacaaaaaga

SEQ ID NO: 221633 - DNA, 444 bp, Glycine max
tggagatatatggcagtcggcgatctaaagggataaccctaatatgataatttggtcagcattgagaccactcaacataaaggaggagatattaatttctcaatcctacaatgttctgaattatatattatccaaagcctgaactcctgaacttatattatcccagatctaaacttataccacttcaatatagaatgtttcacattatatatatatatatacactaactattgtcccacagacaataaattaaaacataaagttttcattgaaaggtgtaacattcaatgttactatatataatggcacccggtactacgtaacgattaaaaattcttatcatttttaatgcaaacatatatttttgggtctaaatacatctaagctctaactattaaacaaatattacaaaacctctcacatataatctaatatatactacat

SEQ ID NO: 221634 - DNA, 430 bp, Glycine max
catgcaagcttgacaaacatgacattcaaagacggttaatatacaaaaacctgtctttgaaagcattgttagacatcacattcaaagacggttaatagcaaataacagtccttaaaagttttggcaaacatgacatttaaagacggttaatagcaaataaccgtctttgaatatttcaatctttaaagacgattattataataaccgtcgtaaaaaataattttgttttaacatcgttatctacaacgacggttcacaaccgtcggtaaaagcctttttttagtagtgaaaacactggtgttttatactagttcacttaatctgaactacatctagttttccttcaacccgagaaaggtttcactaatcaaacttattacaaaataagtattctttatatcattttttgctataacacaacaatctcaac

SEQ ID NO: 221635 - DNA, 445 bp, Glycine max
  unsure (1)..(445): unsure at all n locations
acctattgatactcaagcttgccattggccaaaaaatataacatcactaagagtagcttttatttatcttttattccatttatatattcctggtttttattttaattattaccgattaatttggaattgtatttatgttttatttttttagcattcttgaattttcatgtttctaacctttataattatttttctatttttatttaattttttttatatgaaatagcaactaaatgcgtattaagatttacgggacacctcatagagggatatctcatgcacgctcaattctcttaattttgagtcacagtttgcaaattgcaacccttgaaattataggatagaagaggaaattgattattaattcattgcgggtaatggatgagatattagccccacctagttaattgaanatataatgagcccaaactaaaaagaagaagca

SEQ ID NO: 221636 - DNA, 420 bp, Glycine max
  unsure (1)..(420): unsure at all n locations
agctngccatttaanaaggcattgntaatatttatttgctgaaagactctttgaaaggaagnggctaaagtcagaatagttctgattgttataggtttcacaactggggaaaatgtttctttgaaatcaaaaccaggttgttgatggaagccttttgctacaagacgtgccttgtacttactgacagacccatctgaattatgcttgactctaaaaacccacttgcaaccaattggttgcctattatgaggtttaggaacgaattcccatgtattgtttttgagtagtgcaaccatttcttcatccatagcatctttccacttaggatctttaagtgttgttttgacagttttaggcacaacatgagttataagcaaggttggttggagtctaggcttgaaaattccattttttgatctt

SEQ ID NO: 221637 - DNA, 466 bp, Glycine max
  unsure (1)..(466): unsure at all n locations
ctataaatctcagcttaagacctagtnttagcttggattgataattctgtaatgtccaacatgtntaatagatgcggcatttatattgaatatttttacactagacatgtgtgtgatatagtctgggtctttttcatgcttagttttaatcaaatgtgaagtgaataaagtattttgtttctctaagtttcctaagtacaagcaatagaacttacttcttgaaatctggatggaaccatcaaattaatcaattttttagcttggtaatcgagtgcctaagccaattttagaagagaaaaggatttgtagtttagaataatcgattgtcttcctagacaatcaattaccttgctccaggaaataatgaaaagctctatgtgcgatttcataatcgattaccacacatgataatcaagtacgacacatgataatagatacccacaaacacatagcctgtaaagtttca

SEQ ID NO: 221638 - DNA, 193 bp, Glycine max
  unsure (1)..(193): unsure at all n locations
atggcatcatcaaactttctatttctcgaagggaactctattaataggcctcctatattcaatggtgtgggttatcattactggaaaacccgtatgcaaatcttcatagaggctatagatttaaacatttaggaagccatngaaattggtccttacatccctactatggtagcaggaaatgcaactatataaa

SEQ ID NO: 221639 - DNA, 423 bp, Glycine max
  unsure (1)..(423): unsure at all n locations
ttttctcttacataaaattacctctcttatgtccacgattttatctttattaccctactcactatatttagagataaaaaccattgatatcaatcacgtgggaagagattcataatgaagggacttttaaaagctattagtaacatttaatctctaaccatgatcaattcgagctcgaaatcatgtcttacatgttccatgaaggacctctcattctttgtgggatgaggataatttattatcttgcttgatgtctataagattatcttgccttgtctaacaatcataatttgattntaatccttggatttggctatgtttctatgaaacttcgagacttattatttctttataatatatggctatcatgactgaacaaatatgaactatgctatatgactaatgttgttcatatatatatat

SEQ ID NO: 221640 - DNA, 368 bp, Glycine max
  unsure (1)..(368): unsure at all n locations
caaggcttttttgacttttttacacccngggaggagtggagcgctatccaaaagaatcgccttaatcatacgtccatgtttcaataagcccctagcttcatcaagcgtttgtaactttatcttacctcatgcggaagcgtctagaaattgcttcgagtgaggacgtaagccatcaataaagatattcagttgtataggcttattgaatccatgccttggagtccaacggagtaacctgcggaatggatccaaagctttgctgagagatctctctggaaactgacgaattgaaaagaactctgccttccctggcggcctgtgaatcagaaaggattcttaagaatttcttctaccttttccaagctttt

SEQ ID NO: 221641 - DNA, 325 bp, Glycine max
aaatcagaattcttagtggtggattatccaaagcaagccatccgccgtgtaatcagagccagaacccttcatatagaatgaggaaaaatgactatttattatgccgatatgatatagcctcaaatatcgctatactctacttgcatggtccagctctcgattatcaattaaaaaataggacttggattgacaaggctacaaagtaaaaggctttgttattgagtgagactcgtaactaaatgggtcagccttttgttgagagcatcatactgacagggtgcaaagaaaagaactgtgattgggactaactatatcacgagcctta

SEQ ID NO: 221642 - DNA, 298 bp, Glycine max
atagatacatgacataccatatgagaacgaccatcttatatgagaattaaaatgactaagctcaaatattggactaaattaacaaatcaagattaaaatactttcaatgcggattaaaatcacatttaacaatataatctctagatgtatcatatagaaaaatcaatatcttaaatgtttaatataaatgatcatcaccacaggcaacaccattgacgtcaccatcaccaccatcatcactgtgatcgtcactatgaacaatcgtgttgtcactgcatgacaacgacagtcatgttga

SEQ ID NO: 221643 - DNA, 134 bp, Glycine max
tagaaatcaagtgatacaaatcaagtgatcataaattcctttatatattgggagcaaacgcaaattttatatattatacattagttttgcttagaatccttcgatattccatgaatatgtatctgtctatctat

SEQ ID NO: 221644 - DNA, 413 bp, Glycine max
  unsure (1)..(413): unsure at all n locations
gagctgaaattttttatattatgctactacttttnttaannagnnngcacaaaacagactgtatggatttggttgattggtgtaatatttgagcccctagaaaagtgtaggtttcataaacagtacatgggaaaaagtataaatgccgccactaagggttaattgggtaaaaaattacattttatttctgacttgctgaccatcttcttggatagagtttatgcaaatttgcttgagtttaccattctacccaagtaaatttaaaaaagagtttgacagcaagttggctgcctgtacttataattgtaaactgttggaatttatgagtttttgagttgacttgaaagtttgattaacaattaacatgcagttttaaaaacccactacaacactgatttatttatgacatcctt

SEQ ID NO: 221645 - DNA, 294 bp, Glycine max
aaaaacaaccaccaatccacaaacaaacaaataaatattgattttcatgaaagaaagagagagaaaccttgttgtcggcaaaaaggaggaggtggttggggacagccttgaattggtggtagacgggacccaaaacggtggttacagtgtcttccacggttccaacagcagatctcaaaggtcccgagttttgctttgcgaagctgtagagattccacacacacacaaaggctttaattgccgcaatcttcacaaacccaagatgcttcagttcttcttgatcactcttggtct

SEQ ID NO: 221646 - DNA, 365 bp, Glycine max
  unsure (1)..(365): unsure at all n locations
aacctttgacaaaaaannggctaacataacaccttgtggtgacaaggagactgctttcgagccaagtgacaatgttatccactctgtcaaactccatcctacccatgggtttatatgggagagggaagaaattgatgctgtttcctctgaagatggagccattccaccaactgggtggaatatatatgaagattactatgcctgaggccgctgcatgggccaagattacggcttatatggccgaaaatagattaaatacggcctttgaggctgaattccaacaaaatatggcagttgaagccaagatcgaaaattttgaaaacaaaaaaacaaaggatcgaagactggactgcatttatgatgat

SEQ ID NO: 221647 - DNA, 417 bp, Glycine max
  unsure (1)..(417): unsure at all n locations
nntttgaattgttntcatcttgcactcgatgagaaatattctatgaattactcatgagttttctcaagcattacaaagaagtgatcaatatattataaatgctatgaaattagttattgtgtccaaacaaaggttacaaacaatgaaggatgattgacattctctgctcggtgatgtttcattattttgtgaaaaacacaatactattgttcaaaatatgaatgacacttttcaaacacaaggaaggtcaaggcgccatatggaaaagtttataatttgcatcatttttaaaaattgttttatcaaatgattgatcgacaacttcaagagttgaataatcgctctacaaaagtgaatattgagttgcttctttgtgtaacttgcttaaatctaaaaaaattattttctacatttgat

SEQ ID NO: 221648 - DNA, 349 bp, Glycine max
ttgcatgcaagcttgtacaaatataatgtgccataatctatatccaagttatatagttatagtgggatctttttcactcgcactctcattcttcctcagtcttattttcatccaacctaagtgttctcacgaagcttgcttttgtttgaccgatcccacttttttcatccttctatccattttttgtttccttgagtggcaactcattgaaacactggcgacctggacctatcgatggctcattggagcgcttacatgacaagcatatttcatatcaagggtgggagggtgaagagagaatgactcctccagggtttgattctgttagggctttaacacacttggatca

SEQ ID NO: 221649 - DNA, 403 bp, Glycine max
ggacctatgaaactaagcttgactacttaggagtctggacttagactaccttggatacttctatttgctcgcttaaaaaagcaaacggtcactatttcacgcttgctattgatgtgcattatgaatctttactagtctatttcaagtgagcccctaataacgattggtgataccaagctagtgtgaatatgtaagattatgatgcttaaataagcgaggtctatatgattctgtatgtgttatatgtataattagacctgggtaaagcactgttcgggtcaaggaactttgattagacatctatcactactacttattactgttacgactacattgaagtaagactatgtattaatcaatttggagacggattatgtggattcgtatataccaatacattcag

SEQ ID NO: 221650 - DNA, 433 bp, Glycine max
agcttcccctaaatgacactcattgtaccttctagtttctaactcagtctcttttaaagtcatcctcactgaatacaaagtgacttgcaacagtttggtgagtaattaaacacctttttatatgccaaattttgatatcatatagttatctaatatgaatttcttttgtatttcaggatgtgtcaagtaccatgtactcatttatgaaagctgcaagattcacttatctgaacttggaagggacagagtgtaaaatagtttataatcatcatatgaagaccgcaaaaattggaaatggatggaggacttttgcacaaacatagaatttgcttcctggaacttgaattatatttgagttcccagatgcaacttctaactttgttttattctggctctgtttggaattaaagtacattactactttcatatatta

SEQ ID NO: 221651 - DNA, 465 bp, Glycine max
  unsure (1)..(465): unsure at all n locations
tgtatgaacaagtntagtaatgacgtatatggaagtagtaatccatgtatgaggtctatgtattcttctattacattgatgaattgtgttttaggtccctatcaaattgcacaaggtccttattaaattggaaaattttgtatgaggtctctatcaaattgcagaattatagtctaataacaatgacattaacaaacttgtcataatgtaacaaaatgttaggacattaacaaacttgtcatatcaatgacattaataacaatgacattaaaaaacttgtcataatgtaattactaagtaaagagtattaaacatgattacatggataaagttaacttatagtcatgtggtacaaacaaaaaagccaaccaaaatgacatcattacatggataaagttaacttaaagtcaatatgaaaaaaccaacaaccaanataaataagtcttcttcaatgttggtttcaaa

SEQ ID NO: 221652 - DNA, 419 bp, Glycine max
ccatttcctgcgaaggctaacatttggaaagttagttttaccaattgtatgctactctttaaaacaaaaatggcatacaacctcctcccataaatacaaacatcaatgtaaatttaaagcaagcttatgcacatatttccttacgaacgttcacttgcacaagacattctatttaactaagaaaaatgcacccatatacaatcaaggcagcttcgttacctagattatttacatgtacttccaaggtgtatttgttacctacatcacacacatttcctttgctaaattcacatacatgcatactctaagcactttggctatcgaaaattgcatacgcgcacatcctggtatttctaatacctatacatacacaaactttatgataaatcttgactatctgcacaataaggtgctacatt

SEQ ID NO: 221653 - DNA, 445 bp, Glycine max
tactcagcttctcaagaagcccgaggaagcttctggaggaagcctcttaatgaagcttctatagaaagctacatgaagctgtctcggtaaaaacgctgcccagccttcgttaaccgttggatcttctcgaaattggtctgcaacttcacaagacacttgtccatgatctgaccgttgggatctatgagaagatgtctggagtgtgctataagcctcttaatgaagcttatggaggaagcctcctaatgaagcttctagagaaagctacatgaagctacctcggtaaaaacgctgcccagccttcgctaaccgttggatcttctcgaaattcggtctgcaacttcacaagacacttgtccatgatctgaccgttgggatatattaaaagatttctggagtgtgctataagcttccgtctccgagagcatttcttatttaagcactt

SEQ ID NO: 221654 - DNA, 391 bp, Glycine max
  unsure (1)..(391): unsure at all n locations
agcttgtgtgttgttgctttgggtcaaacttgtgtttgagcatttgatttatgaaaacaaacacacctatagaagtcaataatgtttagatgggatatggagttttgaacttataatgttttatgttgttttgaagtagacattggagaactttacttttatgcttttccttttcttagttgttcacaatattttcttcagcgcttatcctatggtgtttttatgtatttaacagagggatcatgccaaaaagagattggatagtcatcactttgaacctaatggaagtagcggtaaactgccctgttatctgataatatatttagaaaacttttctgtagtcagcattatatttttttcatgcttgatgtttttaactgtcgngttttga

SEQ ID NO: 221655 - DNA, 417 bp, Glycine max
  unsure (1)..(417): unsure at all n locations
tgggatattnttactatatatgggagtgtctgcgttgatctctacctgtttaaanatgtgataattcactcatcatgtgttgttatgtttggatcatgtgatgatcttaaaccttgtgtttgtgagagcaaatgactatgtgaattactttaagaaaccttgtgatggaggactctgagacacaatattttgataggatgtaacattggaacaagagtttttattttaattgcatgacgtatcaaacatgtcattttactttatttgataaacttgaacagtcttgttttaagtcataaatatctctaagaaattttatttggtaacaagtgaagcgaatgtgaacattacccacgtggactgatctacgattttattgaattaaattgagttaattagattccggattttatatat

SEQ ID NO: 221656 - DNA, 424 bp, Glycine max
  unsure (1)..(424): unsure at all n locations
ctgcagctgccatttaaaagcattgtaatatattttgttgtaagatctcaatgaaaggaagtggctaaagtcagaatagttctgattgttataggtttcacaactggggaaaatgtttctttgaaatcaaaaccaggttgttgatggaagccttttgctacaagacgtgccttgtacttactgacagacccatctgaattatgcttgactctaaaaacccacttgcaaccaattggttgcctattaggaggtttaggaacgaattcccatgtattggttttgagtagtgcaaccaatttcttcatccatagcatcttttcacttangatctttaagtgntgttttgacagttttaggcactacatgagttataatcaatgttggttggagtctacgcttgaaaattccatttattgatcttgtt

SEQ ID NO: 221657 - DNA, 434 bp, Glycine max
  unsure (1)..(434): unsure at all n locations
gacctataaaactcagctanagtcctagnttagttnnggatgataatttgtattgttttcatgtttaatagatgtgtgcatttatattgaatattgttacactagacatgtgtgtgatatagtctgggtctttttcatgcttagttgtaatcaaatgtgaagtgaataaagtattttggttctctaagtttcctaagtacaagcaatagaacttacttcttgaaatttggatggaaccatcaaattaatcaattttttagcttggtaatcgagtgcctaagccaatcttagaagaaaaaaggatttgtagtttataataatcgattgtcttcctagacaatcaattacctcgctccaggaaataatgaaaagctctatgtgtgatttcataatcgattaccacacatgataatcaagtacgacacatgataata

SEQ ID NO: 221658 - DNA, 387 bp, Glycine max
  unsure (1)..(387): unsure at all n locations
agcttagagtttcttttataaaaggnnnattattcatgcctaccaaacattagagaccctgagatgctatgtgatgaatgcctaataggcaagcaagctagaaattcttttgtttcaagcatacctacaaaaactgttaaaccacttgaagttgtgtatactgatgtgtgtggtgcttttgaggaggagtctctcggtggaaacaggttttttgtaacctttattgatgatctcactagacaggtgtgggtttatcctattaagaagaagagtgatgtgtttgacactttatatatttggaaaactctggtcgaaaaatagtgggagtccaaattgaaagtgcttagatcagacggtggacgagaatacattgtcaatgaaatcaaa

SEQ ID NO: 221659 - DNA, 413 bp, Glycine max
gacctataaatactcaagcttcattacttctcacgcttctgacgatgaggaataaggtttttatcacgtccctcagccacaccattctgaactggagaaccaacatagtagattgggccacaaccccatgctcttgaacaacattcgcaaatgaacccggggctcgtccatccctctgtgtatctaccatatgactccccacctctatctgacctcacgacctcaatatgctttccacattgtacctaacttcagccttaacaaccttacaggcatctaaagcttcatccttacaacgaagcgagtacagatacatatatcgtgaataatcatctctcaaggcaatgaagcatttcagactatctgcacccatgcctgacaacacacgtccgatgcacgattcctaaaaaata

SEQ ID NO: 221660 - DNA, 418 bp, Glycine max
  unsure (1)..(418): unsure at all n locations
ccttaagncacctgcggcatgaagcttaagttctgcttgcngannntttcttatattttttataaagcaaccaccttcaaattcatgagacagtttggcaaagaaagcagtagcaagggcagtcttgcctatgccacctatgcccaatattccaagggttctaacttcatttgacccaatttttagtgatgattcaatctgttcataattgtcctcaattccaaccagtccttccagtttgtttgggtatcttggagtcagtttttgcaaaacatccccaacaatgttcttaaggaattcagattcaatcgtaccatatgaaaaggggaaaaaatgaaataaatgatgtattgtaagtctaacaacatcaaaagaanaagaaaatagaagtccacacatgattgattatacatcatct

SEQ ID NO: 221661 - DNA, 441 bp, Glycine max
  unsure (1)..(441): unsure at all n locations
ctggatctgtngttcgaggaatttgatgttttcaacgtatctttagcaattcttgacacgattactgattcgactgatcatggtagagagctacaaatagttcagagaagactataagataaattggcagataaaaaatttctcctcgttttggatgacgtttggaacgaaagcgggcctaaatgggaagctgtgctgaatgctcttgtttatggagctcagggaagtaggatccttgccacgacacgcagtgaggaagttgcttctatcatgcggtcagacaaacactggctggggcaattacaagaaggctattgctgggaattgttcgcacaacatgcattcagagatgataatcttccacgagatccagtatgcacagatattggtaagaagatcgttgaanaatgtagaggacttcctctgccttgaagtcaatgg

SEQ ID NO: 221662 - DNA, 412 bp, Glycine max
  unsure (1)..(412): unsure at all n locations
agcttcgactattttctatctaggactatttatttacgtttttatancncgnatgggaccgtcttaaaaacactcttttctagtagtgacactactaaaaaattggatacaatgtcagtttagcaatacaaagacagtatgttgtggaaagtgaatacttttcacaacgaatctcttaccgtctttgtataggcataggtctatgacgggtttttaactaaaccatcttagaataatctttttttataaaaaatacttgtatttaagatgggtttttataggaacaccgtcttagaaattacaatttctaagatgatcttaacctaaaatcgtcttagaatttataattttttaaaaaatggaaacaatcttttctaagatggtatgtgtagaaaactgttctacaaagcat

SEQ ID NO: 221663 - DNA, 290 bp, Glycine max
  unsure (1)..(290): unsure at all n locations
agctataactctttcttctctcacagnctttatatgtgggagccaatccagtccttgagttcggactctcagccacttatgatagccgccgatgatcccattactgcttcccctaagctctctgtcctttcttcacgccgcatcccatgccttgcgaactccttggagtaccctcgcgttgtggtcactgaaacctcatgcgatgaaaagcgtgatgctttcttttgatggcactcctaattaagggacatactttgatggagatcgaatctatttttatgctcttttta

SEQ ID NO: 221664 - DNA, 380 bp, Glycine max
  unsure (1)..(380): unsure at all n locations
tgtccttggttnanacatgagtgatatatgagttatgacttgtccgattcaatccgggccaaactgtatgaaggaaatagtgcgcttccaaatctgcactttatgcagaattttgctgtggaaatgtgcagcacaatcttgcataagtgcagaaaaatgcttgtgtatggttggctgtggaaagggtagtacacatggggttctggacattttctagcagatcccaacggtcaaaatgtatgcttatgtactagagacttccagtaaaattttcgagtcgatccaacggtttacgacttggaacaaagaaaatgttactgtgatatttgtatgtgaaaagctgtgattatggttcgtgtattgggcaaaattttctgcct

SEQ ID NO: 221665 - DNA, 353 bp, Glycine max
ttttggggagaaagagatgagtgaacgatagaacaaaacttgcatgtattctcttgatttcaggattgtcatcatcaaaaaaggggagattgtggaagcaatgttttccaagtttattttgatgatgccaaagactcaagtgaagaatcaagagtcaagcaagtttcaagaatcatagagtcgttcaatcaaagcatgtttcaagaatcaggattaaagtgaagattcaagagaagactcaattaagataagaattaaaagagtttttcaaaatattgaataacaccactttgctcaagagaatttttcaaagaaaaatcttctaccaaaaagtttactctctggtatcgata

SEQ ID NO: 221666 - DNA, 447 bp, Glycine max
tgtaagagcttggtcacttcctctttcaccacatctagaatgaaggggttgagtcgtcgctgtggctgcctaactggcttaactccatcctctaaaactatcctatgcatgcaggtagatgggctaataccaggaatgtctgctaaagtccatccaatggctttcttgtgcttcttgagaactagcaaaaccttctcctcttgctcagcagcagggggaaatgatcttttctggttgcctggttcagcctcctacaattaatgcagactcgccagctattctacactcttgtgggaataagctcatccctctcattcttgatcactatgaggcctatcttcttaggaaccacttcgaatggactcacccactggctgtcacaaatggtgtagatgattccaacttgcaagagcttggtcacctcctttttcaccacatctagaatga

SEQ ID NO: 221667 - DNA, 425 bp, Glycine max
  unsure (1)..(425): unsure at all n locations
ggaccttaagcaccgcggctgctgctttcaacacaatatatattnggctttggctgccggagctccgctcccaaacaagccgggaacgtattatattctacctcctttcctttttataagaaacaagttatagggtattatttaaagttaattaacactcattctctcttctcattagaagaaaagaaaagaaaagaaaagaaaaaccctcactttatgaatattgcaggactccaaaggtgtggaaagagttgcagattgagatggataaactatttgaggcctgatttgaagagaggaatgttctctcaacaagaggaggatcttataattagtcctcatgaagctctaggaaataggtttaattaaatacatagaattacaagttgaatgatgatttctattagacgatagtgaaaatcatt

SEQ ID NO: 221668 - DNA, 452 bp, Glycine max
  unsure (1)..(452): unsure at all n locations
nntgaaatggtctccatatacacactacggagctttctctttcttaatgcttcctactgaatacgtctcaatatgaagaagataaagcctttattagattatcatatatatacgggaatcccgcatcttctttgatcattcaaataaatgcttaaacacttgtattctgattaacccggattgtgagtaaaacaatattacttaaataactacctatcanaaaaatattaacaagaaaaaactatctataaggaatgaatttggacatgtttgagcctgtttgttctagccaaatcctgcgtttcaatgtgccttcaatatcaatcctccctccacactggattggtgttgaaagtaacaaaacggcaaattagacacacccttaataactgatgtgtcttaaaaccctctaatccatgtatttactggtaatttcttaatctaaaaaatta

SEQ ID NO: 221669 - DNA, 122 bp, Glycine max
  unsure (1)..(122): unsure at all n locations
ttacaaaccaggtatctttgcaaatttgcacctcttgctgctttcanagcttttttttccgaaaacgcactgaggcgcgctgagaaaatctggccctgggcaatggaccccaaatatgcaca

SEQ ID NO: 221670 - DNA, 186 bp, Glycine max
aaagagttctgctatgcaacttcctatccttttgagcttctatatctgctcgatttcttcctctcactatccttcattattgaggagcaatccacaagatcagccattaacattcatactccatattatcttcctcccggagaaaaatatgccacaacgctggtttccccaaatcttgattcttcg

SEQ ID NO: 221671 - DNA, 207 bp, Glycine max
tgagttaattgaaaataggatgtatgttaattatataatttagtgaatatatagtttagatatgggggtaaaaattaaaaatataatttaaatgtgttattagatatataatatattataatgaatagattagttagagatatattaatttattaagtgtaattgagagagttagataagtattagaaaattgattttgagatagga

SEQ ID NO: 221672 - DNA, 430 bp, Glycine max
  unsure (1)..(430): unsure at all n locations
agctntacgatagtgggtaagtgcaatcttttttgcccagccatcaattatttaagccacatcctgtttgagagaagaatgatcagatgaacttcaaaacctttcaaattatcttgatgtcaatacatgtttgctaaaagaatgtcctagtcaaaacacccaatatgtctgtacaagaggcctatcactagattttattttattttagatatgaaaagaaatttattaaagagaaagggaaaaaaggtacaagagcaaataataagatttccaaaattgaaaccattttttttatcagcaaagataaatatttatatatagataaatgagtaccaaaattgaaaccatgaaatgcaaaatccagaatgttcaagataaacaaaattagtggattctaaaatgatacagaaatttataagcagtaccttgg

SEQ ID NO: 221673 - DNA, 447 bp, Glycine max
taattgatgatatatcaaggggcataaagtttaaatcacatatctattaccaaaacaataaaataatcacctatatgttggtgagcatcttgtcataatgcataaagaatcataagttataaactacatatgaatcggacaaaaatgttaaagaaattaaaactcaccaacatgttgaaatttagtagattcatgattcctaaactcgagaaaaccacaatgagatgatgagtgtttttgtctcgtacgagatccatatctcttctacttcttatcattgaagactctctttcgatcccataacattgattcagaggcataaaaatcaaccttagtagcactaagcacctagaaagaactgtgttcacgacaacaatcttagcacaaaactaaatcaaaataaaatttgaatagcaaaaaacatccacaagattaacacccaaattc

SEQ ID NO: 221674 - DNA, 392 bp, Glycine max
ttgtcgcaaaatactaagactctttatgaccacgccttaacggcctttttgctttatcgataacatggaccgttcaaaagcataaaatcaacatgtaactttaccgcttttgcaaaaactacgtagggttgatttcctcatcgcaatggaggatacgtaggaagcaaagccccatttttgtcgaccaccccaaaagatcgctaatgggccaacgccttaacatttctctacttttaaaaaccaagagatcgctaatgttcccacgccttgatgtttctctcctttctaaatcaaaagatcgcgtaatgggccaacgccctcaaagacctcttcgttcattaaaatatatcttgcgaaagaagaaaaaacaacttaaccaacgcttaggtctc

SEQ ID NO: 221675 - DNA, 438 bp, Glycine max
tataataactcaagcttaagctgtccaattgctccacgattctggaaggaaagtattatgtctgttttctggctaacaaatgagcacataccactaacccttgtgacatgtacatatttctgattccaggccatctgggttaccaagttgacccacgcatccagtttgccttcaagctttttactttcatatgatgcatatgggtatcgaactacctcatgcactcccttaatgactatggcatcatctctggcgctaaactgctgggagatggaggccatcttctcaaattaatatttggcttcagtaagagacatgtctccaagggcttaaccactggagcaaatatcatacttctctccatatttactgagccttcactaaaatatttgagaagaaggtggtcttaaatctgatggtgagcgcaactgacacata

SEQ ID NO: 221676 - DNA, 345 bp, Glycine max
  unsure (1)..(345): unsure at all n locations
atgcttcattgagttctcacaaaacatcatccatgccgcatcctttaagggcaaagcagatctctgatcataaaatgggactacattttgaagactgtcgtaatacaccaatgccaataactcgtgtatctcacactggaaatatagcaaatgcaagaaagaagttaaatatataaataaacaataatcttagcaaggcaatgatgacatgcctcaagattcttagggtgtaagcattcatgtaaatgtcgtaagcataataaagtgcaaatccataacantaaatcttgaatatacagcatantaaattttattgcacattctactagcctttaaaatattatc

SEQ ID NO: 221677 - DNA, 368 bp, Glycine max
ttatctatgcaccgggtaaataacatataatatgcccgtatcttgggcatatgctttacgtaaccctaagaaaactttataattaatctctttacgaccatatcgctgtaatatgggggttctcttgctagggtttccccttcttttatcattaatggtttagtctctctttatattttttttcctttaaggattttgcatgaagccttcatggaagcctaaactgctttgaatcaattcactagtttaaggtttcttttatggatcttgagctctggttttaaattggttttcaattcttggtgtactctctatctaaatgaatcttaatatttctctcttgaatatggaatatgaatcctattaat

SEQ ID NO: 221678 - DNA, 410 bp, Glycine max
  unsure (1)..(410): unsure at all n locations
agcgacnggctttaagcagatttgaagattgattagaaagtcttgaaatttgcacctacttgatgcaaagaggagtgtttgaacgtgtgcaaatgtgtgcatcagtagctttgattctttattttttattttcacgtagttgctgaagtttagctagttagattctattttctgtttttcagtctttaactcaatctatttaagcaatatctgatgaaatcaataaaagtgtgcattttttttatttacaatattcagttctcctcttctttaatatatctccaacagatttattttgcacaagagttatatttaaaagttttgttggatgggatattgttatccttgagtaggggttggggacctacaaacttgatttcaatgctgaaaatttgctttgacagctaaat

SEQ ID NO: 221679 - DNA, 453 bp, Glycine max
  unsure (1)..(453): unsure at all n locations
ctataaaactcagcttgctcataatcgtgtcagttattggaccatgctatgttactcttgnaactttagtcacgatgttcattcttcgacgtgagggggtgagttggtgatcccacatcaattaatgatatagctcaaatagtgtatagaagtaggggtagtcctcaacacatcaacaaatgatatggtctgaataatgtatataagtggagggtaattctcatttcacgaacaagcctttgagattgagtcaagctgaaattgctattctagatgttgtctaagcctatcttaatggttgttgtcaaatgtcaagtttatcggaccattgcagatatttagtgttgaaacttcagtccgggatgtccattctttaacataaggaaatgagtttgtgatcccacatcaattagtgacatggccaacaatagtgcattaattacgtgtacggga

SEQ ID NO: 221680 - DNA, 416 bp, Glycine max
agcttgcttatttattctgaaattgagaatattgattattaaacacacaaaatggaagtactaggtatttattacctatacttaacagaaaatacttataacactacaaaataaccataaattgggagagtttgatacaatttatacaagttttatacacacaagttagtcattttcactgactaacaagcatctagtagttgcttggtttgtggtctcaacccatctataaacatattcaattgaattggctccgagaacccatgggtgacaatctttttcaataaacctctaaacctctccaacacttcactcaaggactcgtcaggcaactgatgaaatgaagagattgcaactttcccttctgcagtctttgactctgggaaatatttcttcagaaactcttcaacaacttt

SEQ ID NO: 221681 - DNA, 388 bp, Glycine max
  unsure (1)..(388): unsure at all n locations
tatgatacttggtaatgttntcttactaattggggttatntgattctttntattaatttcttttataataaactcattccttcgcaattttgtaccgtgtggttggtacttgtgatgatcgcaaactcttgttcgtgggagcagaatgacaacagtagagtacgagaagtgagattctttcgtggagctgccgagccgacatgatgacgttgggattattttgggagagagttgtgttttgttaatcaactcctccatagctagttctataattcttttgttgaattgaggatgtaaatcacaaatttattttccattatgtgaatgatgtgtactgagttactatacctatatatatatatatatatatatattcatttacttatgt

SEQ ID NO: 221682 - DNA, 409 bp, Glycine max
  unsure (1)..(409): unsure at all n locations
agctncaccatttttatgacattgntaatgtattttanctaaattatntctttttccggatctntaggctatatttggtttacatgtgggagctccaaactcagtttggagaagaaaatgagtttgacatcatgtntgatttctcttcaaaagtatgtttaacgctaaaatttagcttgaaaatttaatttgggagaaacaattattgagatacttttgcccaaacttaagtttgcaaattgcaatcaaaacatgtacatgattttaatctataaaaccctttaaattttgttgttacccccacacccaccccacaaataggtacacgttaaagaggactatgattggatgaataagttgaccataatattaacatgtacaacattcagttgttaaagaacaaacttat

SEQ ID NO: 221683 - DNA, 437 bp, Glycine max
  unsure (1)..(437): unsure at all n locations
cggtaagcttgttatacttatattctctctgtgagtgttcatttatatttactagcttatgagtgcgataactcactctttgtgtgttgcttgctctttgaatcctgttataatctcaaatcttgtgtttgtgtgagcagatgattatgtgaataactttaaagaatcacactgagacataatgctctgattgaatgtaacattgggacatgagtttttatttcaattaatgattttattttattctattttatttcattgctcaacatgagttcttttgttaatttcgatggccttggtttgagtcaaatattgctttaataagtcttatttggtaataatgaagcgaatgtgatccttttacccagtgaattggtgtacatgatntaaataaagctggtcaaataaattncgattctatatatatttattatatg

SEQ ID NO: 221684 - DNA, 415 bp, Glycine max
agcttatcattatatcttatacttagtgttatttatatgggtttgggaaatgaataaggtttaataagagacaatgaactctccaaatgaatgtaaatataaggaatagctaactcttttatgagttgaaggattaactagctcaatatgagttttaagaatgactaactcttcatgagttgcagaattagccggcttaatatgagttccaggaatggccttcatgagttagggatgattgacttcttcaagagttacgaaataatattttgagtacaaatacacacataaaaggccttagtatgaagtttataacatttccttgtttatcattcttgctcagaatgctatgcggttgtgaatattattaatgaatacggagagaggtaatacttatgaatccttacgtgtaacg

SEQ ID NO: 221685 - DNA, 478 bp, Glycine max
tacggacctatgatactcagcttccatatgcttgtacatggtctctgtggtttcctcttattaagcatgcaatgtctagaaatatctccttttgagaataatctaagccatcataacttaattttaatacattatgaatttccatatttggaaacttttggagttttctcaattcacactcccatgcttgtttacttcttgaacgaagacttgcaccaagaacttttaaagcctaaggaatacctttgcaataggaaattgcacttcttgatagatcttcatatccatgtctaggttgtttttctcgaaatacagataagcagaaaagcttaagagagtgatgaatgctcaattccttgaccttatatattttatcaacttggctgaatatttgcttatttcttgttgtaacaatgactctactttcaagtcccaagagatcaaaatcttcaatcacatttctaggtgtctgaagatc

SEQ ID NO: 221686 - DNA, 402 bp, Glycine max
  unsure (1)..(402): unsure at all n locations
tggactaatacatttgctacccaagtttatggtcttgcagtgaagatcctcatacacatcttatggagtaccctatcgtctgttccacatgaaaaccccttgatgtcaaggaagatcatatctttctaaaagcttattctcattctctggagggagtggcgaaagattggttgaactaccttgctccctggtccatttccaactgggatgaccttaagagggtgttcttggagaaattcttccctgcatctaggaccactgccatcagaaaagacatttcaggcatcaggcaacttagtggagagagcttgtatgagtactgngaaagattcaagaattatgcgccagctgtcctcacaccagatatctaacaactcttttgcagtattctatgaggactta

SEQ ID NO: 221687 - DNA, 374 bp, Glycine max
  unsure (1)..(374): unsure at all n locations
gactctttttatttgaattngaatttcaacgttcaaagacactggtaatcgattaccaaaacattgtaatcgattacagctttttgaaattaattggaacgtgtgaaatccaatttgaaaactttttcaaaacaattttgctactggtaatcgnttacaaaaatctggtaatcgattaccagagagtaaaaactgtttggtaaaaggttttgtcaaaaattcatgtgctattcaaagttttgaaaaactctttaatacttatcttgattgagtcttctcttcattcttgaatcttgagtcttgaatcttgatcttgattcttgagatctttgaaccttgaatcttgaattcttcttgattcttatcttgaactc

SEQ ID NO: 221688 - DNA, 441 bp, Glycine max
  unsure (1)..(441): unsure at all n locations
tagacgactntgattgagtcgagaatacgttattatttatttggacaagtctgaatatgatgtacaagaaaatgaatgtgagcctttttccactctgaaagtcttgtaaaaaaatgtcttaaaaatacttttaattaatatttgaattttatttttccttattagtatatatatgctatgggtagagggtgtcacagcccccgactggtctccctatgattttacctggtgagagtgacctaacttaccaatgtggtttgtcttgtcatgtaatcctaagtgcccgatgagatttttcactgacatagtaccacattgcatataggattgagtcttagtatatttattgcataacgctcgcgtattgatcgatattcattgggtaggagatattgtgttttgatcctcgagtacgtgaatgatgtgaaaatgtgtgagacg

SEQ ID NO: 221689 - DNA, 377 bp, Glycine max
  unsure (1)..(377): unsure at all n locations
cgcttccttgagaagctagagcttagctacacacacccatctaanatttatgctcacctctttgagaagctttcttgagaagctagagcttagctacacacccctataatagctaagctcacccccatgacaaaaaaacatgaaaatacaaaaaaaaaaatcctactacaaagactactcaaaatgccctgaaatacaaggctaaaaccctatactactagaatggccaaaatacaaggcccaaaataagaaaacaacctattctactatttacaaagaagagtggacccaaccttggcccatgggctcaaaaatctatcctaaggttcatgaaaaccctaaggccttctttatcaaccctagcccaatcctcttgg

SEQ ID NO: 221690 - DNA, 469 bp, Glycine max
  unsure (1)..(469): unsure at all n locations
tgaagaaacttgaagaaagtttgtctgttacatgcgcaactctcttgagtggcattngtattgattggtgtattgtgtgttgcatcttagtctctatcatntcgtatgtgcatcatcatgtataagtaagaagaaaggttctaaagttagaaaatctattcaatgtttaaaactctctattttaatttattacaagttaatcataatcgattacattagtgtttgtagcttacagagaagtttctcgtatcagtttaatcgattacaaggtaatcataatcgattatacaattcagatgagacaaagaatggtttttcaggagtctctgctctaatcgattatcgggtgatataatcaattacttctctcttaaaagtggttcaaaagtgatcaataacactttaattgattacatccagaatctaatcgattacattgttctttgaaagtttctagtttttgggaaag

SEQ ID NO: 221691 - DNA, 308 bp, Glycine max
  unsure (1)..(308): unsure at all n locations
gggggttgagataaaaaataaaaaactattcccccaannaaaaannctacttctgatttaatgcaagttccaagttcccttaaagatagatttctaaaagatgattcaaaataaccaatctgaatgtaaatgtaaagcaccacataataaaagagtttaagggaagagaaagtgcaacctcaattttatactggtttggcaaagtccgtgcctacgttcagtactcaagcaaaccacttgagattttccactccctttgtaaaaatccgtttacaaagtctgaaccacacagggacaacccatccatt

SEQ ID NO: 221692 - DNA, 282 bp, Glycine max
gccgtgagtcgctagatgggaatcttatgagtagggctgtagagagagggtgaaggttaagccggagctgatggaagagggttcgagaagttgcggtggccacgacgacgatccaacaacttatccttctggagctaggcgagctcggtcgcctgatgtagagacatatggtggagcgccttaacctcacggcaaagctctaggatgagcccgaagacaacacagctcaacaaacaagagggagctaggtcaaaggctcaattcgccaggtgttcaaactcc

SEQ ID NO: 221693 - DNA, 389 bp, Glycine max
  unsure (1)..(389): unsure at all n locations
tttgctagnttattgttaggagtgtaaaggctttgtgggaacctctcacccgcaaaccctttcttttgttcaaagggatgtgaacaaagtagctaataggttggcttctttagcttccctttttgaggatagagtttggattgaggaagnttcccctcaaattctttcccttgtaaatgatgacttaggacctctagccattttcagttaattaatatccgttacttcaagaagaaaatgaattgacaatatccatcctttgatgattgaaggagatacaagaaggaaaaattattattataaggagattntatattattttccttttctttattgaagtgaaagaaaagaaaaggagagtatttatgcacacccacaattttttttca

SEQ ID NO: 221694 - DNA, 460 bp, Glycine max
  unsure (1)..(460): unsure at all n locations
ntgtgtaatcgantacacctgattggtaatcgattaccagtgatagttgctgaacaaaatcaaaagatgtaactcttccaataactttcaactttttctaaaagttataacttttccaaatggtttttaagtttttctaaaggatataactcttctaatggtctcttgactagacttgaagagtctataaaagcaaggctttgatttgcattctattaattcattctttagacaacaaactnttgccaattgatttctgaatctcttcttcttcttcttcctttgccaaaagctttccaaagttttctggtttttcaaaccttgaaaactgcgctattcatctctttcattcccttcttcctttgccaaaaagaaattcgccaaggaataaccgnctgaattctttttgtggctctcttcatccttatacaaaagaacgaaggactaaccgcctgaattc

SEQ ID NO: 221695 - DNA, 316 bp, Glycine max
gagttgacaggagcacaacatctgggatcttctcttcgaagcaaccctccctaggaagggaccagctactagaaccatgagccaaaggctccaagaggatagggctatagttgctaaagaaggccctagggatctcacgaacctcaaggtatatttctgagcccatgggtcaaagttgggtccaattatcttcgcacatattacactaggaggccattatatctgggccttgtattcaggactccataatataggcagggtacccgtacataataggagtttaccatccttgcattgtagggcacctaaactactt

SEQ ID NO: 221696 - DNA, 445 bp, Glycine max
  unsure (1)..(445): unsure at all n locations
ntcttctataacccctaanatttagaggaacaacaagggtgtattattggcaaaagtataaccaactacatttgcactacattagaagctataaatatggtgcattacaagaatttgaggtaaaatggcagcaaagtcagatatcaaaaaagccttcgacacgttggattggtagttcctttttaaggtgttgcatgctttcggtgtaagatctaatcttctttcacttgttgttaatttctaggcacacgggttttttctttgcaaatgaggggttaggcaagaggatacttttttccccttttttgtgtatagcanaggatgttctgagtataagcttgtccttgcatgtgaactcgggtactcacatccctaagttgggtgatgcaattctaccccaaagggcattagatagaagactccaagaagattatgccatagatgt

SEQ ID NO: 221697 - DNA, 344 bp, Glycine max
tggaaagactcttcacagttaactctcggccatcattcaatcttcccttccctgcaaaccaacaactacatttgttagaaatattgtgagtgtggaaaacaaagatcatatagagaacacttctactaataatatcacctggcaagtcaacaaaacaattttttcaactttggtagaaaaggaaattaaatttatagtggacaagtaggtaaaatgtcaaaacactatgtatcattgacaagacaaaattgtttatttggaacatcaaatcgagaggtcaacaccaactgtatctcacaatacctcttaaaacttatctggagattggcaatttgcacaatgca

SEQ ID NO: 221698 - DNA, 447 bp, Glycine max
  unsure (1)..(447): unsure at all n locations
gctaggatctttntctttatggntcgcattatacagtttcagatctcttctatatatgctcccttctattaaattcaaactttggttgtgatatcttctaatgcaaaacggatgcaacaaaaagaaggatgctagattggggaacacgagttaggataattgatgggattggccaaggaatccttctgtttcatcgatatttcatgttcaggatcattcaccgagatttaaaacctagcaagatattgttagacaccaacacgaatcctaaaatatcagatattggaatggcaagaatatttggtgagaatgaacttcaagcaaacacaaaccgaatacttggaacatagtatgtcaaataaaagaatactgctgttgctaccagtaataatatagttgcattcactaatgttattcacatgatcaaccaaccacttattaatctac

SEQ ID NO: 221699 - DNA, 415 bp, Glycine max
ttttccagggacaagaaaataaagagacgatgcatcttgctttccttccttcaatcgatgtgctcggacacgaccctcaagatcatcagtctattaatagttcatcccaacaagaaagagatcaatcaattgacaatcattcacaaacaacggactgcataaaatcatcatagcatataggttcccattattgtgctaaaaggcatgacaaataaaatgttatgaaaaatcaagatacaagcacatcatgaagaggatagaaaaatgtgggtcccatcttatttgatcatccgcgtttctaaatgatctctcaagtgagatactcatgtgagagaacccagatttcatcctaacaagtagaaatatgaagctaattcattgacacatgatataccatggagtatctattaaatac

SEQ ID NO: 221700 - DNA, 411 bp, Glycine max
  unsure (1)..(411): unsure at all n locations
agctngngtatttttgtattctactaatatattgaattgcccattgctttgcctgagaataacaattggttgaccacaacagcgctgggggcggcaacggacaatggtctttcaaataaacctgttgtacatgaacaaacattatatcatgcgctgaccgtgccaaacgaacaagcgaagtcattgcataattgttacactaactatattcaatgtacctgaacaaaatgatttccaaacacgtgaccgacacatatgatgcggtggccataagagtcaggtggtggttgacttctaagagggaaaaatgtcatgctttgttgttgggacaacgatacaaggattacgttataccgtgaagcaatcacatatcccatgtctgttatatccatccactttgccacactaacc

SEQ ID NO: 221701 - DNA, 463 bp, Glycine max
  unsure (1)..(463): unsure at all n locations
taagctaaagtcagagaacccacttgatgcattatgagaatgaaccatccagaacattagatcataggtgatctagcaaatggtgttcaaactagatcgtcattgaaaacccaaggacacgctacaataatctctgagatagatcccaaacacattgacaaggccatgcaagatgacaattgggtgaaagagaagcaagaagagctcgactagtttcaaaagaatggtgtctggaaactagacgaactaccaaaaggaaagaaggcagtcagagtagatggtaaggttatgagaaataagacaaggttagttgctaaaggttactcataatagataggtattgactacatagaaacctttgcacctgtttcatgtttagaagcaatacacatcttactttcgtttgcagcttatagcaatatgaagttgtatcanatggatgtatagagcgtatttctaaatg

SEQ ID NO: 221702 - DNA, 195 bp, Glycine max
atggtggaaaatcaccattgaaggacctcattaaagctcaaagatccatcccccataaaagctctacaagcacgcttccatcaattgggaaaggggttaaagccttgcatttcagggcattaagagtaatctttgtagaaaggactctctttttttagatttccatggacctttgagaagggggcgagctgtcct

SEQ ID NO: 221703 - DNA, 406 bp, Glycine max
caccagatgaagaacacatggctaaaagaaagtgtggttacacttcacatataatgcaaattaaaagtaaaacatacttattttctttcaccaaccatcaaattttcttacaatttacattctcccacactaagtattcattaaaatgcttacaactcaaatcagacaatctaaataaagttaaatagccacacccttcttccttaccttagaatgaaaatcttcattccaacaaattttttttccattgtcaacagagccgtacaagagggagtctgacttgtcctctttaaaatgcctggtacacactatgcaggacaatataaaacttgagatcaaaacaacaatactaattttaaataaagagtcataagggttcaaattacataacatcatacttaacata

SEQ ID NO: 221704 - DNA, 411 bp, Glycine max
agcttcatcttatgttgtatttcaagatcttctttcttatggaagaaaggaatgcacttcttgcattgtatatctgtttaatggccgcacaactattggcattgtgttcatttagagttagtagaatgtttcttggcttcaccatggactttgtcatatcagcaataagtgttttttcagctttagtcaatcgccccgcatatggatgtccaactaatgacttgccaattcatgattatgcactccacaaatcaacttcaccatccagccttctcctccaaccactggcttgcaacgaagcttgaagggacacccacatttcctagtcccagtgtctcttctgataaattcttttttcctacacctatacacgccactcctttcacagccaattaacacaaacgtagtcct

SEQ ID NO: 221705 - DNA, 387 bp, Glycine max
  unsure (1)..(387): unsure at all n locations
tggaggggttgatggngacccggtgctgagagaatcgatttttatggctacatangagtacatgagctcctttgaaggtgggcaactggcgatggtgggctcatgttcgatttgtggatgtgggagagttgatttccaccatcgcctgatcttcacctatttccacacatgacgggtaccccataatccaacaagctcgatgtgagaaatcatggaagaatcagtcttcctacttttgtgtgttgaccacagagtggtacctgcagatatgtcgcggaggtcaagagaccttgttgacgtcatgtggtgtgctattgcccaaaaccaagcttgatcaatcctaacctcacccgggcatagtcattcagtgagacctgtattgtccta

SEQ ID NO: 221706 - DNA, 439 bp, Glycine max
  unsure (1)..(439): unsure at all n locations
nttcgntatcaatgaggatagatgaggaaaatctaatctattctaccatcgcctcactgaatctcccagcactgcatattctttcaaacagttctcccacggaagcatattccatgactattgcaagatgagttggagtaagcaacaactgcgatgaattatgtcacaaatcggcttaaaagtcaagatgcagttagctaacatgttatagatcacacctagactagtcatttagttacaataatatacataaatgaggagcgacaaaagataaatcgaactttgaatgaagaggaaacgtaacatctcatgttgcaagagtaaaggagtaatgtgtgtcttctatcaaagcacccatctttcttgcctgagaaagaatttttaaatcatattgagaagattgttttgtcggttcttacacgattctggaaaatcttat

SEQ ID NO: 221707 - DNA, 394 bp, Glycine max
  unsure (1)..(394): unsure at all n locations
catgtttcttgtgaaatgctttgtttggatgttttttacatacctatnccgnnntagggnnntngcgatgatgtttgtgatgtttatatgctgagatttcttatggaaaactgttaaaggtgaagggtagagttaacttaaggttataaagtgagaatgtgatgttatgagtggaaaaaagagtgaggctttgaaagttggaaggttaagtctgaattctgtggtaaatggaggttaaagtgagttaatcctagcttgaaatgtcatttaggacttatgagaaaggttaggctgtgctagagaaaaaaacaaatgaccaaagtgaacaaagagccatttctagggcaaatttgggtgtgaagagtcaaattctgattcggtgagattttaggtg

SEQ ID NO: 221708 - DNA, 311 bp, Glycine max
  unsure (1)..(311): unsure at all n locations
agcttagcctaggtctagtaatttcanatcttattagagtctgagcttattgcagcatgttgcgcttagcttagcctcatcaaaatgacactcaggcttagcgcacagggcgcgcttagcctaactacaaaaacttaagggacagtgaaagagttgagcttatcgtaaaatggagcttatcttaacctcctcaacacataacaagggcttagtgcaacaactgcgcttagccttatttaaaggaaaactatttagcatagtgacgcttagcttgacatgccatgcttatcgctgaacaaaaattcttaaaa

SEQ ID NO: 221709 - DNA, 458 bp, Glycine max
  unsure (1)..(458): unsure at all n locations
ntngaaatcaaactttaccactggtaatcaattacaggatactggtnatctattaccagagagtaaanactctggtaacttagaaaaatttgagaanaattctttcgaaaaacaaaactgtgctatgtttgttttttgaaaaatcttttcaatacttcccttgtgaagacttcttgatatcttctcttgaatcttgaaatcaaacttctcttgattcttgaatcttcttgatttcttctcatgaaatttgaaattaatcttgatcttgaacttgttgactcaatcttgaaatcattcttatggctttttgtcatcatctttgtcattatcaaaactacttgaatcaacttgattcatcatcatgaagcttgcttctacaaaaacatgatggaaaacggataacacagaggtacttacattgaccttagtaagtccttgaattgctttaaaatgagcct

SEQ ID NO: 221710 - DNA, 173 bp, Glycine max
acaacacaaaaccctcatgacttacagccataaatctaggcaaaccaaccccacaacacacagaagaggtaaacctaacactcatagcagctacctatatccaaacctctatggcacaaaaaaaagatagctggatgtcacaaggcctcctacctggaacctctaagaaacac

SEQ ID NO: 221711 - DNA, 340 bp, Glycine max
  unsure (1)..(340): unsure at all n locations
tcgtgtgnatgacatacactccacaaggtttgaagtagaggagaccttcaatcctattacgcaacgtggcggacaaaagtgggcaaataacttgaatggacattatcgacaatgcggaaggtattatgcgcttcactatccatgttcacatattattgcagcttgtgggtacgtgagccttgactactaccaatatatagatgttgtttacacaaatgagcacatcttaaaagcttatccctgacccaactacaattcatgcgaaaggttggccaaatcaacatggatacagaatgagatggattggtgcgaaccatctgagcactgaccaaaatgcatt

SEQ ID NO: 221712 - DNA, 451 bp, Glycine max
  unsure (1)..(451): unsure at all n locations
cttgatttcccttgttccggaaacctatcttatctcatgtgcaccctttcccaatctccgggttcgaagacaaccttctttctccctttgttggctcgtttagcatagcatttatatttcctctcaatttgatctttgactctctcatgaagcttcttcacatagtccgcctttgcttgaccttctttatgcttaaaaacagaaacattaggcataggcaaaagatcaagaggagttagtgggtttaaaccataaacaacttcaaaaggagaacaattagtggtgctatgaacagctctattgtaagcaaatacaacatggggtaaacaagcttcccaagtttttaagttctttctcaaaactggtctaagcaaagntcccaaagtcctattaacaacttccgtgttgccatcggtttgtgggtgacaagtggttgataatacaatttagt

SEQ ID NO: 221713 - DNA, 333 bp, Glycine max
  unsure (1)..(333): unsure at all n locations
gcaagttcacctccttgagatgagaagctagagcttagctacatagcctctataatagctaaactcacccatatgccaaaaaacatgaaaatacaaaaaaagtccctactacaaagactactcaaaatgctctgaaatacaaggctaaaaccctatactactagaatggccaaaatacaaggcccaaacgaaggaaaaacctattctaatatttacaaagataagcgggctcatacatagcccatgggctcgaaatctaccctaaggctcatgagaaccctanggccttcccttggatctctggctcaatctacttggagtcttttatccaat

SEQ ID NO: 221714 - DNA, 431 bp, Glycine max
  unsure (1)..(431): unsure at all n locations
ntatntgatgttgtcaggcagaagttgatatcccataggctttttgacagtaggatgaaaaggaagttacttcacaccgtgggggagagatggaagcactttaaatcagacctcacaaggaaatgggcccttgcagccgatcaagactgtgtcgaggacactgtctgtgagaaatacaacatcagcaaggaaaagtgggcccagttttgccagacttgcagagacccttcttgggaggtatgttccttgccatttaagttgtttttcaaaaaacatgatgttgttatacttcattctaccaatttgaaacattatttgttaatattttcaggatgtgcgcaagaaggcacaggccatctataagcagaatactaccccccacgtttngtctcgtgggggttatgactacttggagcaaaaactcttggctg

SEQ ID NO: 221715 - DNA, 356 bp, Glycine max
gaaccaggtgagaataaaacccttgcccttagaagaaaacacaaaatgaatgagtatcctcaatcgaagaaagggataatgctaataaggaaagatatttcccattttaaagagggagaatttaaagtacatgataatagaacatcctcaatcaatgatcggtagaaaacagaataaatatacagaaaggtctttggaccacacaatatctgaacaatacagaaatgttaccaataaaacatggctaccaaaaacctgtgcgtcattggcttgttcacctcgcgccaaacaataatagaatagaaaaaggcccataacactcaaattcatattttcctccaagaaaaactctattc

SEQ ID NO: 221716 - DNA, 276 bp, Glycine max
gaggattcctaagaatccttctttccctaacaaggtaagtccaccaatagatggcatacccttggaagcttagggaagccaaaggaaccatcctttcctcacttgaatgatggcaaacaaagagatgctcaacattcattttccaatctaaataaccatctacattgtccttcccatcggagtatgtgaggttaatgttagcctcttaaggctgtctttccttttctctcctatttgagtgaggtctacgatgagacatatgccttcctccataat

SEQ ID NO: 221717 - DNA, 193 bp, Glycine max
  unsure (1)..(193): unsure at all n locations
tcctgcccatggatatgaaggatccaaccttgggccaatggtccccaaattgggaatgaccgctttaaataattcagatctattcgaatggtgcttatgaattataggaattaacccctcagaaacgtactttgagtattaatggcgaantttagaaaaaatataaacccacattgctcgaagtttaaataag

SEQ ID NO: 221718 - DNA, 293 bp, Glycine max
tgtgtcttggaacctctgttcacagagagcgctgagcttctctcatactacacagcacaccaatgtttcacatacaccaatcaccacctcttcatcaatgcttactgatcaactctcggtacttaatactgatgaccattcaactgaccctgaagttgaaacagcctagaaaaatgccggtctgttgtctgatttcccacctagcatgtcacacgacatcacaaaaacatgtattggagatatgtcaaggcctgataatataaataaaccagatgctcatcccgtactgcata

SEQ ID NO: 221719 - DNA, 254 bp, Glycine max
  unsure (1)..(254): unsure at all n locations
gagacagaaaaagaagcggccgatagaagagccggagaaaacagggaggcngaaaaacgcaaaggctgaccatgcccaanagaaggctaatgaggctaaacgagaggccgataggcttcataggaatgctcttgccacgcaagaaaaaccagaagaagaattgactaccaactactcgatacacacgttaaacgaggccgaggccgagaagcagtatctttatgagaagatcaaatggcaagagaggtctcgcg

SEQ ID NO: 221720 - DNA, 439 bp, Glycine max
  unsure (1)..(439): unsure at all n locations
ctgacagattcctgctctcccctgagaggctngacaaatggtctgcaagcactcaaatcactttacccaggaacttttcaaaccactgtccaatcttgcttaggtctatatccgtcaactggagtcctaaaccttttatgattctagactgctggttatcagacaattctttcaaagaaactgtgcacaattgctggtcctccaatcaataatcaggatggggaggttatgttctcaatgaaaaaatatagagactcaaataaaggctgaaaatttggaataaggagaactatggagatacttactagaaggtcaagaacattgaagatgaactaaacaaaatggaggaagatacaacccaatgactgctatctactcaagaagagatgaagaggagacaattacaagaagctcttgggtagctgacaagcccatgaat

SEQ ID NO: 221721 - DNA, 405 bp, Glycine max
  unsure (1)..(405): unsure at all n locations
tatcttgtaggattatggggtacccatcatatgtggtactaggtggcggtcgggcgatggngcacaacaagttttccacatccacaatgcgcgcataaacccaccatcccctgttgcccacctccaactaagctcacgtactcccacgtagcccatatcctcgtttctctcaacaccgggtccccatcaatcctcccaagctttcccaacatcaaagtaatacaacattcaaacagcacaagctatcacagccaagcaaaacagggcaaaggcagaaaactctgcccaaaacaccaaccaaatcacagcttttctcacttaaagaccccagtaacaatttcttcgttccggttcatntaaccgtggatcaactccaanaatttactggaagtctctagtacataa

SEQ ID NO: 221722 - DNA, 455 bp, Glycine max
tccatcaagcggcaatcagagcacaagagcttctagtgtttagggaaggagcccacagtatgaataacctcgggatttgaggacaaatcctttccaaagtggagggaatgatgcaatcctaccccgcaagggcattgggtagaagacttcaagtagattgggctatagatccaagggaaggcccgagggttctcatgagccttagggtacatttcaagcccatgggctaagtatgagcccgattatctttgtaaatattagaataggtctttctttcgtctgggccttgcattttggccattctattaagtagtctttgtagtaaggacttttttctatgtattttcatgttttttgacacggggtgagcttatctattatagggggtgtgtagctaagctctagcttctcatctcaaggaggtaagcatatctcttagagaggtatgtgtagct

SEQ ID NO: 221723 - DNA, 445 bp, Glycine max
  unsure (1)..(445): unsure at all n locations
acccgttgcatgccacctngacctgtacggataagcgccactttgtttctgtaggttnncctttgaataatgtttatcgcgtctatacgctaagccctggttgtgtgttgagataagcgccctgctgcgctaagctcaactctctcactgtcttttaagtttatgtagttaggctaagcgcaccctgtgcgctaagcctgagtggtattttgttgaggctgagctaagcccgccatgctgcgctaagctccaactctcttcagttttgaaaattgttgacttaggctaagctcagttatgcgctaagcctattctgtagaaaaaaatgttttctatgtcttcgagctaagcgccagcctgttgttggatcgagtggcctcaaaataattaagaagggggggttgaattaattattcctaaacctttactaattaaaaatttactc

SEQ ID NO: 221724 - DNA, 442 bp, Glycine max
tctcaacatcaacatatcgccctgcatagcttgctcctcatactcttcttcttccacttcttcttcattgatttcagactaactagtgatttctccatcatccttcatgatcatgatcctcctggttggtcattcagaagcaatatgtcctctgcctaagcacttgaaagattatatgtttctggttccagtattggatgaggaagtagaggtgttatgtttgctttcacctacactggacgctgctgactttccatgcggagatgtggctgcagggcggaacgaattacctccctccttcttggatctgttggtccagttctggttgtaagtattgggtgagttcctccttgttgcactttttcttttaattatctgttcaacccggagtgccctatgtaacaagtcattcaacactacatactcttgtaattcaacaaca

SEQ ID NO: 221725 - DNA, 208 bp, Glycine max
ctatataagaccgttttccatgatttatgcgatgggatcttggatagaatgtctggagtatgctagaacctttcgatgacgagagcacctgttatatatacattacagccttcgttttcgcgtgcctcaagataaacgacatttgtgactctgtctttcttcacaagccatttcttgacttacatttgctttatgcatcgacctcaag

SEQ ID NO: 221726 - DNA, 392 bp, Glycine max
tatcgcacacatctctcaggttattgtggcataataaaacaggatgcatatcattaaaagtgcataaatctccctacttatctatttggcttcaacatataaagaatacctcaactgggatgtgtctgcataaataactctacgttaagtttgtggatctcgttgctatcgaagaaggaaaggtgtctccacttagcatggagaaattttccttttcatttagaaacagattgcattcaagttctgaacaataatcatacataaatttgataattggaaactagtatgccacaatgacttgatatttttataagcaaaaaaaattattagaatagtgagtacaaagggtatcaaacccattaacatgagctacaacattcacatagcacaag

SEQ ID NO: 221727 - DNA, 469 bp, Glycine max
  unsure (1)..(469): unsure at all n locations
ctcagccttttaatcctaggnttgtatggtacgtacagatgagtgtatctataggacttgaacaacttanctaatacttgaacacaattaacataatgctcccaacggacataattctgtgtgcactgttttataacgtctacttatgattgaatggcccaagaaaactttttttgtgaaggagggaaagcagcaatggaagatgacgctttgattgattataagagtgaacgtgttgaatgaagaataaaatgtgaaaatggttgcagtgatgagagttttagctaatacttgaacacaattagcataatgctcccaagggacataattcttgatgcactcgtttataacgtctacttaagattgaatggcccaagaaaactttttttgtgaaggatggaaagcagcactggaagatgaggcctttattgattataagagtgaacgtgttgaacgaagaataacatgt

SEQ ID NO: 221728 - DNA, 432 bp, Glycine max
  unsure (1)..(432): unsure at all n locations
caagcttcatcttgtatatgagtatgngcctttttgtaattatcgcacttttctctcaggttagtgtggcataatataatagtatgcatattattaaaagtgcataaatttccctacttatctatttggcttcaatatataaagaatacctcaattgggatgtgtctgcataaataactctagtttaagtttgtggatcttgttgctattgaagaaggaaaggtgtctccacttagcatggagaaattttccttttcatttagaaacagattgcattcaagttctgaacaataatcatacataaatttgataattggaaactagtatgccacaatgacttgatatttttataagcaaaaaaaattattagaatagtgagtacaaagggtatcaaacccattaacatgagctacaacattcacatagcacaag

SEQ ID NO: 221729 - DNA, 483 bp, Glycine max
  unsure (1)..(483): unsure at all n locations
gacctatgaaactcagctntttaatccttggtttgtatggtacgtacagatgagtgtatctatatgacatgaacaacttagctaatacttgaacacaattaacataatgctcccaagggacataattctgtttgcactgttttataaggtctacttaggattgaatggcccaagaaaactttttttgtgaaggagggaaagcagcaatggaagatgacgctttgattgattataagagtgaaggtgttgaaggaagaataaaatgtgaaaatggttgcagtgatgagagttttatctaatacttgaacacaattagcataatgctcccaagggacataattctgtttgcactgttttataaggtctacttaggattgaatggcccaagaaaactctttttgtgaaggagggaaagcagcaatggaagatgaggctctgattgattataagagtgaaagtgtcgaacgacgaactaaatgtgaa

SEQ ID NO: 221730 - DNA, 442 bp, Glycine max
aggatatggggacccatcacatgtggactaggtggttgtttgcgatggtgcacaacaagatttccacatccacaaagcgcgcataagcccaccatcccctgttgcccacctccaactgagctcacgtactcccacgtagcccatatccttgtttctctcaacaccgggtccccatcaatccttccaagcttctccaacatccaagtaaaacaacattcaaacatcacaaactatcacagccaagcaaaacaaggcaaagacagaaaactctgcccaaaacaccaaccaaaatcacaacttttctcacttaaagaccccagtgacatttccttcatttcaattcggtaaccggtggatcgactcgaatatataactggaagtctctagtacataaacctacattctgaccgttgggatctactaacaaacatccagaactcat

SEQ ID NO: 221731 - DNA, 436 bp, Glycine max
tggtgtgaggtacttacccgttgaagactgaagaattctattaccgaacgatgaatcttgaagaacggtcgagaatctttgcgtaattactcacggaaacgttacgaaagcgcctcggcttggattttcttcacggaactaattatcctcagctatttcaagagagagagaagtgcctaaggggctgaacccttttctacttcacttctcgccctatttatagagaattgcgggagaatcttgccacccatctcgcccaggcgagaagggttgcttcctccagaagcaatatcctttcggaggaatcttctggagggcccaagtgggcttggttgctatatgcacccccatttttactaaacacacacctctgcctttttttgtgattcttttttcgtaaaggtcccgaacttacgaatctcggacgatacttggt

SEQ ID NO: 221732 - DNA, 354 bp, Glycine max
tataagataagatctagatgaaataatatctatagaagatcaaatctaattaatatctagataagataaagtctagataagataaaattttgtagaataaaatagtctcccctcttcaagttcaagcccaattctggattcaagcccaatgcttcattaattcctgaaattagattaataacatcaaattagctgaatgggcccaaataataaaattgcctaattaatttgacaattaagactaatcagtaattaatatggtgcaaaaagggttaagatataggagaaaataatggcacatcagttattaagcaatgatagatatgtcgcatcccattagtcgaaaacattatt

SEQ ID NO: 221733 - DNA, 376 bp, Glycine max
ttttttccatcatcgcctgacagactcggataggcgaaaaatatgctacttctacgacgcattcatacttggtgcccagcaacagtgagataaagaatctagcattaaagtctcacggattgatttaagacaaacagatccttcatactttatgctactcagacaaccggagactagaaaaagagaaaatggaatgcctcgagaaaaacaacaaaatgagataaatctatactccaaaaggggggcaaatagaaggaaatagaagttaggaaagagatgccaatgatagttcgaggaacggcaaaggaataaataaaagaattttggaaattagtgtggtagaggatctgaaattgagcgatgctcctttattctc

SEQ ID NO: 221734 - DNA, 457 bp, Glycine max
  unsure (1)..(457): unsure at all n locations
agcagcacactngacacggaggcaggtcgagagatttatattgggaggcaactcaactctagttgagatgcgttgcttgtaagctgcgaaccctttcaatgcatctgtagttcagtgaaaaactcttaccttaagctcacacgctcatatgaactccaagcttgaaaagccatgaaccatgtaagataacagtactagatccatgaataataaccaaacctatcctaacaacaaaacgtttatcactttaagcctgatgctcatcgaaagacttatcaaacctccaagcttaagggagtgcgagcaatcctaatgaatcagaccatacctatagacaactgtttttatggattacaaaagttgatgtctaattacaaattcattatgagacaagcatataaaaaaatatagatttcaaattgaacaacacacttgattgtcatgatctaataatata

SEQ ID NO: 221735 - DNA, 401 bp, Glycine max
  unsure (1)..(401): unsure at all n locations
agcttctttgttagacctcgatcggacatttatccaggcttatgtcgaccgncatttttttcgatccatttcggtgaataatattttattgccgagatgggctaatgttttcctggccgaataaatgggaaaatgccagtttcggccgaaacgaaaagtcggttgggctcgcacaaaaaaacctagccgacctacattttatatttttttatgcaacaccaaaacaagaaaactttctgtgccgtaaaaaaaaaaaacattacatgacagcgagcgttttgaaaaacaaaattgcgcaaagtcggggctttttacaaccgaaggggcttttgagtttcaattcacccgtgaacaaattgcatgagtcggttagaaatgtcgatcggatcatcctgtgaagt

SEQ ID NO: 221736 - DNA, 451 bp, Glycine max
  unsure (1)..(451): unsure at all n locations
tcaccggatgacgccgatcgaacatttgctaaccgacgtcatgcatattncgntcacggattgaattgaaaactcgttaggcgacatctgtcgtgaggtaacgaccgatatttttcagccgacattgcacaattctttttagaaaagctcgctggtcgataatggtctttttacggcagagtaagttgtcttgtcttggtgttgcataaaaaagttacaatgtacttcggctaggtttttcgtgcgagttcaaccgacattatgtttcggccagtaaaacattaacccacctctgcaaaaaaaatattagctaaccgtcttcatgcatatttcattcaacgattgaatagagaactcattagccgacaacggtcgtgaaatagtccacgactgtaattctcagccggcatgcgcatttctttctaaaacaacctcgctggagattatgttt

SEQ ID NO: 221737 - DNA, 325 bp, Glycine max
atccttaagtcacctgcggcatgttatcttcttaaaagcttgatctacttctccacctctctaatagcgaagctcacctccttaagatgagaagctagagcttagctacacacaccctataatagctaagctcaccctcatgacaaaatacatgataatacaaataagtccctactacaaagactactcaaaatgcctcgaaatacaaggctaaaacgctatgctactagaatgaccaatatacatggcccaaacaaaggaaaaacattttctatattttcaaaataaaccgggctaatcctaagccatgggctcaaaatctacc

SEQ ID NO: 221738 - DNA, 455 bp, Glycine max
ttagaatatttattacatgttattcattatgattgtacgacataatgaaggatttctatagatattctattacttagatttcaatgagacttatctctagaaaattgcttttgatcattaagattttatgaaattgtggattcatggtaggtgcatccacagtcaagcataataaggattttgcaagacatagtgaagctggttgggctctacactatgcaacataatggtgattgtaagttgtgccatgctaattaagagtaaccttatcacgtgtcacaaccaggctggggcaggtaccccactcccatatatgatgctagatatcaccactcatcatatcccattaacttcctaaaggatcatgactgactaatgccccaacacttttctattataggatctaatttagttctcttttgtgatatccttcactgtggaactgatacatgaat

SEQ ID NO: 221739 - DNA, 394 bp, Glycine max
  unsure (1)..(394): unsure at all n locations
ctgaaatatttattaantctgttcctttgcgncactgnaaatagctattgctttaatatacacaattatattatgttttctatattagatatcactttggttttttggttttttaatacacacgaaagttttgttctattattggaaagtgatataagaatagtggttggtagagatcatgaggaggaataaattttgtgaacttcctctagagtgtgagcctatagctagaggtaatgtggcctcaccttatgtgctagggctttaatggtttacatgaaagtggttgtgtgcaggagaaacatctaaagaacatgctcccttatgccaagataaagcacatgttntgcggtctgcttgagtattgtgcaatgtatatatgtaacgtgtattg

SEQ ID NO: 221740 - DNA, 401 bp, Glycine max
  unsure (1)..(401): unsure at all n locations
tctngagaagatcatggccccatgaccatgatcacngagcgtcagcgtgaacatattttatgctntcgttattttaaatatatattgtaattgagcattatagactctaattgagggttcttaattattgatgcattgacggcatagagcaagagcataggattcctcctccttctctctttattccagcttgatgttctttctttattgttttaagttccatggctatgtgccataagtcatctttgttatggaattaaggcattgcactttacatttgtttaattaatctaaatagtcgaggttgtcttcaatatttttcttttaattcttctcttattgcttattatatatgcttgagacttgatcactggttgcatgatgttagacacttatgaatg

SEQ ID NO: 221741 - DNA, 111 bp, Glycine max
taagtgaaaaaccacgatattaccatatccttaaggaattttggagctttggaattggtttgggaataagtgtgggggggtattgtaacaaaaaaaaaatagtatatgtat

SEQ ID NO: 221742 - DNA, 448 bp, Glycine max
  unsure (1)..(448): unsure at all n locations
aacctgacatggagaggaaatgattattaaacgcacagaatgtatttactaagtatttattacctatctttaacaaaaagtaattacaatactacaaaataaccataaattgaaggagttttgatacaatatacataatttttatacataaaagttagttgtattcattgactaacagttagccatacacagaaaccctaacccaaatgagatagagagtgcaaaataattgttgcttacacgagaaaggggatccctcctcctctgctcagcacctcacaatcactcaaacactctttaatctccctaaaaatgtaaaaccctaggcttctgtgcatagntgctcctctttgctgcctctacagcactattctcgaaagttgtgcaaaaatatgcagctctgatctctcaaaatcctcaccctaantttgacaattcaagcttaaat

SEQ ID NO: 221743 - DNA, 363 bp, Glycine max
atatttcatacgggacaggagaaatacctcgcctgatcctattcagcaggcgcctaaacaggcattaaactttaaaacttaaacttcctctttcacaaagtaaaatatcactcgatgctatcgactccaaagtggaaaataacaagattggtttttttgtcagaacatgaaggaaaacaaattatcttacatattgtagcgtgaatgctctacacatgaccaaacaatttgaccactgtatctctatgggaaacttggaactattagacctaaatcaggccaacttactaacgactcactgtcacacaatagagaaccaacagctaaaatatccggatccaaggcggggggaaagaaacaacg

SEQ ID NO: 221744 - DNA, 453 bp, Glycine max
  unsure (1)..(453): unsure at all n locations
tatattcgtcttagaatagtatcattctgagacgggtgttatctttgaaccgtcttacaatatacactcttttaaaacagttgtttgataaaaaccgtcttagaataatactaagacggcactaagaagatttttatctaaaaactgtcttataatgtacactttttatgacgagttttaaaacaatcatcttaaaacggttcgttgtaaaaaaataaaaaaggtgatcttctgagatgattcttagctaagaatccgcttagaatgatactcttctaagatggtctttggttaagaatcatcttagaacgatacattctttttatacggtttattaaggcattgtcatctaaagataagactttcaacaatgttaacttccaagatgatttacaaccgccctagaacgtgttttttttgtagtnatgcttatacgatgactaactttatcta

SEQ ID NO: 221745 - DNA, 407 bp, Glycine max
  unsure (1)..(407): unsure at all n locations
acagagagtttttttttatgngcgaaggttttcttaacatacctagggatgggggcgaaggagaagaagcagagacttgtgacgatgctcgagtgcgacaaagacgatgctcgagtgcgacgaacacgatgctcagatgcagacagggaccttgaaggtagacggagattataagaagaagagagcgcgaaagcttagatggagaagaagacagagcgcgagcttcttagggctcaccatattttttaaaatataagttcaacatcggttttttaaaaaaaaaaccgatgttaacaaaatgatgttaaggttaacatcggttttctggaaaaaaaccgatgttaacatatcaaacgttaacatcgattttctaaaaacccgatgttaataaacatatgttaacatcg

SEQ ID NO: 221746 - DNA, 462 bp, Glycine max
  unsure (1)..(462): unsure at all n locations
actcagcttatgtgaagagataaatgatatcagccataagggacattttgttctaaaacgagatcttngacatgcatcttttaattaatttcttattgttcttaatctatattaatttaaaataaatttatacataatatttaaggcttaaatatttttatgtgtctataaatatgtatttccttttcttttagcccatgtattttaattctatttttcatccctctaagttatattttttcattttaagtccttgtaattcttttttatgtttagatcctatggtgttaacaaaacatcaacattaacgttttttaactgtaattaatgacaagaactaaaattgaaagaataaagaaacataccaagaccttagtgaaaaaacgttaaattacatgaaccaatttcttatctaatcctatttttaacttgggatcttaacgttaatgatttanatacatt

SEQ ID NO: 221747 - DNA, 389 bp, Glycine max
  unsure (1)..(389): unsure at all n locations
acacttagatactcagctttcacctangatgttggtgccaatttgattgaatggtacacactggaactggctacctatgatttttattaatagattttcactgtagagaaagtcttgaatctaatcacccgaataactaaaattatcttagccattatagaatcttgaatgtgaagaagcatccttggcaaccaagattcttatatactataagcagaaaaccaaataaagaatgaacatacgaggaatataatattcttctcattaaatatctgctgcatgtttcaaatgctcttctaagaagagttccaagcaaatgttcacactacaccttcacaatggattgcaggggtttcatctcaactacagcattcaacatatatatgatg

SEQ ID NO: 221748 - DNA, 303 bp, Glycine max
aagcttttatatacacatgcgcgcataacccacattccttgtgccaccttcactgaactacgtctcccacgtacccaatctctctttctctaacaccgggtccccataatcctctaagcttccaaacatccaagcaaaaaacgttaaacagcacagctatacagccaagcaaacagagcaaggcagaaactctgtcaacacataaccaaaatacagcttttctacgaaagacacagaacaatccttcgatccatcgtaacgttgatgactcaaaattactggagtctataggaaacctgcttt

SEQ ID NO: 221749 - DNA, 455 bp, Glycine max
  unsure (1)..(455): unsure at all n locations
tggtggttctttcctgctatcaaagaggttngcaacaggttttattttgttcttaggtacccaaatctttttgggtccattttctttgttagcatgtgggtgctagtaagcattggatggaccctttgatgggttgccctttttatggagtccttgaacttatgagtctcatgacctacttttccaaagaaaataacaaacgatgacttcttcaccatgtatgatctttttgcctttgaaaccatggccaaatatgtctgtggggtttctttgcaccttaataattttgttaagagcttcatgaccaccaataaacttgcctagtttatctctcaagggttctatttcctcatagagttctacaatctcaaatgttgttccttcaagacctcacattccttaggcatatagtttagcttagaaacatttttttgtatgctgcatttcgccaaaga

SEQ ID NO: 221750 - DNA, 338 bp, Glycine max
agtaccttgctttctagccgcgtatttggctatattatgacatttggataatttagtatttctttatttgcatggtttgaatgaacaattatgaattatattatatgactatgtggtttttttatatatataatctattcatgtttcttgcctcatgattggtttatattcttcaatgcatgccttgtgaatgattaatagtatatgtttgtcttatacttgttacgcactttggctttttgttgatgccaaagggggagagaaatatggaataaatcaagacctacacacgtaattacttaatttcaccgaacataaactctaaacaaaggggagat

SEQ ID NO: 221751 - DNA, 442 bp, Glycine max
  unsure (1)..(442): unsure at all n locations
tanacctttatatattaaaataatataatacactgcaggtttatgactcgctacttgaaatntcacacacacacacacacacacaaatatatatatatatatatatatatatatatatatatatatattaatttattatctctctacttaattcaatatgatataaatatgagttgttaattggcttttattgtgttcgaattatttatttattcagattaattgtatgtttattttggcatttaagcatgcaatattaagctaaataatttatgcacattaaatttaatggctaagagcttatatgctttaaatattggataatcatatgcatataatatttatttaactttgaagttttgtgtgtatgattcatgaatttatacatgcaaaattatcttgaatattttatgcaatatccattcatttatttacattattt

SEQ ID NO: 221752 - DNA, 374 bp, Glycine max
  unsure (1)..(374): unsure at all n locations
ctagancgatngctaaaggatacaaccaagaggaaggcattgactatgatgagacctatgcctttggtgcaaggttggaagctattaggctattgcttgcttttggnttgattatgaatttcaggttatatcaaatggatgtgaaaagtgcttttctcaatggatacattgaagaagagatatatatagaccaccctccaagttttgtagactttgaacatcctaatcatgtttacaagttgaaaaagacactgtgtggtttaaaagaagcacctagattttggtatgaaagataaagcaatttcttaattggacagtcttttgtaagaggtcaagttgacaaaacatcgtttatcaagagatcatacaacgag

SEQ ID NO: 221753 - DNA, 446 bp, Glycine max
  unsure (1)..(446): unsure at all n locations
tattganatctagaggaacttcttatggtgtaggtcttcttacacttcaaaaattgcctggattacctgtgaaagagtatgctcacccaaagaaaaaggtggccttgggattaaaaatctctacctttttaatataagcctcttatctaaatggaggtggagatttctccaataccactttgtagttcggtcccctcttattagattcagatatggatgttctttctctgatctatcccatctggcccacaaaattggtttgcttctaacatgattcgcaatgtcggcaatggctcccaaatgaaattctggtatgttctttggtttggtgactcatgcttctcacacttgttctctcgattgtctcagtgagtgacaaggcttccttgtacagtaactcttcgaagtgaactggcagtggcagcgaacttaattgtttcgaggag

SEQ ID NO: 221754 - DNA, 416 bp, Glycine max
  unsure (1)..(416): unsure at all n locations
agctnggtactcaaattcttagggtatgttttcaagattgaatataagcctgggaaagataatcaagcagctgatgctttatcaagaatgtttatgctagcatggtcagaacctcattctatcttcttggaagaattgagagctagactaattagtgatcctcatttgaaacagttgatggagacatacaagcaaggtgctgatgcaagtcattatacagttagggaaggcttactgtattggaaagatagagtagtaatacctgctgaggaagagattgtgaacaaaatactccaagaatatcatagctcacctattggagggcatgcaggtataactagaactctggcaaggctgaaagctcaattctactggcctaagatgcaggaagatgtcaaagcttatatacagaaatg

SEQ ID NO: 221755 - DNA, 364 bp, Glycine max
cgaactatttcggaaacaataaatgtgaaattgaaagcgaaagtgcaagagaatgagaaaattctttggaatgcagagactaagaaaatgctctcaactacatatgaaacaagcacaaccagagaaagatgacaacaatagtgcatagaggagatgaaaacaaagagtgttcagattccacaaagatgatgacaatagtccagagagcataacctgagaagacaaagagagaagacgagagtggatttttggttttgttcacaaagagggcttttgatttttaatagtgaagggtggtagaaagtgtttttgacttctccatttttctattttttaaattcatatatggcttattctaataatc

SEQ ID NO: 221756 - DNA, 439 bp, Glycine max
tagcggtagtcctattgggaaacactatttcggtttatctacaagaaaatctatcgtggaacgtgggttctggactccctataatcctcatgggcggatctattatataatttgttaggctcttccctctacgtaaagatggaagctataggcaatgtgatcaactctggaacacatgttgttataagctctcacaagaacaaataactcaacttaccattacatgtcttatatggcatgcactattgtgaaaaggattcaacaatgcatatgtcaagtgataaactaacgcacacactggaagaaggaaaattataatttgacatgttttcacccgagtttaccattctcttacatgtatgtccaactttgttacctatatatcatattatcatatttacacagacaacaagctatccacagatacacaccattagac

SEQ ID NO: 221757 - DNA, 399 bp, Glycine max
  unsure (1)..(399): unsure at all n locations
ttgcttgtcttgtgcagaattatggtatattttttacacactttagacaagacccagtgcacagaattacacagcagccacagtgcccattttgggacaagagccctagaagcagcaaagagaagtagcttttgcagagatacctaggttttgtaaccttattattgttagggtttcttctgtaatggctagctaaacaccctagttggggatttctaatgaatagctgatgtaaatacataatatctaattgattgtggtttttgtgttcaatgattcattcaatgcttgatgtttgtatgcttttggtctgatcacccatttgtgtgcgcaggtaggtgactttaacattgggaaatgtactgttgccttanaacttgattgagcaggatcgaactt

SEQ ID NO: 221758 - DNA, 422 bp, Glycine max
  unsure (1)..(422): unsure at all n locations
tacaaacctgttntaagttcaaacccattaataatatcatatctagatgaaataacatctagataagataagataagataaaatctagatgaaataatatctagatgagataaaatctggataagataagatttggtaaaataaaattgtctgctctcttcaagtccaagcccaattctagattcaagacatattgcttataattctcctgaaattaaattaaaaacacaaaattagttcagtaggcccaaatgataaaattgcataattaatttgacaattaagactaataagtaattaaaatggtgacaaaaagggttaagaaataggagaaaatgatgacacatcacacatgataaggagactaccatatattcaaataataaagatgttagagataacctatgagtgaaagcctgact

SEQ ID NO: 221759 - DNA, 359 bp, Glycine max
tgctcatgcaacaattggtagcccgggctatacgagacatcttgccaaacaaagtcaggttcacaataactcgtctgtgctttttcttccatgctatatgtagcaaagtgattgatccagtaatgtttgatgagttggaaaatgaggccgcaattatactgtgccagttggagatgtattttccccctgctttctttgacatcatgattcacttgattgtgcatctggtcagagaaatcaaatgttgtggtcctgtttatctacggtggatgtacccgattgagcgatacatgaagatcttaaaatggtatacaaagaatctatatcgtccggaagcatctattgttgagaggtacatt

SEQ ID NO: 221760 - DNA, 455 bp, Glycine max
  unsure (1)..(455): unsure at all n locations
tctccaatctccaccgttcaacgagaaactccaagatgtctgcgtagtcgntggcggagtacacgcctatgcgctgcgccacagcggagtagtgctcgaatagcctgaggtcatccccatcgtacataaggtgcgccggcatcgtgatcttcttctccatcatgttccctatggccaccattgccccggtggggtccacttccagaagcttctccacgattcttgagtacgcgttctcgtgccgcttctcgtccgctgcgatggtcccgcataggcgcgccagcactggatccccgccctccttcgcgagccgagccgtgttcccgtgcgccacaaatgttgctcgctcttggaatgacgtgtacacaaaccccaaatatgggttggtgtctgtcccaaggtcctacccaatttaatcaaaacaaaatacaatatttcaatttcattntaaaaag

SEQ ID NO: 221761 - DNA, 99 bp, Glycine max
gttctttttctgccttaaggaagtttctgaaaacttctctggacgattctaaagatttctgggagaccttgccttataaagcactgtaccttgctgcct

SEQ ID NO: 221762 - DNA, 184 bp, Glycine max
  unsure (1)..(184): unsure at all n locations
aatacccgagtggttatccgtataaatcataattttttgttgtctgtctgacgaacagcctgatatccagcatagactatcgtttntttctgcgcccttcgtctatcgcggtcgacatgttccgtttacacgcggagatatacttcatcttccgcgcacacaaaatctgtgatactgacatttg

SEQ ID NO: 221763 - DNA, 443 bp, Glycine max
  unsure (1)..(443): unsure at all n locations
ctaagcttgatcggcatccggtgaaagtttgagcatcgaatttcttttagcttccatgggtcaattgcgagcatctcgatatattataagcctgaatcggacattcgtgtgaaaagttatgaccatttgaatttctcaagaggttccgttgttcaatttcgagcctctcgacatcttatacgcccgaatcgaacatccgtgtgaaaagttatgaccatttgaatntgcaagagtttccgatgtttaatttcgagcgtatcgatatattataagcctgaaacggacattcgtataaaaagatatgaccatttgaatttctcaagagcctccgttgttcaatttcgagcctctcgacatattatgcgcccgaatcggacatccgtgtgaaaaagtatgaccatttgaatctcgcgagagtttccgcatgttaatttcgtgcgtat

SEQ ID NO: 221764 - DNA, 377 bp, Glycine max
  unsure (1)..(377): unsure at all n locations
agcttggnnccncgcggagtggccatgtattgtttactgtgtaacaacgcccaggacgaagattatttgctcatctgtcgcgagagcattgcatggcactagtgtgaatgaatgttatgctcttatccgtctagaattattgagctgagtaatagtcttaggagtaatattcgcggggatcagagctctctaatcgtctctcataggggagaccctttctcttgccattcatccctcttactatatgcatatcttttctttttctattcacatttgctcctaatgtgtatagactatcatgaccatgagaggctaaacctctatattgggtgcctagcgacatacattcttgcaatgtaaattcttctactatctat

SEQ ID NO: 221765 - DNA, 409 bp, Glycine max
  unsure (1)..(409): unsure at all n locations
acttattcagcgtggtgggggccagaaatttcttttattcaantntcatgcagtactgctacttaaaatttgacgtacagcaaaataatgtgggtcaagatgcctggtgatatgatcatgcactcaatggtagttggcatcttatttacactgtttcagagctatcaattccgataggacagctccatatgcccttgtttttttcaaaagttgtnttgacgtgtgtaacaccaccttatcaaacaatggccaacatatagccttcacttgtaaccaaatgagacgtgcctaagtgtatcctcacatttttagtgcattattcggtattccatacttttgcaggcatgctttggacatagtttcttcatgttatgctggagtacaactggaaggattttctgactgatga

SEQ ID NO: 221766 - DNA, 460 bp, Glycine max
  unsure (1)..(460): unsure at all n locations
ntacgatgtgtngccacatcaattaaggattacttgcatctaatttcaattctctgancctgtaaaaaaagaaaatctcaattctgtatgatagtttcatttttgagacaactattgtcttgttgtctatgctacctttttcttcaacgtttactattaaaagggcacaagcaaacaaggcacaataggttggcaaaacccaaataagtaagatactatagtaattgatcggtgcttcaagaaaaggacaaaagtacatttttgggaatggataatcatgctcacattcaaaggaactactgatagacatggaaaanaaaaatcagtacccgtatacacccatctgaatcttctgattttgatgaataatatttaaattgatcggatatgaattcggacaaaaggcggatacgggtatgagtataagaaatatacatccgttccgatcctgaacccggac

SEQ ID NO: 221767 - DNA, 263 bp, Glycine max
aaaatacctttcaacggtatggatatatgtgaatatatatagcatggaagtgccttgcaatgtgtgtgaatattatggcataaaaataccttgcagagtgtgaatgtataccaaataatgcatttccaaaatctgtatatgtaggaataggagcttaaaaatgccttacaaaatgtgtatatttgtggataggtagcataacgagcctttcaacaaatgtactcatgttaaaaatggcacgagattgattcccaaatgaatat

SEQ ID NO: 221768 - DNA, 365 bp, Glycine max
agtgaaaccggtgctacaactcacaataaactcgggccgagatagaaacacgacggtgttcagttcaaggtatagtcctcaagcttacccttatggcttgcctccggacttcactccccataccactccgaaagagtgagccaagcccctaccttcgaggggcaactccctccttatgccgactattccctgcaagaagatgatgaaggagatgcccatctaggccctctacttccctcaaagatccggcctgccatgaattaccccaaccaaacattattcgtcatgttccgtctccacccgcacccgttaatgaatccgttccctctgccaaagataagggaaagattgattcacttgaagag

SEQ ID NO: 221769 - DNA, 351 bp, Glycine max
  unsure (1)..(351): unsure at all n locations
cttttatttgttaatgttggtcggcattgtataaaaaatcgacaatttcgtcctgtatgagaaggaattgatcaatatagtttatgactcaacagaagaccagaggcctgcattgatatcatttttcagtctattgatccaattaatctacagatttgagacatgcaattgtaaagtgatgtacctatattagttactacaagcagggaagatacagcatataaagagaaacccactttcacaagaggatatcatntctattatattctttaccttatcctcattatcccctgcttaactggcattaacgtgactnttatcttttaacacactactgntactggacattat

SEQ ID NO: 221770 - DNA, 407 bp, Glycine max
  unsure (1)..(407): unsure at all n locations
ggaccttgaatctcagcttggcgaattctgaatttataaccaaagatttagattatcaaacatggatttagatcaaatatgttttcgtctataattatgattttgtcttgaattttttatgattgatgttgcctcaacttttatttcatcgatgtttatcatccggctatttttnaggttaagtgatggtgtgtcatttgttttttaatactttattttattattttttttcatgggtaaaaatcattaaaaattgattgaattaagtggtttcgacggattaataatttatgacagtttataaccgtcacaaattgtaagaactggaaaanaaagaagttagatcaacacgtgtgaagtccagcactaacaaacactgatacacaaacaacacacaactcaatttt

SEQ ID NO: 221771 - DNA, 369 bp, Glycine max
agcttgtacaatcaagagctatatatttttctaggataaatcaactgaagaagaagattattacttgaattaattagacatactatttggttataatttcttgtgattatctccttaattaaaccaagccacaattctataaataggaggctaggcattcattgtaacagagtgtagaagttccgagcagttcttagaaattataattagaattccactcactagatgcctccattattccgttagacactctaggtttcattgtattatttttgtgagtacaatttcatccacctaggagaggaaaggatgaacctttgtttgctttaattctatcaattcaacactttaatctgaagtctttatttg

SEQ ID NO: 221772 - DNA, 411 bp, Glycine max
aatctttgctggaagattcccaaaaatatacactgtggctcatgttgatactaatgacgtttgtgaatatactgaattgcttccctgaaaccacacctcccattttcttcatggaaaggtctatggaagttacaattgttgagccattcgtacactcgatgcctgaccaagaacatgcatattgagtttctcagtattattttccctccatgatggtcaccactccaattcttgcaagcgtgttattcatcactctacaaggctcattcttattacagcttatggaagtgctctctcgtgtaagcggtccatcatattgctacaaacttgctgatgataccattgaatgtagcatgatataaatattttgatgagggagtatttgaataccttcattggaacttggagagc

SEQ ID NO: 221773 - DNA, 397 bp, Glycine max
tgccacccagctcgcccaggcgagctaggatgtcttcttcatattcaaccgccttctggaggaattttctggaaggcccaagtgggcctggttgctatttgcacccccatttttactaaatacaccctcttgctcttttttggagattatttttccgtaacgttactaaactttacgaattctgtaacgatgcttgttttctttttgtaatgttacgataccttacggattacgcaattatccctttttttgccttccggaacattacggaactttacagattgtgcactaacactttcttttaattttcggcatgtcacggaacttcacggattgtgctacaatgctttctttagacttccggcatgccaccgaactctccgaattgcctaacgat

SEQ ID NO: 221774 - DNA, 410 bp, Glycine max
  unsure (1)..(410): unsure at all n locations
gatccttaagtcactgnngctgcagctatgacatctacaacatcatttacccgaacaaaacgaaaagagattgttattgaaacagattatactaccccatccacaacacaaccaattttcctttcaaatatacaccatttttacacccgttaatggttacttagttattaattaatcaattctatggtgtatgccaataatgatacacttgtcggttcagacagggttactacatatcagtaccagaattggtgttccttaaccaatttatagtaagtatatattgtcaaacatctaccatgtattacactgaataccatgaatgaccattattcatttgggatgaagctcatataaaacaccatagtgacgaaaatgaagcgcaatactaacatgacctagaaatacct

SEQ ID NO: 221775 - DNA, 408 bp, Glycine max
  unsure (1)..(408): unsure at all n locations
tagagtatgcccgagtcattcatccctatgagatngtgtttaagtattggcgatcagaattgccattccttggattatagggttgaaccaagctcatgcttttacaaaaaggttcatcaagtcaagttgaaatatggaagtaaccgtcttgcaaaattggggcaaaagatgaattgagtcacatcactgcttcgtctactgccaaacatatttaggattattgatgtccttgttacttccagtctcaccttgacaaagatgtcatggaccatgttgaaaatctaaattgattcaaccccatatcttgcgtaaaaattcgcaatacttcaactgtacatcattcgcatgcatccattggttacattgctcagtgcattctcttcttgtataataaaataaaatgaactt

SEQ ID NO: 221776 - DNA, 301 bp, Glycine max
  unsure (1)..(301): unsure at all n locations
agcttgtgaagtttaagcttgtggnattttattgttagntcagctaatgtggtaagctatttgcacacgccaaagttgagggaacatatgcattattgtgttgatcatcctgaaaagataaccaagcttgcaaaggtgaaacctcaagtttctgaacttaagggtgtcatgatggagttttttaagaaaaggtacagatgcactacttatttgcactaatttaagaggataataccattaaatttgaagagatcaatcggtactagaatcatttttgccataaataaatatgaattgcact

SEQ ID NO: 221777 - DNA, 463 bp, Glycine max
  unsure (1)..(463): unsure at all n locations
ntattcacattatgtaattaggcattgactagattcttatggctttgttgaaatatgtttatgaatttctaatttgttatatgtgtataatataaatatatatatatatatatatatttaatattacatctatttgtatagggacatgttatatatatttgctacatgtaaatatatttaaaactttgaagctagatatattttattattataatacatgtttacttatttgttaagtatattttgtagttagttaacttgtgagacgttaaattgtggacatgggatatgaatgtgaataagtctgtcgttaatacttttgttgtgaggtgtgaattatacaataatccgactggtgttaccttaaaaaaatgtttgtgtgacgtgtaaaaggaaagtgatgattgcaggtatgaacctaaagtgtaaattgagcacattgtgttaacgtgtttgaaataag

SEQ ID NO: 221778 - DNA, 417 bp, Glycine max
  unsure (1)..(417): unsure at all n locations
taggaacccaaacttgtagcttcaatgcaaggatacattcttatgtctatgaatccanaatgtggctttagagttagaacaacatgaaaattacgatttgcttgtgagagttcttgctcgaatctgggcttgcccatgtttgatactttacatagaggcagcgtggaaaacaccttgcaatagcgtgtatacataggtaaatataacgagcatgaaattcctagcaaagtgtgaatgattgtctttctaaatgaatgtatgatagcacggaattcccttttgtatgcaagtgtgtgcataatgtaaatagcttgccaatatgaataaatgtgaatgaaacaataaatttttttttatgatatatatttcaaacatatgtaggtagttgtgaaatagcaaacgtttacgatataaatt

SEQ ID NO: 221779 - DNA, 289 bp, Glycine max
gggatccttaagtcacctctgctgcaagctctgcatgcttcacatgtcctcttgaagcgcgagggaggtcctggaccaaaattaacgttctccgcatgggtcgctcttgttgccggcggtccgacggcacggtcgaatgggaaagagggttccttccgttcggaaactcactcatggaagccgaggtttttaccacgttggtggagttgttgttgggattggaaagtgatggggacctctgggtcaagggccgtgggttggtggccgatgaccgccaacttggagtata

SEQ ID NO: 221780 - DNA, 409 bp, Glycine max
  unsure (1)..(409): unsure at all n locations
tgagggaaaaatggtcattcttaagaagttttctgacttttaaatctaatcagcaaaagagaaggtaaatcctatacggatatgatcatttgagatgcatcaattttcaaattaagagcactgccagacataacgcatgaatgttttgctttcacacaacagcattttcaaagagtgaaatattaccctctctcttaagaagtccctaaaataataaaattatataagtatttaaagtattagaaatcatgttatatagttcctgaggtattgaaaatntctttaaattagttcgtcaatgttacttagatgtattaacctagagactaaattgatgaatatttcttttacagggaatattcaatactttatgaactagttatataattttattaaattaagaattatt

SEQ ID NO: 221781 - DNA, 442 bp, Glycine max
  unsure (1)..(442): unsure at all n locations
agtcttctttggaccttgaacaagcaatcttcttctctntcataaccatgctatgtgctcgcgactggtccctttcttcccttcgcaacttgagttcactattgctaccccatagagcttcgcgaaatttgttccggccatactcttccttgcgagccctcttggtctctcgttcaagggctcttgcggtaattgcattctcttcccgtaacccggcacactccttccgaacgtgtgtagcagccaagttggacttctccttggcgagttttgcctttcctaactcgcttttgagagcttggacttcctcgtcctcttccggtgcttcaaaattctcttcgctgacgacttttaacttggcgagccaatctaaacctcgtatgcgaactctcagccattcgtggtacccaccaatgatgccattacgaatgcctctaagctc

SEQ ID NO: 221782 - DNA, 431 bp, Glycine max
  unsure (1)..(431): unsure at all n locations
tctcccctttttccctataaatagggagaggagggaagatcattttctttcttctctcctggnatctggggatcacttgaaattagtgaaaaaaatcatttccgtgaagaaaatacattccgaggcgctttcgtagcgcgaccgatacgtcctcgcggttgatgccgcgaagatattccgccgtctttcgtttgttcttcggcgatcttcgggcttctatcaatcagttccctaagtgaaacattgaattcattatgtacccttggtggccccacttgccttctgacgctaatgtcatctcatgtactttgcgtccccctcttgcgcgcttatgcaattatttaagtcttttctcgcctaagatcaatcaaacatgttcccgaacattagatggtacgtctgtactactgttaaatgaaatccaccttcgc

SEQ ID NO: 221783 - DNA, 435 bp, Glycine max
  unsure (1)..(435): unsure at all n locations
agctntaagacatttagcatctgcaagttttcattgatattaaagccttgctccacttatacatttattttctgcctacaaaattcaatattcattctaaaatgacaatagaccctactactcttaagtattcaatattcattctaaaattgaaaattcaatattcaatattcatacctttctgctctaacaaatctgttgttcatctgatagcaatcatcggagaaagaacactatatctgcttggtgaatcttaatcatgaataaaaacaagaattatcctcttacagctctctntgcctatcacatgaataagtaacacttttaatagccaacaagcagtttcacatacttttggtgagcataagctgaattagtttgttgcagttgaacttggtttggctttgagttcttctaatgcactactcattatat

SEQ ID NO: 221784 - DNA, 466 bp, Glycine max
  unsure (1)..(466): unsure at all n locations
tgcttctacatctcccnctttttgatgatgacaaccctttttatttagaaacacatacacattctttttcctagtcgatcactcacttaattctccatattctcccccctttgtttttgagtttaagcttcacttgaaattaaattacttaattgtgtgagttcttgatttaatccctattttctctccccctttgacatcaacaaaaagccaaaatgcgtaagacatacatgatttttattctttaaaaaaatcatacacatagcatccattgtaaatcaatcataaaagattctaaactaatcatgaagcaagacatgaataaaccaaactaaaatataaaccacatagtcatataacataactcataaatgttcagtcatactaatcaaatattaaaagaaatacttgatggtcaaatgtcataataatatagccaaatacacggctagaatcaaagtactaa

SEQ ID NO: 221785 - DNA, 456 bp, Glycine max
tactcagcttgtgggtatggatagtcaatctcaacgaggattctgttcttttacacacaaagaactcctaatgaagttgtcaaacataacctgaatgattactaaacgaagtaacggattatctcgagccataaagacttcattctactgaaacatacatatgtaatcaattatagtaactgataattgaataattcggttattcttgccaaaattcaagtagaagggagatatggcgcttattctaacactatgaaatagattattaaactttgcaatcgagtacattaaattgaactcactgcttctaagagactttgagatcaaactcataatcgtcccatgtgtgatttctactatgccctggtataagaaaactaatactaaatcatccatcatgcctagtctaaaaacataccatacagacaccacatctcttattaccttgtctgacat

SEQ ID NO: 221786 - DNA, 418 bp, Glycine max
  unsure (1)..(418): unsure at all n locations
agcttgtanaacggctagacatgatatatgtcatggtgttgttttggccagcggntcaaggataaaggaatgtcctacattatttccatgacacgcgtgcaacaatgatgatttagaaattttatgcaaaactggtcatgcatgcacctttgtggacactcaagcatcaagttttgtggttttctgacactagggctcaggattcattnttcctattttaagtcaacccagtgtttccaaaacatgctcttttatcaattcatgcattcatctaagtccattttgggtgttcgggaaaattttcacagcattcaccctttaggtgtatacatattttttcaacaaaacccttttgtgttttgatcagtgaatctttttcaaagaaagagctagagtttatttcttttcgaaagcgtct

SEQ ID NO: 221787 - DNA, 319 bp, Glycine max
  unsure (1)..(319): unsure at all n locations
atgaatgactcgggcatactttaagcttatgcacggaaaatgtaattatgaaattgagatgcccgaagaaacaccatttcctagttaaccatgcattaagtaccatgttcaattatnttttaaagtgaaacgggtttatgatcccaacatggttggctcgtggtgctaacacatgaaactaagaatgtagtgtgaagtttcacgcttcccccttttttgtttttgttttgtagaggaaaacacaaggatgagcaaacatgagaacacatggtatgcaattttgcagatcacaaagtttgttgaacgcatatgcatgatg

SEQ ID NO: 221788 - DNA, 432 bp, Glycine max
atcctctgagtcacctgcgtatgccgtctgcttgagaagcttctatggaggcttggtctttgattcttaatgaggtccttcaatggtgattttcaaccatggagatgcagcggaagataaatgataatagatgagaggaggcgtcatccactagggaatatgccatggaaggaggagcttcaccaccaagagagtgccttggataagaagcttagagaggaagcttcaatggaggaaaaaatgagagaggggggggggggcacaaaattgaaggagaaaaagaggaagagaagttaaacttggaaatgtgtctcacaagtttcacattcatcaaagttgtgacaagtattacaacatgtttctatttatagcctaggtcacttattttgggaatttcattttcatctcatgtgaatctaagaggaatttttc

SEQ ID NO: 221789 - DNA, 383 bp, Glycine max
  unsure (1)..(383): unsure at all n locations
ctcagcttaagattaagtcttcatgttgctcatgttgctcccctatctcttcacctccaaggtcgcacttttgtttcaatagcttcacattctcatcgctgcttcctctaattcccttctcaaaggcctaagtcgttgcagctctcaccatggcagttatgtgccatggtagttgcacatcatcgatgtttgagagattatcgaaggcaagtctgggggaaacgtgagcgaagaagaaaatagggagtcacgagtgaaccatactagaatcctcaattaattgatgaacaaatctaaggagggttttagatctaanggcaaagtaaaaggttgtgtgaagtggaatggtggtagtggtggttggagaagaggctntggggggc

SEQ ID NO: 221790 - DNA, 116 bp, Glycine max
cttgggaagaaagatatgtttttcccacctgctactttgagaaaaaaatttctagggtgttgcctagcctcaaagtctatgaaatctccatgaaccgtctcaaaattttaacatgg

SEQ ID NO: 221791 - DNA, 326 bp, Glycine max
tgagaacttaatggggtcgcttaggactataaaatagtgtcaacaattaacatgatccaatataaatctttccgtttctgatttaattcccttagtttccttaactaactaagaggggttgaatctgattgcgtctttaaaaaggatatgtcaaatctattaaggatcatcggactatgttgtataaactgctctaattgttaaaacttttagatgataactttttttctaatcacaattcaatttcccttcttattttacaagagatttactaggcaaattgacttctcaaacttctatataaaactacccaaattaataataaa

SEQ ID NO: 221792 - DNA, 438 bp, Glycine max
  unsure (1)..(438): unsure at all n locations
tgagagggagtcacctcagtggaaggtcgaacttattgttgttttntgagcgctaccgaatagggaggcatattaacaatagttggctacactgcgcgagtcaattgtgggggaggcaaatgaactattacatctgatggaagagctgtcaaggcctcaggcggagtgtgcacaaagtcatagtgtgtctaagtgggtgcttgaacatatatggtttttgttaccactggtttagagaaaaatagctgtggagattatggtgacaagtgtaggattattgtgaatgaatgccagagggaatctctagtcattagataatggctcccttggagctgcccttctaaacctacccaggtgtatagtataaggaggtggacatgcgttaatgaatggttagaattatagatgggtgagataagagtgcatcaatggactcac

SEQ ID NO: 221793 - DNA, 448 bp, Glycine max
  unsure (1)..(448): unsure at all n locations
aagctngagggatcagtagggtaaacagcatatcactattnggtttttattttttccacncgnncttgaaagtgtccaagtccttataggtagtgtattccaaacgatgtgtacatgttgtatatatatactgtcttcaactgtaccgcataagtggcctgaaacattaccagttttgaatcttaataaacaatcaatgtcatcctataattttgtctgtcgatttactcttgatttatattcatgtatccctataattgcatgctttgattcaactatttctggataagtaattgtttatttttaaagctctctcacgaaggtaacagaaatgctgttgtcatcagaaggtaaatgagaatctgacacccatacatacttatcatgaactacatattgcaattcacaccctgtggttgttaagtgcacctcacgatttttaaaaatg

SEQ ID NO: 221794 - DNA, 316 bp, Glycine max
  unsure (1)..(316): unsure at all n locations
aagcaccgcggcngcaggggagggcgaggttttgtttctttgcacacgactgcggggcggctttttgtcacccgctctgaccccatgaatattcttgtgggcagcggctcgccatgccacacttcacctctatccaacggattaatcaaccctgtgcctgccatgcccacttctctatcccccgcctcccgtctgctgtttttagtccgcccacttccatgtattcccttacccgtttctaaacttgccttgcctttattcagtaaccccttatttttcccctcctaaaagtactctgtccctagtaattacaatt

SEQ ID NO: 221795 - DNA, 424 bp, Glycine max
  unsure (1)..(424): unsure at all n locations
aactcagctnttatagataagcaataacgagaagcgagcttttatttantgttattacacccaacacaggtctaatactacttcaaatatatgtgaattgaacaacccttttccatagataggtggtacaacataaacatattgagttgcactaattcctaacattcaaatgcaaaaaatgttgaacacgactatagagtatacagagntcctaatccttctcctttgtttcataaagaccatgtgcctttccgttcacaatatctttagaatattgatggaaaaattgacatccgaatgcgttcttttctacattaactaaaaaagtttcagtgattaattgagaaaccataacttttaatgaaataaattttaagaatcatcagcttatcatggagtgtctgcaacctagaaactccatctt

SEQ ID NO: 221796 - DNA, 430 bp, Glycine max
  unsure (1)..(430): unsure at all n locations
ctcagcttttatctaagtatatcactctctaatgagaagggagtttcacatctccaaagngcgaacacagaacttggctcaagtttctctcgctaggaaggcttcaactaatcttcatcatgctccttgataacctcataaagccccaaagaagatcgataaagagggatccactcaactgacaagcttctggaggaagtagacaaaaatgacagttgtcatgaagtgacaactaacagggtcattctaaagtggtcattctcaagaacctttctgatgagcattttgaggtaacattagaatggtaattctgatgttagctgagaaaggatccatacttgaagtatatcctttacatgaagtcaactgttatgtctttctgaagtaggatagcttcatcaatcttaacacatcttcacaggttaaagca

SEQ ID NO: 221797 - DNA, 271 bp, Glycine max
  unsure (1)..(271): unsure at all n locations
aaaccccccccccgccannaaaaaaaaaaggcgggagggaaaaaaaggaggggggagagaagaacgagaagaaggaagagcgggggaagagaaaagagaagaggaggggggggaaaggaaggaggaacagagagcaaaaaanggacggggggggagagagaaagaagaaaagaaaagggaaaagaagagaaaagggggaacgagaaaaaggaaggggggggggagaaaacagaggaaggagaagaaacaaaaggcggggggggaggaaaaa

SEQ ID NO: 221798 - DNA, 449 bp, Glycine max
agtcttggacaatcgtgggtcatcttgctgttctctagtccctgctatatttgaggattgcctatttgtttgatttaagatcgatttaagatctgatgcagcttgactcttctgtcaacagatggcaggggtgtataactgaaatttggctttacctgtaattagtttataacattctaaattgttttgccaggtatacagactgtatcagcttacaaaagctgctaattttgccgagaagttgttattctctatgaaggggcttcctgcgagtcctgaattggcagaacgaagtggagctttgttcgcaatgttaatcaccttccaagtactagggattgtgtgcctttggtcattgatgactcttcttttgaggctattcccttctagacctgtagcagatcattactgagtttattgtggattaaggaagagtgttgtgagcacta

SEQ ID NO: 221799 - DNA, 364 bp, Glycine max
  unsure (1)..(364): unsure at all n locations
tgggggatattcaatgaattgaagagtaaagatgatctgtatgctttcagtttttggacnatgatcaacgagtcgtgtgaagctggttactctgtgaaaggctttcggcttttggccatgttggaagagtttggtctgtctccgaatgatgttatatacactactttgattgatgggtgttgcaagtatggaaatgttatgctggcaaagaatttgttttgcaagatggataagttgggtttggttcccaacccgcatacttatagtgtgttaatgaatgggtttttcaagcaaggacttttagggaacggtttcagatgtatgaaaatatgaagcgaagcggaattgttcctaatgcttatgc

SEQ ID NO: 221800 - DNA, 363 bp, Glycine max
gaagcattggcctgctatatatcatacccggcagaagttatccgacacaggtccatcattctttgatgcagacaattcctgaactactttcttcagtcctttactaacagatagcatttcctctgccaaatattttaattgtatctgtgtgaaataaagcttatgactcagcttacaccaaaattcaaacagaaagaactgaaatcacctgaggttgatataactgtcgaataaaaaagaaaagaccttggatgcagcctccaagctccctaagtgtttggggaaatcaagaagttctggaggcttttcggcagcacctaccatcaacatcatcaaacaattctatccggcttattacaagac

SEQ ID NO: 221801 - DNA, 388 bp, Glycine max
  unsure (1)..(388): unsure at all n locations
ttaaaactaagctcacgcanccaggagnncccgaaaggcgccgattggattactacaaacaagagcgcgacgagagggatcatacccaagtgaaaccccattcgagaacctgctgacaacaacaaaaatggtagtatacccacgaaatgcacgtaggccggtgatgaaatccacagataagccctcccatggccggcacgaaactggtaaagggcacaataatcccaccatcttcttagactcatatttcgcgtgtcggcaggcaacacatgaagcaataaatcgctcgacaaccttcctgagtcctgtccaatagaagtacttcgccaaactcgctattgatttggcgacacccatatgaccaccctgggaaggggaatgacactcc

SEQ ID NO: 221802 - DNA, 413 bp, Glycine max
tagcatctgaagctttcttgataataatagcctgctccagttatacatttattttctgcctacaaaattcaatatggattctatattgacaatataccctactactcttaagtattcaatattcattctaaaattgaaaattcaatattcaatattcatacctttctgctctaacaaatctgttgttcatctgatagcaatcatcggagaaagaacactatatctgcttggtgaatcttaatcatgaataaaaacaagaattatcctcttacagctctctttgcctatcacatgaataagtaacactgttaatagccaacaagcagtttcacatactttggttgagcataagctgaattagtctgttgcagatgaacctggtttggctttgagatcttctaatggattactca

SEQ ID NO: 221803 - DNA, 360 bp, Glycine max
  unsure (1)..(360): unsure at all n locations
gtataaccccccttttgagagacacctttatctaaatcattccatctntncctagtcgacactcacttaatttcatttctccccctttgttttgagtaagcttcacttgaaataatacttaattggtgagtcttgattaatccctattttctctccccttgacatcacaaaaagccaaaatgcgtaagacatacatgattttattctttaaaaaatatacacatacatccattgtaataatcataaaagattctaactatatgaacagactgataaccactaaattacccatagtcttacataactataatgtagcatctataaaattaagaaactgagtaagtatatattaccaatcac

SEQ ID NO: 221804 - DNA, 384 bp, Glycine max
gggaacatgaaattgaaggaggaaaagggggaagagaagttgaactttgagttgtgtctcacaagactttcattcataaagttaaaaaagtgttacacatgcttctatatatagactagatagcttccttgagaaggtttcttgagaaaacttccttgagaagcttctttgagaaaactttcttgagaggctagagcttatctacaaacaccactctaataactaagcctacctccttgagaagcttccttaagaaactttcttgagaagcttccttgagaagattcctagagaagctagagcttagctatacacacctctctaataactaagctcaccttctttagatgagaagctaaagcttagctacatggtagtcgatga

SEQ ID NO: 221805 - DNA, 462 bp, Glycine max
ggatgaatcttttgcatatataaaactggatgatggcattggactcttaacagaacaatctacaagagcacatgcatctaatcaagtaacaagacaacctcaagaagaaagagaaccaattggacaaattctaaggaagaaccatccagagagttaaatcattgaagatccctcaaccaaagttcaaacaagaggatttctcatacaacaatgttacatagctctcatttagaaatggaacccaaacatattgatgatgtagtggaagatgagaactgggtaaaagccatgtaagaggaacttgaacaattccaaaaaaaaatgatttctagaagctcgtagaactaccactatgaaagaaagtagtgggtgctaagtgggtgttcagcaacaagctaaacaagacaggtaaggatgtgagaaacaaggccagactaattgccaaagggtactcataacaag

SEQ ID NO: 221806 - DNA, 410 bp, Glycine max
ctccttcttccatggcttattccttagtggatgtgcgcctcctctcacctcttctcctttgtcttacattgcatctccacggagaaaaatcaccattgaaggacctcattgaagctcaaagatcaagcctccatagaagatccacaagcaagcttccatcacctcttgttggactaggcccaatttagacggccctcttaggtttagactaacttaaactgagtttcatccacagatccctcttgtaagactaagtttcgatcctgcttcaatcaagttctaaggcaacagtacatttcctaatggatgatcacctaactatgcatacaaatggatgatcaaaccataaacataccaacattaagcattgaaggatgcattgaacatagaaaacataatccattagatat

SEQ ID NO: 221807 - DNA, 436 bp, Glycine max
tagcagccaactcctgaggatcaggcctcatgagtgtttatctttatttagtccagagtgattccccctcttccacaataattgtggtcttcaagaaagtgttaagggtgtcctcatcaagcttaatcagatgacctctcaccctcacatgcttaggttatttgtcctccgggtcatagaggttggcgtataattccttcataatggcaacatcaatgttgcccgcaccaaagtcagtcaccctgatggaagcttgctgtggggcttctatggaggctggatctttgagcttcaatgaggtcctttaatggtgattttccaccatggagatgcactggaagacaaaggataagaggtgagaggaggcgccatccactatggaataacgcatggaagaaagagcttcaccacccagatgagccttggataagaagct

SEQ ID NO: 221808 - DNA, 270 bp, Glycine max
tctgaatctctcttgtaggagaatcttgctcttgtcccaccaccccttcttgttagatatctgctagcaagcaagttgtctatggcgatccagaagcgtggaacaatcttggtgctgtcccctcccaatgaaaaggactcaaatgcggtttcttcctcttgggtcagagattcattcttttccaaattctcacagctgtgggaaatcttggatccacttattgttggcgcctccatagatgaagatgtaagagtcccttttgatcttatt

SEQ ID NO: 221809 - DNA, 301 bp, Glycine max
acagtttacatttggattgttcgcttaccaacaacactttctagacgcaatggctacacctccccattaaccaacatatgaaatatgagcgaactcatgcacatactcctttgaacattcactcgcacaagagattcttctacctagaaaaatgcacctatgcacaatgagggcaccttcgctacctaaactatttatacgtacttcccaggtgtattagctacctacatcacatgcacttcctttgctaaatttacatacatgcatactcaaagcattatggctacctaaaattgcacac

SEQ ID NO: 221810 - DNA, 306 bp, Glycine max
catgcatcttgtaggtaggaaggcggcaatgtagatagaagccagtcctgggaaggacttatctaaattcgcgtgaatgagcctccattccctagacaccacaccaaactggaatgggcaccaagcccaaccaaggtagccccaaatctgttcaaacattctaattccccggtgttgctaggagcacccataatttttttgctgggacatccaacaacatactgatagaataaaaatctttttcaaaacaacttaggttaaattttaatattaatttttaacatgttttaatttataaccttaata

SEQ ID NO: 221811 - DNA, 447 bp, Glycine max
  unsure (1)..(447): unsure at all n locations
ttgtccttagatccctcttgttaactagacttataccttttacattatngnaacagcatacttaaaaccataacttaattcgcagatccctcttgtaggactaagtttcaattctgcttcattcaagttctaaggcaacaatacatttcccaatgttaaaatcacctaactaggcacacaaatggttgaccagaccaagagcaaacacaagttaagcattgaaaaagcattgaacacaacatacaaaatcaattagatatgaaaataatgacaatagtttttcattagaaatccccaacaagggtgtttagccaaccattacagatgaaaccctaacaataataagcttacaaaacctaggtatctctgcanaagtagctcctcttgctgcctcgagagctcttttcctggacccttgttaaagntgtcctgaggtcttaattgtgt

SEQ ID NO: 221812 - DNA, 426 bp, Glycine max
aaacactataaattttacaagacatgaataacaaacctttgcctatgaaaactccagccccaaagcaaagagaagaaacactacaccaaattgtgcaacagtctcaacctgcatacaagtaaaggaaaataagcttatccagtacaaaatgattgagtaacaatataagaacaattaacagcttaaattgaagtttaaagttaaaaacccaaacttcaatgtttcttccatggatggagtaggtagtcatgaaccgccaaaaattactttatatgccatattacttgtgagaacatataatatgttatgctgatagatcattctaacttcaatgtttagggcatcttagtagctttcaaaagaattttttattaaatttcatgatccctaatcaagaatttgcacctcaacatgcttacaccatgc

SEQ ID NO: 221813 - DNA, 470 bp, Glycine max
  unsure (1)..(470): unsure at all n locations
tagaacaatatactggtccttcatttaactatctntggtcttgtcggccactatcaacaaagtactttcgatacctactgtatgttgatttggccaacgtcgttatgggtatgttgtgacaatcctacaaaaccttattgatacattcggagaggttggttgtcatgtggccatatcgacgtccttctctatcataagccatcgtccattnttcctttaaaatgcgatcaatccatgttgctatggctggacttagttgacgaaatttttctaaattttgatcaacaatgtgcttgcacggagtgtaacctgcataaaaattgttaggaaccaacaatttaagtatatatgaaacttaaattaacgtgaccattanaaattaaatcttacccaatttcttcaacatttcttttngtttggcattattgaatttgcgattgaaatgcttgtatgtgcggacgcagaaacat

SEQ ID NO: 221814 - DNA, 356 bp, Glycine max
catgcagctgtgaaaaagagttttatctctttttatggcttccaaatcaacccaaatggaatcctaaacccatcaaacaggtttccacatactaaaatacccaagtaacaacagtttataatttctaacaaccttaccacgaaatctaaaaaagaagctaaaatgttaatttaaggaaagataacttcctatgctcctacaacacttctaatggaagctactatgtaaccatgcaagaaaataagagtaagaagggacttaaggaaagataatttctccttttttcaatgcaataatcccaatatatctaagtattcatgcaatttatcctcaattcataggtatattctaaccct

SEQ ID NO: 221815 - DNA, 459 bp, Glycine max
  unsure (1)..(459): unsure at all n locations
ntgaatctcagtccanactctcttctaaaatcttattttatgcttaaatagggggctntgttcgtgctcgtgcgcttagcgcacttatggaccacttagcgcacattagtgaattttggcttagcgcgtgcctttcttgcttagtggatgaattgaagtggtgcgcttagcaaacctgtacagctcatcttcttctagagtcttcctcgcgcttagcccatgagtgttgcgcttagcggatgctcgctaagccagcagattggcttagcgagaaggtgaaaaacaacacttttcaaagcttgcctaattaacctgaaattgatagaaaatgattattaaacacacaaaatgaaagtactaagtatttattacctatacttaactgaaaatacttataacactacaaaataaccataaattggaagagtttgatacaatttacacaagttttatacatat

SEQ ID NO: 221816 - DNA, 415 bp, Glycine max
agctttattaccacttctcaatagggatattatcgaagaccacaaatggcttaagtctcatttgtggaaggagtagttatatatggaacactcctatagaaagcatattaaaagaaccctccaatgttgttgatagcaatggcaaagttcgtcacggttttgtgctgagccgtgaccatgttgagaaactaaagaaatgggtgtcttttaagtgcaagagtatttatgggttagagttacaatcattgcagacatcaacctttgtagcgacatgttctttgatgtgggtttgtagggtccaatcagaagagaccaataatgctagcactaatcctaataatgatgaaacctgtaaattgccttgctcctcgcattgtatcactcaagaggggcatgctaataagagaaaatgcta

SEQ ID NO: 221817 - DNA, 372 bp, Glycine max
  unsure (1)..(372): unsure at all n locations
ttaccatnctctctttatcatggatgtggcctataattatgtgtataccacctaaccatctcataattatttctgggtattaggattggtaagtagctattctatgatttttattttgtccatttgttaagtagaccttgaaaaatttgataaaacacagtaacttacatggctgcagaacatgctattaagtattgtacgtgatgccacaaaatttatgttactggagtttgatttttgcttttggagaacttttgagaatgaatattgtagttcaatgtattctgtgttagctgacaacactgaatgcttaattatggaataaagggcttagatgtttagaatctattctggcgatctttaatagtatta

SEQ ID NO: 221818 - DNA, 383 bp, Glycine max
  unsure (1)..(383): unsure at all n locations
agcttgtgtacattgggacacagattctatctctaagtctcagaactccattcgatcccacattgaaactactatctctccctgacactatggcttctaattgagttctcagaaaaggatcaagcctttgaccctctctgatctctcctagcaactcagtagtaattctcatagctcccggtctttcattgttaggggtagcctcacacgaaaggctaaggtccctaaacttttctaggagatccaactcactaaccattaggtcagatatatgtagggatttcctattcanagcatcaacgactacattggctttgtcaaggtggtagctaagctcaaaacaataatccttaagaaaactctaccacctnctttgacatatg

SEQ ID NO: 221819 - DNA, 450 bp, Glycine max
  unsure (1)..(450): unsure at all n locations
tcaagctntagtcttcatgttgttcatgttgctaccccatctctaacaataatggctatgcatacgtaatttgtgtatttaaatcacatagcgattacctaattttcctctcttttatttctttttttgtatctaatcattagaaatttaacttcttctgagttttatccagtagatgctaaagtttgtaaatttacagtgtttttagttgtatactttttgtagagatacaatagaaggcatgaaagaggatttaagagttggggaatcacacttagtgcgacagcctcactcaacgtgttaggactgttcagcccaagaagctcgcttagcgcanaaagccacatgggaagccaattgtcacgtgcaagtgcaataagcacgcaccatgcggcttanggtgtggtcacttaagccaagtggactctttgcatcgtgcccagcatgcca

SEQ ID NO: 221820 - DNA, 354 bp, Glycine max
aaaaggctaaataaaccgcgacttaggtataatatataaacctatctcccaatatattattgggttcttttattatgatagaattgccaattgtaaatggatggaccaaaagggcatccaactgttgggaatgctactaccgaaatacaccagtaaaattatgtgagaattgacattgtttggaatgggattccaaattttataaatacattgtagcagtaagtatgaatataacataaaagctataaattgaagtagtatgtatgtcgctataaagtatattcgtctaagaaccacattctttggactgatttgtcgaaaatggttaccctttatatctttggtttaacacta

SEQ ID NO: 221821 - DNA, 431 bp, Glycine max
  unsure (1)..(431): unsure at all n locations
ntgaattctagtcagaaaaacgccgcaaacatattctaatactcatgcctctnctacanncaaaaccggaaacttagattcctaggcaagagtcatccttttggcactttagtctagcttctacaaactacccacacactcacaatgcgcataatttattttgcaagctaagttccacaaaatcatgcgcaaatgccattgaggcatttcaccgaacacttggtgggcgcatgtttaagcatgaaaatcaagggaatgggggcaatgtggcatgccccattatctcagaatgcaccctatgcctaaggccatcccctacaacccctcaattcaacaataacaagcaataattcaaagataatccctcacgttttgagcaatacatgcaacttagagcatcaaatatataatggaagcccaagacccaaaat

SEQ ID NO: 221822 - DNA, 434 bp, Glycine max
  unsure (1)..(434): unsure at all n locations
tggcaaaaggtaaatagctgtatatcaaatggatgntattttcatncccctcaatggacttatcaaggaagaagtctatgtggatcaaccccctgtgtttaagagttctatctatcctcatcatgttttcaaacttaataaagctttgtatggtttataacacgctcctcaatcttggtatgaaaagttaagttcatttttaactgaaaaatagctttataaaaggaaaggtagatactactctattttgcaaagattatgacagtcaattcctaatcgtccaaatatatatggacactatcatattcggtgccactaatgacttcttatgagaggatntttccaagcttatgtaggcagactttgagatgagtatgatcggagaattgaagttctttcttatacttcagatcaagcgaatagatgatgacata

SEQ ID NO: 221823 - DNA, 326 bp, Glycine max
  unsure (1)..(326): unsure at all n locations
agctncatacaaatacacgaatgacttgctgttacgtatttgttctacggatgatcggagttatatactccaatgcggaatcaaaccttatcgtcattcaaacactaaatttagggaaaaacttttctatttcatctttgcccacattaagaaggacaccctcctaataaccggaccaagtgatgatagggaggaaaagagagtgttgtccttgcgcaaaaacaatcacaacacaacttaaactctccgatggtagtgagtaccgacaccgtgttcatgcatgtgaacaagggcacgatggtggtgtgagatgatggaataggatg

SEQ ID NO: 221824 - DNA, 411 bp, Glycine max
  unsure (1)..(411): unsure at all n locations
gcttgatgttgagcaagggggtcagggaccaagccatacacataacttatactttttgttcgacannatagaaactatagcattaaacatgctcgtggtattgataatagaattgtacactcaaagttaaagtgattctatctatctatccatacatatatatatgatctgatttcgaaaaagaacactttctaagacgtttctttagaaaaacgtttattgaaaggaactttcttagaaggttcttcagaaaaccgctttagaaagtctactttataagataatcttttcagacgtacactgtatcacacggttctttacaaaaacatgcttcataaaactgacttagaaagtagagtttctaagacggttttttcataagactatcttagtaagactaatttctaatac

SEQ ID NO: 221825 - DNA, 428 bp, Glycine max
  unsure (1)..(428): unsure at all n locations
agctngnnnnattaatcaatattttatcatgcctaaaattttactaattacatggagattgtttaaaacctttatatcctagagcaccctacccatnttatttctcaactctcaaacctgtcatacttaaagttctcagggattggatctacagataaaaaaaattaaaaaataaaaataaaaggcatatattattaatgcagacaattaattttcataaaaattccccatgtcaactaattaacatgcaacaatgtaagtatagctgacaataattgtcaagttcggtattttatacaataatatcccggaggaaaagctataaattagttaaaggaacatacttccaatgcatttacaaatatgccgctagattcagtagaaatgtcccattgaataaataaataaaagaacaatattcgttactc

SEQ ID NO: 221826 - DNA, 454 bp, Glycine max
gtccctaggctaaacccgtatcacagaagatttgtttatgggataagaaagatgcaaagctgtcagaataaagtagacaaactccttaatgctaaattcattagagacatcagatattctacttggctcgccatcatcgtcatggtcaaaaaggtcaaaggcaaatggcgaatatgcaccgactacactgatctaaacagggcgtgccctaaagatgattaccctctgcacaacatcgaaaaactgtggaaggaatgccttccaagattattttgatgatgccaaagaatcaagtgtaaaacaagtttcaagaatcaagatcaagattcaagattcaagtaaagtatcaagactcaagattcaagaatcaagagaagactcattcaagataagtatttgaagagtttttcaaaacattgaatagcacacgaatatctctaaaagaaaaatcttt

SEQ ID NO: 221827 - DNA, 416 bp, Glycine max
  unsure (1)..(416): unsure at all n locations
catgcagctctttggactgaacagcaagtattttctttttataaccatgctatgtgctcgcgactggtctctttnttcactttgcaacttgagtccactattgctaccccatagagctccgcgaaatttgttcccgccatactcttccttgcgagccctcttggtctcttgttcaagggctcttgcggtaattgcattcttttcccgtaacccgcacactccttccgaacgtgtgtagcggccaacttgaacttctccttggcaagttttgcctttcctaactcgcttttgagagcttggacttcttcgtactcttccggtgctgtaaaactctcttcgctgaccacttttaacttggcaagccaatctaaacctccgatatgaactttcagccattcttggcacccacccatgat

SEQ ID NO: 221828 - DNA, 229 bp, Glycine max
ttcgaatgatttactgatccttgttttgttcttaaccaatggatcacgttaaagagttccctataagagatgcttcttgaggtactcatgtgcttgacaagatggctaactcatgcatggtttattttgaaatgcatctattccctaagaaaaataataattacaaaagcttttaatggtaattatagtatctacaaggaaacttttagcaccaggtctatgccttttg

SEQ ID NO: 221829 - DNA, 379 bp, Glycine max
  unsure (1)..(379): unsure at all n locations
aagcttcctctgggatctacccagtctcttgctgccgcgcgatctactttctttggcnccctcctcgncatgcaaaggaaacgattacccatcttggctaattgagctaagccttctctgagggttggaggagttgataatttgttgtagggtatgaatgaaacaacagctcaaagtcttcttgtagccccaactgattttagagattattaaatgccgtacatttcataatncaatttcaacctaacccacgataataggccgtttttaatgacatctacttattattgcagagttttttaatttattttattaccgtgcatcctatccagtagtcaagacgagacatattgagctgaaaataagcacatgatctgta

SEQ ID NO: 221830 - DNA, 340 bp, Glycine max
gaagatctagcgagccttaagaccgtaaaatatttcaccgtggagattagagatacaagtcatattgagtgtagattggagaaatatatatcttcgactaagattgaagatacaagtcatcaatggtataaaatactacaacgttttatttatgagaaataattataagctattatgtacgtttgaacctttgtctataattactatattgcaccatgtaaaggtagagactgtaaacactcacatattctattaagtgcacacaacgttcacatatcaacgacgtattaaagacaatgtcgtaactaccattttggttccatcattttacttctttatt

SEQ ID NO: 221831 - DNA, 360 bp, Glycine max
  unsure (1)..(360): unsure at all n locations
tctaaacaagatatcacggttagcaaggaggatcttatgtatgtcagtgtnggaaaccccaatagaacggaagaactcgagtttaggcaaaagggtattctctgcatcctcaagaagcaccaaaggttgtttcttcgcaagttttgcaacctggattttgtcaaacccatagttgctgagcatatcaataacagcatctgggccatctgggtttttaaaattgaccctgctggagagttccttggcttttcatggtggcaccccacatgaattgatgaggtatgacacagtaaaggtgtcacctttgcggcggattccatctgattcgaaatcaaacagctggctgacgtgatgaattga

SEQ ID NO: 221832 - DNA, 360 bp, Glycine max
agcttgtaaactaatacattatgaatctctgataccacttgttagacaagtggtctctgctattctaagaaggggggctgaattaatatatttcaaactactttcccaattagaaatctatttcactttttattcaagttttaaattcccttaataatgaacttcttaaatattgattcaaataaaaaaaatttgaatatgaatataaagaaataataaacaaaggagattaagggaagagaaagtgcacacacaaatttatacttgttcggccacacccttgtgcctacgttcagtccccaagcaacccgcttgagagttccactatcttgtaaattccttctacaagttcaaaacaca

SEQ ID NO: 221833 - DNA, 384 bp, Glycine max
  unsure (1)..(384): unsure at all n locations
gatccttatgtcacctgcggcagcaagcttctacttatgggcttggcggctttcttcactttcttgactccaacgcgagctctgaccactgttcttccttcccgcgatgcttcttttcatgtccgcctgagtgggcttatagcctaaaccatacttcccacgatttcctttgggttttatcaggctagttatgctgccattgtctttgcctaaacccatcccgggttcataaccgttccctaacataactcgggccatcattaccgccgcatcggacagaccaggttgcccanagagggagtccacggaggaaatgctgaccacctcaaaagactggaaagcggtttctaacgattcttctgcggcttccacataaggcatgga

SEQ ID NO: 221834 - DNA, 401 bp, Glycine max
  unsure (1)..(401): unsure at all n locations
aactaagcttctcccaatttctataaatagggggagaagtgaagtgtttattgttcggccccttacgcacttctctctctttcgaatttgcttggaaaaactgtttccttgaagaaaatccacgccgaggagcttccgaaatgttgtcgtaacgcttccgtgaggaatttcgcgaaagtttcgaccgatcttcgacggtcttcattccttctttatccgtcttcgatcttcaacgggtaagtacctcgaaccaagttttttcgattcattctatgtacccgcggcggggcacaattgcgtttcgcgtatttttaattctcgttccgattactttnttactaccccctctttgacgtgcctcaagccacttttatttaagtcatttctcgcttaacctaaaa

SEQ ID NO: 221835 - DNA, 431 bp, Glycine max
acacatgaaactcagcttcccagtttctggggtccaaccttgtatacttgtgctattcatctattcattctcttctccctctgccaaaaagaatatgccaaggactaaccggctgaattctttttgtggctatcttctcccttttgcaaaagaacgaaggactaaccgcctaaagtcttttgtgtctcccttctcccttgtcaaagaattcacaatgacacagttcgagaattcttttgattcttcccattcccttatacaacagtgttgaaaggactaaccgcctgagaattcttttgtatccccattcacaaagtatcaaaggtttaacagcctaagatcttgtctcaacacattggagggtacatcctttgtggacaagtatagggtcatctacttgggttgactgagacaaagtaggtactcttttg

SEQ ID NO: 221836 - DNA, 400 bp, Glycine max
aactcagcttctctttgggcactatctcagcctctttttacgtgtttaaagaagcccgatagggtcacgtgcaggtgctgctactggtggaggcacttgaatttggttgccagacctcaaggtgatggcactcacatttttcgaattctgcacactctgtgaaggcaatttgtcagaattttgggactgagcttggttcaactgagtagccatctgccccatctgatttgtcagagtcttaatggaggctcttgtctcttgctgacattgcatattctggatggtcatttgcctcactaactcttctaaggaaggttgaggaggagccccaactgcttgatggctttgtaatgactgctggtgttgctgctgctgattggaggaggacatatggttgctt

SEQ ID NO: 221837 - DNA, 416 bp, Glycine max
  unsure (1)..(416): unsure at all n locations
agctntgtgtaatcgattacactaatgtggtaatcgattaccagtgattgtttatgaattaaatcaaaagatgtaactcttcaaatagtttttgactttttcaaattggtttttaagtttttctaaaagtcataactcttctaatggttgtcttgaccagacatgaagagtctataaaagcaaggctttgttttgcatttcaataatcttgaatacttttccaatcaatctcttacaatcctttacaagccttgaatctctttgaacttcttcttcttctttgtaccaaaagctttctgaagttttctggttttctaaaccttgaaaacttgggctattcatattttcaactcttctccctttgccaaanagaatatcccaaggactaaccacctgaattctttttgtgtctcttt

SEQ ID NO: 221838 - DNA, 439 bp, Glycine max
  unsure (1)..(439): unsure at all n locations
atctctaagtcacctgctgcatgcatgcttgcaatatatagctgatatgcatgtgttctatcctcaganagntnattaggtgccactggtacatgatcagatattcgtgtaccaagatggtcggcgagactgattatgtttgatgaggagctttgagcatactgcatacaatcatgtactcagtcaaaatccaatgaatgtccatagtattttatgattgttatgcagcaactcaatgcataagctaattttaagttgaaagaaacttatttcattttatattcttatttttttttctcttacaagtgtttattgaaaagtttatccaaataagacctagataattacctctaacatggacaacggctgggaatgacaggcacgcacaaatttaactaaagaatctgctggaggagattctcttgaaatgctggacaat

SEQ ID NO: 221839 - DNA, 426 bp, Glycine max
  unsure (1)..(426): unsure at all n locations
agagagacttcttgttggattctganaagaacatcaacaagatcttcgtcctctacttcaactctgccatcttttgctcttatttgcctttctagatgctctctgacaatgatttccaacaccttgtcaaccctattcagcagcttctccaatttggccttcgacccagttatgaaatgtatggatttcattgaaggaaacaaatcagcaaggtcgaatcctccaaccgaacctattactttctgaagccaatacataaactcatcctggtccttatattngttaccaattgctgcccttgaaacagacgcacttaccagtgagaaaactcttctagtgagattgattggtgaaccttccgatgctccaatcgagtctataaatcttgctgtctcgccatctctaatacaagagaaagactgaacc

SEQ ID NO: 221840 - DNA, 322 bp, Glycine max
aaaatgtcatgctaatccctctgatattagaacgaactcatgttatatatttatgcacacgcgtacgtgtggaatatcctaccatttatatcaacatagaggccatccaacacattctaattgtcacacacatatatgcatttgaaaagaacatacattcttacgctcaaggcattgcgtcaaaattcacacctaatttatatcctaaacatttgctattacaaactacctacatatatttgaaatatatatcatacaaatttttatttgttcactcacatttattcatattggcgagctatttacattatgcacacacttg

SEQ ID NO: 221841 - DNA, 393 bp, Glycine max
ccgagaagttcatagtcttttcgattattggcaacatatgaatgagttgatgttccacataattaggaatcgcttaagcgtttgtatttgtgctttcacttggaaaaaataaacaatatttgtcttttaatgaaaatgagattttattcaaccctatgtctttgctgaaatttatgtgtgggttcaatacttcgacaacttatcattgtcatgcattcatgtttagttcgttgtcgcattactcattgcattttgttctgttagcagttatagtcaaagtaaacacaataaccaaaaagaacgaacacgctttatggcacccctatcaaacacgttccaaaaccaaaatcatgagagagataaaggaagttcaagagcagatgaaggctgaca

SEQ ID NO: 221842 - DNA, 273 bp, Glycine max
cctttccttgatttgaagctcactacaagccttaagtgaaaaaccatgatattaccatatccttaacgaattttggagctttggaattgttttgggaataactgtggggggtttttgtttattggacaacttggtttgttggctatgcttcatgaagtattttgggccatacttgatgtacattgtatactggttaaatgtgggacatgctgaatgaaatggttgttctcaaaggctatatagtaaataaaaaatattcaagagaaaaatttg

SEQ ID NO: 221843 - DNA, 135 bp, Glycine max
tcacaactttcaagctagtctacatccacacatcttgaactattaaaagcgaagagaagcggggcagaagcataaaactctgcccaataacacataccaataccacaacttttcttacacaacatccccatgaac

SEQ ID NO: 221844 - DNA, 380 bp, Glycine max
ggagacgaggaactgacctgtggaggagcgactttgctttattgacgaccacagagcggtcactggagatatgttccggtgagaatgatacctcgtcgacgccacgtgaggcgctattgaccacaaccaagtcttgactcaattccgacccacactgggcatattcagatagtgaaaacctgcgatggtcctaagcgcgcgagcccatgtgcttcaactaactacggataactagaccactaagcaaggaggcttgtcgtgcctctccaactgcgaatcttgtgtaatatgtggatagtggcctctcgtcatcagatatctaatgtgagtcaccgatgaccctgtgtgatattgacgacaggatgtttacatagtctctc

SEQ ID NO: 221845 - DNA, 312 bp, Glycine max
aaagggggggttaaaaaaaaacccccccgaaaaaaagagggagagaggaggaggggagaagggaaggaggaagggagaagggagggaggaggaagaggaaggagggaggaggagggggcgggggagggaggagaggagggagaggaagggtggaggggacggaaaggagagggaggggggggagaggagaggaaaaggaagagaagggagggggaaaacgagggaggaaggggaaaggacaggggaaaaagggaaagggaggaggggaagggagagggaagcagagggaaggaagagggaggggaggagggg

SEQ ID NO: 221846 - DNA, 86 bp, Glycine max
caccaaaaatatttagactaataatttacaacatcttttttattgtgctagatgctttcagataattatgaaacaaacatgttatc

SEQ ID NO: 221847 - DNA, 309 bp, Glycine max
agccacggctaacgagacatcttgccaacacgacgggtacccataactcgcctgagcatcttcatccatgccatatgtagcaaatacattgatcctgtcacgttcgatgaacgggaaaatgaggccgcaaccatatcgcgccacctggagatgtattgaccccccactttgtttgacatcatgagtgactcagatcgagcatccggccacagaaaccaaaagatgaggccctagccatctgcggcggacgaactcggtagaacgatacatgacgaccctcaaagggtctacccagaagctatatcctcc

SEQ ID NO: 221848 - DNA, 406 bp, Glycine max
accttgagatgaggaagtgattaatggttattcttcctgctattaatgcgatgaccttctattgtgacctggagatatgacgtgggggttatgataccatcatgacctctagtggggtgcaattgcccaaaaactaacttgacccatccccaccctacccgtgcattgtctgttcgagagaacctgtgatgtacctaaacatgcgagctccttggcgtctacatattaaaggaaccatcaccacatatcaaggaggcttgaggtggctggccacactgtgaattttgtgtaattcatgggatgtggccttctggtaaccgactaccaagggtgggtaaattattacaaagctaaaaaaataatacaggaggcttaatggtctcttgaatttattccacgggtgtat

SEQ ID NO: 221849 - DNA, 347 bp, Glycine max
gcggccgaaggaactagttccgctctttagtacgacagtcaccgctttaggagcgttgtacatcattcgcgcttcgaagccatcaagggatggtcgtttctccgggagcgacgcgtccagctcagggacgacgagtatactgatttccaggaggaaataaggcgccggcggtgggcaccactggttactcccatggcctagtttgatccagaaatagtccttgagttttacgccaatgcttggccaacagaagaaagcgtgcgtgacatgaggtcctgtgttatgggtcagtggatcccgttcgatgccgacgctttcagccagctcctgggatattccatggtgtt

SEQ ID NO: 221850 - DNA, 191 bp, Glycine max
aattacatgagagcagaggttgctaagtttcaagcctatcgatttgttatattctcaacctggaccttaccgtcaagagatatgaccataccattttcactagagctgaccttgtgcatgttcagagcgtatccacatgtcatgcgacgcactcgaacctgccagtcaaatgatatgacattgtcaattta

SEQ ID NO: 221851 - DNA, 373 bp, Glycine max
  unsure (1)..(373): unsure at all n locations
cctcaccctacgcctgtcattcttctatcggagagngacaatagggagtcttttgtatatatacaagttctgatatgctttcccattggaaaacatgttgatgagatactgtttgatgtactccctatggaggctagcaatctctcacgtggaaggccttggcagcatgataaagatgttgtccataatagtcgcacaaacaacatttcattgttacataaagggaaaaacgttacccttacccctatgtttgcaattgaggtttgtgacgatctaataaaaaatgagagcgcatatagaacatgagactcacgcgaatctttcttaaccttacaaacccacactgatgcgtatatagagttatcttattaca

SEQ ID NO: 221852 - DNA, 323 bp, Glycine max
  unsure (1)..(323): unsure at all n locations
agctttgcttctacagctaggnggttctcttatataaatcagaccattgatcgggaggccgattagatggaactcccttatttctattaaagttattcctggggtgggatctccaaccttggccttaagagaaatttcctccctgattgtatccttgaagtcctccttgatggaacccttgacaatgtggattggtcatatagttgacttctttggatgcatcgtcntggaccatgcacatgcctgactcatgggccttgccatagatgttgcatcccccaatgaacatgaatgaaaaatggacaggttacacctgcttgcac

SEQ ID NO: 221853 - DNA, 410 bp, Glycine max
  unsure (1)..(410): unsure at all n locations
tcttatccaaggcttatcttggtggtgaagctccttcttcctggctnattccctagaggatggcgcctcctctcacctcttctcctttgtcttccgctgcatctccatggtggaaaatcaccattaaaggacctcattgaagctcaaagatccagcctccatagaagccccacaagcaagcttccatcatgtggtaatcagagcacaagagcttcaagtaagtgttccttaaacctccattattttttttctttaccttctcttccattgctgtttcttcatttttctccatgtatctcctcacatgtcttggtctaaatgttgtaacatgattctttagaagtttcaccgattaaacttgctatagaaactagatttgatttctatgggtcaatttcttgttctagttc

SEQ ID NO: 221854 - DNA, 434 bp, Glycine max
agcttcatacaagcgtccagagatttcaccattaaaccgttctatgattatattagtatgtatcatttgataatacaggatacctgagtagtccgaaggcacatagaaaacattgcactgatcgagggcctgtgttttgctctggattctggaggaactttgaagagttgggaaagtaaaggcacatataaggatttgtgttctaaggcataaaatttattaaaaataataaaattataagtggaaattctttaagaaaaaatataaaatttataccattattacaaattttacatggtaataataaaaactatggtttaaaatgtattatctttaacatatttctagaatattacaatcgataatgtcgttttaaataaatgaaaatgatatattaatattcctactctttaacatcctaattatatttatta

SEQ ID NO: 221855 - DNA, 379 bp, Glycine max
  unsure (1)..(379): unsure at all n locations
tctgaagctntacggggctcattgtctccagattgctgcaaagaaggacaaagtatcttcttgcgatcgacagaagagcatagaccacagactcttgcatcacgagaagatatctataacgtggcaagctgagatactatgatagaccagagcgatgtcgaattcttcaaaatctgtattttcactacactaagaagaatctgtggccacctcatagacttctgtaaagacaataacatcagttacttgcactgagaagatgcgagtaggaagccatcatctctatcaaatacctatctacagcgagggacatatcacccatagcttcgccactatactcatcgatcatactgctctacatgttgctaagttcctctta

SEQ ID NO: 221856 - DNA, 234 bp, Glycine max
tgcatgtatatagcaaaaatacctcacaaaatatatatatatgtgtatgtctaggtagcaagatacctgtgatatgcatctatataacaaaaataccccacaaaaatatacatatgtttaagtagcaaaatacctcatgaaaaaaaaaaccggaaaccaaaaaattaagtggttacctgaaaaaaaaaccaccatgcttttgaaaaaaggaacctcccaccttttctttgaaaa

SEQ ID NO: 221857 - DNA, 465 bp, Glycine max
  unsure (1)..(465): unsure at all n locations
tgtcaagttctacctcttgcatgtctgtcatagctaatctttgtttctatgatacagncctacgtngatgtcaggatcaacaaacatagctggtgaaggctgaattgatgaccttgaaggaagaatccattttgttgctcgttattgatatggcctcattaaacatcttttaagtctgatgaagaagattgtaagtctgatgggccccttagtatgctgaaatatcttcctttgctccagacttgcaatcatagcctcatagataaacactttagtactccatatgctttctccattcttctaagtttgaattcatgcatgacattaggctgtgcaacatcgatcatttgttcatcaactcttaacactagctttggataagaacattttgcactaggatctgtttcaacaatatcatcctcttggtctctaaggtatgcttcaataacatattgaagcatggct

SEQ ID NO: 221858 - DNA, 308 bp, Glycine max
gtctatatatacctagctctcagttcaatttgatctctatatctaagcttcttttcttcatttccttgcaagctacatttcatgaatgacaaagtttttatccaggatatgcccaacctgaaaaggattggtacagttgatatggtgaaaggtctttctaagctgaagatgcttactctcaagcctctcaaggagtatgctcctagtttatcacagcttctattcctgttggttctgctagtgtttcagctttttcatgtaataaaatacctatatgtgaatgtatgtatacatgattttgatgatgt

SEQ ID NO: 221859 - DNA, 454 bp, Glycine max
  unsure (1)..(454): unsure at all n locations
gctggagctgaccgctnaacgaggcgggaagctggacttgtcttgcactctattctagacgcaatttccctccaaattgttgcatcaattattgcatcaatttacctccaaaacacttgcaatgtgcctttttttgaatcctgtgggtcaagaattaaaatgatatcaaaatcctcattattctcttaaaaataaatagtaaagtagaggaaatctagtcattcttgtttgattggactatcaattaaacctaaatttcacagttatcatgatgaagttagagattctaatgagttagatactcgagatggaagtgacgatgaaagtaatcccaaagtcaaatttcctcgatttaaggtgtctgaanatgatgaaaatgtaaagcttgaggtagggttgcaattcacaataagaaacaaattctagaggttatcaaaaccttcggtataatgtc

SEQ ID NO: 221860 - DNA, 349 bp, Glycine max
  unsure (1)..(349): unsure at all n locations
ctctcataactaagctcacctcttgaaagcttcttgagaagattcctanagaagctatagcttagcttcacacacctttctatagctaagctcacctccttgagatgagaagctagagtttagctacacacccctataatagctaagctcacccccatgacataatacatgaaaaaacaaaaaaagtccctactacaaagactactcaaaatgcctcgaaatacaaggctaaaaacctatactactagaatggccaaaatacaaggcctaaacgaaggacaaacctattctaatatttacaaagaagagtggatccaaccttgacccatgggctcaaaaatctacccta

SEQ ID NO: 221861 - DNA, 414 bp, Glycine max
tgatcattggcagaatggtgggtagccacctgtgtcattgttcttatagcctcacggggttgccccttgtccagagacattggccaactacatttatgtgttacatacggagtacgggatataggagatgatggtgtagaattaccactttgactacttgagaccttagacaatgccactaattggcaccgagactcttcctctctctttttatacccttttctttaccaagtttgaccgtgagataacccaactgagatgctttcattgggtcaaaagtttgaactattgaggatgacaattttctttcactttgaatattcaatgcatgactagtctgttcatgattcttagatctgagtgtccactgttgagatattcccgttcacatggattgccttgaccataggaata

SEQ ID NO: 221862 - DNA, 255 bp, Glycine max
aaaaaattgaacaaagctcaatattttgatattctattggtcgcctagatgtagacatgattgacatgatgtatatggaaaaaaatttggatagtaatcggccgctctaactcaaggcagaaaagaagatgaatggcatcaaattggttaatgggatcggaatagtggtgttacaaccaagtgaaaactattccccacagttacttgcaaaagaaaaaagtatatatgctcaacggaaggccggctcctaaaata

SEQ ID NO: 221863 - DNA, 328 bp, Glycine max
caccttatagaccttgaattctttcatgcttcaagtttatcttcgggagttcttaatcttgcaatcgtggtaacacaggttagaacccacttactcatatattcacagcttgaaagttgggactagcctattatgacgttatcgttctccagaatattaattgtgaataataggctttccaattttccctgggtcctattagatctctaagcacgtgctattccttcataaggtttttggaagccattataagaaattttataaacctatcatatcattactaatggcctttattgatgatagatctcattttttgcagggtttaatt

SEQ ID NO: 221864 - DNA, 407 bp, Glycine max
tcacaccagcatacaaataaaacagtattatgaaaaaaggtacgtgagctcaaactcaaagaatgcataatatatcattttaaaatcagaaccactgaaccaccatacattataaaagaatttgccagatcaaacatctaaaatgggtagaccttacaagaacaattagacgagaagaaagtttcatgcagaattaatgtacaaaatgcaaaaacaaaagacaagccttcaaaacctatggtcagagacactacgcttattggatgttattcatgaacttcagtattcgttattagaatcatatacgttcaggagtcttattaatatgttatgttatcattggtatgtagcagaattgtacaagacctatcatagtctagtgttttgtaaataggagaatatgttag

SEQ ID NO: 221865 - DNA, 381 bp, Glycine max
  unsure (1)..(381): unsure at all n locations
cttctggtgggacatcttgacttgctttccgatctgacattcaccacagattctgtcttcttctattntcagattgggaatgcctctaacagcacctttgtcaatgattttcttcatgcctcttangtgcagatgtccaaacctttgatgccatattctgacttcatcttctttggaggataaacatgtggaggagtaactggtttcttgaggtgtccataggtaacagntgtcctttgatctgctgcccttcattagaacttcactcttctcatttgtcaccaagcattctgactttgtgaagtttacattgaatccttcatcacacaactgactgatgctgatcaagtttgcagtcagtcccttcaccaacagtacttt

SEQ ID NO: 221866 - DNA, 369 bp, Glycine max
ttcccaacgattggccctttaaggagcaggaactcaaggccctctatgcgcgaagggcgaatgcaattgaggaattggacaaaagatagccgaacgcaaggaaagggtaatagttgtctttccttcatagaacacaccgttccatgtattttttttttaattcccgcacgtaatatgttttgatctgtgatgagatagacagcgaaataaatgaaaaatatattgtagaaatttgatggagtgatggaccttgtttttatggaaactaatgggtaaaccggcatactggttgctgaaagtgtaagtatatacatttttgatcatggaccgaaggagtgacggattgactttcaggaactttttgtttta

SEQ ID NO: 221867 - DNA, 469 bp, Glycine max
cgcccgaaaggatgcttccacggaggaagagagagaggtgtgtttctgagagagggcggagcacgacactgaatgaataaaacacggatagaagtggaacctctaagtgtgtctcacaagactctctttcatcaaagttacaacaagtgctacacatgcttctatttatagactaggtagcttccttgagaagctgtcttgagaaaactaccctgagaagcccctcttgagaaaacttacttgagaagctagagcctagctacacacacccctctcataactaagctcacctccctgagaagctttcttaagaagactcctaaagaagctagagcttagctacacataccctctctaatacctaagcccacctccttgagatgagaagctagaacttagctacacatcccctataatagctaagctcaccctcatgacaaaaatatgaaatacaaaaaagtcttactca

SEQ ID NO: 221868 - DNA, 285 bp, Glycine max
gagaagagaatgctgttcaagtttgtaaccgataatgggagcaactatgttttatcgggtatagtggtggaggagaaaagaaacatatttattggactccttgtgcagctcattgtattgatttgatgcttgaagatattgggaagcttcccttgtaaggaaaacaattagaagggcaattaatctagttgggtttatctatgcccattcaagtaccttaagtttgttgagaaattttacaaacaacagggaattggtgagacatgctattactagatttgcgac

SEQ ID NO: 221869 - DNA, 431 bp, Glycine max
  unsure (1)..(431): unsure at all n locations
ntaancaagacacananatgagagatgggcaagatggatgatccagacaggctctatagtcttaggaagggtatattaaattggaagagaattcctaactgaagtagcaaaaggtttggccaaagtatttaagttaaaaagcgtttttcacgagatttactctctggtaatcgactaccataggatgtaatctattaccagtgaccacaaatgatttacaacagctattaaaatttgaattccaaatttgcattggtcatccattacacatatattataattgattaccagcagacattgaacgtttaattcaaattttacagcttgaatcgatacacacatactggaatcgattaccagaaagatttcaaaaataattttcacagtcacatctttcatttgtcctgatgccacaaagctacattatggat

SEQ ID NO: 221870 - DNA, 382 bp, Glycine max
taattttttatgcacggatagatagccagggccaaactttccagaatccatctttctcacgaatacggtcagaacctattcaccaagcacaagggaataatcacaacgattaaaagtttaaaactaggttttaattaagttgaaaggtgtactttgctcctcttaatgcaatagcaaacacatacctgtcccaaaactttcttcacacagactgaacataatccagcatccattaaattaccaaagaatttccgacccgtggggacctggttttgaataacaattaaataaaataattacatgtcttatagccaccaaaaagtattttcatacttaaaagacattgtagagcaatatatctcaaaagattcacattcagatg

SEQ ID NO: 221871 - DNA, 364 bp, Glycine max
tgcttgtggggctcctactaaggctgtatcgatgagcttcaatgtggtcctttgatggggcatttccaccatggagatgcatccggaagacagaggacatgatgtgtgaggatgcgccatcctctaatgaataatccatgggagaaggagctgtaccaccacgatgagccttggatatcaagcttggtaaggatgctgcaatggaggaccatcttgagggatataacgagagaggggggagcgcgactttgaaggaagaataagggagagtagctgaactttgagttttctctcacatgactctcattcatcatagctacgacgagcgatacacatgctcttgattttagactacgtaccttcc

SEQ ID NO: 221872 - DNA, 148 bp, Glycine max
agctctagccaaatgacttaccttgatttatttcttgaagccctttgaccctgttcccttctttgtttgaaactactacagccttaaatgaaaaacatgatatcaccatatccttaagaattctggagctttgaaattgtttcggaat

SEQ ID NO: 221873 - DNA, 373 bp, Glycine max
  unsure (1)..(373): unsure at all n locations
atggcatgttggcatcaccgcgattcttgttcttgtcagcttcacacttatcaattgctacctacagtttattagtgcctncaacaaccctcatggtgtagaagtagcaccaaaaactaaagttgtgatacccccaacaactaccatattctttgtcttatgtggaatgatcatatattccataagctcacacattttgatcaatgggggaattagggttagtacaatctccacacgtaccatatcccttgttgatgatgcatactgatttttatatgacaatgcttgctaaatcctaatcgaaacgcctctaatcattccatgcatatactacttaattctacttaatactttcactaatttctcggattac

SEQ ID NO: 221874 - DNA, 371 bp, Glycine max
  unsure (1)..(371): unsure at all n locations
gcttagaatttgtcctggcttcanaccagtgtaacagattgtttattatgcaagcagaagagaatgcagcagatttgacatataatcctagcagccatgatgaacatgacaaaacataggttatttagcagcagagttgaagcaagacgttagttaattaattaaagtgaacgaataaaacataattaaaaaaaagcgaaaaaaatctcaagaactgttatacataactcaaaacatagatttatattcatatatttaaaaacacgcaagggtagttccaaatgcttcaataccaaaacagagaaacaagcaaagttcctctgaagcagagttccttttcttactgctactacccatggcggcaaaagacg

SEQ ID NO: 221875 - DNA, 353 bp, Glycine max
agctgtaggaaaatggaagtttaaagtctttgttagtatagtaggaggttctcgttgttggcaggcacgacactaacaatgtaatttatttgtaagtagattagcaccaaaattttgggtaacttgtttgaaacaaatgctaaacgaaggaaatgaatgtttatattaatccttagactgtctatcttgtggaacaagtacaaaatttgtaggaccaacccttctcattatagagtgactgagtcacatatgtatgcaccaaactaatgtcattcgatctattcaatagacctactgtagcattgaactaagtatatatatgtatggttaggttactatgactttaacctttt

SEQ ID NO: 221876 - DNA, 376 bp, Glycine max
  unsure (1)..(376): unsure at all n locations
ctcaagtgttaaatgatctttggatcgattcttgaaaccacttcatgtgttttatacaatattgagagaatagatgaattacattaaaactcgtgataagtttttctaagagattcatggccatcgaaacttaccacatcttcctggtgtgactcagactctntaaaagttgtgtccaccatcagacatatgttggcctcttcgtgatcttcatcagacgaggttactgtcaagtccttacacatgctcataaaccctctcttttctttaagcttaaagaatttcctcttatcttgacctttctctagatntatacattcaaacttggaatggccaactttttgactcattcaaactatgggccttttccttttct

SEQ ID NO: 221877 - DNA, 343 bp, Glycine max
tagcttgagcaaattcagacgacaatatcttttgattcggatgtccgattgcgtctcgtaatatatctagacgctcgtaattgagaacgggaagttctaagaaaaatcaaacaccaataacttttaactcggatgttggatatagccccgtaaaatatcgagacgctcaaaattgaaaacaaaagcactcagccaattcaaacgacaataacttttgactcggatgtccgattgtgtcccgtaatatatcgagacgctccgaaatgaaaactgaagctctgagaaaaatcaaacgaaaataacttttttctctgatgtccgattgagtccccgaatatatcga

SEQ ID NO: 221878 - DNA, 435 bp, Glycine max
  unsure (1)..(435): unsure at all n locations
ntaacctcatcgtctctcacaggctttatgattgggagtctatccagtccttgtgttcggactctcagccacttatgatagccgctgatgatcccattactgcttcccctaagctctttgtcctttcttcacgccgcatcccatgccttgcgaactccttggagtacccttgcgttgtggtcactgaaacctcgtgcgatgaaaggcatgatgctttcgtctgatggcactcctctcatgggacatccttcgcatgaagatagaatcctgattcttcctttcttctagcgagggaaccatttaacagacgcccctccatgctagccaagagttggtgcacaacaaacaattcttgcgccgctcttttacatccccggtcgaacgtgtcatacatggccaaaatggcgacaatcgggcttttcttgccatgatgaa

SEQ ID NO: 221879 - DNA, 218 bp, Glycine max
  unsure (1)..(218): unsure at all n locations
cacggagnnaaaaaagggggggggtttatgaacaccacagagcaggaggaaggccccccccccccaacacagaggagagaagagggagaaaagaaagaaacgaaggagagaggggaaaagaggaaggaaagggaacaaaggagagagagaaagaagaggagagagagaagacagcagaggagggggaaaggaaaaaaagaagagagaaagaaagagga

SEQ ID NO: 221880 - DNA, 211 bp, Glycine max
aacacaaaaaaagagaaagaggaacccccccccccaacaaaaaaagaaaaaagaaaagaaagaaaaaaaaaagaagaaaagaagaaaaagaagaagaaagaagagaaaaaggaaaaaaggaaaggaaaagagaaaaaaagaaagaaaaaaaagaagggaaacggcgaaaaaagaaaagagaaaaaggaagaagaaagaaaaggagaaagag

SEQ ID NO: 221881 - DNA, 386 bp, Glycine max
tcttgaccacagagaggaccctgtagatatgtgctagcgcagtcgtgatactcttctgacaataagcgctgacctattgatcatttccattctcgagcgaatacgaccattgccgttcttattctaccatggaaatcctatgaagtaccttatcttgtgagctcctggctcttacccgtaacttgaacaaaactacttctgatcgaagcttttgaggtggctggccgccttttgaacatgaataatattatcatattggactctggtaacctatgcccaacggagagagttcatgctcattgcttacaattgaaagctagaagttatgatggcctctggttatcgaatacctaagatgtgttatcgattaccactcctataaatgg

SEQ ID NO: 221882 - DNA, 441 bp, Glycine max
  unsure (1)..(441): unsure at all n locations
agcttccttgagatacttacttgagaagaatctttgttaagctctcttgagaagctagagcttagctacacacaccccctataatggctaagctcacccccatgccaaaatacatgaaaatacaaaaaagtccctactacaaagactactcaaaatgccctgaaatacaaggctaaaaccctatactactagaatggccaaaatacaaggcccaaaagaaagaaaaacctattctaatatttagaaagaagagtggacccaaccttggcccatgggctcagaaatctaccctgaggatcatgagaatcctaaggccttctttagtagctctagaccaatcctctnggagacttctatccaatacacctggggggtaggattgcatccataaccaaagataaaaaaaaatgacatgatagctaaaccaatagaagtttaaca

SEQ ID NO: 221883 - DNA, 451 bp, Glycine max
tatgcgcatatttccttacaaacgttctcttgcacaagacattctattattcgtaaaaaatgcacccatatacaatcaaggcagcttcgttacctagattatttacacgtacttccaaggcgtatttgttacatacatcacacacatctgcttggctaaattcacatacatgcatactcaaagcattttggggtaccaaaaattgcacatgtgcacatcttggtatttctaatacctatacatacacaaacttcatgatgaatcttgactatctacacaataaggtgctacatttcatgctcttttcaagtttttgctacctaaagccgcatgcaaattcaagtatattttcctttgctgactaaaattgtattcaaattaaaaggtatacattttttggaatgtatcttctttaataacatgcaacatatttatgtatatttgtttgtga

SEQ ID NO: 221884 - DNA, 453 bp, Glycine max
  unsure (1)..(453): unsure at all n locations
agcttgggncctgcgtttgagattagatgtgtatgtatgctttcttgcgctgtaagcgttatgccatgacattatcaagcatccttccatgggcctcttcgctacttacaatgttgggcctataaaatccattggacctctgtccattgagcctaatgcagttggaatgcacggaagcaaatacattggtgtgttaagtaattctcctttgatcatgaggaagaagtgtgaggaaaagctataagattgtcacattaagttgctaatcattcttttaatcgctgatactttatagacaaaattcatttcgtcaggattggaaatatatagcttctaaatgttgcattaaatacatctttgtagaacataagttttcttagtaattttcatatcttaatcataatataatatttcattctcggtatttgaccccgtctattgtttctacaaatc

SEQ ID NO: 221885 - DNA, 451 bp, Glycine max
  unsure (1)..(451): unsure at all n locations
taagctctggcacctctgcttagcacgttgatatgcttgttgaacattacctcatttttgatatacgtaggggaattgacactcgataagaaataacgcacttgcttgcctcgaaatgagatatcctttgctgctgcatacgcgctggtggaagagactgttgatttgctaaccaatgcgtgagttgttacatcagactctgataagcatcatgatcttttgaggacatctgctcggaacctttcgagaggtaacaatattaacgatatgactatatactggaatgcaaaatatataactttactatttgtttccaagtattctattattaaattggatctattagtacacaatgactaatatgctgatggcaccaatggaattgcatcgtncttcatttgtttatatatacggagggacgggattgcgcnagggatatatgctactgaat

SEQ ID NO: 221886 - DNA, 499 bp, Glycine max
  unsure (1)..(499): unsure at all n locations
ttaagtcacctgcggcatgcaagcttaaaggaagtgaatgatttagcatggtcagatatgtctccgcattgattggtaaatttgtcccccaaattcttgaaaaatgtaaagatccaagtacattcagcataccttgtattatagggaacagtaagtttgacaatgccatgctagatttaggagcttctattagtgttatgcctctatttatttttaattctctatctctaggtcccttgcagtcaactgatgtggtaattcatttagctaatataagtgttgcctatcctgttggtttcatagaagatgtcttagttagagttggtgaactgattttccctgttgatttttatattttgaatatggaggatgaatnttctcaaggattaattcccatcattctaggtagaccctttatgaaaactgctagaactaagatagatgtatatgcangcacactatccatggagtttggtgatataactggtcattntaatat

SEQ ID NO: 221887 - DNA, 453 bp, Glycine max
  unsure (1)..(453): unsure at all n locations
tataaaactaagcttgagccaaatcctgactcccataaaccttgacccaggtgatattgtaatccttaccctcggaagcaaaaaaaagaaggaaaggaaatttcctatcaacggatgaaaaaagaggagaggaaatttccaatctatgagaaagaaaagaagaggataggaaattcccaatcaaagagtgggagaaagagaaaaaagagaaagaaaagtcccaacctaagaatgggagaaaaagaaaaaagaaaagagagaaaagtcccaaccaaagaatgggagaaagtaaaaaaggaacgaaagaaagttcctgatcaaagaaacagaagatatgtgcatgaaggtcttttgaccagacaatatctgaacaatacagaattgtcaccaagtgaacaaaacgaaggaaaggaaaccatgacctanagtggtcttctccctttgattaccacc

SEQ ID NO: 221888 - DNA, 348 bp, Glycine max
  unsure (1)..(348): unsure at all n locations
agcttanatagaaacattgaacacttgaatatatcctcaaatagataataaaaatatttacatcaagtactcagtagaaattcccaacaaaggattntaggcgtccattacaagggagcagctttcacaaataggagaagggtttcagagaaaataccagattacaaagcagtggggatgtctcctccacctctaagaacctagaaaataactctaaaatctggaatctacctaaaagttaggacctttgcttccttgctcagcttttcctctgttttctgcacacaattcgcactcaattcagacctctttcatgtcgtcacgctctcccttttttctatgcaaatc

SEQ ID NO: 221889 - DNA, 444 bp, Glycine max
  unsure (1)..(444): unsure at all n locations
tgaagtgaggaagtgtggaagggtgagacttcctacttttattcgttgaccacagagtggtacctggagatatgtcgcagggggtcaggagaccttggggacgtcaggtggggtgctattggccaaaaccaagcttgaccaatcccgacccaacccgggcatagtcagtcagtgagaacctgtgatgtacctaaacaggtgagctcctggcagtcaaccgataaaagaacaaagaccacaaagcaaggaggctcgtgtggtggctggccagctatggatcttgagtaatatttggagtatggcctctggtaatcgattaccaagggtgggtaatcgattacaaggcttanaaatgaaggcaggaagttaagatggcctctggtaatcgattaccaaggatgtgtaatcgattaccaggcctagaaatgggatcaggaacgtgag

SEQ ID NO: 221890 - DNA, 427 bp, Glycine max
  unsure (1)..(427): unsure at all n locations
ggacctctgagtcacctgcggcatgcagcttgaggtgcgaaagaattcattttgtttcatcaaaagcgggagaatgtgaatgtatgtatataaaattctgatgatgccaaagacgaatctacaaggctgcttcaaaggataagcatttgcttcaagattaatacaagattgtttcaacacacaaagccttgattcaagatttcttcaagatcaagccttgcctcataacatagtgctttcaacacattctaggctctggtaattgattaccaggcagtgtaatcgatcaccagaagacagggttgacaaatagctgttgaaaagggctttgaatntgaattctctacatataatcaattaccatatgtctgtaatcgattaccaccaaccaaacttctgaaattcaatatcaaagtcatgacccttc

SEQ ID NO: 221891 - DNA, 360 bp, Glycine max
gagaagatgaaaaaaaactgctaggaaaaatcaactgtagccaaatagcttttggcttaagctgaattcagacagaactgcacagacgtactatatgtttaagcttgaagattttggcttaaacaaaccctcacttaagtgtaggtttttgggactatataaatagattttcacgatcattttttagggaacgtttgtcactttgaaagaatagctcctttactaaagttcttcttctccaacttttttctttcgttgatcttccatctttcttgcttgctattcatggatatgggtagctaaaccctccattgttagggttattattgtattcaaaccttatgctctcatgtatttctt

SEQ ID NO: 221892 - DNA, 462 bp, Glycine max
  unsure (1)..(462): unsure at all n locations
gacctaagaaactaagctnttgcagattacattgggccttgtttgcccataacttttttaattaccaaaatggtcccacaatacttttgagcctccctcctccagtttttgatgatgatacaccatggtcatccacctccatgctaggtggttgttgcataggttcattattaggaccttcaactgtaccggtagaactttctactggagttggttggtgtgaagatagcggagtaggatggtctgaagattgtgaagttggctggtgtgaactaggttcttcaatttgcatattttctgccatggacttcaacaacaagctattattttaaaaacaaagcanttaatacaatacagattaacaaacatgaataaaatagtaatccatggcaactagtgtagagaataatacttcaaaaccctatatagcagtgaaaatgtgacaagaaataaatctaaatt

SEQ ID NO: 221893 - DNA, 475 bp, Glycine max
  unsure (1)..(475): unsure at all n locations
agcttctacttatgtggcagggcgtgtctttcttactntcttgcctcaaccgcgagctttgaccaccgcccttccttctcgcgatgcttctctttacatctgcctgagtgggcttatagcctaaaccatacttcccatgatttcctttggcatttatcaggctagttatgccgccgttgtctttgcctaaacccattccgggttcgtaaccgttccccaacataactcgggccatcattactgctgcatcggacaggcaagctttcccagagaaggagtccatggaggaaatgctgaccacctcaaaagactggaaagcggtttctaacgattcttctgcggcttccacataaggcatagaggatgggcagctcaccaagatgtcttcctcgcctgacacgatgaccaaatgcccctccactacgaatttcaactttgggtggagtgtagagggcacaactcccactgagtggat

SEQ ID NO: 221894 - DNA, 443 bp, Glycine max
tctagttcccagattctcccatgtcaaactgaatcattgtatatgaaacagaaagccaggtcaatagctgtagattctgagaggaagaggaggtcaaaaggtaactaccgaagtaatcaaacttcacatttgtcgagacacagaaaaattcataaatgacaatataaggttatgaatgataatgatgcaggaaattaaaggacttttcttttggtgatgagaataaagaaacacaatttccagtgttaactgtgaaattttataataaaaagaaaattgccttacatagttgggtgaatacatataatgaaatcttggaagctatggccataagtatgtgagatgcacgaatgatgtttatagaatttgagtgtaaatgattcaagttgtgaacaatggctattgagtctcttatcatggtggttacctaacctatccacgca

SEQ ID NO: 221895 - DNA, 452 bp, Glycine max
  unsure (1)..(452): unsure at all n locations
agcttcaaagaacatattatttacttttctcccgacgcanagcgcccataatatagactctttngaatgcaatatttattattaattaacatttacttaaaaaattaaaaaaatgttagtctcactttgcaatatttttctcttttgattttagaatgttcacatagattttaataaattatagaatgtgtgctaaaaagtatataatatgttctcatcttgttgctgtctgtgaatttgttcaaggtaaaaagcgcgaattcgaatttctttttacacgtatacacctttaaactccatgtaattatctcatgggttataaatatgccataatgttcatctttgtcatatataacaaccattcaattgatatcanacgtgcatgttgtgattggtatgtattatacatacaataatcgtgaaattttacaatctattcttaatatcacatt

SEQ ID NO: 221896 - DNA, 410 bp, Glycine max
  unsure (1)..(410): unsure at all n locations
ctttctcatatagnngncgatacactagctagctaggttgatgatcctgaccccagtgttcaattccactgatggccaattgagtctgatgtaagatgatatgagaaggatttatagagagagaatgataacctagaagcttcattgggtgggaatgttgatgataatgatggtgatggttgaggggtttgcttacaaaatagggaagagccagagagagagagagagaattggttgatgagtctagtacaaaacggtttggagagggacatgagagattgacaaatatgggtgtcttattgtctttgactccatggccttgtcttntttatatttcttttctaattgtttcttcactcacaaggcaatcatcgtacgtgaaccatagaatgccacacacacacacatac

SEQ ID NO: 221897 - DNA, 453 bp, Glycine max
agcttcaaagaaagattgtctttcacatttcttatttccagaagggaattctatcaatagacctccaatctttaatggagagggttaccactactggaaaacccgaatgcaaatttttatcgaggcaatagatctaaatatctgggaagccattgaaatagggccttatatacccaccacagtagaaagagtttcaatagatggtagttcatcaagtgaaagcataaccataaaaaaacctatagatagatggtctgaagaggatataaaacgagtacaatacaacctaaaagccaaaaacataataacatctgccctaggaatggatgaatatttcagagtttcacattgcaagagtgctaaagaaatgtgggacactcttcgattaacacatgaaagaactacagatgttaaaagatctatagataatgcactaactcatgagtatgaatt

SEQ ID NO: 221898 - DNA, 445 bp, Glycine max
  unsure (1)..(445): unsure at all n locations
tgtagaatggccagacatgatacatgtcaaggtttggtttggttcaaggattaaagggatgccccacattatttccacgacacaaatgcaaaaatgatgatttggaaattttatgcaaaactggtcatgcatgcacctatgtggacgctcaagtgtcaaatttttatggtcatgtgatgctagggctcaggattcatttcctctattttaaatcaacccaatgtttccaaaatatgttcttttatcaatttgtgcattcatccgagtccatttcgggcgtccggggaaatttcacagcattcacccttcaggtgtagacacattntccaaaaattggttatgatcaatgaatttttttttcaaagaaaagttggaaatcatctcttttcaaaagcatgtcggtttttcagctagacaacttattttccttttccccatctttttt

SEQ ID NO: 221899 - DNA, 434 bp, Glycine max
  unsure (1)..(434): unsure at all n locations
agctnttgnttctttntataaaaagagaagttctgattctcatcacgttgtctaaaaagccttgaggtggattcaagtgctctgatcattcattagcatattcattttttggtggcatactcaccactgtttgtttctttagggaactcaccataactaaaaaagcgcaaaggcacccctataacacccgatccagaagtaagatggataacgaagagggagtgcaagaacagatgaaggccgacctatcggccttaaaagatcagatggtttctatcacggaggccatgctaaaacttcaaaaaaactatagaacgggtgctacaacctgcaataaacttgggccgagacagaaacacgacgggttttaatcggaggtatagtcctcaagcctacccttatggttcgcctncagacttcactccccgtaccac

SEQ ID NO: 221900 - DNA, 459 bp, Glycine max
  unsure (1)..(459): unsure at all n locations
ngcttgtggagattctatggaggctggatctttgagcttctatgatgtcctttaatggngattttccaccatggagatgcagcggaagacaaaggagaagaggtaagaggcggcgccatccactagggaataagccatggaagaaggagcttcatcaccaagatgagccttggataagaagcttggagaggatgcttcaatggaggaaaaaaaagagggagagaaagagagaggggggagcacgaaattgaaggaagaaaaagggagagaagttgaactttgagttgtgtctcacaagactctcattcatcaaagttacaacaagtgttacacatgcttctatttatagactaggtagcttccttgacaagctttcttgagaaanattccttgagaagcttctttgagaaaacttccttgagaggctagagcttagctacacacacccatctcataact

SEQ ID NO: 221901 - DNA, 393 bp, Glycine max
  unsure (1)..(393): unsure at all n locations
agcttatcattaanataaatctaaaggggttttgangtccctgatctataancgntgaacgaatacttgttgttggatcaagtggcctccaaataattaagaagagggggttgaattaattattaatgtgccttgactaattaaaaatttatccttcttaatgttactagatttaattaggcttttactacaaagttaagaaaatctagaatagaataagaaacttaaccaaaagtaaaagcgataataaaagtgcacagcggaaattaaagagtgtagggaagaagaagacaaacacaagagttttatactggtttggcaacaacccgtgcctacattcagtccccaagcgacctgcggtccttgagatttcttttcaacctttgtaaaacc

SEQ ID NO: 221902 - DNA, 439 bp, Glycine max
agaactatgattattgaagaatattccttgttgtttttgatgagactggccctataaggccaagaaaagaaacacttgatgatattacaaattcattagaagacatacacattgatgagaaaaggcataaaggcaaaggaaatggtaatgaagaagactttcaacttgatgaaaataaaacaaatatagatcttccaagaaagtggagaacttcaagatattatcttcttgataatatcatcagtgacatctcaaaaggggtaacaacttgacactctctcaaagatgcatgcaataatatggcttttgtttctttaattgaacctaaaagtttaaatgaagccataattgatgaactctggattattgctatgcaagaagagttaaatcaatttgaaagaaataaagtctgggaattagttgacaaacctaataatca

SEQ ID NO: 221903 - DNA, 131 bp, Glycine max
aacaccaccgaaggaccacaacgaagcacaaagacccagcctccacagaagctccacaagcaagcctccaccaatgagaacacatcattcgacgccactgccagaaccgaaacctcgcacaaaccaaaaaa

SEQ ID NO: 221904 - DNA, 328 bp, Glycine max
attttccaacggacggcgccctaaccacgagccatacatgagtaacaaaccccaccccaagctccgggagacgccacatggtaaactgaagacgccccgggaaagcccacaatctaataagagacatcaacaccgaagcagtcaatgaaccccgaggcaagcacaacaacaggaaatccataacccaccaggcaacgactctacagcagaacgtcctcaatcaacagaacccagagaaacctgaccttagagtgagcactgaagcaaggaggcaaaccaacattccaccctctaaaggcagaccaccaaggccgaagagagacctcaa

SEQ ID NO: 221905 - DNA, 446 bp, Glycine max
  unsure (1)..(446): unsure at all n locations
ctaagcttgataaggaaaacttcnaaccttgccattactctttatctttgttttcctttaccaagattcattatgagtcttgatttaggcatgttcacgctggttttttgatacttggagatatatgacttctatcaatacttttttgcatgtcattataactattatatttagatagctttttcattacaaaggcaatgtagttttgggacatcaattctaatggttcctcttgttgatgtcctatgttgagacatgttttaattcatatttttactatgtttaacagatgtcttctcctttggaaattagtgaaccaataacattcactcatacaaatgataatgaggtgaacgtacaagttcctgcagattcaactcaagtagaagcttacaacgaagaatatgaacattaagaaccacgttgcacgagaaagacgaaaaaac

SEQ ID NO: 221906 - DNA, 459 bp, Glycine max
  unsure (1)..(459): unsure at all n locations
agcttgtacttataaagtaggatacgatatcttgtatactaattttaacgnngaagagccattcaatcatgcaacacaaaaaggaggaaaaacatggattattatcttaaatgagcgttactgcgactatgaagattttcaagcctacaaatatccttgctagcacatcatagcagtgtgtgctcgtgttaacatcaattgatactagtatgtagatctggtgtacaaaattgaaagcatcattcaacctattttggcaattggaattcccttggctgtgaggaaaccatccctaaaaggagtggctttattattgtttcatatgcatccaaattatgtctcanaggtaaataaatatttatgcccataaggaacgaaatgatctggataaaatctcaatgtaaacaaacgtgtagccaatacaagcataaagggaacaacaaaagtattggtctcaaa

SEQ ID NO: 221907 - DNA, 458 bp, Glycine max
  unsure (1)..(458): unsure at all n locations
tctagtccttgtggatcttcttccctctaattcttgaactatcacttgtaggtttagcttgaacttcacctgtaacgtcatcaggttctggttcactcaatgtttttgtgttgatatgcatcattggcttcttgcttggatcatgtttgtccttcatccatgtgttcagctcatcaaattgcacatccctactgaaaactattcgattcgttcttggatttaagagtttgtatgaccctgtgggattatagccaacaaagatcatgtgttcactcttgtcatccaatttcttccttgtttgatcaggaatatgtttgtaacatgttgagccaaaaactctcatatgcttcacagatggtgttttccctgaccatacaacttctggtacttgatttttaagttgttgtgtggggcacctattcaatacatnatgttgtgtgacaactgcttcttcccat

SEQ ID NO: 221908 - DNA, 374 bp, Glycine max
  unsure (1)..(374): unsure at all n locations
agcttgngtagagaaagcaggtttaatttattgagacatacttggaactctgataatatagtgaaaactgggtaggctgccaagaactggatgcagttttgggtctgagacgagccagtataaatctctatgtgtttccttttattggtttaacagacaaatggtttgaatttattattagactttatatcttgttttgatttacaacgaatattgtttttctaatcatatgctagaggttacatcacaactttcttatttatctattgttatgttgatatacattagacgataaacatgtttttgtcttagacgaacatttanatttctaaaaacataattcgacccatcttcttgtatcatttgcttctata

SEQ ID NO: 221909 - DNA, 452 bp, Glycine max
ttcaactttcatgtcatggcgcgccgtggtggatttcttgatctatgacgagaatttgacgaatctttgtccaacatacattatactcgaacatagtaactgacgctcgctcaaggacttcagacattgcgtatgctgagatcacttgagttacacttgccttatcatgttatgtatattaaattgattaataattcgcttagtaatattcaggtattccctttttcagttgtaacactcgtggcaggatttgcaattcaaattcctgatacaggtgtaaataagtaagttagatgtgaagcaaataaaaaaaagaagctgaaactttggaccctacaaaaaatgatatgtgttacacacttgaaaaaaaaattaataaccttttatctttcaacaacgatgagtattactaaaagagatcttatattaagagtcactacccatttaaacta

SEQ ID NO: 221910 - DNA, 424 bp, Glycine max
  unsure (1)..(424): unsure at all n locations
agcttgatgcatacaacctatatgctccagtttgagggggagagnngagatattatgtagattacagagatatatattaagagacatgatacgagttcgatttagttatatcagatttgatttgtatttatgtagatgagatcttttctatagtgtaattaggatcatatttctagtgccattgtatctttagatttacctctattcatgtatcctttttacagtttaatcaatccgaaatatacatacttcttcaattatttcctccagtctcaaatataccatgttgagtgttatcagcaacaaattntcagtataataaagtattactagctatttccagtccagttctatcagaatgtaaaagaagggagttaagttcttacaacagcaacaacaccatcatatgagttaagctccacat

SEQ ID NO: 221911 - DNA, 457 bp, Glycine max
tcagcctgatcgctaagcgacagcttatccatggctaagctttacctatcgtcaccaagcgcaattctttacagccacaattgaggtccatgacgctaagcaccagtcatgacagctaagagagattctttgcagcaatatgagggctaagcgagtccctctcagctaagcgcatgctcctttgtacttaagatgcatcattttagctaagctggccagagcctggcttagcgacagttgcaacttttctaatctgcagacctcgctaagcggacataccctcacgcaaagccgagtttctgttaaaaaaatgattttgaatttgaaatgtcggctaagcacacgggtccgctaagcgatccttgttgagaaaccaaacgtctctcttgctcgcttagcacatcggtttgctaagcgaaagtatcgaaaaactgcttaagtgagtgaataacaatta

SEQ ID NO: 221912 - DNA, 186 bp, Glycine max
  unsure (1)..(186): unsure at all n locations
cgcagcgaaagaaccncccagagagagatgtcgcagccccacaaaacagcgaaccacggaaaggcacaaattttatacagacacgggcacacaaaagggaacgcacgggagcgaacaaacccaaagaaaccccaacccaggcacaaacccaagacaccacaagagaccaaaaacgacgggaggacc

SEQ ID NO: 221913 - DNA, 348 bp, Glycine max
gggagatgtacaaggcggctttgacattttaagaagctgcacccacagaggaaaaaagtactacgagaatctctgcatgatagctgtaaatcaatcaataggtgcgtacttacaaattacaataatatttctgaggattatagatctttccagaggttgagcattatttggtggaagccacttctcataggatctcaatctcaatggtttaaattatttataaaaaaattaatatagatgcctcaactggcaagatgcatcacacattcacggttaaaccctttggagatacacctcaatgtgaatactcgctcttgaaaaccaatgtttaactagtaactcattttt

SEQ ID NO: 221914 - DNA, 457 bp, Glycine max
gaccataaaactcagctggggtgagaaccaaattttggatttatgatactttataagggagaaagtataaacatcatttttttaatatgagctccaccggttaattcatttttctatgggcacctcctcccccatatgcaacacgttctatgcatacttaattatattcaaattgattcttttgatttcttctgttcttatatacacagtggcattgggttaggttttttttaaaaatatggtttatgttttaaataataatttatgtttctttttaattgagtttggacgttccggattatcttttctatttttaattatatgaatatgctaccaattaagaaaataaaaaaatatttattataaaactattaaataaaaataaatcatttaataactatttataaaaaaattatctttctaaagaaacatgaaatactgattcactagtataaaa

SEQ ID NO: 221915 - DNA, 401 bp, Glycine max
  unsure (1)..(401): unsure at all n locations
agcttctatagaaggttctttcctaatttctctacaattgcatcacctctcaataggatggtgaagaagaatgtggcatttacctgtggtgaaaaacaagagcaagcctttgctttgctcaaagaaaagcttattaaggcacttgttctagctcttcttgacttttctaaaactttngagctagaatgtgatgcctctagagtgggagttagagccatattattacatggcgggcaccctattgcttattttagtgaaaaacttcatagtgccaccctcaactacctcacttatgataaagagctttatgccttcataagagccctccaaaattgggaacattaccttgtttccaaggaatttgtcattcatagtgatcatcaatcacttaagtacattag

SEQ ID NO: 221916 - DNA, 421 bp, Glycine max
  unsure (1)..(421): unsure at all n locations
tctccaaccctatggcctaaggcattcaatgctctatcgatccacacaacccactngtccttgtcctcctcttccttgtcctcctcttccaccttatgtttgcttcgatctcgctcaactactgagacaaactctttttggaccttagacaagtcttcaattcgtctttcaggatcatgccttccactcgtgactggtatctttcttctctctgaagtttaagctcactgttattgcctcacaaagctcctcggaacttgtttcggtcgtgttcttccttccaggccctcttggtttcttgctccaaggccttggcagtggctgtgttgatgtctcttagttcgtcattctcctttcggattctgatagctggtgttttaaacttttcattgactgcttangctttttcaagcttcgcttt

SEQ ID NO: 221917 - DNA, 428 bp, Glycine max
  unsure (1)..(428): unsure at all n locations
agcttgtaggattatggggtacctttcatatgtggnactaggnggcgatcgggcgatggtgcaagtcgactctccacatccacaaatcatacataaatccaccatccccagttgcccaccttcaactgaactcacgtactcccacgtagcctttatccttgttcctctcaacaccgggtccccatcaatccctccaagcttccacaacatccaagaaattcaacatccaaacatcatgaactatccaaaaccaagaatacagggcaaaggcagaaaactcagcccataacacattccaataccacaactttgcttactcaaataccccaataacattctcttcgttccgattcgttaaacgttggattgactcgagaattttactggaggtgcctaaacataaatctacatttgaccgtgggatctgt

SEQ ID NO: 221918 - DNA, 460 bp, Glycine max
  unsure (1)..(460): unsure at all n locations
ttacggacctatgaaactcagctgaaaaaaagtagtgtttatgatttancttattctgaaacaacttggatcaaaggaaaaattgagcatgaagttgcacacacaaatcttcttgaacaacttgatatatgtgtaatttgaagactgcttaagctacataagtgcatttaagatgatcttagtgtctatggcaagctaagagaaagatctatatctttcatgaagaagttgtgagttaacatggcttgtatcttggaggaaaatgatgatcaagataaagatgtcattttgtcctcacaatataacgtaactacaatgctttgaagattttttatcctatggtggatataattctttgcaactatcatgaagacatcaaaatccagtttggccattcaaagggtcaaagaaataaaagacaataacaagcataaaatgctacaacaagctcacaccaaaa

SEQ ID NO: 221919 - DNA, 476 bp, Glycine max
ttaagcacctgggctgcagcttaaaaccctatttgggaagaatttttttttgttaacaacatattctacaactttgtaaattctgcatcaaagtctactctacgtgtcacaatctgggacaatttgccacgttggatagtctatgtggcactaaaattgccaacaatgcacctcactaatgacgttactttcatatttaacagcaaggactattttaccaaaattatgcaaagatatggactatttttaaaatttaaaaaagataaggactaatttgaaaaagggatcaaaagtcagggaccaaaatgtctatttactcctttatatatatcttaatattacccattgaatctgtttgcctaaagatatttatctacaacttatgagtttcacactcttaggcaactttacgatatctcaaatgtcatattcaagtttttacagatatatcacataatcatatccaattatatttt

SEQ ID NO: 221920 - DNA, 446 bp, Glycine max
  unsure (1)..(446): unsure at all n locations
aaactaactcaccagtccctacaaaacaattgacaagtctgtatttattacctgaacaggagatatatctgtcattttctacaatatatttgtgtaaagaagaccaaattcaaatatatcaaatcttgaatgatccataattaaattcatagagtagactattaaatttatgctcaaaaggaggaaaatagaagtcaagggaacacctttaaagtttatactaaacaacttagacctgtggaaaaatttcattttactccttgtcttattcaatttaggtcatttgcagtcgccaaagtatcaaaagccctcattatattgaaattatcctcacaacaccctgattntattttatggtatgtcaaattgttgttagaagaaacaacgaatgtgtaaagaaataacatcaattggaccagacaaatgtttaaggatacctatgcaca

SEQ ID NO: 221921 - DNA, 304 bp, Glycine max
tgctcaacgcaggtaaagaagtgaggaagaatttgattttgttgttttatacacatgcaagaggagaagcgcataacgttaacagaaccagttccacacactatactgaatagtccaacacaccttaattcggacgtgtggactagatgtcactaaagttggtgccgtgattgcaggttaagcaccgaagaatctttgatgtctcgaagatatacccttcggaattagtgtgaggagacaatgcttaggactataacgcgcttaactgaccttgagagtgatatgaaatcgaccacaccatata

SEQ ID NO: 221922 - DNA, 444 bp, Glycine max
  unsure (1)..(444): unsure at all n locations
ntgtgaacccatggttgcactatatcattctcttatcactttcaatatatcatcgncatcacgcctttaataaaaaaaaaaacatcgttgcttatctaaaaaaaatcgaaaagttcctccatgtgatagcaaactaggtttttatttctttatattttctgacaatttaaatttctcccaacaagatgggtaaggattttacattattctcaaatcaagtccagacaaacatgtacgtacggattgcactataccatgtgattttctctgtcggagatcttggtggagctagctccaagaggacccttccaaagctgtagaagaagcagcatcactgtagtgtttcttaattcccttttctttcaaaattattagtattatattaaaagaagaataaaggagtcatttgatagtgatgaatcacgtcacatgcttagaacttac

SEQ ID NO: 221923 - DNA, 394 bp, Glycine max
  unsure (1)..(394): unsure at all n locations
agcttggattaattcggcctggcgagggatctattgttttttaattnacgctacaacatagaacacaagagcacgattgattagagaaatatatttctatgcattagcttggttgttagaaagacccaacatttctacctactgctggcattttatttaccttgcattttataggtcttagcataaaagtttagtttaaattctgtttgaaaatatcactcatacatgttctctcaacaatgcttcatttctgaacttaattcacactaacattagttccatgtgttcaatactcggattatctattttatttttaaatacttaacgatccgattctgtttctggcaacccgaattttccctgaatattttggacgaagaagataaaaatcaaa

SEQ ID NO: 221924 - DNA, 447 bp, Glycine max
ctgtgaaataatctacacatatactctacattactttctgataagccttgattgaccactcaaatgtcttttacatcttttgactggcgttactttcaacagggccaagcagagaggggaagggcaccgtgggaaggggtatgtgtgattttttcctaccacaacaatggtttaatgatgtgctttgtattattttaacaaatattgaccttagaagttgtttgggcattaatgctgaatttacatccatatattaattcgagactttgctttcgcatcaggagagagagaggtgtaataaagaatggacaatattccaagagcgtatggctgaagctgagagggactattttcaaacaagggaagctattctccttaacttcacagggcagtgattatgcgaaaaacataaaagcgtttacaataaccacgtaaatgtagcttgag

SEQ ID NO: 221925 - DNA, 322 bp, Glycine max
acctgagcatgcagctagaaggggccatcctatccatattaattgtatacctccatccatccaatggaatagttcttcccaccattcacaataataaacaccatctacattcaacctaaaaatatagacataacaaaaatatattacctaaacaaaacaattacgtcattacgagtaggcaaaatgtggtaggatattaaagaatcaactaatcatgagcaaaattaaaaaaggaaaaaagaatctctttttgtgagagaagtgagactgtaagaaggagtgccctacaccataagttgcatgaaatagggacccaccttcc

SEQ ID NO: 221926 - DNA, 469 bp, Glycine max
  unsure (1)..(469): unsure at all n locations
ctcaagctgggtgagctatacttcagctgctggaaacagaggctttcactttctgtattcttctcaaaccaatcctattgattaccagcagccagaaccctttttgcaaatagggtaattaatgaaaatttcttttaagcatatgatcgatagttaattacaccaaaagttaaatagacaaacatactagctagtgttaataaatttttagcaaaggtaatgtgaaataaaattaaaatttcaagaacaggcgtggttatttgtccaacaactaacttgatcacacttcagacccttaaacaaactcttgcaattaaaaccttgattaaatgaaatatgaagatgtaaacaagtttagaaatgtataagatacctttatttcatgataagttttgggtcaactttatgccatatgtcaaatttcaattngttgtatgtgatatgttggtatccgaatacagaaatacat

SEQ ID NO: 221927 - DNA, 332 bp, Glycine max
  unsure (1)..(332): unsure at all n locations
tatcatatgacgaggcaacaaaatctgcttcctcaaatgagaaagtcttcctcccgcatgaacacagattgtacatactacaaagtacttcaaacctcggtgtgagttacactaatatagatacactatactatttgatgatacactgcacgtgaaacggtcatccatttattgtcccatcaatgcactcacaacgcctttacatgattagctgaagatcctctatatgacttgctcttctagaccacgccttgncactgatataccctcaaagatacctttgatactctctcaattcacttataagacatgaagaccactcctctctcttc

SEQ ID NO: 221928 - DNA, 455 bp, Glycine max
  unsure (1)..(455): unsure at all n locations
tgttgattaggatgttntgactgacttctactcatatatctattccagtgctcatggngatcctcctcatcattaccttctgaagagaaagaagtgatcatcaagtcttaaaagtggattgaaagagtatcaaagatatctttgaggatataacagtgacaaggcgtagtctagaagaacaaatcatatagaaaaatcttcagctaatcatgtaaagacattgtgagtgcattaatagaacaataaatggatgaccatttcacttgcagtgtatcatcaaatactatagcgtatctatattagtctaactcacaccaaggtttaaaatactttgtagtatctacaaactattttcatgccggaagaaaactttccatttgaaaaagcagaatttgttgcctcatcatatgaaaccttttgcaaaaacattccgaggaaacatataaagaagacct

SEQ ID NO: 221929 - DNA, 447 bp, Glycine max
  unsure (1)..(447): unsure at all n locations
ccttaagtcacctgcngcatgcaagcttaataaaattgaaaaatataacttatttttaataatacaacagtttttgttttattttaaaaatacacattccatatacatattcgttgtattaacaatcttatgactacaatgagggaattgaattaacaaactaaaataaccaaagtgatatttggataaaaatattcaaagtgtaacgtacatataagctacctaaactctaaacaaaatagtaaaacgattaagtaaacattctacttggattgtaaattatcaggaatattctcgttgtcattcacctttgattcctcagaatatatacaacgtatatgccttgataaaagcttaactgaaggctacanattaggaatcaatatcccacaatatacgcttaacagaaggctataaaataagaagcaatatctcaaattatacact

SEQ ID NO: 221930 - DNA, 456 bp, Glycine max
tacttggagttaattcagcattgtgacaccctctaccctttatatatatattaataaaggaataaaaattcaaatattaattaaaagtatttttaaaacatttttaaatacaagctttcaaatgggtaaaaggctcacattcactttcttctacatcatattcaaacttgtccaaataaataataaagtcatctcgactcaaagaaaatcatataagtctcatacaattaatatagaacctatatcctaatgtcacatcctatcagagcgtggtgttcccgtgtcctctagcatgaggttcttcatagtcatccacctattcatctgctcccccgaacacaaagttcaagatcatcacaggatccaaacacaaacagcaaaccgggagtgagttatcacattgctaactactagagagaaacaacacaacatatagtagccaaatacaatttactt

SEQ ID NO: 221931 - DNA, 437 bp, Glycine max
agcttgctgagctttactatgagattatctttaacaggaccacaaattcccatgccagagaagactaacccaacaacatgttctctcttggcatcacatgaaaccccatgccatgaacaaacagaagctgaagaaaagttgtagacctgggaggatgctaaatccatcttcttcaagaactctgacacaaagaaatcatcagtgtttggttgctgagatgccaagtgcttcaagaagagtgtcagaactagaacagaaccaaacacttccaaacccatcagtgagtgactgagtgatatcataaactgagaaaaatgttgcacaaaactataccaccttgagaaatgctcttctcagaactttaacaccacaacttgaagagagaccaatgctcttctaccttctcaaattatctcgcacgatcttttgtgatccaa

SEQ ID NO: 221932 - DNA, 344 bp, Glycine max
tcgactgaccgatcatgccagaaccacacttaatgaatgtccaaataaattgcaacagatcaatgggtacgaagctcgttaatagccctcaatataaaaatcaaccgatacgccatgccgtaacctcgggcaaataaaaaataataaaataagaaaataagtggcaaccggacattctactatgaaagatctccctacacgaagtcgagaagaaaccaacgaaaactaaggctaacatcagctcacaaatcaagcatttgccagcaaaaggggcatttgaaaccatcccaagggccaacgccttaacggcaccttatcactcttatcagagaaaactaaccgta

SEQ ID NO: 221933 - DNA, 367 bp, Glycine max
cctctatgaaagcaacatgaagccaatggacgaaaacaaatccaaaggaactccgcacatacccgaagaaacgtaagatattactattaagtaacaccttccattaactcatcaatcatcccaagatcgaaagtaacaccactacaatagggactataagtagcatataaaaattatcattctcaaataacaaaagttacgagaacataatccaacagcccattttgcgaaagagctatcacacaaaggaactaaatatgtggtcaaaaacagacaaaacgcaccaaatggtccatcagagcgctgaatccgatatcataaccctgcagagatgaaaatcggagccaaaacacacagtcgccccggc

SEQ ID NO: 221934 - DNA, 439 bp, Glycine max
  unsure (1)..(439): unsure at all n locations
gtattaanatggtaataaaatattaaaaataataaaatcnatattatttagggataaattcggtattaatttattttttcttttattttttataactattaacattcatcttattaaaaaaattatcttatggggataatatttattttttgtggaaaaaaatatttatgcaatatattctaataaaaggaattattttatgaaaacaattatcttaattatccttcatatagatccgccgctgaaagtgatattattgataataattgtattcgaacaaaattgttctctatagaagataaatgtgatccattgtaaaatataaatgtgtaaccacgaggagagaaaatgaagtttggaaggggcaaagatttattgaagagtgagatggttattgtgtgtggacgcataatgcccaatatgtgtgacgtgaaagaac

SEQ ID NO: 221935 - DNA, 417 bp, Glycine max
  unsure (1)..(417): unsure at all n locations
agcttaaagctcctgaagaagctattgttctttatttgagaatatgggtgctagtgatcatgctatcttgcgtgatagaacacactatcccaccaagaagagtttattacagctttcatcacaagatgctctgttggcgtagaataagttgttgtccaagcaactcaaaactttaacagaaacactaagtaagctggcaactcaattacatgttagtcagccttcgccttcttctgttttgcaggttgcacactttatgatggagctcatgaattaggctgttgtattcccactgaagaatcaacacatgaagttaattatatggggaaccagcgcaggcataattttaatgcaggtgaattntctggattccaatagggccagcattacaactagcagcgaaatcagtggaggact

SEQ ID NO: 221936 - DNA, 455 bp, Glycine max
  unsure (1)..(455): unsure at all n locations
ggaacaagtttagggaaatgaggagttgtctgctntgcttatctctttagcacccaattagtattaggtaggaaaccttagagtgaaaccgttagaatcccttgaaactaagtgagagttatgagtcaagtataccgaaatgaggaagataatgttgagggaagagacctaggtccgaatataagtaaatcatttattcttgagagtcacgtgtggactaggattggtagagcgttgaagtcttgaaacttatacctcttttcttgaatcgtcccatgttcgaaaaagagtcagccatgtggccaatcatgttaccttgtatctatttgttcgtttcagattctcattagtgtctcttataatattacccaacttcaaaatagtatgccattcacattctattatcattcagatgtcattctcgtgagaaaatttgacttatgaaatactattat

SEQ ID NO: 221937 - DNA, 358 bp, Glycine max
  unsure (1)..(358): unsure at all n locations
agcttctagagaaagctacttgattctgctcttgntaacatactgcccagccttcgttaaccattggatcttctcgaaatgtggtttgcaacttcacaagaccgttgggatctttgagaagatgtctggagtgggctagaagcttccgttcccgagagcatctcttatttaagcattgcagcctttgctttcggtaccttaggaaaaatgccatttcttcttttttctttcttcctaagccattgctaaagtttcaagtactatctccatactcacagccaccattagcctccactaaccatcgttgttcttcacaccgaaaggaacccttcgaccgaagcggattcttccacattgc

SEQ ID NO: 221938 - DNA, 396 bp, Glycine max
tggttcgaggtacttacccgttgaagatctttttttatgaataacgaatgaagaacgtcgaagaacggttgaaacctttgcgaatttcttcacggaaaacgttacgaaaacgtttcggaagcgcctcggcttagattttcttcacggaaacaatttttccaagcaaattcgaaagagagagaagtgcctaaggggctgaacccttttcttcttcacttcctcccctatttatagcaaaataggggaggtggttgccgcccagctcgcccaggcgagctcagctcgcccaggcgagccaggatgcttcctccagaagcaacagccttctggaggaatattctggagggcccaagtgggcctgggtgctatttgcacccccatttttactaagtacac

SEQ ID NO: 221939 - DNA, 470 bp, Glycine max
  unsure (1)..(470): unsure at all n locations
ctctgagtcacctgcggcatcaagcttgaaatttttcacccggctgtttgttttattattatgcaaccttccagaatatatatttgtctatcatcattcattttggtgtctttcctctgagggcatggggattttgtcctaatttcttttagaatgcatttagattcataattttacttgaggaaagtaatttattacataatttaaatttctntaatccaaaattgattggttgaatgtttttttataaagaatttaatattttataattctaaacaattaaaaatatagaattttaatttccttctacaaagtgagaaattgaaattttcttcttgataaaagatcctttaaaaatatttgcgtatttctttataacctccgttctttctatcacgtgaaagttaatcttgttctcatattcgtaactcttctttcgcgccgatgatcctcttcttcaaaaatatcgt

SEQ ID NO: 221940 - DNA, 461 bp, Glycine max
tgtttctacataactcatgcattctgcacaatacaataccattttcttataagaccagaacaacaccgggtctgtgaaattgtacttgttacatagatttggtgccttgaatcttaaatataaatatgttacctcctgaattgaattttactttctaacaaatgggacactcctgcaaccgcaagaatttactatattgaagaatagtgctgctgaaaaatctactgcatataaagccttacatgaaaatatacatattgtatgatgattataaaattagacttaaggaaaactttagtgatcagtgaacaaagataacatacatgatttgattctgttgcaacttcatttggagcttggaagcaatttcatatattccttgcacagtagtatatattggcaaactaatttatcaaagtcattaaattaattaagcatgcaatgcagcatatacattaaat

SEQ ID NO: 221941 - DNA, 445 bp, Glycine max
agacttgagatctctcttggcagtggacgcttatctttttgtcttagatccaatgtttctaggttgtgcagctcaccaattaattttggaagatggactatcttcccacttctgcagcttaagtacctcaaaaatgataaatcccccaaactttcaatgcacggaacataatcaaaccatggaggacattcaaattgaagtacccttaataacctgtactctgtaggcatacccttcaccaaggattctgacaattcttcatcaccgaaaacatgaagtgatcgaatgttcgagctttcaacgcttcccgtcaaattgttggaaccagatgctattgttaggtgacgaatcatcccactattggataagttcccacgctcactagcagaatggccaaagcttaaatcttgaatcttctcgcggatcatttcacgtactacgtcat

SEQ ID NO: 221942 - DNA, 469 bp, Glycine max
gacctataaaactaagctgggtaacctacccatagttctacggtctgtttattgattcccacatggcgcctcccagatatcacctggttcaaggaagtcatttgttaaaagaagtatcattagaaatgaatcaatagaattcaatttaaaatctcaaaaatgaagaaaagacattggaactaggttaatttgggtaaataacttaagtgcttattgaagaagctccataagcactcataggaaaagaaaataagtaggtaaattgagttagacttctacaagttagaatcaacattatgcacttcaacttttatagaaactttcttttcaaacttttctaaatacataaatgcataagttgattttaacttattaaaggagtttgagttattttgcttatttattacttttcttcttctataaatactcacgggaaagtttatccaaagagagcctaagtgcctatcat

SEQ ID NO: 221943 - DNA, 454 bp, Glycine max
agcttcacacaatctatctttgtcggatatattatctctcacaattctatcaatcattcaatccattgtattcatgccactggttgataacaaacaaataatactcaaacctattacatgtgggtacctattaaagatatttattttttatgtgtgtggatgcaaattctttcgttatccctacttagtatccaaaattggtagtgagccttttgtgtatgacgtatctctccgtccattataatgattctttccacttacatattctctcaaaaaagataagggttatagattccaacttattgcatatattctaaagagaaaaataataatctacacgaagaattgctaatagttattaaacacctctatgttaaagcatatacatataagtatattcgcttattttatgctaacatatttcaactttttaaacaaatcataacttgaaata

SEQ ID NO: 221944 - DNA, 452 bp, Glycine max
  unsure (1)..(452): unsure at all n locations
tctactacctcactaccaaatggcactgaggattcaccattttctttttatgttaatcgntatatattatagtaatgtgtctttcaaaagacagaagaatgttatgagttgcttgcctaattaataatcattcattaagcataaacagaagtagcagttttgactgtaactccggtgaccatgtatttgtagaactagcaggtatctgtacaattgcacggatcgcattgattttcatgcatgttttaaaatgatttacttatacactaataagctgatatatattaatttatcaatacaatgtacaatcataatgtttatattatattaattcctaactataagcttagtcattataattaaagtttctcatttcatttcaagaatgtgttntgtggaaaaattctatttattctataattattggaattaatcgttaaatactaaaaaaa

SEQ ID NO: 221945 - DNA, 378 bp, Glycine max
agcttgaagagggtttatagaaatacttatttattcttatcaacaagttccttgcattggtaataggcttcgaacttaaattcttgtaagatgagtcttattcttaaaaactagaccaactttcgttggcaaaaactcagcttcttttctagcagagtttgctggcagcttctttttggtgacaactactactaaccctttacaaagtgtgattttactggattgagcaacccaaatatccattagcatcactcagagaataaaacctttgaggctgattcttgttaacgctgctgtatttagtggagtggatctgaatgaaaaagaaaagaaattggtctagtgtatgtacacaagtccttgtacatgtacatttat

SEQ ID NO: 221946 - DNA, 445 bp, Glycine max
tctcaatgatgtgaggtctgaattagtttcgtctcagcatgtgttgttatcttccagaagcaaaatggaggagcaggagcggttgttggaactgcagctgagtgagcttggggagcagagggcaagtgtgatgtcctacatggaaaatttgaaggatgcacagattgaagtggagagtgagagaacgaaactcagggttgcagagtctcggaacagagagcttgaacgggatctgaagatggaaaaggagcttattagtgagttggaggaggagctgaagaaagagagaacttctttggagcaggcagtcaaagaagtggctttgcttcaagaggaattggagaagaaaactgccgagtttagagaaacaagtgccgttcttcaggttaaagagtcagagcttgttgatgctaagctagaaatccagcgtttgaaatctgaaaag

SEQ ID NO: 221947 - DNA, 380 bp, Glycine max
agcttgtacgagtattgggaaagattcaagtttttgtgtgtgagctgtcctcaccaccagatttctaagcaactcattcttcaatatttctatgagggacttagcaacatggagaagagtatgattgatgcttccagtggtggagctcttggtgatatgacccctactgaagctaggaatttgattgagaagacgacttccaactcccaacaattcagtgcaagaaatgatgctattgtccttagaggagtccatgaggtggccacggattcatcttcatctactgaaaataaaaatcttgaaggaaaacttgatgccttggtcaacctaataacccagcttgccatgaatcagaaaacagcagtagtcacaacaaagac

SEQ ID NO: 221948 - DNA, 466 bp, Glycine max
tccacaacatccaagcaatacaacattcaaacagcacaagctatcacagccaagcaaaacagagcaaaggcagaaaactctgctccacacatcaaccaaaatcacagcttttctcacttaaagaccacagtaacaattccttcgatccaattcgttaaccgttggatcgactccaaaattttactggaagtctatagtgcataagcctacattttgaccgttgggatctactagcaaacatccagaactcattgtgcactagactttccacagccaaccacccacaagcatttttctgcacttgtgcaaaattctgctgcacaatttcacagcaaaaattctgcataagtgcatatttcgaaaatcacacttcctctcatccaatcttgcccaaatcaattcctacaagtcccaaatcatgtatcaatcatgtctaaaccaaattcaagctttatagcacaacaac

SEQ ID NO: 221949 - DNA, 334 bp, Glycine max
  unsure (1)..(334): unsure at all n locations
agctntcgagaattcaaatggttttttgttttacacggacgtcaaattcaggcgcataatatatcaagacactcgaaattgaacaacagaagctctcgagaattcaaatggtcataactctttacacggaggtcagattcaggcgcataatatatcgagacgctccaaattgaacaatggaagctctcgagtattcaaatgggcataactctttactcggaggctccattcacgcgcattatatatcgagacgctcgaaatcaacaaccgaagctctcgaacattaaaatggtctaacttctctaacggaggtcagattcacgcgcattacata

SEQ ID NO: 221950 - DNA, 442 bp, Glycine max
  unsure (1)..(442): unsure at all n locations
tctatataagctgaaccattttatcaataaacacattttgttttntattcagaaaattagagattatctcttttatcttagtgagagtgattctcctaaattcttgagtgattcaagaacaccctggctgtatcaaaggactttcacaacctttgtgtgttgccctcgctggaaagagtgattctttccttcctatcatctccacccttgttctttcaaaccacaattccagaaaatccacctctgcccaaaattatcccgtgaccataactcccatttcacacactcaaattaagtgattcttgatcctaaattgaatttcaaaacgagatctttcacctcgttttggaatcacctcatttggagccctgtagcttccgttattgccatttctatatttctgtccagccaccacttaacctacgttttaccatcccattca

SEQ ID NO: 221951 - DNA, 394 bp, Glycine max
  unsure (1)..(394): unsure at all n locations
agcttgtaatagttggaggctaattgtcttgttgaagaatgctatgggatgcctcttctaagataacatgacacccatggcaatgttggaagcatccatttcaaggacaaacagaattaagaagtcaagtcgtagtaacacaggggtagacaaaattggcatcatcaattggttgaaggcaagtagggccgaggaaggccattcaaaattgtcgcggattaacaaggtagttaaaagtgttgctagatgaagcgccgataaaaccctgtgagacccanaaacctatgcagggccttgaaggatttaagaaatggccattgtcgtgtagcttgtattattgaagagaaccagtctactccttgtgatgagaccatatgacccaaatattccactt

SEQ ID NO: 221952 - DNA, 459 bp, Glycine max
  unsure (1)..(459): unsure at all n locations
tgttaaagaactgagggaaaatcaagaacaagcttgtactcttatcgttcgcgtgtatgatatccactccacaaggtttgaagtagaggagagcttcaaccctataacgcaacgtggcggacaaaagtgggcagtaaacttgaatgatcgtcattgtcaatgcggaaggtattctgcgcttcactatccatgttcacatattattgcagcttgtggttacgtgagcatgaactactaccaatatatagatgttgtttatacaaacgagcacatcttanaagcttactccgcacaatggtggcctcttgggaatgaagcggctattcctccttctgatgacgcatggacacttatccctgacccaaccacaattcgtgcgaaaggtcggccaaaatcaacaaggataagaaatgagatggatggggtcgaaccatctgagcaccgaacaaaatgcagtag

SEQ ID NO: 221953 - DNA, 209 bp, Glycine max
  unsure (1)..(209): unsure at all n locations
ccatanaaactcaagcttgacggagggaccaaccaccgaggagagagagcatgttnngtttgtgttcaagcanccatgaccaagacgctgcgataggcgcaaacactacgcacaggcgcacgacgagggggagaangaccgaccatggcatacactgaacgccatgcttaagcactcactgtaaacacgcgaccgcactacgtcgttac

SEQ ID NO: 221954 - DNA, 417 bp, Glycine max
  unsure (1)..(417): unsure at all n locations
aagcttataagtgcgggtctgggagactattttcaagtgttcgcgatatgtgaagatgatgttccaagtactttggatttggtacgaccatgctctcctgatttccagctgggaaattggcgagtggaggaacgccccggcatttacgcaacaagcataatgtaaacctctacggttataaaagctctatagttgggcctaggctttagagttctcattttgctaaggctttgtgtcttttgtttttgaatttataatacgaggatctttcttcatctggtcctggtctctacccattctcattcatttgcatgtttatttttttntcataaacggcagattcgatgacgagtcccccgaaggtactaatacctgggacccgtctatcaacttctagccagaaatgattcaacggaa

SEQ ID NO: 221955 - DNA, 438 bp, Glycine max
tctgttttcaatttcgagcgtctcgatattatactgtcgctttattctacatccgagataaaagttattgtcgttcgatttttctaacagcttcccttttcaattacgagtgtctcgatatattacgggacacaatcggacacccgagttaaaagatattgtcgattgaatatgctcagagcttctattttcaattacgagcgtctcgatatattacgggactcaatcggacatacgagtaaaaagctattgacggttgaattttctcagagcttctgttttcaattacgagcggcctgatatattacgggactcaatctgacatccgagtcaaagagtatcgtcgcttgaatttgttcagaacttctattttcaattacgaacgtcatgatatactactggactcaatcggacatcccacttataagatatttgtcg

SEQ ID NO: 221956 - DNA, 426 bp, Glycine max
gattccagcagaccttcaattctgaggggagagtgtcgaacactgagctggaacataacctgaaagtgtaaaatcacagcattgttgtaaacaaaaacaatgaatgatgaacacattgactgcgaatctatgatggttcacgaaagtgttctgacagacatacagacagacagtaaatccgactaagccaaataagcaaactgatttgataaagttctcctactctctcctggatttcaagctgggcatttacagggttagttccacatgaatattacgaaaaaaacacaaggaacagggaagcatcaacaataatcaattccattaactcttctcatgacactgtcattttcttttgcagagaattgagaagcctaccaaaggtctagctaaattaccattgtgtagtacaaagcagtttccata

SEQ ID NO: 221957 - DNA, 458 bp, Glycine max
tgacagagtccacccccagaagctaatgaagggaagagccttatgttatatatgttgacaccaagtatccctgctactgtgagactccaatggatcataactacagaaatagttttgttgtatggcacgcactcagtgccacaaatatactcttgtattatagtgtcttgggtgagggtgagccctggtgcagcggtaaagttgtgccttggtgacttgttggtcatgggttcaaatccggaaacagcctctttgcatatgcaagggtaaggctgcgtacaacatccctcccccataccttcgcatagcgaagagcctccggacaatggggtacgaagaaaagaaaagaaaagaattatagtgtcttgggtagtatatttttataactaggagtaaaggtgtgtacagtgataccaacacattcactaagggttcttaattcagatccttatctctat

SEQ ID NO: 221958 - DNA, 377 bp, Glycine max
agtctggaattggaattgttttttgaatctttacaatatcactaatggtgagaagagacagagacctggtactcgtggatgttgaggcagcagagttggttgtgctgccattttccggcgacgtagagggagcgacagacgagcttgttgagcaatcccctcaccattgttgttgcggatttgaagatcggagactcacacgatcaaagtgaactcaattcgattcgattctacggtgagaaaagaaaaacatctgcctctatgctccttcaacgttcaagcaatggtggggactattgtggaatgaccgaatggtggtccgtggaggagaggctctcggggatatgcttgtggcaaagatggtgagactttgagtg

SEQ ID NO: 221959 - DNA, 439 bp, Glycine max
tctaagccccgtttctctccccctttggtaacatcaaaaagccaaagtacgtggaaatcaacataaggcagagaataacacagccataatcattcacaagtcaaaaatcaaacataattcaatcataaaatactaagtgccaagtactgaaatataactaaagttcagagaataatgtcttaaaaaaacatagccaaatacatggcttaaaataaaatataataataatctaaatctatgatggtggcggtggaaaatcaaagcaccaacgaagacaactcacatcctcctcaagctgagtgatgcgggtatccattccttcaaagcgagcatcaatggcatcgatacgaccatccaaggaatcaaagcgttcaccaacataggtgtggaggcctcgtaactccgaaagaacttcatgcatgagggatgaggagtcatc

SEQ ID NO: 221960 - DNA, 384 bp, Glycine max
  unsure (1)..(384): unsure at all n locations
agcttctcccgcaatgatttatatatagggttgataagcgaagnagaaaagggttcagccccttaggcacttctctctctctcgaaatagctgaggaaaattagttccgcgaagaaaatccaagccgaggcgcttccgtaacgtttccgtgagtaattacgcgaagattctcgaccgttcttcaagattcatcgcttcgtcttcgctttcttcagccttcaattggtaagtacctctaccaagcttttcaattcttctatgtacccgggtggccacatttgttcatgattttatctcgcttcattacttttatacccccttgacgtgctagcattattaagcattctgctaacctaaaaaaaaagattcccgacgtctgatgat

SEQ ID NO: 221961 - DNA, 447 bp, Glycine max
  unsure (1)..(447): unsure at all n locations
tgntgaaagntataaagaaagttggaaggttttctttatattctctgnnaggtggtgggtgaactgaccactctaaaagaactatcattaattttcttgtttattgtcctaaagggactgttttcttatggtctgttgatgcttcttatgcttctaaaactgttgaaatgttgtttaagcttttcaaggagatggtgttatatgttggagcagaaaatgttgttcacattgtgaccgataatgtttcaaattatgttgctgctgataggttattggaaaaagagtttcctaaaatatattggtctccttgtgctactcactgcattaatttgatgttgcaaaactttgggaaatttgaggaagtaagtgagattgtttcacatgcctcaaaaattactaagtacatatataatcattgttatgcattattcttgatgagacaacata

SEQ ID NO: 221962 - DNA, 356 bp, Glycine max
aagtaaagcaccttctgtcaataattgtacaaaacaataaattttaaagaataatccaattaaggagttacctcattagctaaaagagcaaaaccttcaaagtgtttactcacaaaattctactatatactgctgattttcctcaaaaagaacttggagcttggaggcatgatagataattcaaatgatcaaattcataattacaaattccatgttagactaaacaaataagtttaagtataatacaactatctccaaaataggtgcaagtgttgaacacttaagcctcacaaaaagatacattatgcaataaaagctacgttcaacagcatacatagaaccacaatgtgatagaa

SEQ ID NO: 221963 - DNA, 424 bp, Glycine max
  unsure (1)..(424): unsure at all n locations
tctaattttattataccactagtattatattatcataaaatatttaccttttgnggaacacatgtaaagattaataaagaaataaaataataaacattaaaattaaaggaaagattaccaaactctgtattctaatgactaagacatgcaacaagatggggcaaaaagtggaggcatttccatgactaagacatccattataataggagccaatgttacatcccatgacactaaaataagggggagatattactttagtatgatacaaaaatattgttataattcccaattaaatagatcaagtaaaaactatggagtatagacgatggatccttgcttagacttatttaagaggtaataaaagagactatactacgagtacatactcacaagatctgttaaatgtgagcctattgcaacaagt

SEQ ID NO: 221964 - DNA, 380 bp, Glycine max
  unsure (1)..(380): unsure at all n locations
ggacacgaanccaaacactacacnagagcgaacataggggaaacaaacaaaatccgcatgacaaactacaacagaagcaatcactagacttggcattggaagcatgtgaacgaccagagaccacgcnctcattccatattccatgaccggggtactaaaaacagctaaaatgtctatcggcccaaactgacactagatgacagactgcactaagacctctagcacgtcaccggcaggctacagctcaacaacgccaaattagagaacctcatccgaagacccacagtggctcggctgacgaaaaaacacacgcccaccgctgcgaatacgaaaccaaaagggaacccagaggacacgcgctgacaacctccaccacgaag

SEQ ID NO: 221965 - DNA, 437 bp, Glycine max
  unsure (1)..(437): unsure at all n locations
cttgaagaagtttgtctnttacatgcctaaatctcttgagtttcatttgtattgattgttgtattgtgtgttgcatcttagtctctatcatttcatatgtgcataatgcatcattatgtaggagttagaagaaagtttctagagttagaaaatttcttctatagttaaaactctattttaatcgattacatgctgatcataattgattacacgagtgtttgaagcttgcagagaagtgtctcatattggtttaatcaattacaagcttatagtaatcgattacacaattcttttttagacaatgattgatttatttaggagtctctgctttaatcaattatcaaatgatttaatcgattacttctcttttaaaaagtgttttagaagtgatcaagaacaatttaatcaattacattgagaatctaatcgatcacatc

SEQ ID NO: 221966 - DNA, 440 bp, Glycine max
  unsure (1)..(440): unsure at all n locations
cttgagcanattcaaacgacaataaatgtttactcggatgttttattgtttctcgtaatatatcgagaagctcgaaatggaataccaaagctctgagcaaattcaaacgacaataactttttactcggatgtcttattgagtcccataatttatcggaacgctcgaaatagaataccgaagctttgagcaaattcaaacgacaataacctttttactcggaagtcggattgagtcccgttatatatccagacgctcgaaattgaatgttgaagctctgagcaaattcaaacgacaataacctttttactcagatgtcggatagagtcccgtaatatattgagacgctcgaaatggaataccgaagctctgagcaaattcaaacgacaataactttttactcggatgttcgattgagtcccgtaatatatcgaaacgctcg

SEQ ID NO: 221967 - DNA, 434 bp, Glycine max
  unsure (1)..(434): unsure at all n locations
agctngctctaaanttacattgatgatggtatttatttgtcgaggctgcatgccacttttgctgtaagggtagcatttcttggtaaaactaactttccaaatgtttgccttcgcaagaaatggccccgaagaagcttgtctcaaagaggtccatgaaggacaaggcggcccgaagaactanttccgctcctgagtatgacagtcaccgctttaggagcgctgtacaccagcagcgcttcgaggccatcaaggggtggtcgtttcttcgggagcgactcgttcagctcagggacgacgagtatacttgatttctgcaggaaatatggcgcctgcggtggacatcactgtgtactcccatggccaagttctatccagaaataactcttgagttatttgccaatgcttgcgcaacagaagagggcgtgcgtgacatg

SEQ ID NO: 221968 - DNA, 455 bp, Glycine max
  unsure (1)..(455): unsure at all n locations
tataagaacanaattgcctcaatcatttccaaatatgcatgttatttattaagcatcaacaagaatcaagccaaggctattgtgcaagcaatcaatggggcaaaacacaccaaatgattatgatgatggatggctcaaattctcccaaaggtaaactcatcactttcaaattgagctttcaaaactatcatgacatgtataggagaatcaaggatttcaagtcacaaaatgtcaagaacttttattttcaaaacaattacccatttcttgaacatatcctataattcatagaaaaacatgcaaagtcgtacatgcacacaaaattgacccaaaatattaaactaaaaatccgacgaaactaacaacattaacaaattaacacaactaacaaattaacaaaacctacataactatcataaccaaagaacactccgtcccatacttaaacaacacat

SEQ ID NO: 221969 - DNA, 481 bp, Glycine max
  unsure (1)..(481): unsure at all n locations
agcttcaactccttcatatgcacgaaggctcttattattttgaagagnatcctctggggacaccttcaccgtgacgtaagacactcgacataaaaccttaatcttctccttttttaagacaaagtatggacaagctgggggcaagtaaattttgctgccatcagaccttggatgcaactgtgatcgtatccccatatcagctagatcttaacgggtattcaagccatccttcgtcttgccttgaatgttaagaagcatcccaatcacactgtcacatancattttctccacatgcataacatcaatacaatgtctaacgtctagatcaaactagtacggaagatcaaagaaaatggacctcttcttccatatgcaactcttacttttatccttcttatggagtctttcacatacagtattcaggtgttgaacgcgctggtatacatgctcaccattcattggatgcgtcaatatcatgctc

SEQ ID NO: 221970 - DNA, 387 bp, Glycine max
actcaagcttcctcaatttttgtggattgatgctcttaagacgactactgttttattattatcgagttccaaccaacgctgtctcaaagacaccttttgagttattcaagggttggaaaccaagtttgcaacatatacgcgtttggggatgcccgtctgaagtaagaatttataatccacaagagaagaaactagaccctaagactattactgggtatttcattggatatgatgaaaggtctaaagggtataggttctattgtccatcccacaacactaggattgtggaaacaaggaatgcatagtttcttgacaatgacttgatcagtgggagtgatcaatttaagaacatttcttctgaaagggatcactatgaagctgaacctt

SEQ ID NO: 221971 - DNA, 468 bp, Glycine max
  unsure (1)..(468): unsure at all n locations
ggaccttaaaactcagctggagaaagntgaagatgttaggtctttacatttcttcttcttgagtggcatttgtattagttgttatattgaatgttgcatcttattccatctcatatctcttgtgcatcatgcatcatcatgagtaagtgagaagaaaatttctaaagttagcaaagtttcttcataaggcaaaactccctcttttaatcggttaaaaccttatgtaattgattacacaagttttttgtagcttgcagagttatgtctcctattgcgttaatcgattacagtcttctcgtaatcgattacacagttgtttttgagataatgactgattcatttaggagtgtttgctttaattgattaccatgtgatataatcaattacttctctttctataagtgtttcagaacaagaacactttaatgcgatactttgagtatctaatccattacattattctcgagt

SEQ ID NO: 221972 - DNA, 355 bp, Glycine max
  unsure (1)..(355): unsure at all n locations
cagcnnngagaggatgcgggaaaggtggattttattgttagaacgggggagcacgaactgccaggtttaaaagagggagagaagcggaactctgaagctcgtctcataaaccttaatcatcaaagttacgataagcgttacacatgcttttatacatagactaggtagcttccttgaaaagctctcttaagacaacttccttgagaagtttttttgagaaaacttctttgggaagctataccttagttacacacacccctctaataactaagcccacctcctcgagaagcctgctgtagaggatccccaaagacgcttgagcttatcttcacacacctttctaatagctagctca

SEQ ID NO: 221973 - DNA, 443 bp, Glycine max
  unsure (1)..(443): unsure at all n locations
tttaagacagttgattcatgacaatcctgaaggtttcgatgntngcttaactttnggtttaagggaaaacaaaataaaggacatattatacccaatgatagactaaagttgagacaagaaagaaatataaggttatgctttgtaaaataatgtattaggccaacagttgtctacggaaccataaatggtgctaaaatatgtatctaagtagaacataagttgtagacaattgaactacgtgaaggaccctgaacatgtgaaaatcatctggattcaagaaaatcaccaaaagcctgatctgcaaccagatataaaaactgaaattcaataactttgttaatgaataaacatgtgtcaagttagcataaaaaaatatgggatgcaataatgatgaccataagctgttccaatttgntgggtatgcatttcctagtgtactaatt

SEQ ID NO: 221974 - DNA, 294 bp, Glycine max
acacgagcagcacccaaggaagagattctctcaacccccaaagggaggccagccccaccaacatcccaagcccaaccaaatcaaaaccacccaacgccacaacgccaagccaacgaaaagacatacgaccacccaataacagaaagcaacactagacaacgagaaacaccgatgcccagagcctaaacacaaaagactccaacacaccccagggaaaacacatccacaacaaaacaaattgggcacccctacacaaaaccaaattcaacaaacaacaccaaaacgcagaagcaa

SEQ ID NO: 221975 - DNA, 443 bp, Glycine max
  unsure (1)..(443): unsure at all n locations
gaaactcaagcttaatgacttgcataaaccanaaaaagcatacgatatcttcttctggattgttgaagngaatgatagctctaaaaatgaaaaacaaaccaaatacattggaatctcactcctttaataaatacaagaaagaaatggtttaaaaaaaacttaaattggacacaaaaaggttacagacagtccaataagcttgtgttatcttatcatcctgcaacaaaaaagaaaataacgtccaataatatataataatttattatccaaagatacaggtttggacttcaacaaccctagatcctatacatatacaatagctaccatcctatctaggtctggactgcagttacttcatggctcacaagtcaatcaactgcatgagataactagcttcgcanaactgcaaagtcaacattttaacaaaatgtaatcaaataatc

SEQ ID NO: 221976 - DNA, 405 bp, Glycine max
  unsure (1)..(405): unsure at all n locations
agcttctacttatgtggcagggcggtctttcttcactttcttgtctccaacgcgagctttgaccactgctcttccttcccgcgatgcttcttttcatgtccgcctgagtgggcttatagcctaaaccatacttcccacgatttccttgggcatttatcaggctagttatgccgccgttgtctttgcctaaacccatttcgggttcataaccgttccccaacataactcgggccatcattactgctgcatcaaacagacaaggctgcctagagaaggagtccacggaggaaatgctgaccacctcataagactggaaagcggtttctaacgattcttctgcggcttccacataaggcatagaggatgggcagcttaccaagatgtcttnctcgcctgacacgatga

SEQ ID NO: 221977 - DNA, 450 bp, Glycine max
  unsure (1)..(450): unsure at all n locations
tccatcaagtggtaatcagagcacaagagcttcaagtttgtgctccttatacctccattaattttntgctttaccttctcttccattgttttttcttcatttttctacatgtatctcctcacatgtcttgttctaaatgttgttaacatgattctttagagtttgcaccgattaaacttgctatagaagttagatttgattttctatggttcaaatttcttgttcttgttcttgaaccatgaattgtgttgagtttaggatcctttgagttttgtcttgttattttttgtggctgaaacctaaaccataaaattcttacaaaaatattaaagtataagaaaacctcaaaaatctagagtgacttgttcacctattgtagttntgtcatagaagtcatgtctagtcatgaaacttgtcacataagatttcttatgttgtgctgaattttat

SEQ ID NO: 221978 - DNA, 307 bp, Glycine max
ctgcagctttattgaaatattgtttcagagtctggcccagggtgatgctccgcaggccgcagacgcgccgccacctcatcaggttggcccagttggatcatttgatacagagcagtatttacggcatttggttcaccagcaggcggccaacaaccgggcgcatgtacagacccatgattgtctttaccagttgagcctcagcctgcaaagccagggttttacttcttttccatgccttactccggatcagttcagggcagaggtcgcatggcccggagaatggcctgaggcccgggcaggagaggca

SEQ ID NO: 221979 - DNA, 449 bp, Glycine max
ggccaaggttgagctaagctaacttcaattctatctgaatttggctaagcttcagcctgatcactaagcgaaaacttatctgtggctaagcgtgacctattgtcgccaagcgtaattccttacggccataactgaggtcgatgaagctaagcgccagccatggcagctaagtgagattcattgcggcaacatgagcactaagcgagtccctctcagctaagcgcatgctcatttatacttaagatgcatcattttagctaagctggccagaacctggcttagcgagagttacagcttttctaatctgcagacctcgctaagcagacgtaccctcgcgctaagccatgtttttgtttaaaaaaaaaaactgattttgaatttgaaatgtcggctaagcgcacgggtccgctaagcgagccttgttgagaaaccgaacgtctctcttactc

SEQ ID NO: 221980 - DNA, 449 bp, Glycine max
  unsure (1)..(449): unsure at all n locations
agcttcacaagcaagcttccatctagtggttatcagagcacaaaagcttcaagtaggtgttccttaaacctccattaattttcagctttaccttctcctccattgttgtttcttcatttttctccatgtatctcctcacatgtcttgtgctaaatgttgttaacatgattctttagagtttccaccgattaaacttgctatagaagctagatttgattttctatggttcaaatttcttgttcttgttcttgaaacatgaattgtgttaagtttaggttcatttgagttttgtcttggtattttttgtggctgaaacctaaacccataaattcttancaaaacattatagtagaagaaaacctcaaaaatctagagtgacttgttcacctattgtagntttgtcatagaagtcatgtctagtcatgaaacttgtcacataagaattctta

SEQ ID NO: 221981 - DNA, 471 bp, Glycine max
  unsure (1)..(471): unsure at all n locations
ttacggacctataaaactcagctttagaattntgtcagctgcatcaaaatgggaggcaactttatgttnttgagtctttgcatcaactcatgctcaactttagcttggtttttatgttaacagttgcccaaaaatagagcaaattgttttgaaatttgttcatgaccatatccataatgctccatcactagcagctgcattaataagaatgcactttcatgactgttttgtaagggtatgtgcttcaatctttaagcttctttcatttttacttaacaagtacaatgttattgttagattaaggttaaggagctaactaagatgaagcatttcagggatgtgatgcatcagcccttttgaactcaacaaccaatcaggttgagaagaatgctcgtccaaatcttacagtaagaggctttgacttcattggcattataaagagcctctgtgaagctgaatgccatggtgtgg

SEQ ID NO: 221982 - DNA, 373 bp, Glycine max
gtttttccacccattctgaattttttaatgttttgtacttcatggtgaaggagcaaatataatatgtgccttatgagtgaataactactaattacagtgtctcttctctttttttactttcttttttattggtttgcaagactttctcaagactatggttgtcattatgtgatgcatatctcgtatcaaaatatgattatttgagataaaaaaaaacaagcagatatgtaggtccattccaaaatttattttttcttaatggaaaacttactaatgaaacaatataatttttcaaatacagtataaaaagacctttaatgcacatattttaccacttttaacagaatttattaaaataaaattggttttttta

SEQ ID NO: 221983 - DNA, 416 bp, Glycine max
  unsure (1)..(416): unsure at all n locations
taccanaagaattagaattagaataccaaggatacaaatgtttatttctcatttaaaggtacttgctttccatggcctgaagtagttctgctacattaagaagtcaaagataaatatggatatgcaacttttgttgggaaaactaaaaccgtgatcttcatgacttgaacaatgtaaaaaatatgggaacttaagaagaggaaggaagagagataaaagacaatgaaatattaaattaatattaactcattacaatgtacaaatactataaaaccaagagcattaaccattatactaatcataatcctaactaaataagaaacaaattattagataaggaaacatggtaactaatcttaagaaataataaggaaatagggaaattaatacttgaaggtaagatagcctacgatagg

SEQ ID NO: 221984 - DNA, 470 bp, Glycine max
  unsure (1)..(470): unsure at all n locations
agctngtactctaatcattcataaacctgttttantcttttcacataaatattggtaatggtatatttttccaaaaaaccgatgttaatgttaacatcggtttctataaaaaaccgatgttaacgtaccttaacatcagtttttccaaaaaaccgatgttaatatccaaaacgttaacatcggttttttccaaaaaatcgatgttagcatacgttaacatcggttntttaaaaactgatgttgttttcaggaattttttttaaatattgcctctgtttttacaaaaaaccaaaatttaacctgtaaatttaaaatcagaccacacagcacacaacatatatcatctgcattttgctntcaagtagggtttagcagaaaactagctagtaaactattaattgaaaanaatcaattgataactatggataactatcaacaaaggttattcaatgttaatatgaaacaaaaat

SEQ ID NO: 221985 - DNA, 459 bp, Glycine max
  unsure (1)..(459): unsure at all n locations
ttgaagatacaaactccctccatacacccaagatgggtagtgttattctattnttagcagggagttagaatttctaatccaactaattactaagtgcttgtttaacgtgtgtttgtttttccgataaacttgcagcaacatgaagtctgagactacttcagtatagaaagataggtgttgttgcttctccaactttcccaagggagatttaggaattttttaaaagggaatcaaaatgatattcagatagttttaccggtgatccaaacacacttagttagcattcaaaattaagtttagagcatctggaactaattttacaacaacatttatcttaacaggagacttgtgactaaagttaatttaatatccacacaatttaatatccacacanaaatgtgtggatatcattatgtgaattgagtcaaacaatataattatgtggcacttggacctaca

SEQ ID NO: 221986 - DNA, 414 bp, Glycine max
agcttgtgcaatcgcagcctcccgaggtatttttatttcgattgttagctacaacagctacagaattcactgttcactatggtcccattgtcccaacttgaactcttcaacagcaagctaatttttcatacgtgtgtacaacatcataataaagggatgaagagtcggatatcaaattttatcttgcaaaaactcctatattttctacaaaaaaaaatttattaaaaaaagggaggtcaattcttcaccccatgataaagggatgatattattgctttgtgggttgcgaagtgaaaatcaagaatttaaatcctgaaggggaaaaaatcttatctgcaacagtgtaattgtttgggagatgaaattgatggaggaaatacaagagagaataaatcttaagttttatttgggtga

SEQ ID NO: 221987 - DNA, 454 bp, Glycine max
  unsure (1)..(454): unsure at all n locations
agcttctatgtgagaggatgtgactcttgacatgtgaatatgaattatattgtttatggcactggnaattgataaccaaaccattgcaatcggttacggctatttgaaaaccattggataggagcacattcatttgaaagctttttcaaatacattgtgctactggtgatcgattaccagagagtaacaactgtgtggtgaacatgctctgtgaacaatgcatgagctactgaggttttgaaaaaggcttttcatacttatcatgaggagagcttttcttgattcttgaatcacgagtctagaatcttgatcttgattcttggaagcctgaaccttgaatcatgattcttgattcttgaaatcaactttcctcttgaatgctggagtgttcttcacgctttctctagaatcttgaagnggatgatcttgaatctatcttgaacatctcggactc

SEQ ID NO: 221988 - DNA, 432 bp, Glycine max
  unsure (1)..(432): unsure at all n locations
agctngannnaaaagttatatgcctagttactttttaacagacatcttggaagaaattaaatattattctgaatacaagttaatcacagtcaaatattgatggccgattgctaaagcacaccacatttggcaagtatacggatcacgtcaagtaatataattactagtagaagaataccgttgatcttgcatagattttttcaaatactgttaagttattacaagttgagctaacatgaagcgtgtagtctaatcattcctatatgaagaatatgatgtacgtaacaatgcaattgaatgaaagggatcgatgtagtgagatgcaagctgattcatactaggacaaaacataatggtgagtaatcgcgtaagaagttgttgattagtagggtcgaataatgagttctacagttgttctgcttacatgaacta

SEQ ID NO: 221989 - DNA, 416 bp, Glycine max
  unsure (1)..(416): unsure at all n locations
ctaagcttaccatgaaacttanagaaaggtcacaagcctcataaacttaacttatctcttgattaactttttggacgagaagctcaagtaaactccaaagaatctcttccaaatgcccaactcaatctctaaatttccagtttttttcttcagttgcagtgcatattatgataagcacttcaattctcttgactagcattgtgtttataaataattggatgtgataagaaacaaggcttcattatcaatagaaaaaatatgaacaccattaatattatttatttattaactattaatcaaataagataatttagacttcaaaattaaacagtctgcacaaaatttaagaatagtttgcttaattctctgatgaaaacccacacccagactcttctcctagaaagcaaaaacgtgga

SEQ ID NO: 221990 - DNA, 432 bp, Glycine max
  unsure (1)..(432): unsure at all n locations
ctcccctctatcaacgcgaggataagttcttcatatttctgtcttcgttatattntcatttttcccataatcattgagtcacatatcagtaagaaaatatatatcgagcacaaagttacttacttataagtccgttaaactcattattttaaagttatgaagatttaattcaattagttaaaacataacgtataaattatttgatattattttttattcttaatgataaaaaaatcacttccaaaataattgagaaaacactcgacatgtttaaaatgacgatgattagtttccaatttaatgaaccttgttgtggtgggaggggatctcaatctctaaattagaagtcttacggtgactaagggatgtctggataatacttgcttagaatttcaaatanaatatatacaaccagagtctgaattgggctgc

SEQ ID NO: 221991 - DNA, 466 bp, Glycine max
  unsure (1)..(466): unsure at all n locations
tatgcatgcagagccaccaatgaaattgtaatgactgcatttgctattaaacagatattcagaaagacagaatgtttaaatcagattcatgtacatcgacaaatgcatagttaatatgccatatataaataggcttaagaaagtgtatacaaacacagaacataagatgcaactaactagcacataacaattggaacattatacaactaagtaaactttgctactaaaaggggcatctcattctcactagtcacggataattataaatcttccaacaacatttttctgctggtcatcctaataactaaatggcaaaacttaattgaagtaacttaggtgttttcttatgttgtttttccattagaagttttaacttaacaagtattaatctttattgtgtaggttaaggtggcgaatctcaaatcttaattaanaaataatagtaaaaaactattaaataataccc

SEQ ID NO: 221992 - DNA, 377 bp, Glycine max
  unsure (1)..(377): unsure at all n locations
agcttcttatccaaggctcatctttttggttattctccttcttgcatggcttattccttagtggatggcgcctcctctcacctcttctccttngtcttccgctgcatctccatggtggaaaatcaccattaaaggacctcattgaagctcaaagatccagcctccatagaagccccacaagcaagcttccattagtggggcaggcacttcacaccttccttgcttggtcgacacatctggtcaagtctttatcacaacatatacttattggccttactatatgtttcttctttctaaattaattcattaagtgtgcctaaacttacgctatttaactttgtttcatgaataggtagctgtgtctccggaaaaccacc

SEQ ID NO: 221993 - DNA, 455 bp, Glycine max
tcttcatattggcgatggagagaaactacaatcttgtttcctattgttgccctcccaaatatcacattattatatgttaaaaataagcgtgatatagtgggtgccctaggacaattctttatcccatgaagattcccattcaactttaattagaactcacagagtttcagcacaaagaataaaaaggtagtgggataatggatccctctgtcttatttctctcgaaggtataaattccctacccagtttcccattaaccaacatagagaaagtcacaaaagtaataaatttcattattaactccacaaaattttggggaaaactgttatgagcaaggatagaagcagaaatgcaaaatgcagagaacgggttaggaaacttaagacatggaaggaaagggaaatggcttatattattcttatttttctgttaatacatctcatatatttataact

SEQ ID NO: 221994 - DNA, 453 bp, Glycine max
  unsure (1)..(453): unsure at all n locations
agctttgaccattcagctcgaatatgagcttggttnttcttggccacttccaactcatttctcaagtgaggcacttgttccctcaactcatctctttgtactttcagaatctttgcttcttcaaaaacttccctttttctctttgtacttgttaccttggccgattgaaaaacagaaatgttagctttaattgcatttatctgctcttctagctctttcttccttttctccaaacatgataactggttgcttaactcattttctaaggacataacttccttgaactcgttcttgttagcttcaagatttccttctagtttatctgctttcgagatgttggtgctggcagactctattttcctactggcatcattgtagtcgcaactccagcgagtgaattctcttgaaacttctaatatcaacaacctcatttctgctgagactccatcatct

SEQ ID NO: 221995 - DNA, 461 bp, Glycine max
  unsure (1)..(461): unsure at all n locations
ttggtgttattctaggatgtgttgaccgttgaanaatatgtttagtaaggaaagtcaaaccanaaaaaanaactataaatgaaatgaaagacatcaaagaaaagtcgcaacagaaagctgagagtgctgaaaagtagaagaacgcaaatcaacttgtctctgatgattgataaaatgccttacaatttgctgatacataagtttaaattaaaagataattcccatttaggccttgaaacaaagataccaaacctgcacgattttttacaaccaaagaacatatgaacaagcgtctcagcaccatttttgacatgctctacattaaattattaaaaaaattacattaaaatttttaatataaaaattattaaaattatattaaaaaaatataaataaaactcattaaattaaaagtaagtcccactattcttacaagttttaataaattttagttaataata

SEQ ID NO: 221996 - DNA, 425 bp, Glycine max
  unsure (1)..(425): unsure at all n locations
ccttatcaaatgaagccaattcgagaggatagttctcgatagatcattcatganttctatgaggagagaacttataaaagatttcatttctttggaagaaagaaagacctctgtaaaaccaaattatagatattgtgtatgcctaaaaagtaaaactgaaaattcaataaggaagaattatcaaatggctgctttaggtgactaatagggtgttaatatgagaacttagtaattgaaaactaacacttttattccttggttgttgctaatttttattgtggattttactttttaattcattttaatttaagtgtatctagctatttctaattaccaaatttaatttgatttcatctccattcactattagaaaaaattggttttacattgattattaacgattttaaaatttattattgacaaat

SEQ ID NO: 221997 - DNA, 371 bp, Glycine max
  unsure (1)..(371): unsure at all n locations
agctatggagatatcaagagccaaatctgtttcttctttactccagncttcttctggcttcaattcttcagagggctatccttctatgtccagcatattgggatgttcccagcctctgatgacatgcttccaggttctgctatccagtgattagaggaaggccaccattcttgctttccagtattcatagttgcttccatcaagaattggtggtctgttcactggtccgccttctttctccatgttcatcagaatttatcttcctagatctcactctgtgatttccagtgtcggctctgataccaattgaaattcttatactgaggacagatgtcgtacaggatgtcacgacatcacgcttctgaacatgc

SEQ ID NO: 221998 - DNA, 436 bp, Glycine max
  unsure (1)..(436): unsure at all n locations
tgtccttccttacaagtcccagtgctacctcgntagtcactgttatttctttgantggaatctccgctgcctgcttaacaaattaaaagagaaatcagtacatgcattacagtataaaagaattttcataatgtcattcaatatcaaattataatatactaacctctgatgctatttataagaaataagttgtaatgtacactaatagattcagaggtagtatcataaatttataaatttttataataattatcttaaaaatcatactaaccctaatttttaattgattgattgatactgaccatgtaaagggttttcatgatttgatccaatcacaaaatgcaataaattggttgtcttctatgataactataacaaanatcataccaataataatttctaagtgatagaatacangtatttatagacacaacat

SEQ ID NO: 221999 - DNA, 410 bp, Glycine max
  unsure (1)..(410): unsure at all n locations
atccttaagtcaccgcggctgcagctgcatcatacctgctgtttatttttgaggaatnngggcttcccataatggatacatacacatggcatcacattcacaaacaccattcaagtatgaaaacgttactggtgttcctaatgcagcggattggagggaaaatggagctgtcacagcagtcaaggaccaaggccaatgtggtaattaagtaacagaatttcttttatcagtaagaatcgaaggcaggacaacagggagtttacaacaactcacatgttctgctcaattaactgagctagactccctcggttaacacagaatattaaccataaattaaagtgatactattttcttttctatatatcactgctatgatggcattaattaatcatgtgtaatctgtaaattaa

SEQ ID NO: 222000 - DNA, 460 bp, Glycine max
  unsure (1)..(460): unsure at all n locations
tagcatcaatcaccttgctgaccaaacaaatgaggaatttgtggtcttccataatggatacaaacacaagggatcacattcacaaacaccattcaagtatgaaaacgtcactggtgttccgaatgcagtggattggagggaaaatggagctgtcacagcagtcaaggaccaaggccaatgtggtaattaagtaacagaatttcttttatcagtaagaatcgaaggcagataacagggagtttacaacaactcaggtgtcctgctcaaccaactgagctagactccctcggttaatacagaaaatcaaccataaatgaaagtgatactatnttcttttctatatatcactggtatgatggcattaattaatattggttaattggtaaattaacaggtagctgctgggcattttcaacggttgcggcaacagaaggtatctaccaaataactacaagtatgt

SEQ ID NO: 222001 - DNA, 291 bp, Glycine max
  unsure (1)..(291): unsure at all n locations
agcttcaagagatcattctcttgtatcattattggngacatcncaacaggggtaacaactagacattctcttaaagatttatgcaataatatggcttttgtatctatgattgaacctaaaaatataaaagaagccatagtatatgataactggacattgccatgcaagaagaactgaatcaatttgaaagaaacaatgtgtggaaactagtataaaaacctaaatattattctgtcataggaacaaaatgggtttttagaaataaattaaatgaacatggcataattatta

SEQ ID NO: 222002 - DNA, 396 bp, Glycine max
  unsure (1)..(396): unsure at all n locations
ggggatngcattngggcatctantttgactttcctatgccgcctctacatacataaaacagccccaccatcccaattttgcaaaaatcatattcatatatcattggggcatttcaccgagcacttggtgggcgcacgtttggacacaaattgcaagagaatggggacaatgtggcatgccccattgcttcagaatacaacataggcctaaggccttctcattcaaatcctcaactcaagaaaacaaacataaaaacaaaccaaaactgccctacaaatataagcgcattctcacaatttggagcaccaaaagatgaagaaaaaggcaaccaaaagtggcttgagggagcaagaaccgtaagccttcgtgttctttcttttgaatgagggggggggg

SEQ ID NO: 222003 - DNA, 368 bp, Glycine max
  unsure (1)..(368): unsure at all n locations
agcttgcatatatatcaatatattaaagggtgtttgacgctctccactcagaatcaatgccttcattgtgaattgccttcattgtagacaatttaaccctgaaccagattaaagaacaacacataaaactcatataaagcggaaacaaaaaagcgtaagcttcaaacaggaaattggattaatactgcatgtggttgcaattctttttttaaaactccataggatcctaaaccctttttcattattatttggttaattnttatggaaacaataaatggaatatataaatatttatacattcgctataaagaaagaaaaaaaaaggtggtgcgcgcgtctggaacatacaaaaagaaagtgtttgatat

SEQ ID NO: 222004 - DNA, 451 bp, Glycine max
  unsure (1)..(451): unsure at all n locations
tanacagaaatcattaacttgatgattgtacattattaagttgatnttttttgtttggtttcaaaagttgaatagtttttttttttttacaggaatagtttacatcgtactataatggttcttcctataaattcacccaattactcaaatacggaaatattaaatattatttatatttccaaaatattaatattaaatgaatttaatttcctatttaacattttactcaattaatatttttttaaaaaaaagcaaatactangaagatgtactatgccgataagatcattatccagccataccccacaaaaaaaatcattacccagaattttatttcctcaatacaatttatgcaatatgcatgcacaccctggattcttctttcgagggaagggatggatgattnttccccctctgaaaaaatatgaaaaatcacaaacagtaaatgcat

SEQ ID NO: 222005 - DNA, 462 bp, Glycine max
  unsure (1)..(462): unsure at all n locations
cgtanaanatggagcccnctcgctaatagttataaaacagtatccttattggtaaatactctctaaataggaccctctgacataaatttgcctcataaaaatattgttgtcccaatttacaataatcaatagtaagagaccctcattcccggctttaacttatcctggttttaacctgtgcaacaaactagccatttctgctatacatgttttttttttctcttttttaatagaattactgctcatccttgtaatttcaacatgaaaacaccacactagggaaatatagcaaaatagcatctttatctatctgatacatacaatgattntacaaatctattccatacattctataatggtacaacatggacttcacattatattaactaaaaaaagaaagactatgaataatttgaatgtatacatcacaaatctgagaactcaaactcttttataagtgtt

SEQ ID NO: 222006 - DNA, 373 bp, Glycine max
  unsure (1)..(373): unsure at all n locations
agcttgggcttggtttagacatgagcgatacatgatttgtgacttgcaggatttgatttgagcaagattggatgaggggaagtgtgattttcgaaatctgcacttatgcagaattttgctgtcaaaataggtgcagcaggattttggctttgtgcaaaaaaatgcttgtgtgtggttggctgtggaaagagtagtacagaatgagttctggatgtttgctagtagatcccaacggtcacaatgtaggcttatgcactatagacttccagtaaaattntggagtcgatccaacggttaacgaattggatcgaaggaattgctactgtggtctttaagtgagaaaagctngtgattttggtgatgtgttgagcat

SEQ ID NO: 222007 - DNA, 476 bp, Glycine max
ggacctataaaactaagcttaatggagaatgaagaagaagaaagctacgtgagagagggagagttaaggcttctgaatttctgctttggctgagtgaggagagagaaaagctttttggttttaaataaaaagggttttccctttttccattattttattcaagctctgccacatgtccctatttgattggagcaaaaagggcccactttctctttttgactgtgacccatactcagtcacaaaagtgagaaaaatctgacctttgaaacgctacaatcctgcctcggtttgcgtgccgtttctctgattccagtttctctgcgtccgtcggggccagttttcgaaagcaagcaatttatatatcaaaacgctcagaataaaaccccgagcatggttcaaaggttggtttcgttaaattctaagttgcacgcaaaacgatgaattttaaactaattaattaagaattaacccataac

SEQ ID NO: 222008 - DNA, 443 bp, Glycine max
  unsure (1)..(443): unsure at all n locations
agctntgctccttttataagaagagaagttctttatctatttgttatctacaaaaggcattgaggtagatccaagtgctctaatcattcattagcatattcatgttttggtggcatactccacactgcttgtttctttatggaactcaccataactaaaaaagcgcaaaggcacccctataacactcgatccagaagttagatggataactaatagggagtgcagaacagatgaatgctgacctatcggtcttaaaagatcaaatggcttctatcacggaggccatgctaaagccttcaaaaactatagaagataatgctacggcggccgcttccaatacggctagggaagcggaaccggagctacagcctgcaatatacttgcgccgatacataaacacgactggttccaatcggaagtatagtcctcaagcctatccttat

SEQ ID NO: 222009 - DNA, 459 bp, Glycine max
  unsure (1)..(459): unsure at all n locations
tgcaagtgtattgactgtatattgaggattctcangcatttatttttttatctttctgtcacgggagtttcactatgtcccatgtcaaccctctaacatggcaactaaaaaatatgagttacgtaaggataggtcattcaagtcttttttctaattgaatacagctagtatcactttcgtacagtatccttcttatcacggtaatgcgaagtgatgaataaattaagaggtttttgttttcttacaagggtgattaaattgaatgagtttataataaactaaatattattattttaattttggtgtgtgagtcgtacttcatatatgcaacttaacttttatcataaaaaatagataaattggatttattaaatacaagttatgtattttttttaaaaataataatagggttaaataatctatttttgaagcgcttatagaaatttgggtcctatatta

SEQ ID NO: 222010 - DNA, 467 bp, Glycine max
  unsure (1)..(467): unsure at all n locations
agtcacctgcggcatgcacgctggactatagatactttatcagcgtattgattattctctgggatgggattcaccaccattaaggatagcattccttaacttcactacataccacggagtcactctgaaagatattaacataaaagccaatggcaggaaacaaaatgagatatgaaggttttaccatatctagtaatatcctactcaatgtaaagaccaatatgaccagtgcaacgccccagcataataatcaattatcagaacgctattgtttggagtacttaataaactccgaatgtctcacttcattctagagcaattcatcattctatgtntctgatgctctgataacaataatgatgccaaaatttggttgcaggcttgcagcacacaaattattatccagtttatacttataaccaaatgcttccttctcagattcaattttttatcttctttaaatatat

SEQ ID NO: 222011 - DNA, 446 bp, Glycine max
gaaactaagcttcccacagcaatctgtaatccagcaaccttcaacacaacatgctgttctcagaaagatccctctgttcagcagtacatgcctgtaatggctccttttccatactattattctcagatgccttatgtacagacatacttcaacttcacaagccaaagtcttttgctaataccactgtgctcaaaatctagttctgaatcgtgaaatagttcttcaaataatactactgctggcaattctgcatttctgcctcttgtaatgctttgtcatttgccacttggcatgctagactgggtcatcctagtgcgcagatgtcatgagatatgtattccaaacatgtaaaattccatctatcaataaaactgtctcacatttctgttcacattgttgtgttcgcgcatcacatagattgccctcatcttcttaactatctatct

SEQ ID NO: 222012 - DNA, 414 bp, Glycine max
  unsure (1)..(414): unsure at all n locations
agctngctanaataatcttggagtggatgttgattctatacaanccnggatcaagctttgatttagctaaaccttctttagctntcaccttcatcattaagctttgaaaagtctttttgcttgttttagctatttgcgttggctttttgcccacacagaaaagcttatgcaaatcagttgtattcttgtagcgcactaattaagaaagttagttaattaaatctaattgcatcaatcgcaatgaataactaggttttcccctaacttacccttcattggaacttngatcccagaataaaaagaagtcattggaactaaaaccttaattaaatgaagggtatcttagacatagttatattaaaataaagtaaaattaattagaaaatttatattcgagaccaagaaagaaaatga

SEQ ID NO: 222013 - DNA, 461 bp, Glycine max
  unsure (1)..(461): unsure at all n locations
ttngacggactataccaagctctaggaaccagggacggagtatgttctatatataggcttgctaagggtagagagaggaagactagagatttggatcaagtaaagtgtgttaaggatgaagaaggcaaagtcttagtgcatgaaaaagatatcaaggaaaggtggaaggcgtatttccacaacttatttaatgatgaatatggatatgactctagcagtctagacacaagagaagaggaccggaactataagtactatcgtcggattcagaaacaggaagtaaaggaagcgttgaaaagaatgagtaatggtaaggcggtggggccagacaacatacctattgaagtgtggaaaactcttggagatagaggtcttgagtggctcaccgaactctttaacgaaattatgaggtcaaaacgcatgccggaggaatggaggagaaacacgttagtgccaatcta

SEQ ID NO: 222014 - DNA, 448 bp, Glycine max
  unsure (1)..(448): unsure at all n locations
agcttganatccanaatctaatccaaggataatgtttcataaatgggattcccttactcgtgctattcgattccggtgcaacccattcatttatatcctattcgtgtatagggaaacttaagctttttgtgtcttcttgaaataaagatctggtggtagagactccaactagtggttatgtgttaacttctaatctgtgtttgaattgtcctgtggaaatttctagtaaaacatttttgattgatctgatttgtttgcctttgagccaaattgatgttattctgggtatggattgggtatcttccaaccatgtcttgttaaactgttttgataaaactgtggtgttngatggttctggagtgagtaaggatatgatngttatctctgccaaacaagttgtgacatctttaaaagaagatgctcaagtgtacatgatcttgtctaacct

SEQ ID NO: 222015 - DNA, 456 bp, Glycine max
cgacctatgaatctcagcttctcaggaggtgagcttagttattagatgggtgtgtgtatcttagctctagcttctcaaggaagcttctcaaggaggtgagcttagtttttagatgggtgtgtgtagctaaactctagcttctcaaggaagttttctcaaagaaacttctcaaggaagttttcttaagaaagcttctcaaggaagttttcttaagaaagcttctcaaggaagttttcttaagaaagcttctcaaggaagctacctagtctataaatagaagcatgtgtaacacttgttgtaactttgatgaatgacagtcttgtgagacatacttcaaagttccacttctctccctcttttattccttcaatttcgtgctcccccctctttctttccctccctctttcttttcctccattgaagcatccttccaagcttcttatccaaggctcatct

SEQ ID NO: 222016 - DNA, 406 bp, Glycine max
  unsure (1)..(406): unsure at all n locations
agcttgaatgctctattcaagggagttgataatattatcttcagacttatcaacacatgcacagtggccaaggatgcatgggagatcctgaaaaccactcatgaaggaacatccaaagtgaagatgtccagattgcaactattggctacaaaattcgaaaatctgaagatgaaggaggaagagtgtattcatgacttccacatgaacattcttgaaattgccaatgcttgcactgccttgggagaaagaatgacagacgaaaagctggtgagaaagatcctcagatctttgcctaagagatttgacatgaaagtcactgcaatagaggaggcccaagacatttgcaacatgagagtggatgaactcattggttcccttcaaaccttngagctangactctcggata

SEQ ID NO: 222017 - DNA, 458 bp, Glycine max
  unsure (1)..(458): unsure at all n locations
ntgcattcattcattcatggcagacatgaaatntatgaggttacttctataagtagtgctgagttgctaagagttgttttctcttttttctcttttgttttttttatgtctagacataatctaggcttgacaaaaaaggaaggtccagaaatttgttgagaggtattatgcattcttcaaatgaatcaaattgttaaaatacttttaggaaattcagtagaagtatacaattatggtatgtttggaaaaccattggaatgcacttttaagtccgttcacactttccaagagacaaaacatagatgctagattttgtttctccaggtgaaggttggtttccgttgtgatgactgtgaaacagacccactagtatttatctatgtagattctattntgtatctaaagttgtctgtccctgcaaatttgtgttacaattatttcaactgtttgatatattt

SEQ ID NO: 222018 - DNA, 425 bp, Glycine max
agcttttgtccgttgattccacattgttattatgaccaacatcgtgccatcgccaaagtgtgtcatgccaccgttggagtgtccacaggtgttgactactaatatttttgtgtctctaggtcatgatttaaataattaaagacctctggaactttacaaacaaacttgtattgcagatatattttcaagttctaacataacaggtatactacatacatttgaaatctaacattatacaaattaaacaaaaaccctcaaaactgacataacaggtatattgcaaggagtcactataaaaatcatttgaaaaaattaattgtggaccaagacagatgacaactatacgtaccttaaagggaaccagcaaatgagagggtacatacggatgggaggttcgccattcaaaaataatgcacaaattcaag

SEQ ID NO: 222019 - DNA, 442 bp, Glycine max
  unsure (1)..(442): unsure at all n locations
tgagtntcttctatgggtaaccaggatcatgcatactctgttgtttcctcttgaaacaccttaatgcgattcgcaagagcgaaagtctctcgctattcgtaatgaaagtaacaacatgacaaattatcaagcaatctaacaagacatgattggaagataattaacccataacaagattaacattcgattgactaggagacaataattntaaatcaagaatgatcacttattcagaatcaacaacaaatattctaaatgaattcaagaatgaaaccatgaccacaatatatacacatagggagacatcaacaatcgcatgatcgtgatagaaacatcagtaatcaaactgtttgacgtaggctgacaacacaaagagtgaattatacttgggcttgcaagtataatcgagctacttgactttagcaaaccacacaagaaaatg

SEQ ID NO: 222020 - DNA, 442 bp, Glycine max
  unsure (1)..(442): unsure at all n locations
agcttatanattgatcaactaataatcattttaatactcaaccttacaatctgaaatacgaaaacaagaagatgaatcaaccagctaataataaaggggtacatttaataaaatttcaagactaatttgttattatttgactcccaggcgtctctctaaatttttaaataataaaataaataaaagttaaatacagtaaataaaataaaaaactaataatataaaaatagtggaaaattaatataggttaaaagaaaaatttaaaattcaaaaaataatttaagaataaaattgtctaataataaaatgtcaacaatgtaataattctcattaatantaatatagatgattgatgattaacacactgcccaatttcaatggacagttgattttnttagttgaaggaatctagtcttaatcggtgatcacatagtgtctaact

SEQ ID NO: 222021 - DNA, 419 bp, Glycine max
  unsure (1)..(419): unsure at all n locations
tctacattaaactntagttgatctttgataaaaacaatttttatttaaattttacttatttttttgaatgaactttgaatcaatcagaatcaattttcaattttccatgataaaccggaggattacaacaataaaaaaatgactagggtgcataatgatgtccttaatgaatagagaaccaaaataaacttgagttattgcaaaatatatgcatctccatcaaagtaattaagatcatacctttcattgtggttaagacgaattccaaggtaaaaggccacagaaagcaaccacgaatcactatgcacagcaaccaaagaaatccaatccctgcgactcacatcatccctagcaaaattgattccagaagtggctcanggagctctggtggaacttcctctgatggcagaagtacttcc

SEQ ID NO: 222022 - DNA, 448 bp, Glycine max
  unsure (1)..(448): unsure at all n locations
agctttgttaccccatgtttgttttgctttctatacagctgntcatagcaccactaattgttctccttttgaagttgtttatggctttaacccactaactcctcttgatcttttgcctatgcctaatgtttctgtttttaagcataaagaaggtcaagcacaggcggactatgtgaagaagcttcatgagagagtcacagatcaaattgagaggaaaaataaaagctatgctaaacaagccaacaaagggagaaagaatgttgtcttcgaacccggagattgggtttgtgtgcacattacaaaagaaaggtttccgaaacacacgatatcatagcttcaaccaacgggagatggaccatttaagtgcttgaagaatcaatgcaatgctacaaagttgactgccaatgagataatttagtccaccttaatgctctattatctttttgag

SEQ ID NO: 222023 - DNA, 390 bp, Glycine max
  unsure (1)..(390): unsure at all n locations
tcctagaaaccaggacgtccttgaaccgttatttttattgtcaagncaaaaatcggggggttaactggttttactggtttgcacttacaactatatttaaaaaaaaaatcaaaacaacactgttttggttttaaaaacaagaacaatgccatttaccactggctgcacattaagccaataagcccttttttctttcacaatttcacactctctagtttgngctctctctcaccgtctcacgagttgcgaatgatcgctatggcggtgcctcactctctggcaacgcaacaacttcatggaagatgagctgcatgcaacatcatgtctcaacaaggctaagtattttgttgttcttcatgaatctctctaaggtaatttgtgaatgtgggc

SEQ ID NO: 222024 - DNA, 305 bp, Glycine max
  unsure (1)..(305): unsure at all n locations
agcttctattctctaccacttgtttttattaactgangggcaaacagaggtagtgaataggtctttatccactcttttaagggctcttctaaaaggcaaccataagtcttgggatgagtatcttcctcatgtagaatttgcctacaataggggcgttcatagaaccaccaagcaatccccttttgaggttgtctatgggttcaatcccttaacacccttagacctcattccccttccacttgacacttcttttatacataaagaaggggaatctaggtcagaggtcgtaaagaagttgcatgaga

SEQ ID NO: 222025 - DNA, 449 bp, Glycine max
  unsure (1)..(449): unsure at all n locations
tcttctattatataggcattcgtctccaagttatgtatcgntctttcaatggncggatccttcactctattctttgtgtgaggtcttaagtcttttgaagcatttaatgcttgcattaaatgcacgtccctgctacatgcaaagtccatgctgataggaaagtgtatattgtactccgatagggaaatcacttcttttatcataggaggttcgcaataatagagcgttccttttgatgatgatcaacgttttttagattgtggacttcatttattcttcataggacatttcagattctaggagaatgttttatgcatgatagaatctcaaacatcgagtattaaatgaagggtttaagtacattanttatatgctataccagatcgtcttataagtttaccatctgagacttcagatgcacaaaataaatcatgacctgatagcatatc

SEQ ID NO: 222026 - DNA, 440 bp, Glycine max
  unsure (1)..(440): unsure at all n locations
agcttgccgccagtagtaatggcggattgtttgtaaataacagacccccaccggaatttgttntgaaacggaccctctttcgtaaattggttttaaaaggaaccccatacagtaaatttgccaagaaattagtgttgtacccataaaataattttttaaaatgaataaaaatgttataagagataaaaaaaattgatattaattttatcattttattttttaattctatagtatcgacaatgaaaaaattatataatatttttgaaaatatataaatgcgtaaagaataattataatttgtaaaaatataagtatcttgaattcttttatcatgagattatatattctataaaaatttataataattttcttctataanaaaatttagatantattgtactgaattcagcacagcataatatttagaaaacacataaaaa

SEQ ID NO: 222027 - DNA, 334 bp, Glycine max
tgtcaaaactcagggcaaacacatcctctgtcctttgctctacaaacctaaagttcacccttggtgagccctttttgtttctaagttccatcttcaaaggaactcgaggtacacaaggtttgtccttgacgatcttctttattcctaatttttatctgtctaggaatacgagtatatataaaacccaaggtctgcccttggtacagattcctccaaaacccaaggtccacccttggtacgtactcctgtaaaacccaaggcatcccctatgtccactcactcgcacaactatgacgaccacaatcaaaggtcttagttcaacaacacaaactac

SEQ ID NO: 222028 - DNA, 265 bp, Glycine max
tcgattacattattcagctgagaccatgtctcattttcatgagtcttgtgggaagatcgattaccaagttattgatatcgaatacatcgttcttggaagtgttcccaatagtgatcaagaacactttaatcgactaaaccaagaatctaattgcattcattgttcttgaaataactccaagtgctgggaagaacaccattatacattaaaatgagaatttatttggtacttctttgaaatattgactaccatggcgtttcaacaa

SEQ ID NO: 222029 - DNA, 431 bp, Glycine max
  unsure (1)..(431): unsure at all n locations
acggaccttgaaactaagcttgagaaattntggtgcctgatatatattgtcttctttctatgtttaagttagatgtagctggggtttttctcacagataaaacatgtgtgacgtcctttgacactatatccactcaaatttccatatccaggaaagccattaatggtacaaaatatcatatcacgcaacctgaaggtctgctaaagattcctatcccacacatcaaccccatcttcccacaattttctgaaatcttcaatcaacagactgagatacacatcaatgtcattccttagctgtctaggacccgttatcatcatacaaagcttagtgtacttttgcttgatgcataaccaatgggagaggttgtaaatcatcagcaaaataggccatgaaatatggttagtgcttaagttaccaaaatgattcat

SEQ ID NO: 222030 - DNA, 420 bp, Glycine max
tgcattgtgtcaatttgaacgtctcgatatattatgcgccttaatctctcatccgagttaaaggctatgaccttttgaatatctcgagagcttccgttgttcaatttcgagcgtctcaatatattatgcgcctgaatctgacctccgtgtggaaagttatgaccatttgaatctctcgacagcttccgttgatcaatttcgaggtcctcgatatattatgtgcctgaatcggacatccgagtgaaaagctatgaccattttaattgctcaagagcttccattgttcaattttgaacgtctcgatatattatgcgcctgaatcggacatcctgtttaaagttatgaccctttgaatttgtcgacagccttcgcttgataattttgagccgtgtcatatatgaagagcctgaatcggacctt

SEQ ID NO: 222031 - DNA, 445 bp, Glycine max
  unsure (1)..(445): unsure at all n locations
agctttataagcacgggttcgggagacaaatgtcattcgttcgttatatgcgaagatgatattctgagtactttggatttggtacgaccatgccctcctgatttccagctgggaaattggcgagtggaggaacgccccggcatttacacaacaagcataatgtaaacctttatggttttaaaagctctatagttgggcctaggctttagagtttttccttttgctaaggctttgcgtcttttgtttttgaatttataatacaaggatctttcttcatctgttcctggtctctacccattctcattcatttgcatgtttacttctttttctgaaacggcagatccgatgacgagtctcccgaaggtactaatacctgngacccgtctatcgacttcgagcaagaaatgaatcaaacggaagatgaacgaaatgaggatgtgggact

SEQ ID NO: 222032 - DNA, 367 bp, Glycine max
  unsure (1)..(367): unsure at all n locations
ntctgcagggaagctgagtgtgaagtatgcaattctgcatatgattggcgctgcaaactgggtacccaccaatcatacttccactgttgccacaggtttgggtaaatttctgtatgctgttggaaccaagtccaaatttaattttggaaactatatttttgatcaaactgttaagcattcagaatcttttgctgtcaaattacccattgccttcccaactgtattgtgtggcattatgttgagtcaacatcccaatatcttaaacaacattgactctgtgatgaagagagaatctcctctatccctgcattacaaactggttgaggggacacatgtcccagacattgtctcgacatcagggaaagct

SEQ ID NO: 222033 - DNA, 462 bp, Glycine max
  unsure (1)..(462): unsure at all n locations
agctnntgactccttgtagaacttgatacatttggcttcctatctaatcatcttagagaagagtttcttatatcgttgtgtgctagataactttggatatttgatgtgaaacattttaggtcatctttgcatagcattntacataggatatattgcattttatctatatattttagcttgtttttgtataatttttagtgtttcatactcttaggacttgtcatggcgttctccttgttttcatnttacttcagtcattccaagatcaattttcacattaaggatttataaaggaaagtttgagcacaaaagacttgaaaacagataacaacaatgaggttttgctataccttgtagagaagatcatgggatgtgattaggatcaagacccaatcatcagacacttaagctagagcccagataatatgtgtaggaagatcatagccccaagaccatcatcat

SEQ ID NO: 222034 - DNA, 425 bp, Glycine max
tgttggattatggggcacccgtcatatgtggtactaggtggcgattaggcgatggtgcaaatcaactctcccacatccacaaatcaaacatgaacccaccatccccagttgcccaccttcaactgagctcacgtactcctacgtaacccttaccctcgttcctctcagcaccgggtccccatcaacccctccaagcttccacaatatccaagcaattcaattgcaactatcatgaactaccctaaaccaagaaaatagggcagaggcagaaaactctgcccaaaacacattcacatattatagctttccttactcaaataccctagtaacattctcttcgttccgattcattaaccgttggatcgactttgaaaatttactggaggttcctagtacataaatctacatctttaaccatgggatct

SEQ ID NO: 222035 - DNA, 467 bp, Glycine max
ggacctataaaactcagcttgaagctgagcagagagacaaagctctttgccttcttacagaggagatggttctgtttgaagctttggatcccttccaaagctgtcagcttacaaatcaagaagaggagaggctgtttggatgaggtgaaacgagcccttatgtgagcactgggcaagatgtttgaaccccctgccctattgggtttttcatacaaacaaagcatgttattttggtctgaaatggggcagattgtagacttgtgtaatcagtcttcaactcgcaagtctatgttattttgtccaattctacataagttcgactgagcctaccagaaaattattatagtagcgagttaaacagacttgcatatctgagattgtaactaagacgagtttacaagttggcatgtgagtttgacaaccatttgtgcatgtgtcactaggaacatgtgcctggtaagtagaag

SEQ ID NO: 222036 - DNA, 460 bp, Glycine max
  unsure (1)..(460): unsure at all n locations
ctgcagcatgcaactttagccaggacaaatcttgtgtttcatagcttcttcaaaaaaatgcccaccccctcaaaaatctgattcaagcttaaataggtgggttggcccgtgctcgcgtacttaacacaaatctggatcgcttagcgcgcataagtggattgtggcttaacgcgcttctcttgtttaacgaatgagctgaagcggtgcacttgatgacttggagcggtgcgctcagcgaacctgacaactcatcttcttctggattcttcctcgcgcttagccactgagtgttgcgcttagcgaatgctcgctaagccagcagattggcttagcgagaaggtgaaaacaacacttttgccatattggctaattaacctgatattgagagaaaattgatatttaacatacaaatcanagtttaattatctatatctatatcaacataaagtactataatata

SEQ ID NO: 222037 - DNA, 456 bp, Glycine max
  unsure (1)..(456): unsure at all n locations
tgaagaggatgctntaatggaagaaaaganagagagaatgttggagcacgaaattgaaggaataaaagagggagagaagtggaactttgaagcgtgtctcataagactttcattcatcaaagttacaacaagtgttacacatgcttctatttatagactaggtagcttccttgagaagctttcttgagaaaacttccttgagaagcatctttgagaaaacttccttgagaatctagagcttagctacacacacccctctaataactaagctcacctccttgagaagattcctaaagaaacttccttgagaagattcctagaaaagctatagcttagctacacatacctctctaatagctaagctcacctccttgagatgagaagctagagcttagctacacaccccctataatagctaagctcacccccacgacaagatacatgaaaatacaaaaa

SEQ ID NO: 222038 - DNA, 442 bp, Glycine max
  unsure (1)..(442): unsure at all n locations
agcttgacgtttcgcgtattgacggtcatgatccgcttggatggatcttcaaaatctcccagtctttcgacttaccaggaactccagaagaggatcgtatcatggtagcttccttctaccttgatggtcctgcactcagctggtttcagtggatgttcaagaacggagttatcacttcgtggccagctctcctccaagcaatcgaatctcgcttcgccccctcgatctacgatgacccacacggagctttgttcaagttgattcaacaaggtacagtaacggagtacctaacggaatttgaaaagctagcaaatcatatcaccggatggtcaccatcggntctcctcaactatttcatctctggcctgagtccctaaatacgtcgtgaggtacaagccttccaacatgtatctttacctaaacctacagctcttgctcgtct

SEQ ID NO: 222039 - DNA, 441 bp, Glycine max
  unsure (1)..(441): unsure at all n locations
ntanagtgaggcaagagttaagaagatatgacttaatcatctcttgtgtgtcagattttctacgtttgttcctcttgctgcaacaacatcttgctcttccaaaagtattattggacttatccctaaaacatgaataatatgagtgaatgatatgttgaaggtgacaataattaataaatgaaacaattatgttatgttaactaataaatgaacgaactgtgttgtggaaaattttaatacacttctaacatgtcccctcatttcatgttcctaattgtcaggtatgataattcagagtatgtggattaacgacattggcatagatacaaggtttgcctatgaacatcctttntggtgactgcatgatctattttggagattgatggttctgtaatttgacattgacattatgcangtaaatgcaaatgttattggaacttt

SEQ ID NO: 222040 - DNA, 469 bp, Glycine max
  unsure (1)..(469): unsure at all n locations
agcttnctcggggccatttcctgcgagaactatcatttagaagttagttttacaagataatgcttatcttaacgcanaaaatgtcatgctaatctctctgattttagaacgaactgacccctcacccaaaaacagctaaaacacgtatgtgtggaatatcctactatttatatcaacatagaggccatccaccacattttaattgtcatgcatatatgcattagaaaagaacatgcattctcacgcctaaggaattgcgtcaaaactcacacttaatttatatcctaaacattttctatttacaaactacctacatatgttngaaatatatatcatacaaattnttattgtttcactcacatttattcatcatggcaagctatttacattatgcacacactngcattcagaagggaatcccctactatcatacattcctttangaagaatatcattcacacttcggcag

SEQ ID NO: 222041 - DNA, 308 bp, Glycine max
  unsure (1)..(308): unsure at all n locations
tgatgactcacaggctcaagaacactaagaaccagcttggtataatgagaagaagcacaactgaattccactccctcaagttttaaattcatgcaaaatgaaggtataaaggctccaaaagatttttttctcacaaagaccaataagctatgttgtaggattcaattgacaaggctgtgtgacactttgaatggcccccttggcttccaatttgaacgtgccaagctataccacaaatgggtagttttgctttttnncaaacttaccaaaatggatcagaacgtatatcgccaaaaaatgggttattt

SEQ ID NO: 222042 - DNA, 375 bp, Glycine max
  unsure (1)..(375): unsure at all n locations
gcttgaagaataccctaatgaattgggctttaattgtccatcaaaaaaggccagttaagccaaatttaatttactttacctcacggcatcaagcaatttgcttgcaattccttttcttctgttagagggagcaacccanatggccctaatgccacaagcagcggtggttggtttgctatcacaaaagattgcaccttccatcctttcagaatcactcaaggaagcaacttttttctcaacctccctttggaaaataacattcccaaaccgaagagtggtagaacgcgtcctcacttcccttttcttcacgctatcaggagagccagacacaactgtgaatgccttntcaatnggttctgcaacgaggcacccaac

SEQ ID NO: 222043 - DNA, 456 bp, Glycine max
  unsure (1)..(456): unsure at all n locations
ntaccacgacaagtactctntcgtagctacaatccttctgttgtgcacttccgagtaaccctcgaatgtgatcttatctatttgtttattcattcattgccactcttttattttatttttgaaataccctttagttaaacattaagtcaactaagtaataaaagcgttataaaccattttttgtttatactactgacactttggatatttaactagcctcccgatccatgcatgtatttcaaataatttgtaaattgaaaaataaagaaattaatctcacacattttttagaatataagaaatatataaataagaatataaggaatactccgacgtcctttatataaaatatttctgtatccaaaatagtcgaactaacttcaacatcttatgattacatttagtaaaaagtaaaatttctaacaacacacatttcgttaataaattatacccgcg

SEQ ID NO: 222044 - DNA, 430 bp, Glycine max
  unsure (1)..(430): unsure at all n locations
tcagatacattcacatgccagccaangactgttgttttatttatgntncgaggatgactacatttcatgctatgttagtattctataaagaaattgaaattgaaaaaatgatagagagcattggtgtatcggaaaggttattgttctatgaccaggtaatctcagattctagtcacgggaaaaaaaataaaaaagcctctctgctcattcagataggattgcctacatgtaatcctcttcaactccctagtaacagaaggtcgagttgagctgtccttttgaattacaaaagaacacggtgcaatacctagtatgcaaccaccaatgacattaaacatgatcaacaatgcattctcaaaattaataaaactgcatggtgttggctcacacaaaatgaagtagggtaaactgctcagaaataaactagcta

SEQ ID NO: 222045 - DNA, 420 bp, Glycine max
  unsure (1)..(420): unsure at all n locations
agctntggaaaatgatttctatacaaaagttatttgtataaagcgactaacatacatgtaaacatgtgatggtggattgtgacattatgagatgtgaaattatgaacaagttttagttgtgaataagtgtgtggttaacacttgatgtgacattacttgtgttgtgagctaattatacaataacccgaccagtgttatcttgagaaaagtgttgatgtgcaatgttaaagaaaaagtgtaggtttcctatttaggaaccaatgttaaagagaaagtgtagatttcctatttaagaaccaatgttaaattgtagcgcagtgtgttaaacgtgtttaaaacacgagtgtgaggtcgtgggtattgtataaataatgagcagtgtctgcatgcaaaaaattattttatgggttggacctaaat

SEQ ID NO: 222046 - DNA, 397 bp, Glycine max
  unsure (1)..(397): unsure at all n locations
tgtgtgaaatgccatgtttggatgagttaaacatacccattctgttttaggggtnttgtgatgatgtttgtgatgtttatatgctgaaattgccgatggaaaactgttagagatgaagggtagaactaacctagggttagaaagtgagaatgtgatgttatgagtggaaaaaaaagagtgaggctttgagggttggaaggttaagtctgaattctgtggtaaatggaggttaaagtgagttaatactagcttgaaatgtcatttaggacttgggagaaagcttggactgtgctagagagaaaaacaaatgatcaaagtgaataaagagccatttctagggcaaaatcgggtgttgaagagtcaaattttgattcggtggaatttcaggtgtaaattc

SEQ ID NO: 222047 - DNA, 448 bp, Glycine max
  unsure (1)..(448): unsure at all n locations
agcttccttagctaaagttagaggtgacctttccaaagcatttgggtatgcaatgtgtttttccctaaatcaacatttggattttttttgtctacttcgtgtctcactttgtttccaacattcttaggagtgatttcttcatatcgtgggttgatttccttccttgatctttaaagcagggggtatgacaagcacaagatagcaaaccacttggttgacatccgtgagtagggaactagggtaaacttggccagtcagttgagacaccaaaaggtataatttcgacttggagagattaaccttagggaaactaacctagagtttatcctaaagaatcttaactttgaaggatcaacctagaaaggtcagcctcgaagaggatggccatgagtggtnaccatggngaggtcgccccataacctaagagagtacacaacttgctagcttc

SEQ ID NO: 222048 - DNA, 338 bp, Glycine max
  unsure (1)..(338): unsure at all n locations
atgcactctcacccatctcaataacaagcccttctttcttcctgaccacacatgggcattaattcattgatagaccattaatcttatgtgtgttgtaggaaatcttaaatggcccatattcatgcggaagggtgtcaaaatgaaatgcactagaaaggactcatacatatcaacctctagtttctaaagttgagctganatatctcgcattttcatgatgtactcacgcacacctttcacactggtgagccgaatagaagaaaacttcatgatcaacgtgcttgctaaagtcttatctgaagtgatgaactgatcatcaatggccttaagcaagtctc

SEQ ID NO: 222049 - DNA, 415 bp, Glycine max
  unsure (1)..(415): unsure at all n locations
agcttcttagtttcagatgatgcagatgggtttgtagctacctcatgcactcctctaatgactatggcatcatttctggcgctaaactgctgggagtnggaggccatcttctcaattaaatttctggcttcagcaggagtcatgtctccaagggctccaccactggcagcatctatcatacttctctccatattactgagtccttcataaaaatattggagaagaagctgttctgaaatctgatggtgggggcaactggcacatagtttcttaaatctctcccagtactcatacaggctctctccactgagttgtctaatacctgagatatccttcctgatggctgtggtcctggaagcagggaaaattttttctaagaatactctcttgaggtcattcccactcgtgatggacc

SEQ ID NO: 222050 - DNA, 428 bp, Glycine max
tcactcgctaagctcccataacttaatcaaattattgctcagtttaatgcctctatgcgcaacttattcttggctaagctcaaatccatgcgtctaaccttaggcttagcggggtcctcgccagctaaacacaatttgaaaacactggaccatagcaattttcgctaagcggcactcctgtgttgctaagcccagtgtcatttttgtgaaggaccgctaagtgaattatgtctcgctaagcgaccaatgctgttttcaattggattttctagcttttgaagctcgaataacttgtgtcctgatcagttgttcggttcctttatatgcaaatggcctctaagacacgtaagagtagtgattctaggccacatgaccagaatgataaaggagattcaatctaggaacctgaaccaattattaatatattt

SEQ ID NO: 222051 - DNA, 385 bp, Glycine max
cagctgctcacggaagttttattaagacagcttctcaaggtttcttcctattctataaatagaagcatgcgtaacacttgttgtaactttgacgaatgagagtcttgtgagacacaactcaaagatcaacttctctccctttttcttccttcaattacgtgctcccccctctctctttctctccctctttcttttcctccattgaagcatccttccaagcttcttatccaaggctcatcttggaggtgaagctctttctttccatggcttattccttaatggatggcgcctcctctcacctctttttctttgtcttccgctgcatctgcctggggaaacatcaccattgaaggacctcattgaagctcaaagatccagccttcat

SEQ ID NO: 222052 - DNA, 369 bp, Glycine max
taaagacatgtcacccaccatcttctcatagtagactactgcgaatgtgtctattatcattgctatcatctccctcttcattattgtgggcactacctgagctgtcatatccctccacctttgggcgtcttctatcaaagattcatgctccctcttacacatcgtttgtaattgcctaatgaaggcaaccattatgtccttccaggaacggacctaggagggttctagattagtataccaggtgacgactgtcctaatagactttgctggaaaaatgcatcaacgacttttcatctgtcatgtgtacccctattttctgcaatacatctttaagtgattcctggggtatacttatcaaaattcggtatc

SEQ ID NO: 222053 - DNA, 440 bp, Glycine max
agctttgacttttgtgtggaatgaatgaatatgttaacagattcaatagcaagaaaataagtgcatatagggctacagatgtcttggaattaatacatacagacatgtgtgggccatttcatacatcttcatggaatggtcaacaatattttatatcattcatagacgattactctagatatgcatacttgtttcttatacatgaaaattcacaatctcttgatgtgttcaaaaaatttaaagttgaagttgaaaatcaactcaacaaaagaataaattgtgtcaaatctgaccatggtggtaaatactatcgcagatatgacggttcaagtgaaaaatgtttggggccttttgccaagtgcctagaggaaacataactcttaagacgaaacataactcttaatgatatagtaagaaacatgagttgtcattctaactta

SEQ ID NO: 222054 - DNA, 317 bp, Glycine max
  unsure (1)..(317): unsure at all n locations
taactggattagaactttcaattaacactctctctggaaccttccatatattctgccactcttctaccatttgtgacatctcttgatcaatcttcaaataaattntctggagcaatacctatgagtcttgcaaattgtaccgaccttaatgcccttaaacttgatcagaatcgactaacgtatcattttccccaacagttgggccttctccaacgacccatgacatttactgtgtcaaacaatcctttgaccgggcctgttccaaactttaccaacgggcatgtcgtggaaattattcaaataatgaacggctatgt

SEQ ID NO: 222055 - DNA, 466 bp, Glycine max
  unsure (1)..(466): unsure at all n locations
cctgcggcatgcaagcttcacacgagaggcgatcctacgttcctcatcataataccattatatgtaagaaaaagcatgtccaaaacacattactacaatgaaacaatagtatgttaaataccatacaccataataaactagctaaaagtttataccattcaacaaaggatgtattagatgagaattgtcagcatcaaatatgtattttgcctgacggaagcacaagtatcagaaaaatcctccacagctatagcaatagaaaccaagccgctcacttacgggttcacacacatcaacacaaacatttactcactacacatgtcaatatctcctccgggggctcctggaacgccgttcacgaggtggtctgcanaatgataaagtttataacattcatatgctaaacaatgaaaatttggatgcaaatctagaaaccataccgtgcgctaagtttagatagcaaagt

SEQ ID NO: 222056 - DNA, 220 bp, Glycine max
agctgagaccaccggatatacctttcaactacttttttttgctccataatgggcttcaaaactttgtgtatccccccaattatgttaaaactcaaagcatattttatattatggaccaccccaatgcttatttcacaaacaaaagtgtgcccaactgtttgggaacttatgcataaataaaacactggtagaatacccacctcaactttattagaaaagt

SEQ ID NO: 222057 - DNA, 376 bp, Glycine max
  unsure (1)..(376): unsure at all n locations
taaggaaactaatcaagagaaacttgttctaatatcatttactggtcttaaaanataacattttaattcatttaaataattagtttcattttttaaatattatatagcaaagccgcttatctataagagagaaaagaaaatttggaatgatcattttaataataactaggaattgctactatgtgtgagattaaatttttactaggtcgtaagaagagaataaacccatctttgaagaacgccacttattttataaatanaaatgaaaccttttttaatgatatgttatagtatgttactagttttatcgataattatgcgctaataattaactaataactttagagatttccttcatcatgttttttattatatt

SEQ ID NO: 222058 - DNA, 313 bp, Glycine max
  unsure (1)..(313): unsure at all n locations
cgcttncatcttcantcatcaaagttacctaccctatgccaatcttcttgtttgnaacatggctgcccatcttnatcataccaaaatccctttctgacatgacgagaaaaatcctccatgaggagtaacacggaaagatgcttcacagtcgactatccatatacaatcattaaatacaatacttaaataatgttcattactgataagataaacattcttatcgtctgatgccacagcagtagtggttccaccttcattcttgttctgtgagccaatttgattagcatggacagttccagccttctgatctttc

SEQ ID NO: 222059 - DNA, 399 bp, Glycine max
  unsure (1)..(399): unsure at all n locations
agcttggaactaagcttcttttctctacctcttgtcatttacaaactgangggcaaacagaggtagtgaataggtttttatccacccttttaagggctcttctaaaaggcaaccataagtcttgggatgagtatcttcctcatgtagaatttgcctacaacaggggggttcatagaaccactaagcaatccccttttgaggttgtctatgggttcaatcccctaacacccttagacctcattcccctcccacttgacacttcttttatacataaagaaaaggaatctaggtcagagtttgtaaagaagttgcataagagggttaagaaccaaataaagaaccaaacaaaggtttattcaactaagggcaatagaggaagaaaagagctagttcttaatg

SEQ ID NO: 222060 - DNA, 354 bp, Glycine max
  unsure (1)..(354): unsure at all n locations
tttgactgttgngaatagatntcattggtctattcgcatcatcttactcttatgaataaattntattggttgtggactatataaaanaatgggtggaaccaatagttgntcaacatccagatgcaaagaccgttattcgcatcctaaagaanaacatcttttcaaggtttggcacaccaagggaactgataagtgatggaggatatcattnttgtaacgtccaactcaagaaagttcttcaacactatagtgtcagacacaaggtagcctcaccttaccacccccagaccaatggacaagctgaagtttcttacaaggaagtcaagaagatctatgagaaaacagatgctcaat

SEQ ID NO: 222061 - DNA, 349 bp, Glycine max
tgctgatcatgccatcacctatttggccttatctcattcatacccacctggtagtatgactcgtgccaccaccatagaggcatcagacaaactgagttgtatgagaggagactccacattagcgtcggtcacaatttccaatccctgaaatgacatttctaatgactccttcattacttcaacataaggagtagacaatggacgactaactagtatgtcctcctcgtcttatactataacgagcttgccttccaccatggatttcaattttggatgctaacatgatggctccacactcatagaatggtatcagggtcagacttactaacaattgtaagcaggagttata

SEQ ID NO: 222062 - DNA, 324 bp, Glycine max
ctcagcttggagtttcaagtgccaattcgtcttcttctttagtccagtcttcttctggcttcaattcatcagggggctttccttctgtgtccagcatcttgggatgttcccagcctttgatgacagctttccacggtctgctatccagtgatttgagaaaggccaccattcttgctttccagtattcatagttggttccatcaagaattggtggcctgtcactggtcctcttctttctcatgtcatcagaaatatcttcctagatctcactctgtgattcgagtgtggctctgatacccattgaaatctgatccagtggacaga

SEQ ID NO: 222063 - DNA, 451 bp, Glycine max
  unsure (1)..(451): unsure at all n locations
agcttctatataagctgatctcttntatctataaacacaagttgagttttattcagaaaattagagtttatctcttttatcttagtgagagtgattctcctaaattcttgagtgattcaagaacaccctggctgtatcaaaggactctcacaacctttgtgtgttgccctcgctggaaagagagattctttccttactatcatctccacccttgttctttcaaaccacaattccagaaaatccacctctgcccaaaattatctcgtgaccataacttccatttcacacactcaaattaagtgattcttgagcctaaattgaatttcaaaacgagacctttcacctcgttttggaatcatctcatatggagccctgtagcttccgttattgccatttctatatgtcttggcagccaccacttaacctacgttntaccatgccattcatccat

SEQ ID NO: 222064 - DNA, 283 bp, Glycine max
  unsure (1)..(283): unsure at all n locations
ctctagctcttcattggtggattntgatctcctcttggggctctatattgtgggaatgngctcaaatatatggggcaattntggcttgttttcttgcttgattanggtgaattaaggggttgtatgggatggccctatgcctataatgcactttggaacaatgggacattgtccccgttctcttgttattgacgcctaaacgcgcgcccactaagtgttccgtgaaaagcctcaatgacattagcgcgtgacttttgtaaagaaacaacccatggcgcatttt

SEQ ID NO: 222065 - DNA, 367 bp, Glycine max
ctgcagcttgctttcaacttcttttctgcattatggggcactgcacccccaaatgcgcaagtaagaagagataattttctgggccctcgtgtccgtaaatgcattcatatcatgcatcacataaggatctcttcatggcataataatgaacatatcgtttttacatttgtacattatcatattccaccatcacattttgcatgagtcattgcatcatcatgcatatgcgctaaacatactttttgctctacacactgcatacgctttgttttcatgttcgctcatgcatgatccttgcaatttcctccgcaaaacaaaaacaacaaggcaagcaatgaaaatcatgatgcatttcttagtgcatata

SEQ ID NO: 222066 - DNA, 441 bp, Glycine max
  unsure (1)..(441): unsure at all n locations
tgtttntatagagaaacaatttaatcgtcttaatcgattattgtttaagcaatcgantagattatctaagtaattgattaaagtgttcatctaacatctggaaaacaactcaagaataatgtaaacgacttgatgacctaagtaatcgattaaagtgttcttgttcacctctgaacaactaaacgagagagaagtaatcaattaaagcaaagacttctgaataaatcaatcattgtctgaaacaacagtgtaatcgattaaaatactatcatacttaattaaaccaatacaagacttaactctttaagcttcaaacaacttgttgtaattgactacgacanatctgtaattaattaaaacaaagatgatgcacacattatgatgatgcacaatgcaaaacaaatatcaaatgtactatgatgcaccatcaagataacaacc

SEQ ID NO: 222067 - DNA, 413 bp, Glycine max
agcttcttctatgtattcatgttgtacattattccaaactcaaaacgcttggtgtgaaacaattaaatgggttagttgaataaatatatcccttctctccagtactacacccgcctctcaatcacaagtcttcttgaaaagcaactcactcacaggacccacacaattccatttctatcagctgcataagctttatctcaggctacacaaaacagcacaagagacattttcttccaacctatctcaccacacctttatcattgtcttatttcctcagtttctcccacttagagtcataaaccaataaaacaggaaaatatgttattgctacacatcattacgttgtctaacctaccccacaacaccctaagctactagggacagtcatccccataattatcctccatctagct

SEQ ID NO: 222068 - DNA, 377 bp, Glycine max
  unsure (1)..(377): unsure at all n locations
tattcaagtggttgtgggctagacttttctaagatctaatttcaactatatgtngggggttggntccgaatcagaccaagatgacagaagggattntcttcctgcacccagcatattttctcatacacccaatagtaagagggaaaaaccaaaaacatccttacgtatagtccatatggattgtcaattcaccatttgtgaactcatacgagttaccagtcaatattatgttaaaaatatgtgttatgaaataatttaaaattaatggttcatgcaagtctcaaacttatgatcattgtgttattagcaagacactctaaccaattcagctaatatgtcaattatgttaacaaataattaatattgttatatataac

SEQ ID NO: 222069 - DNA, 467 bp, Glycine max
  unsure (1)..(467): unsure at all n locations
ctgcggcatgcaagcttgctccggaacacaatgtttgcttgttggtaatgggagaaggtctttaggntctgaagatgagaaccaaaacatgatattgcctagagaggtaaaagcgttaagctaatgacgttaaagaagcgcttcctgggaggcaacccagttttaatctttgttgtgtttgtttttgatgcatttgatcatttggaacttgctatgtaatctgtacataggagtatatcagccaatctttgaatgcgtaacataagggtttcaatttcttggaaaaaggactaaaatataacttagaaaatctttttgaaaaacagttcttttgctaagcgcaagcctcgcgctaagcacatctctgttcatgcgctaagccacgagtcttgagcgcttagcgcccaacccttgcatctgaggctatattggtccgctaagctggccaagggtgagctaagctaact

SEQ ID NO: 222070 - DNA, 161 bp, Glycine max
  unsure (1)..(161): unsure at all n locations
aagtctcacgattgtcacgtgctcatgcaacaattgttattcttggctataccagacatctcgccaaacanagtcaagttagccataactcacctgtgcttcttcttccatgctatatgtagcaaagtcatcgatcctgtcaagttgatgagttggaaatg

SEQ ID NO: 222071 - DNA, 446 bp, Glycine max
agctttgaagggccgaaagggacgagtcatgggtggaattatgatattagaggataaattgaaggcttgtcaaaggtcgaagagaagtttgaccgaatagctaagtaggacagaagagaatatgttgacaatcattgaccagtataaagagaagctaaacctagctgttagccatgggcagagactagagaatgagcatgaaaaggtatcggctcagtaagtggaaagggaagtaagagagagggtgatagaatcattgcacggcaaagctatgaaatggatggatagattcgctctcactctaaatgggagtcaagagcttccaaggttgttagccagagccaaggcaatggcggatgtatactcagctcccgaggaagtccatggtccttttgattattgtcaacatatggtcaagttgatgtcccacataattaggaaccact

SEQ ID NO: 222072 - DNA, 422 bp, Glycine max
  unsure (1)..(422): unsure at all n locations
cgcctaattaacctgaaattgagaagaaatgattattagacacacaatatggtttttctaagtatttatcacctatacttaatagaaaatacttataacactacaaaataaccataaattggaagagtttgatacaatttatacaagttttatgcacaaaagttagtcgtattcaccgactaatacataaactccctgttntaatcgatttccaggctattcataatcgattacacaagtcttttgagaagctttaagagagatactcattttgattaccggtcatccgtaatcgattacacaattcagttaagaccatgtctagttnttaggagtctctantttaattggctaccaggtgatcgtaatcgattacttcattcttgaaagtgtcctaggagtgatcaagagcgctttattcg

SEQ ID NO: 222073 - DNA, 427 bp, Glycine max
  unsure (1)..(427): unsure at all n locations
agcttcctcggggccattcctgcgaaggctaacattngtttatttagttntaccagcgggacattactcttaaaacaaaaatggcatataacctcctcccacaaatacaaacatcaatgtaaatttagagcaagcttatgcgcatatttccttacaatcgttctctcgcacaagacaaaaaaaaatgcacccatatacaatcaaggcagcttcgttacctagattatttacacgtacttccaaggtgtatttgttacttacatcacacacatctccttggctaaattcacatacatgcatactccaagcattttggggtaccaaaaattgcacctgtgcacatcttggtatttctaatacctatacatacacaaacttcatgatgaatcttgactatctacacaataaggtgctacatctcatgcct

SEQ ID NO: 222074 - DNA, 363 bp, Glycine max
  unsure (1)..(363): unsure at all n locations
gactctgaggggttggtcgatgatcctctcttgtattctgccatcctaactagcttattttagttgtgactctaatacgtgtgttcctatctttgaaaagctgcatgtttgtgaaaagcaatttattgaagctttccatgatattcagttcatatggttgaatttctctatgaagcaaacaccatntttgggtgaccactgtatgttgccacttgaggacaactgaactgttctttctttacttgaggacaagcaaaactgtaaatctgggggagtttgttagtcgccttatacgactaaatgttgtattgaacacattttccacaacttgtataattgcccaatcgatggctatttttggaa

SEQ ID NO: 222075 - DNA, 466 bp, Glycine max
  unsure (1)..(466): unsure at all n locations
acctgcggatgcagcttttagctttcattggtgattttgatctccttttggtgctctaaaacgagggaatgtgctcaaatatgtggggcaattttggtttgttttcttgcttgattgggttggattgggggtttgtatgggatggccctatgcctataatgcattttgaagcaatggggcatgccacattgtccccgttctcttgctattgatgcctaaacgcgcgcccaccaagtgttcggtgaaatgcctcaatggcattagcgtgtggcttttgtaaagaaacaacccatggggcattttggtttgtacatattttctattttttgggacatgtattcattcccgaaaaaagctagaataattgcctcacatatatcctaggcctangaacacaaagttttatgcataagaacacaagaggaggtgcatattgggtaanagtacccttttttgtcagcaatca

SEQ ID NO: 222076 - DNA, 340 bp, Glycine max
ccttgatactcagcttcactttcataacaagcgtctcggtatatcacgggactcaatcggacattcgtagtaaaagttattgtcgtttgaattagttcagagcttttgctttcgatttcgagtgtctcgatatattacgagactcaatcgtacatccgagtaaaaatttattgtcgatagaatttgctacgagcatccgttttcaattacgagcatctcgttatattacacgactcgatcggacatccgagaaaaatgttaccggtgctagaattttctcagagctcacgtgttcacatacgaccatctcgatacgttacgggattcattcggacattcg

SEQ ID NO: 222077 - DNA, 372 bp, Glycine max
  unsure (1)..(372): unsure at all n locations
agcttataaaagtccttctgattcaatttattcttttctaactgtatgccatgatatgaagtgcaaaggttggaccgcatgttagttgttaattattgattaacttaaacacttgagcttgagtgaaacagtgacattgcactggttaggcatccttccttgaaatctgtctgctgattagtttcattcagttgtgttgcttaataaaaatgctcttgtctctaaaaagctgcatgtcttatgaaaaaccattgattgagtcattgtatagatgtctcatcatatggttaatgttttggaagcaaacaccctntgtaaataatcacttgcattattttgcacttgaggacaagtgagttgttctttatttgc

SEQ ID NO: 222078 - DNA, 362 bp, Glycine max
  unsure (1)..(362): unsure at all n locations
tgagatgaggaagtgtngaagggtgaaacttcctgctcttattggtgactcacatagtggtacctggagatatgtcgcggnggtcatgagaccttgtggacgtcacgtggggtgctattgcccaaaaccaagcttgaccaatcccgacccaacccgggcatagtcggtcagtgagaacctgtgatgtacctaaacaggcgagctcctgacagtcaacagataaaaggaaaacaagaccacaaagcaaggaggcttgtggtggctggccacctgtgaattttgtgtaatatgtggattgtggcctctggtaatcgattaccaagggtgggtaatcgattacaacgcttaatattgacgacagg

SEQ ID NO: 222079 - DNA, 420 bp, Glycine max
atctctaagcactgtgctgcagcttgagcaaatctgtttacattttcttgttctaggagagaatgccaattcttaccctcggaagcaaaaaaagaagagaatgaatatttccaatcaaatgaaaggataattccaatcttagagtgggagaaagcaaaaagaaaagaaagaatattcccaatcacagaatgggagaaagaaaaaaagagaagtataaaagaagatagctcctggtctaagaaaccagaagaaatgtgccgagaggtccttggaccacactatatctgaacaatacataattgtcaccaaatgaacaaaagaaagaaaaggaaaccacgacctaaaatggtcttccccctttaattgccaaccaaatacatgtgcgctagcgactttctcgccccgcactaaacacaaaca

SEQ ID NO: 222080 - DNA, 374 bp, Glycine max
aactcagctcgagctcgatctgaatcttgatttgattttgaacttgttttttttcttgatcttgaatcagcttcctcttgaatctgaagtgttcttaactattcctcttgagtcttgaatcgtcttgattcatcttgacatttgaactcattctttgattgacctttgagcttttgtcatcacctttgcatcatttttgtatcatcaaaacattttgaatattcttgattcaccatgagctttgcttctgcatatggtctgctcttgttcttgaatagcacgaacaaaatagtgtacattatccataacagacgtaaatcatttctgctggatgctgtgtgacaaattctgggataaacacaactattgactat

SEQ ID NO: 222081 - DNA, 398 bp, Glycine max
  unsure (1)..(398): unsure at all n locations
agctgctctaatatcattgagggttgttttatgggaggaggatatatgccatttttgctttaagagtaatgtcccactaaaactaactctccaaatgtttgccttcgcaggaatggcaccgaggaagcttgcctcaaagaggtccaggaaagacaaggcggccgaaggaactatttccgccccggagtacgacagtcaccgctttatgagcgttgtacaccagcagcgcttcgaagccatcaagggatggtcgtttctccgggagcgacgcgttcagctcacggacgacgagtatactgatttccaggatgaaatanggtgccggcggtgggcaccactggttactcccatggncaagttcgatccaaaaatagtccttgagtattacgccaatgctt

SEQ ID NO: 222082 - DNA, 440 bp, Glycine max
  unsure (1)..(440): unsure at all n locations
tgccattcacagcgccttgngcctgagataatgcggtgtanttctatgttaatgtggtagagccctgngtgagacgagtcactgcttcaagttggtcaatggtgggctgacagatattgtgttctggcatggtgaggtataggaggaggaggctggtcagaccaattgttagcgttgacagctgtatgtctatattaagaattaattacacaactggatgtttatttttgccattaattttctagaagattgaataattcagatcaagatcatattattccaactttgatatgcctttattattatttggcgtcagaatcaaatctctcttatttgatctgatccctttttatttacttttctctctgcattcattatgtaactggaaccttgccttatatgaaatcttttattcctaatattacacaattattctcctc

SEQ ID NO: 222083 - DNA, 335 bp, Glycine max
  unsure (1)..(335): unsure at all n locations
gaccctaagcgacgcggctgcagctagacttacaaagactttctgacaggttggtcttcaaacactgagacacctatgtggaacatactcaaactaatggacaggcagaggcagctaacatagttatcctcagggccctgcgtacctgactcgataagtctaacggcttatggaaagaagaactctacaacatactctgggcgttccactgtacatcctagaaaacaactaataaaactccttactgactcacatatggcatatttgccatgatcctcattgaagtccgggaacacgttggcaaggagactactgctncagctacaatcaaatga

SEQ ID NO: 222084 - DNA, 275 bp, Glycine max
  unsure (1)..(275): unsure at all n locations
acacaannaactcaagctacaangnacccgcgngcgcccaacacatcatatccttctttattctcaccaccnccatcatatntaataatgttcacattcatgtccaatcgcctccntactccattgaccgaaacatccaacgcactcattgcctaataaatcttgngcggcacatagacatcatcacaacgcgaataatcatcaataatgaggataaaatatccctcctttctgaaagaactaacttcaaaaagtgcacagatatcagaacgcac

SEQ ID NO: 222085 - DNA, 395 bp, Glycine max
  unsure (1)..(395): unsure at all n locations
agctagaatcggacatccgtatganaagttatgaccatttgtaattcacgagagcttccgttgttcaattttgagtgtctctatatgtgatgcgcctaaattggacattcgagttaaatgttatgaccatttgagattctcaagagcttccgttgttcaatactgagcgtctcgttatgtgatttgtctgaattggacatccgtgtgaaaagttatgaccatttgaatttctcaagagcttccgttgttcagtttcgagcctctcgacatattatgcgcccgattcggacatccgtgagaaaagttatgatcatttgaatctctcgagagctaccgatgttaatttcgagcgtattaatttattataagcccgaatcggacattcggtgaaaagt

SEQ ID NO: 222086 - DNA, 121 bp, Glycine max
gacctcatgtggggtgctattgtccaataccaagcttgaccaattccgacccaacccgggcatatatcgtcactgagaacctgtgatgtacctaaacaggcgaactcctggcaatcaacag

SEQ ID NO: 222087 - DNA, 444 bp, Glycine max
  unsure (1)..(444): unsure at all n locations
agcttgtctcagcgtttatgtctatattgttaccaacatgntagctatcatcgccaagtaccaagaagagttaggtctagccacggcccacgagcatagaatcgcggatgagtatgcccaagtatacgcggaaaaagaggctagaggaagggtgatcgactctttacaccaagaggcaaccatgtggatggaccggttcgctcttaccttgaacgggagtcaagaacttccccgcttgttagccaaggccaaggcaatggcagacacctactccacccccgaagagattcatgggcttctctgctattgtcagcatatgatagacttaatggcccacataattagaaatcgttaggaaacttgtatggtctctcagaccttgactagatacgacttcctttnnttttgaaataaatgagttggcccatgttctactccaaaagc

SEQ ID NO: 222088 - DNA, 303 bp, Glycine max
  unsure (1)..(303): unsure at all n locations
tctacttatgtggcaaggcgcgcttccttcaccttcttgtctcttattctaactttgaccatagttcttccttcccgcaaagcttctttttatgtctgcctgagcgcgcttatagcctaaaccatactttccacgatttccttgagtatttatcacgctagttatgccaccgctgtttnttcctaaacccatcccgggttcataaacgtgtcccaacataactcgggccatcattaccgctgcatcggacacacaaagttgtccaaagagggagtccacggaggaaatgctgaccacctctaa

SEQ ID NO: 222089 - DNA, 425 bp, Glycine max
  unsure (1)..(425): unsure at all n locations
cccgggacctctaagcacctgcggcatgcagcangnaggtttttcgagttcnttcactcaacggcncggagctaacgaacaagccgcagtactggactcttttcagcaatgatgcataccctgttgatgaatcagcgcgttcccaattggagatggatgtgaaagagcgcattaagaccacccgccaggtgattggtgatgccaacgagtcctttgataaccagcttatgagaccaaagttgaaggatacaatctttcgctgcgatatgagcaggtaaccaacgcgaagaagcagggtgctttctccagcctcatagctgccaagtcgattccaaagagcttgcgttcgctctcaatgaagctgatggaagagacgattgcccatcctgacaagtattcaacctgaggggaagctgctcctccag

SEQ ID NO: 222090 - DNA, 387 bp, Glycine max
tactcagctctactctcttattatccttattagacattccaatatattttttcttcttttctttgaatgtacatttcactccattcttgcaattagctaaaaaatatttttaaataatctcaatcttcattcttttacctgtatatttgattttcttttgcttattcccttttaactaatccattttaatttttgtctctaaaattaatttcgataaaagaaattttcgtcaatagttgaaacatccatatctaataatttaaattgataagtgtcaatccaaaatataacatatatacacttatttattataatctttaagaataatatataatataacttatatattacgttatgtatacttgtcaaacttttattataaaaaaa

SEQ ID NO: 222091 - DNA, 418 bp, Glycine max
  unsure (1)..(418): unsure at all n locations
agctttgcagatttggtcttcgctagggattgtatcaatgcgggtccgaaaagaggcaaatttgatcatcctactatgacgactgagaaaactggggcaaatgaagagggtgagaaagagggagaaacccatgctgtaactgccattcctgtgcgaccaagtttcccaccaacccaacaatatctntactcagccaataacaaactttctccttacccaccacccagttatccacaaaggccatccctaaatctaccacaaagtctgtctaccgcacttncaatgacgaacaccacctttagcacaaaccaaaaacaccaaccaagaagtgtaatttgcagcgagaaagcctgtagaattcaccccaattccagtggtctatgctgtacttgctccatatctactatgatattcaatg

SEQ ID NO: 222092 - DNA, 316 bp, Glycine max
  unsure (1)..(316): unsure at all n locations
ctggagcaccacttcaccctaccttacctctcgagagcggcaattacatcttccgtggtacccgtcttcctcttaacatgctcagtcaccaccctgtgcccattggatcctctcttgcctttctcccacgaccatcatattcgtcgtcgttactttcaccaccaccaccgaagccaccacctctaccttgaccacggttagcgcgggtttgcgcttcatggatagtgatgttcggccgcaaggtnctggtcgtgcaaccactattcacaaatctcgctccctcttggtgtttctctgaccatcaacacaagatctt

SEQ ID NO: 222093 - DNA, 402 bp, Glycine max
  unsure (1)..(402): unsure at all n locations
actcaagcttatagctgacttattatccacanaaagcttcactccatcactctccttgttttttaattcctgnaataaagcgtccaaccagacagcttggcaagcactcattgcagctgcaacatactcagctncacatgttgataaagccactatggattgcttcttacaactccacgatattggtgttgcaccatacatgaatatgtaacctatagaactctttatgtcatatttgtctcatccccaatccgcatcagtatatgccactaattcttctaagctactgttgtctatatttggaaatagatttccagtattgatggtccttcttatgaaccgtataatcctcttagcagccaggagatgaggaattcctgggccttctcgatatctacctac

SEQ ID NO: 222094 - DNA, 437 bp, Glycine max
agcttgcgccgccagcaccacatccgctgttgttgtgctagaataatcgccgccggggaggcacaaatggcagcagctgcgccacgactgataccaacgtttaccatcaccggaaatagggttgccatcagcaaaacacccagaccggttgcggaagagacggccagagacatcagacaggcgacaaaataggcggcaatcatcagcaggtaaggggagttaatatactgcaatggttttgacgccagcttgaccaccatatcattcgcgccgatatgggtcatgtaagcggcaaatccacacagcatcataatcatcatgccgaggtcgccgccgcggctcattagtaatattttaacgtattcaacgatatccgtggcgctgtagcctgttgaagcctggctggacggtaacactttgtgccccataatggcact

SEQ ID NO: 222095 - DNA, 427 bp, Glycine max
  unsure (1)..(427): unsure at all n locations
tttttattatntactcttgggcctggagacaggananattatgtttacattcattgagctccttattggggttgtggctattgtgggtgtaactcgctacatcattaaagggtattccgccactggtgtgttatttgtcggtggcctgttattgctgattatcagtgccattatggggcacaaagcgttaccgtccagccaggcttcaacaggctacagcgccacggatatcgttgaatacgttaaaatattactaatgagccgcggcggcgacctcggcatgatgattatgatgctgtgtggaattgccgcttacatgacccatatcggcgcgaatgatatggtggtcaagctggcgtcaaaaccattgcagtatattcactctccttacctgctgatgattgccgcctattttgtcgcctgtctg

SEQ ID NO: 222096 - DNA, 449 bp, Glycine max
  unsure (1)..(449): unsure at all n locations
agcttctatataagctgaaccannnnaactttttacacattttgagttttttcagaaaaggagagtcaatctcttttatcttaatgagagtgattctcctaaattcttgagtgattcaagaacaccttggctgtatcaaaggactttcacaacctttgtgtgttgccctcgctggaaagagagattctttccttcctttcatcatcacccttgttctttcaaaccacaattccagaaaatccacctctgcccagaattatcttgtggccataactcccattttacgcactcaaattaagttattcttgagcctaaattgaatttcaaaacgagacctttcatcttgttttggaatcaccttatttggagccctgtagcttcagttattgccatttctatatttctgtccacccaccacttaacctacgtttaccattccattcatccat

SEQ ID NO: 222097 - DNA, 343 bp, Glycine max
  unsure (1)..(343): unsure at all n locations
tgaatcggacacccgngtganaagttatgaccatatgaatatcacgatatcttctgttgttcaatttcgagtgtcactatatgtgatgcgccaaaattggacattcgagttaaatgttatgaccatttgaattactcaagtgcttccgttgttcaattctgagcgtgtcgttatgtgattctcctgaatcggacatccgtgtgaaaatttatgaccatttgaatctctcaagagcttttgatgttcaatttcgagcctctcgacatattatgcgcccgagtaagacatccgcgtgaagaagtatgaccattttaatttctcgagagctcttcgatgttaattt

SEQ ID NO: 222098 - DNA, 382 bp, Glycine max
  unsure (1)..(382): unsure at all n locations
agcttcctcgtggcttctttgagaagctttcttatgatgctctctttgagaagctaaggctntaaccactaacagccttctaataacaaaactcacctccttgaaaataattagggataaaaaaacacaacaaatataatcaaacatcaaacataataaccaataatatgtagatatatattagggtgttacatacggcacccttatcgaacccgtgccaaaattagaatgatgattgaaatagaggaggtgcaagagcagatgaaggtcgacatagaggccaagaaagagcaaatgaccacaatgatggaagccatgatgagtatgagaaaaatgatggaggtcagcatggctacagtctgtgccgcaagtacccgcactg

SEQ ID NO: 222099 - DNA, 245 bp, Glycine max
  unsure (1)..(245): unsure at all n locations
tctaatcttttacaagaattaagctctgataccacttgttagacatgtgttctcatatatcataagaatggnggtggtattaaataagcacgcgacttcctctaattaaccattatggttgtggctccaaccctcactccaagatttcctttgacaagaagtgctatattggtagtgccatgagacttactgacatgaatcactacgccataacttgattagttcaatggaatagcatgtgaata

SEQ ID NO: 222100 - DNA, 385 bp, Glycine max
  unsure (1)..(385): unsure at all n locations
agcntgctaacccatggaagctcctaagattattccacacattgtngggtgggccactcacggatggccatgattttctcatggtccaccttggaccccatttctaccatctacaaaacctaagaaaactatatcatctacacaaaaggtacacttctctatattgcatagagggggttttttctaaagactgaaacaacttgcctgagatgtcctcagtgatcatctacgctcctattgtacactaaaatatcatcaaaataaataactactaatctacctatgaaatcccttaaaacaagatgcataagcctcataaaagtgcttggtgctttattgagcccaaaatgcattactagccatttctacaaaccaaactttggct

SEQ ID NO: 222101 - DNA, 429 bp, Glycine max
  unsure (1)..(429): unsure at all n locations
agctgtgagaaacatgtaactcnttgtcattatcaaaacattcagcttgatcctttgtctacaattggattgcaacacctaaaaggctggaaaaatttcaagaaactgctaaacaattgagaatcccttgcaccaaaaagttgagtttatattgtccaactagatggaattcaacttacaagatgcttgatgttgcaatatcatataaggatgtgttttcccgattaaagcagcgtgaaactcaatactcttgttttccaagtgattcacaatgggaatttgcaaaggaagtgtgtaagaggttggccatatttaatgatattacagaaataatttttggtacaaaatatccaactgccaacatttattctcctcaatattttgagatcaagatgactttatttgaatgggtcaattcccctaatgaag

SEQ ID NO: 222102 - DNA, 318 bp, Glycine max
  unsure (1)..(318): unsure at all n locations
ggcatgtccaagtttcttatgccatacccagaggtttcctttgatgtgtttatagacatgctacaatttgattggatagttcactaagattaatcttataaagattacctttcctcttagcaatgaaaagttgagtcccatttctgttntggacaacacacccttctttgttaaaggatacatcaagtccattgtcacataattgacttatgctaagcaaattatgtttaaaccctttaaccaaaagtacattattaatgcgaggaataggatcaatacttatctttcatactccaactattttccttttctaatttc

SEQ ID NO: 222103 - DNA, 447 bp, Glycine max
  unsure (1)..(447): unsure at all n locations
agctntctccttcttagcattgtgttggttatttaactgtggatgtgnccatggagccaccccagcagtgaaagtaggtaacttttcaaaagaggaagatgcttgaaacttccatatttactatggctagaccttcaaagtcattaagaattctactgatggctagagccaccttcttctccaggtgagtatggagatatacttttttttttactatctttgaattcttaaggtagggtactaatatccataggtcctaaggttttctttggttttttgtttatgtaagaaaagaatgaaatggaaaaatgataaggacttgtatttttattttttagctcgcttaagtgttggaagattaaggggggtgtatgacattcttataagctgattcaatataatattagaaattattgtcataacgtatggctttatatntgttatcta

SEQ ID NO: 222104 - DNA, 397 bp, Glycine max
  unsure (1)..(397): unsure at all n locations
cctatttgaatctgctatgctgtaccttcttatatgaaacagtcccactctcccaattttacaaaatcatattcatacatcattgnggcatttcaccgaacacttggtgagtgcatgtttggacataaattgcaagaggatggggacagtgtggcatgccccattgcttcagaatacagcataggcctaaggccttctcattcaaatcctcaactcaagaaaacaagcataaaaacaaaccacaactgccccacaaatataagcacattctcagaatttggagcaccaaaagatgaagaaaatataccaatgggaagctaanaacatcaaggattgaatacttacttgttggagtgaataataacaccaacaatgaaagcaaaaggcaaccgaaagt

SEQ ID NO: 222105 - DNA, 452 bp, Glycine max
  unsure (1)..(452): unsure at all n locations
agcttcggngaggaagaattatgtgctgttatcttattntatagcaagataaccattcaactctttgataaactatttttgtcccagtagtatgttgttagtgtcagatgtgcttggtgtagttaaataaaattctagtcttcttgattttctgtttttcatgggtattttagtgagttgcttatattagatattgaatagtggtttcagctgggtgtgaattcaaaaaatagagctgggtctccattcagttgaaaccagagtctaccctgtgaaaaatcttcaagtctcatattactatgtgttttctattacaaaaatgtattcatgctcatctgattaagaattcagttaataaaataaaaataaaaatcttctctgcagcagtgattgtataatgaagactttgagaattcacacanttttgttaattcacattatgccanatattt

SEQ ID NO: 222106 - DNA, 359 bp, Glycine max
  unsure (1)..(359): unsure at all n locations
attcaagacanagaaattaaagatattcaagatggatgatcttatattgtctctagagtcttagaaagggtatattaaataggaagggaatttcaattgaagtagcaaaaggtttggccaagaattttaagttaaaaagtctttttcaacaaatttactctctggtaatcgattaccagaggatgtaatcgattaccagcggccaaaactgatttacaacagctattaaaatttgaattcaaagtttgcactgtgtaatcgattacacatatatggtaatcgattaccagcagtttctgaatgttttaattcatattttaaagcttgtaatctattacacacatactgtaatcgattac

SEQ ID NO: 222107 - DNA, 433 bp, Glycine max
  unsure (1)..(433): unsure at all n locations
agctnttacttccatggcttattatctagtggatggcacctcctctcacctcttttcctttatcttccgctgcaactccatgactaaaaatgatcattgaaggaccttattgaagctcaaagatccagcctccatagaagcttctcaagcaagcttgcataatctatcccttaataaacctccctccacccaaccatccttaaaaaacaaagtaccttgtctattccccaccttcctactaaagacttcttaacccagtctcttctaaccccataacccccctcatccaaccttgctaacatctttcaccatggtgaacgctgattgtatatctcaataatagtgtaccacttttctcaatctgtttgccaaaatcttttccaacaccttgtacatacacccaattaaagagattggtctatactctgaaatc

SEQ ID NO: 222108 - DNA, 330 bp, Glycine max
acacatgatactcagctcgtggggtaaagtctcacaattgtcacgtgttaatgcaacatttgttatctctcggctatatgagacatcttgcgaaacacagtcaggttagccatgactcgcctgtgctttttcttccatgccatatgtagcaaagtcgttgatcctgtcaagtttgatgagcagtgaaatgaggctgcaattatactgtgccagatggagatgtattttccccctgctttctttgacataatgattcacttgattgtgcagtggatgtacccgcgtgagcgatacatgaagatcttataagggtgtacacagaatcaatat

SEQ ID NO: 222109 - DNA, 336 bp, Glycine max
  unsure (1)..(336): unsure at all n locations
tctagagcacctgcggcatgcaagcttaacaagtttgattgtatatntggtttttggtccttnnatccaaaaaggctttataaaaagcttgagcatgtcctttatagtagacaagccgaaccgagccgagccttacataggccgagccaaaggccctctacaagcagctcggctcatttccacccctagccacaatagagtgtgaccatataaataatagaaatacaaatctgtaaatttaattaaaacattgtaaagtaatgcatacatgagttttgattggtgcattgtgtgggatccaccactgtttaatgttgaatgaattgagagcgaaag

SEQ ID NO: 222110 - DNA, 317 bp, Glycine max
  unsure (1)..(317): unsure at all n locations
cgaacacctctaatagggganacccttattctcagccattcctccctttctttcttctaaacatccagccccttctttcatccacattagcccctgaagtgtaaagtctctcatggctatgagaggctaaaccccctttgttaggagcctggcaggtcaactcttgtaatggaactctatctattatctatntaatgcaatattggttctattattcttctctgggcctttctggttattatggccttgacattcatataatgtttagagtggactgcattgaaaatattattttctgaagactcggaaagatatct

SEQ ID NO: 222111 - DNA, 444 bp, Glycine max
  unsure (1)..(444): unsure at all n locations
agcttagctacttacactcttanataacttttctacctncttgagacacttctttgagaaactttcttgagaagattcctagagaaactagagcttagctacacacacccctctaatagctaagctcacctcattgagatgagaagctagagcttaactacacacaacccctataatagctaaactcacctccatgccaaagtacatgaaaatacaaaaaaatccctactacaaagactactcaaaatgccctgaaatacaaggctaaaatcctatactactaaaatggccaaaatacaaggcccacaagaaggaacaacctattctaatatttacaaacaagagtggacccaaccttggcccatttggctcaaaatctaccctgagtttcatgagaaccccggggccttctttagcagctctagcccaatcctcttggagtct

SEQ ID NO: 222112 - DNA, 345 bp, Glycine max
  unsure (1)..(345): unsure at all n locations
cgttagttgtgactggtgttagcccatattntngataatctaaaatattctctaaatacgnattagatgtcgtcttgagttttgaagcgtattaaagagcaagaatcttgtcagagtctgttgaatcgaaaagaaagaaagtgctattataaaggattcacaggttcaaggaagtatttacaaaatacaaggcttagacaagaaagagggcttcgaaccattgggcaaatcgagctggcgtatggtcgaatcgaagtcaaggcaacaagatttctggatttggcgcaatttctgacaaaacttcacaaaattagttcgacttcgagcaatgtgggtaaccgttct

SEQ ID NO: 222113 - DNA, 454 bp, Glycine max
agcttcttatccaaggcacattcttggagtttaatctccttcttccattgcttattccctagtggatggtgtctcccctctcctcttctcctttgcctttcgctgcatctccatggtggaaaatcaccattgaagaacctcattgaagctcaaagatccaacctccatagaagctccacaagcaagctttcatcatagagtctcttccagcttcgtggatcggtcatagagactaggcatctgctgttgtggccttgtagatgaaccaccctggtctctgttgaattggataccagggtgattttgccactgtctctgctgttgatagtgatgattgttctgaaatcctggaaatacacttgtattgaaattgcctttgggctgattccccatatataattaactttatgtacaatgtcttttatttgggaacaacatccagattcatgagctc

SEQ ID NO: 222114 - DNA, 354 bp, Glycine max
  unsure (1)..(354): unsure at all n locations
tccacggaggaaatgcttaccacctcanaagattttatagcgttttctaatgacaccnctgcggcctncacataaggcatagaggatgggcagctcaccaagatgtcttcctcacctgacacgatgaccaaatgcccctccactacgaatttcaacttttggtggagtgtagagggcacaactcccactgagtggatccacggatgccccaacagacagctgtagggggggttaatatccattatttggaaggtgacttgacaggtgtgagggccctattgtactgggagatcgatctctcccctaacctctcggcgggtgtcgtcgaaggcacgaaccaccattgaactctgc

SEQ ID NO: 222115 - DNA, 462 bp, Glycine max
  unsure (1)..(462): unsure at all n locations
agcttgtctcagcgtttatgcgagacagttatcttcatgctagctatcatcgccaagtgccaagaagagttaggtctagccgcggcccacgagcataggattgcggacgaatatgcccaagtatacgcggaaaaagaggctagaggaagggtgatcgactctttacaccaagaggcaaccatgtggatggatcggtttgctcttaccttgaacgggagtcaagaacttccccgattgttagccaaggccaaggcgatggcagacacctactccgcccccgaagagattcatgggcttctcggctattgtcagcatatgatagacttaatggcccacataattagaaatcgttaggaaacttgtattgtctctcagaccttgactagatacgacttcctttntgaaataaaatgagtnggtcccatgtttctactccanaaagcttgtgcanatcaagtcact

SEQ ID NO: 222116 - DNA, 251 bp, Glycine max
  unsure (1)..(251): unsure at all n locations
ccttgatactaagctggttcggggacttacccgttgaagatcgaagaacgatgaagaacgattgattatcttcgaagaacgggtgaaatctttgcgaaattcctcacggaaaacgttacggaaacgtttcggaagcgcctcggcttatattntcttcacggaaacagtttttccaagcaaattcgaaagagagaaaagtgcctcagggctgaaccccttccttcttgcattcctcccctatttatagcaaa

SEQ ID NO: 222117 - DNA, 462 bp, Glycine max
  unsure (1)..(462): unsure at all n locations
agcttgtaggattatggcgtacccatcatttgttgtactaggtggcggtcgggcgatggtgcacaacaaagtttccacatccacaatgcgcgcataaacccaccatcctctgttgcccacctccaactgagctcacgtactcccacgtagcccatatcctcgttcctctcaacaccgggtccccatcaatcctcccaagctttcccaacatccaagtaattcaacaatcaaacaacacaaactatcacagccaagaaaacagggcaaaggcagaaaactctgcccaaaacaccaaccaagatcacagcttttctcacttaaagaccccagtaacaattccttcgttccaattcgttaaccgttggatcgactccaacatttaaatggaagtctctagtacataagcctacattntgaccgctgggatctactatcaaacatccagaactcattctgcactac

SEQ ID NO: 222118 - DNA, 234 bp, Glycine max
  unsure (1)..(234): unsure at all n locations
gctanccccggacaaannacangaccctaaagcacaagagaacaaancattattgttacctaatatcatcaaaaaaaacaactacaaatctacctatgaaacccctcaagacacgaggcataagcctcataaaggcgcttggcgcattaaagagcccaaaaggcatcactagccattcatacaaaccaaacttgtgcttgaaagcaggtttacactcatcaccctctttcatcc

SEQ ID NO: 222119 - DNA, 448 bp, Glycine max
agcttacttgtggagcttctatctttgagcttcagtgaggtccttcaatggtgattttacaccatggagatgcagtggaaggcaaaggagaagaggagaggggagacaccatccactagggaataagccaaggaagaaggagctttaccaccaagaattgccttggataagaagcttgaagaggatgctttaatggaagaaaagaaagagagaaggggggagcacgaaattgaaggaaaaaaagagggagagaagtggaactttgaagtgtgtctcataagactttcattcatcaaagttacaacaagtgttacacatgcttctatttatagactaggtagcttccttgagaagctttcttgagaaaaattccttgagaagcttctttgagaaaacttccttgagaagctagagcttagctacacacacccttctcataactaagctc

SEQ ID NO: 222120 - DNA, 284 bp, Glycine max
  unsure (1)..(284): unsure at all n locations
gtcaacaagttcaagattaagattaatttcaagtttcatgaaaagaaatcaagaagattcaagattcaagagaagtttgatttcaagattcaagagaagatgaattcatgattcaagagaagaaatcaagaatacttcacaagggaagtattgtacagattttcaaaaaacaaacatagtacaattttgtttttctaaagagtntntctcataattttctaagttaccagagtttttactctctggtaatcgattaccagtttcctgtaatcgattaccagtgg

SEQ ID NO: 222121 - DNA, 424 bp, Glycine max
agcttgctaataaccaatatttagagattatgattattaaacacacaaaatgaaaataataagtatttattacctatagttaacagagaatacttataacattacaaaataaccataaattaggagagtttgatacaatttatacaagttctatacataaaagttagtcattttcaccgactaacagtgcacataggagatttcaatgacctgttgtctaatgaggacaagtgaagtagagtagctcacccatcttgagggttatccctatacttgggctaaaagtagaagcacaaaagcagcggtggaagagcgcctagatcgggccatggttatatttgaatggcagcatctctttcctgaagctagcctcttaaacctctttgtctttatctcagaccacacacctattatattacacact

SEQ ID NO: 222122 - DNA, 278 bp, Glycine max
aactcagcttgaggtctgaatcttcttatcaaggagtcattacttcttgttttctattgccgcggaatggaaatggaagaaagatgattggagacaccacttttaggagaagatgagtcaagaagaagctctccaccataggaagccatgaataatagcctgaaagtgggagaagatgaatggatggagagggagagaacgagcaccaaattttgtgcctctcatgaagtctgaactttggagtgtaattctccaatgatccaagttcaaaaaagtgc

SEQ ID NO: 222123 - DNA, 436 bp, Glycine max
  unsure (1)..(436): unsure at all n locations
agcttctgtattggtgcattctactaatatatggagttggccactgcttttcctgaggatgagaattcctaaaccataacaatgctagaggcggtaaaggacaacggtctttcaaataaacttgttgtacgtgaacaaacattattaactcaaatgaacaacaatgattgcataaatctaaaaagtagactaactattttaatgtacctaaacaaaatgatttccaaacacatgaccgacacatataatgcggtgcacagaagaatctggtggtggttgacttctaaggagaaaaaatgtcatgctntgttgtcgggacaacgatacaaggattacattataccttgatgcaatgacatatcccatctncattatattcatccacttatccacactaacctgaatcaaacaaatatacacatcaaatttatttaaa

SEQ ID NO: 222124 - DNA, 339 bp, Glycine max
  unsure (1)..(339): unsure at all n locations
tgcttctcacagcttaccaacttgaatatttgtacttttaaatgctctttgtattgattcaattgtatccttgaattgcatcaacaaattgtccagattgaaacctctttctgcctcattttgatagtaggtttgtaactctggttcccatttataatcttctaaagaatagctcttgccaaaatgaatctcatgattnttcattgaatattgataagctttataactagcatgatatgccatgaattcttcatacacactttctagatcaggagctctttcttcttcataattgaaattctgataccaggggacagatgtcgaccggatgtcacgaca

SEQ ID NO: 222125 - DNA, 452 bp, Glycine max
gatcttaagcaccgcagcagcagctcaatatgtgggttggtccgcgcttttatgcttaacgcaaaactgtatcgcttagcacgcataagtggattttggcttaatgcccttctctcgcttaacggatgagctgaagcggtgcgcttgatgacctggagcagtgcactcaacgaacctgacaactcatcttcttctggattcttcctcgtgcttagccactgagtgtcgcgcttagcgaatgctcgctaagccagcagattggcttagcgagaaggtgaaaacaacactctcgccaatcttcctaattaacctaaaattgagagagattgattattaaacacacaaaacaaatgtataaattatctattacttatattaacagagagtctttatatattacacaacatctataaattggagaatgttgatacaatatacacatagtttataca

SEQ ID NO: 222126 - DNA, 346 bp, Glycine max
  unsure (1)..(346): unsure at all n locations
cttatgcacggaaatgtaattatganattgagatgcccgaagaaacactattttctagttaaccatgcattatgtaccatgttcaattattttgttttgttgttgtgtgttttttttttttttagaaatgggtttatgatcccaacatggttggctcatggtgcctaacacatgcaactaagaaggtagtgtgaagtttcacacttccccttttgtgttttttttttttgtagaggaaaacaaatggtatgaaattttgcatatcaaaaagtttgttgaacgcatatgcatgatgatgccatgactcatgcaaaatgtgaggctggaatatgataacggacaaatg

SEQ ID NO: 222127 - DNA, 424 bp, Glycine max
  unsure (1)..(424): unsure at all n locations
agcttggggtagagcttgcatgtgtaagtatcttaagtggtagtaaacaatatttgttactttgataagttagtagaaacttagtggttgccaagaactgagcatagtcttaagtttgagacgaactactataaattttgtgtgttttcttgtttaactgataaaagatttttgaatttatttttagatcttacatcttctttttaaagaatagtgtttttctcatcgacagatcaattcacattcatcagatgataattnttttccaggtgtaaggaaagttaaatttctaaaaatacaatttaacccctcttcgcttctacagatataaatctaacattagatgtccttatatgactctacctttaccttaacaatattatgttttttttatattaacactatgattaagttctgagacatc

SEQ ID NO: 222128 - DNA, 251 bp, Glycine max
aactggttcacatattaaattattaatatgctctcggacacgacatgagatattagtgcccactccagacaactctataggcactctatggctgaaaggcatgtatgatcatggagcgtatactttcaattgtgatgcaaggaagggagatcctacttacattacgcctaaagctcatgaggacaggccaatatctagccaataacaacctaacggctatgtagggagagaggtccaaggcatacaactta

SEQ ID NO: 222129 - DNA, 444 bp, Glycine max
  unsure (1)..(444): unsure at all n locations
gcttgtagctgaagttcttgagaggtgttgaaattggttangcaatatctaaaaacacattcccctgctctcatttactggaagttcaaaggtaattcctctctctcttatttttgaataaacattgtaatctttatttttatgtgtttacaacgtacattacatttttatgatagtatttttatgttatgacctctactaggtagctaacaagtgtgatttattataattatttgtaattcatttttttgttggttccattggattttattctaaatacctattcttattttataacatatatggnagtagctggaacataaaaattggtatcgaatcttaggttatgcttcttcccccaccaattattccttttaggtagaataattattatagctcttcttcttaattatattaataatttaattacggatcttttgtaat

SEQ ID NO: 222130 - DNA, 453 bp, Glycine max
  unsure (1)..(453): unsure at all n locations
cttaaagagaaataacttccagcttttctttgaagaaaagattcactattcatttcctgttnttgaaaaaatgtgtatacacctaaagggtgaatgctgtgaaaattttcccgaacgcccaaaatagactcggatgaatgcatgaattgataaaagaatatgttttggaaacactgggttgacttaaatagggaaaatgaatcttgagccctagtgtcacatgaccataaaaacttgatgcttgagtgtccacatgggtgcatgcatgatcagttttgcataaaatttcctaattatcattattgcatgtgtgtcatggaaataatgtgggacatcccctntatccctgaaccgctggtcaaaccaacgctctgacatatatcatgtccatccgttcttacaagccttgagccaaagtccaactcaccatataccttgacccaggatgagaat

SEQ ID NO: 222131 - DNA, 367 bp, Glycine max
  unsure (1)..(367): unsure at all n locations
tagcttctgcttcttcctccgagcagcaggcgtgagctcttctggtctcaatggagagaagctgttgggaggggaaaacccaactggccgcatggtgggtttcagagggatccgtttcccactcgcattacccggcgtggaaatcaacggtgacgacacctcccaaccaccagcctggttttgattaagactcaatcccttgacttgcaaatgagcctggagttgagcatgaactgcagctgctgcttgggcctgggcctgggcctgggccttggactgagcttggacaatagcatgggcctgggacagtggaaactgtccttgattaccaacangaatctgggcctgtccttgggactgtgaaaat

SEQ ID NO: 222132 - DNA, 410 bp, Glycine max
  unsure (1)..(410): unsure at all n locations
ccttggatcttcttcatcaattccctctgcttcttgaagatcaatgttttatgaatggagaaggaggaaaggtgattggagatgccacttcaacgagaagatgagtcaagaacttacaggtataagaagatgagtggagggaaagggagagaaggggcacaaaatttatgcctcaaatgaggtttgaactttgaagtgtaatttctaaaatgatcaaagttgaaaaaatgcacacacaaggcctctatttaagcctaagtgtcacacaaaattggagggaaatttgaatttcaattcaaatttcgcttgaatttaaatttgaattggtggagccaaatttagagccaaaatctcactaattatgantagtgaattatagttatggttcagcccactatatcaagatcaag

SEQ ID NO: 222133 - DNA, 410 bp, Glycine max
  unsure (1)..(410): unsure at all n locations
taactcatccaaacatggcaaggttaacatgttgtcaacgaaatncttctcatacatctatcatgaagcagaagactagcaaaactacccatcatatctcccaaaaccccatacccacgaaaatcaagagagaaagaagtccacccaaacctgaaatttcgaagtcccacacgtagagacgcgcttcacgactccgaaaatgccctcctttcgcgatttggagcagaaatgggcaccaaaggttgaagctttgttgggcaacaatggtggatgagagaaaagaacaagaacgctgcgtgagagagagggagagcttctgaattcntctttggctgagtgaggagagcgaacaactctcggcnttaaaaaggggtttctctttcctattatttgattaagctatgccacgg

SEQ ID NO: 222134 - DNA, 383 bp, Glycine max
agcttgatgtgagatagcgtggaagagacatgtcttcctgcttttatttgatgaccacagagcggtacctggagatatgtcgcgggggtcaggagaccttggggacgtcagggggggtgctattgcccaaaaccaagcttggccaatcccgacccaacccgggcatagtcagtcactgagaacctgtgatgtacctaaacaggcgagctcctggcagtccaccaataaaagaacaaagtccacaaagcaatgaggcttgtgtggcggctggccatctatttatcttgggagttatctgaaatataccctctggtaatcgattaccattccggggtaattgattaccacgcttaagaatggagacacgatgttaagtagcttat

SEQ ID NO: 222135 - DNA, 387 bp, Glycine max
  unsure (1)..(387): unsure at all n locations
gacctatgatctcagcttgactaattggtgatcatggtaaagcctactaaccgcatgctattttttaaatggttgcaatgtttntaaacgaggttggcgtaacgccctgaaattttgctaactataaatcaatgtttaattgtatttatcgcgttatttaattatatgattaacttgaatgagtttagatatggtgtgaattagtcatgtgtgatttgattgatgtggatgttgagttatgtggagttttattgacctaagttgaaattatgagatttcaaaatctatctaaacctattatggcacaaccgtgatcctggatttgtaaccattggattatgttcaaatcttgactgtacgtcccaacacatgttcccatgggttgac

SEQ ID NO: 222136 - DNA, 461 bp, Glycine max
  unsure (1)..(461): unsure at all n locations
agctntctccactaagttgcctgatgcatgatatgtctgttctgatggcagcggtcctagatgcagggaaaaatttctccaagaacaccctcttaaagtcatcccagctaaaaatggacctgagagcaaggtagtataaccaatctgtttccactccctccagagaatgaggaaaagcctttagaaagatatgatcttcctggacatcagggggcttcatggtggaacaaacaatatggaactccttaagatgcttgagaggatcttcacctgcaagaccatgaaacttgggcagcaaatgtattagtccagtcttgagaacatatggaacactctcataaggatattgaatgcacaagctttcataagtgaaatcaggtgcagccatctcccttagagtcctctcacgaggtggagattgcgaaatagataacgaacttatatattgaaaaacgaaattt

SEQ ID NO: 222137 - DNA, 279 bp, Glycine max
  unsure (1)..(279): unsure at all n locations
ctcaagctctanaacaagntanttgctcttaggactcgatttacactataaaatatattttattgtatgatggnatatctctttataaagagtcaaccaatgacagatgttacccacaaagagccttgaagcatataacctctatgcccaaattctaaaccacgaaaatgtaagatgtgctaangagaagaaatgtgatgcactgcttgttaatgaagggaaaaaaaagaagctaaaaagctccaccatggcttgaaaaagaattgataagaggttctt

SEQ ID NO: 222138 - DNA, 452 bp, Glycine max
  unsure (1)..(452): unsure at all n locations
tagcttgtcanaactcaaggcttacacatcctctgtccaatgctcgacaaacctaaagttcacccttggtgagccctttttgtttctaagttccatcttcaaaggaactcgacgtacacaaggtttgtccttgacgatcttctttattcctaatttttatctgtctaggaatacgagtatatataaaacccaaggtctgcccttggtacagattcctccaaaacccaaggtccacccttggtacgtactcctgtaaaacccaaggcatcccctatgtccactcactcgcacaactatgacgaccacaatcaaaggtttaagttcaacaacacaaactaccaccaaactatttggcaaggcctttcaatcangtggaagtcatacttgctcctcaaaaccatcagagaagaagcttcgcaagtcacaacgacccatcacccatatgagtgaca

SEQ ID NO: 222139 - DNA, 411 bp, Glycine max
  unsure (1)..(411): unsure at all n locations
tagtaatggcggattgcatgtaaataacagacccncacctgtatttgttttgaaacggaccctctntcgtaaattggttttaaaaggaaccccatacagtaaatttgccaagaaattagtgttgtacccataaaataattctttaaaatgaataaaaatgttataagagataaaaaaaattgatattaattttatcattttattttttaattgtatagtatcgacaatgaaaaaattatataatatttttgaaaatatataaatgcgtaaagaataattataatttgtaaaaatataagtattgtgaatttttttatcatgagaatatatattntataaaaatttataataattttcttctataaagaaatntagatatattggtactgaattcagcacagcataatattt

SEQ ID NO: 222140 - DNA, 415 bp, Glycine max
  unsure (1)..(415): unsure at all n locations
agctatcttatcaaaacctgcnttgacatttatatctaattgtcggctacaatctctcatacacgcaagccttaaagaaagatctctctgcattatgaaaggacatgcattatatgcacctaacgaccctttttctatcaaacaaagatctaaacaagatctacctgttatgagacaatggatatctaaagttgaacgcttatataaaccaaaattttttgaacaccggtgtagttcaccttctgtgcataatatctcctattggtcttcttcaaccaaactttctgaatattatcttgttagattagaaaagctctcaaaacaccttgaacatcctaaaagaaaatgactatctgcttacactgtttaagtgtctgtaagacaatcgtatgtaaactccgaccctctttatacc

SEQ ID NO: 222141 - DNA, 363 bp, Glycine max
  unsure (1)..(363): unsure at all n locations
tnggaagcccttgggccaatgacgcatagtgctccttggtatggattcttattaatnngnncngcctattatgaggatctaccaagtgtttgggcaacaagggtgtggaatttagtccacgtctcctccgcttatcatgttggataccatatttcaatacacacaagtagaagcacacccatgcacaatgttggatacgactactcaagtttccgcaagaatactggcatcctcacacgttgtctgaaatagttggtgtatgtgggaccccaatcaccttggatggtcccacgaaacattgagcctttggacattcctacttgatattaagtgatctccatctcataggtcaattatccattg

SEQ ID NO: 222142 - DNA, 383 bp, Glycine max
agcatgtaatctaccagtgacttaaactgtttccacgtattatattacaaggccgagcagcgatacgaatcttcccttccttatgccaatccctgagaagcttggcttctagccttttgaaaccaaccttccagcctaacacatgcaccaccaatgcattctaacacgatatactctattgagacattccttcatttgataccccaatttctgaacaagggtcaaaggcggtctttgactttgtcatttacaatcttggcggttctcactgtctgtgaccatatctcctttgggattcggaattgtcccaactattacctccccaccacgttaggctgtcttcaccgaagggaaccaactacttctctttatatggagaaaaa

SEQ ID NO: 222143 - DNA, 405 bp, Glycine max
  unsure (1)..(405): unsure at all n locations
agctggtagagttaagtatcgtatcggttttatctttaccgatatctcataatctattacactattgtttgagacaatgactgatttatttaggagtctttgctttaatcgattaccaagtggattaatcaattacttctatctcgttcaagtgttctggggtgaacaagaacactttaatcaattacttaggttatctaatcgattacattgttcttgagttgttttctagatgttggaagaacattttaatcgattactttgtgaaaataattgattactttatagatttaatcgattacagacgggtataactgttttctctataaataaccatcttgtgttcacatctacacatcaagagatcattacagaatactcaatacatctcanaaacaactttct

SEQ ID NO: 222144 - DNA, 361 bp, Glycine max
  unsure (1)..(361): unsure at all n locations
tactgctggcagtaacacctttgccaaagcctcttctattcttcaccagncaccagcacgtacttcattntatttctctatgtcttcttattcctcgctctcttcgatgacaaacagagcagagcatagcaaccttgttaaacagtagataatggtttctatgttctagttttagctctttgggttaccttgtggctgttgcattcaaagagagagcacacacaacacagaatcttgggtgtgcagcgaaaatatgcacagctgcagagaagcagagtgtgtagatacaggagggaaagtagaaaggaatggcaaccaatgctgccattggtttgctttatatacttaagattctgggtct

SEQ ID NO: 222145 - DNA, 268 bp, Glycine max
  unsure (1)..(268): unsure at all n locations
nagcttactctctctactacctcacaccacttaccatacctatcaatgttaagatcatgacatcggcagtaatgcagctgaaaagagacaggggcctatgttttacttgtgatgacaagttttcccctagccattctgggcctataaagcataattttgttccacagggggaaaaaaaggaggaaccttgtttacaaccatatccacccaacgaggttgagacatcgtgaaccccagtttgcagaaacaacattgttataaaggctaa

SEQ ID NO: 222146 - DNA, 386 bp, Glycine max
  unsure (1)..(386): unsure at all n locations
tcttggaggaccaaatngcaaggaagctattctcgaactaaatgctttatatgaaaggtacatttctgtaatttctcaattcagttntcaattctggacgatttcctgttaatttatcctttcacttttggttatagatgacttgctccacggttgaactcactgttcaataggtggagaagttgagggaaatgagtccactttatgaaattgtcaaggaaggtatcaacatcaaggacattcaatgggcacagcactgattattatcaagctctcagaatgcaatgcaagtgatgggaagcaattgtgaatgaactccagacgtagctgccactcttgcaatngcagattcttcgaacttgctgaatattagtaattgtatcttg

SEQ ID NO: 222147 - DNA, 267 bp, Glycine max
  unsure (1)..(267): unsure at all n locations
ggaccttaagtcaccgcggctgcagcttatcaatgttctggttcanccttttatacaaagtcatgttgcnacacaggaaacttagtctaaatggggagaaattacccctttcgaattctcacattatggtggctaaaggagaagatatttccggaggtcctcacctctctaaggaaattctttaaccttggtggagaagattctttattttgatgaaaatatttcaccatgatgtcatcttcaagaaccaaattctttttctaaaaa

SEQ ID NO: 222148 - DNA, 310 bp, Glycine max
  unsure (1)..(310): unsure at all n locations
agctccttctgaagtagttgaacatatgcgtgaganagtagaggatcatacaattgaacaacaatggactcaaacgcaatgtcagtgtctgagtgaacttcttcagtaatagggtctatatgatgaatgaagaagaaacaaaaatagggaaataacataaaaaaagagaactgcaatcaaacaactcattgaaatccctttgccatgggaagatcctagtgaagggaattgttgaagtgaagccatcatgatttagagtttgataacagtgtccaacttgatgatgataagcattatcaggaagcttcta

SEQ ID NO: 222149 - DNA, 427 bp, Glycine max
  unsure (1)..(427): unsure at all n locations
taagcttntggcanaggaagaagaagacatatgagttntataggtttcaagatttctcaaaagttgttcaagaagttctaaaagttgttaaaatgcaagtcaaggtcttgcttttatagactcttcatgtctggtcaagaaaaccattggaagagttataaccttgagaaaatcttgagaaaaccattggaagagttacatctcttgactttttattccaaacttgtcactgtgaatcgattaccataatcatgtaatcgattacacaatacattttaagaaaagatgtgactcttcacacttgaaattaatttcaacgttcagatacacttgttaatcgataccaatatattgtaattggataccatcattaaaaaatcattggaccggtgcaattcagttaaaacctttgaaacaacctttatcc

SEQ ID NO: 222150 - DNA, 456 bp, Glycine max
  unsure (1)..(456): unsure at all n locations
actatggtggaaatagctccatttaagggtcaccatttcctgaaatcccttgtcctgcagccaccaatccatgaccttgaaaggcttatgaccccaatcaacactttatgatcttagaaggatagggcaatgatctgaaaaatctctgtctagtacaaactgtgttgtgtcaggccactgaaatgatcctttgctaccctgcaatgagacacacacataaaaatgcaatgattcttgcggatagtttgcattagtcattgtatctagtcttgaattgtccgttcggcgagacttgtattcttatgttagactcattcggtcaggttattattatctngattaatatgatgaaatttcggctgaatgcatttcaagttgctctctgagtgcatactngattatcatgaaattcgttcaccgatgtcatgtcgtgtactggagacaatgcaaatgctg

SEQ ID NO: 222151 - DNA, 461 bp, Glycine max
  unsure (1)..(461): unsure at all n locations
gatctctaagtcacctgcngcatgcagcttcgtggaactatgtcatcatcattgtgttcctgctcaatagatatctgcgagccagctcacaggtatatggtttcaatggcaccattccagaggctttgtttggcctangattggaggacatagacttgtcccataatggatggagaggttcaattccaccaggatcaagcaggctcttggaaactctcaccaacttggatctttcagataaccatcttcaagggaatatccctgcagaaactggtcttttttcaaaacaaagatatttgaatctgtcttggaatgatcttcattctcagatgcctccagaattcggcctccttcagaacctgacggntttggatcttcacaacagagccttgcacggttcaataccaacatatttatgtgactcacgccattcacctgtccttccacttgatggaaactca

SEQ ID NO: 222152 - DNA, 520 bp, Glycine max
  unsure (1)..(520): unsure at all n locations
ctaagctctaattaccgactnggagtctggtaatggcatgccaccactcncctatgttatatattcccaattggagccattggtgtctaaagatcattgaagtctagtttgtatactaaaaaatgtatttagccattctttcaaataatgaataggttaaagttaaaccgcgtgtaatcaagacaatgttaaaaaataatttgtgtaatattcgattggccggctgttgtaaaattaaatgattttttaagaatggttttattatgtaaatcgtctatcagctgtgtatacctaatatgaaagtcttgttatgttttaagttaattacaaagctacttacgggattgatttgctcttcttagaagagattattttatgacctcttaacacaagaaagaagaatcaaaggtcaaatgacttatntgagtattcatcttaatttgtaacttattttgaaaattatctcttaaaattattttggctttatgtttaaacaggacaaatgatatttgtcatgcaa

SEQ ID NO: 222153 - DNA, 458 bp, Glycine max
  unsure (1)..(458): unsure at all n locations
gcttattgcattcgctgcactntgcgtttggtcttctttatcatttgaatggggggtgacccattttgccacaatggtgacaaggtgggtaattattattattacccttacttttactttggtcatttacagtacttccacctttatattgcttggctggtaaagcaccatcgaccacacaagantgtctcataagcccttgctgctcctgagcttgcaaggcatgtaacactcttgccaaagtgatcttggacagatcctttgtgttctccaacgtggatattgatgcttcatatttctaaggcattgcaaccatatatttttctataattctagaatcaaccaatttagtgcccattaatctaaccttattagcaatgccaagcaatctgtccaagtattctttaattgtctaagactctntcatcacttggagctcacattccctcatcaagatc

SEQ ID NO: 222154 - DNA, 330 bp, Glycine max
tatgcacggcagagttgagatgagtatgattagagaattaaagttctttctttatcttatatcaagcaaacagatgaaggcatatacatacgtcaaaccaagtatgtgaaggaacttctgaagaagttcaagatggacgatgcaaagtcaatgaagaccctatgcatccaaccattatagttggactggatgaagaatcaaagcaggtggacaaagagacatacagaggaatgatagaatctcttttgtagctcactatgtccagacctgacattatgttcagtgtatgcctcttccaaaaggaacccaaggaagttcatatatctattg

SEQ ID NO: 222155 - DNA, 373 bp, Glycine max
cattaactgaactcgaaccactgtcttaaatgccttatatatatgatcatgaataagcccaaatcaatgcttgataaaaaatattcaagtgctactactctagcgaaccaatagtaaataacttaactttctgatagaattttttttgcggattgcggtgttaaatgcggaatgttgaatcacccacattctatttacgttctttcaccacttaaaataatggatcaaactccttattatgtgctgctatcttcatgtgctaaatcaaataccgcaatataatactctactatattttatcttcaaaaatctgtaatcatcgttgatttgaaacttaaaccgacacaaaacaagacttattcttcctaatata

SEQ ID NO: 222156 - DNA, 444 bp, Glycine max
  unsure (1)..(444): unsure at all n locations
agcttaggagagaggatgtgttcaccttctcgctaagctaatctactggcttagcgagcatccactaagcgtaacactcctgcgctaagcatgaggaagaatccaaaagaagatgagttttacaagtttgctaagcgcaccacttcatctcactaagcgcaccacttcagttcatccgctaagcgtgaaaggcgcgctatgccaaaaatcactaacgtgcgctaagcgggccataagtgcgctaagcgcatcaacacaaacaaggccacctatttaagcctgaaatcagattntgtgaagagagattggactacgattcaaagctttgcatgtctagggtttctagagaaagaacaggccaacgtccacagagctttgagatattgtgctgtgtgaagatctgcagagaccatagcttctagcatgagccgactagagagcttg

SEQ ID NO: 222157 - DNA, 314 bp, Glycine max
  unsure (1)..(314): unsure at all n locations
ctaagaatgagaaatcccacagagataatgtccgattgattcttcgctttattttactaaaaggcattcttttattattatattattattttacctctttctttatttccaacgtggttacggcacgaccgaatggtcggaattcattttaatcgatattaacgaatgatacaattcaaacgatcggtggaaatttattttattattagattaggcgagaaacgacttatataaatggcttaagcacgtcaaaaggcggtataaaaagcgaatganaacgataatataaatacatgaaacaaaatgttgaccac

SEQ ID NO: 222158 - DNA, 443 bp, Glycine max
agcttgcttctgcaggggtgaagtaaccatctcgcctatgcgagcaaggttacttcagattgaagcaatagctcacgtgggcgacctgcagatccaccaaaaccccttctttcctataaataggcgtgagggggggctgaagaaggggttcaacttttaaacattgaaaggtttcaatgaaatttaaagagaagacgaagaaagatgagaaaattgaggccgtggcgttaccgaattgcgatcgtaatcgacttctacatcgttcttcgtttggtgttcttcatttgtcatccggttagtatttattttaaggatttggatacaatctatgcacccttaggggtcctctgtgttgtttgcacatcttcatctcattcttctaccattagtaatgtctcttcttctttgtaagtgagttttgaccgatcatatacatcacaaat

SEQ ID NO: 222159 - DNA, 395 bp, Glycine max
cgccacccagctcgcccaggcgagcaagggtgcttcctccagaagcatctttcttctggaggaaggatctggaaggcccaagtgggtcagattgctatttgcacccccctttttactaaatgcacccccttctatttttttggtaattctttttccgtaacgttacgaaactttatgaatttcgtaacgatacttattttccttccgcaaagttatgaatccttacggattatgtatttactcttttttagctttcgaagaagttacggaaactcacggattgcgcaaaaacacctcttttcgatttccgccacattacggaatttcacggatcgcgcaagcctgcttccttttgatttttgagacgtctcaggacttcatttattgtgcaacaa

SEQ ID NO: 222160 - DNA, 412 bp, Glycine max
  unsure (1)..(412): unsure at all n locations
agctgtgaatgctctattctatgtgagtttttataatatctncagactaatcaacacatgcacagtggccaaagatgcatgggagatcctgaaaaccactcatgaaggaacctccaatgtgaagatgtccagattgcaactattggctacaaaattcgaatatctgaagatgaaggaggaagaatgtattcatgacttccacatgaacattcttgaaattgccaatgcttgcactgccttgggagagaggatgacagatgaaaagctggtgagaaagatcctcagatccttgcctaagagatttgacatganagtcactgcaatagaggacgcccaagacatttgcaacatgagagtagatgaactcattggttcctttccacctttgagctaggactctcggatagggctg

SEQ ID NO: 222161 - DNA, 295 bp, Glycine max
  unsure (1)..(295): unsure at all n locations
ccaaaaactcagctggggggtgagatangatttgttgttgaagaacatgttttttcgtggacactactgataaagagaatgatgagggtaaagatgagaggagtaagtggagagaaaaacaaattattgtcggaaacacagaattaatagacaatgaaaaagaaaaagagggagaaaaacacatagaacaagaagaatttgaataaaaatatagaagagacaatagttcgagttaaatagaaagagaaaagagaaaagaaacagcttcagatgagggaaagatagtgccataccc

SEQ ID NO: 222162 - DNA, 302 bp, Glycine max
  unsure (1)..(302): unsure at all n locations
tgaatcggacatccgtggtgaaagatatgacgatgtgaatntctcattatcttctgttgcncaatttcgagcttctctacatattatgcacccgaatctgatatccttgtgaaaagttatgactatttgaattttccgagaatttccgatggttaatttcgagcgtatcgatatattataagcttgaatcggacatccgtgtgaaaatttatgaccatttgaatttctcaagagcttccgttgttcaatttcgagcttctcgatatgtgatttgcccgaatcggacatccgtgtgaaaagtt

SEQ ID NO: 222163 - DNA, 415 bp, Glycine max
  unsure (1)..(415): unsure at all n locations
agctntttggagatccaagtttatttctaattccaagttagtttcttgggtaagagttatgaagttgtcttatttttacagtagtgattctataaccgctgaagggggagagagttgcttttattttaagagaattttggcagattgatcacctctactcttgacgtgagtgatgtatgttgaagtggttgatctatcaaggactctagatgttcctgagatggtgggggtgtttgatgggattttcctaactctgtgggattgtagttctgtcttcattgatcatggaataatctaagtcgtaacatgggatgtatataggcttggaagttatgataaccttgtgtgtgaagtagctcgagtgagttgactaaatgggtctaatccacactcctagacgtcacagacatcttat

SEQ ID NO: 222164 - DNA, 289 bp, Glycine max
  unsure (1)..(289): unsure at all n locations
gatccacatatgtatttagccaccctggcatcctcatttgtgaaactcgtggttntagtgtgcaacacatcattctacatgtcacatctcattgctcaaaccaaattttgcttctttatatatatatagatactaccctttcgcttcaattggagttagatgatttggcctctagcttaactaaaaaatatactctcgcatgttgttagggtgtggatgcatgtcatttagaaataagctctcttgtggtggatgaaactacgattatctttggtaaattagctgaaaa

SEQ ID NO: 222165 - DNA, 268 bp, Glycine max
cccggacctcaagcaccgcggctgcagcttggactatttgatgatttggagtatttttcatcatatgctaatgtcaagagattccatggatgtttatatttagctcttcatcttatcagagactgattcttctgatgtcgcgtctgccatcggataaaagagggctcttcttccttttttgcctcaacatcaacgatgtggcatcaagtattcccttatgcccacttagaatctcttgtcctttgggaggagacctttccttgtgatt

SEQ ID NO: 222166 - DNA, 376 bp, Glycine max
  unsure (1)..(376): unsure at all n locations
tcgctgggaagactctcctgctgtctcatcctaaggtaatgttgatatttccagcctaggtcaatgtttggctcacaagacctgcaaatggtgggacataatgtatgtcgggatatttgtttagccaaatggctcagaaagatgggaatgcccaaaccatttctaagaaacgcatattatgataattagaaattcatgcaaaatttaatcatagcgcacatccatgtggacactcaaatataaggctttgtggccatgcaaacactaaggctcaaggtttgttccacattcaagccaaatcagcatttcaatgattgctcttntatcaagcatacaaacatcaagtccattttggattcacgaagtgttattgttt

SEQ ID NO: 222167 - DNA, 221 bp, Glycine max
  unsure (1)..(221): unsure at all n locations
taagcaccgcagctgcagcttataactagaaggngangctcttattgggtatgagtcttntggacacattttgtattggtatgtgtagtcagaacgtattctacagttgatggttgccttttntcaccataattacattggctagccatgtagtataatggacttccttatgaacccaaaattcaataacttggtagagttcttccttaatggttttttcc

SEQ ID NO: 222168 - DNA, 324 bp, Glycine max
  unsure (1)..(324): unsure at all n locations
gataaaataagaatctgaggaggagaaggataagagagtcgagaatgcaaaagtacatgttgctcccctccaaaagcaacctgcagatctattacttgaatatgactgattctcggaagacaaccaaaccttcatgctcaaccattaggacataagagctgaggaaagactgagatgcatcgataaacaaagtttgcggggatgagatccaatcatgaccatcccgtgttgcacaaaatcatcttaaaattgggaaataatggatatcttctgcacccttctgagactgcaagatagccaanataactctggtcaacgctataa

SEQ ID NO: 222169 - DNA, 456 bp, Glycine max
  unsure (1)..(456): unsure at all n locations
agctngtcaaagagggagacttcttcctctttattcactcgtgatacatgttttacaaagtcagagaaagtttataacattgagcgcaagactaaaggtaatgatgcaatgactttcttgatttccttggggagtttctgaatgtgtctaaccagaggctttgcactagaagaaacttcttcaacactactcataataacatatgcttgtggaagtagttgagcattcctttccactctattagaatagaaggaaaccctcaaataaaaacccattatttattgacactaggaaatcttttatattaaaactttgcatgtaaattaactcaacaggaaggcacaatatagtcaaactagctcccttaaaactntcttagcaacttaaataaagatggcatgtnntatggtatatataatatatccctgtccaaagtccanacaatagctaaataac

SEQ ID NO: 222170 - DNA, 520 bp, Glycine max
  unsure (1)..(520): unsure at all n locations
atgatagctgaccctttacaaagggattaccacctaagacatttatattttatgttgacagtatgagcattattgttattgatgatcataaagcgtaatttaccttatgtatttttaataattatgatatgtttttgattacctgttctatatgtttgcatgcatatttgtgttagagtaatgttaacaggtttatcttgaataaagacattatgttgaaccaattatgtactcctaactaatggccatattaatgagaagactaacttaggtacatggaagagactatgtctattaagtgatgtacaaccgctatgactcagattggttcctattcttaatcatgaaattatgatatacccaatgtatagaacattttagtcattctaatgcgcattatgtgagctcaatctatttatttatgtaagtcataattgntagtaatgtcacatgagcccagttggagaatgttagaattatgtctcatgtgagaagatgccacttatgtaggactaataat

SEQ ID NO: 222171 - DNA, 471 bp, Glycine max
  unsure (1)..(471): unsure at all n locations
agtcacctgcggcatgcaagcttatgattttcaatgatgatcaaggtattgtttggataaaggattttanaanttcaagctntgttgcctatagtgctcttactcaactagaacaagattggtctataccaaacaagtcattttgatgtatgatattttgaattcacttaaaaatttaattcctctctcaaaactccccatccaaattcactattgtgctactttggatactctgtgtagtgtcttagaaaattagggaaaatagtatccttgtgccaggaaaatggccaagtattggtggggtacctgtattcacatgattcacctggatatgtatcttgggtgaatctttttatcttgtttatgctcttaaagtattntattgaccaataagttctttacgcaactcttatacttggaataagaatacaactacaactctatctcttactgtggatcctatactaaata

SEQ ID NO: 222172 - DNA, 351 bp, Glycine max
  unsure (1)..(351): unsure at all n locations
agagtatgaccttactctgtgagttaacgactttctgtgtgtgataatctctgcataaatctttgaattttagaatgaaatgtataaatgaggacatgatgaaggccatgattgtacatacacaagctcttttgaccaaacaacttaccttgaatgataattgccttccttgctccctgtttgagctgaatgatattgtaaaaaatttgaaccctgaacttaaataattatctcctgataccttgtttatcatttacgagagcatatggttaaaggcaaatttaatctaaatttaagggaggaaattcaattagaatgaanagaataaggctaagcatcagcacacacaac

SEQ ID NO: 222173 - DNA, 458 bp, Glycine max
  unsure (1)..(458): unsure at all n locations
aacctgcagcatgcatgctgatgagaccaaaatatgacaaagaacttttncaacaatctaattctcacactaagctataatagacttcactattaattagggataaaaaaagaaatttaaccgttaagcgatcctatgtgtgttataattatgacacaaacaagaatgatgcatcttgtttcttgtacacaggagtggagatggtatttcttaaaatttattcaagctttgtttgtatttttttataaaaaaaaatctataatacattataaatgacacttagtaaagataaaaaatatcgaaaatgagtgaatgacacttacaaatgagaacaaagctgtttatagtcacaacgacaataataagaatatagttgagggactccatggaaagttatgcacaatgaagaaaaccacacaagatgaaagagacacactctgtagtgtttctattgcata

SEQ ID NO: 222174 - DNA, 415 bp, Glycine max
  unsure (1)..(415): unsure at all n locations
gctgggagaggatgcttcaatggagggaaagaatgagggagagaaagagtgtggttgtatctctaaattgcaagaagaaaaagggagagaagttgaactttgatgtgagtctcacaagactctcattcatcaaagttacaacaagtgttacacatgcttctatttatagactaagtagcttccttgagaagctntcttaagaaaacttccttgagaagcttctttgagataacttccttgagaagctagagcttatcttcacacacccatctaaaaactaagctcacctctttgagaagctatcttgagaagctagagcttagctacacacacccatctataaaataagctcacctgcctgacgaaatacctgaatataccaaaaaaaagtccctcttccaagactactcaaaat

SEQ ID NO: 222175 - DNA, 450 bp, Glycine max
  unsure (1)..(450): unsure at all n locations
agctgtcaacaagttccttctcatataatttttacacagcagaaaactaacaaaaccacccatcatatctcccagaaccccatacccacgaaatttaagagagaaagaagtccacccaaacctgaaatttcgaagtcccactcgtagccacgcacttcacgaccccgaaaatgctctcctttcgcgatttggagcagaaatgagtaccaaaggttggagctttgttggggtttcaatggagaatgagggaggagaaaatggcaacgtgagggagagagagagctgtctgaaaaagtgtgggggctgagtgaagagagagaaaagctttgtggtttttaaataaanaaggtttttctctttttctattattntattcaagcaatgccacatgtctccatatgagtggagcaagaaggggcccacttttctttttgactgtgacccatactc

SEQ ID NO: 222176 - DNA, 379 bp, Glycine max
  unsure (1)..(379): unsure at all n locations
taagctcgctgttactgccncacagagcctctcggaatntgtttctgttatgttcttccctacgggcccttttggtctcttgttccaaggcctcagtggtggctatatttacgtctctcagttccgcattctccttttgaatcctaagagctgctgatttgaacttttctttgactgtttgggctttctcgagttctgtcctgagggcctgcacctcttcgtcctccttcggagcttcaactttcacccccttagtggttctcaaattctgtagccaatccagaccttgcgtgtaggcttctaaccacctatggtagccatcgaaaggcccgttgctctgcctctgagttccttgtcttatttgccccatctccatgcc

SEQ ID NO: 222177 - DNA, 412 bp, Glycine max
  unsure (1)..(412): unsure at all n locations
agcttgggaaagcattggtcatctatntttactntcctatgctgcctctacatacataaaacagccgcactatccccattctgcagaatcatatttatatatcattggggcatttcatcgagcacttggtgggcgcacgtttagacataaattgcaagagaatgggagcaatgtggcatgccccattgcttcagaacacaacctaggcctaaggccttttcattcaaatcctcaattcaagaaaacaagcaccaaagcaaaccaaaactgccttacaaatataagcatgttctcacaatttaaggcaccaaaggatgaagaaagcacatcaatggaaagcataaacaccaacgatggaatacttacttgttggagtgaattgaaataccaaaaaacaaaagctaaatgcgat

SEQ ID NO: 222178 - DNA, 418 bp, Glycine max
  unsure (1)..(418): unsure at all n locations
ctgaaatggtcgnctccatgtaccttgcttaggttataagagatctctttgttttcagacaattttgccccaaatttacgggagtttgttcgaccgataattcaaaaggtaagaaacatcagcacacacaacaaattaataaaatgttctatgtattaaataaaaaagagaaattcaaataagtgtgcactgctaaaacaaagtcaagtgaaaggctattgaatggactaagttgattgaaaagacaaactgggttagtctaggatttgtgctctctgtgaactcaagcatttgcatcctataaaaaccaatatttttgtattccagcctcactacaagctcataaaagaccttctgattcaatttgtgcatttctaactttatggaatgagataaagtacaaagattggacctcttg

SEQ ID NO: 222179 - DNA, 356 bp, Glycine max
  unsure (1)..(356): unsure at all n locations
gagcgggacgnngagaagacttgccanaagggtattcatgagtaagcactgatgggaataaagattaaagattcccacatttaatttataagcagatgttagtcccacaagtgatgaagaaaaacatatcttattttcatctttctcctcaccccctttcagttgtcttctcaactaaacagaagtttagggtgtgagttatagaaaaattactagataacttggactattatattgtgtgaagctaatatttaaacttattcaaaagagtattataaacttttaaaatgacttatcaaatacatgcgtttatttatggaacataagtaaaggtgtataatatttaatttttataa

SEQ ID NO: 222180 - DNA, 449 bp, Glycine max
  unsure (1)..(449): unsure at all n locations
agcttctaaagtagtataatgaagtcggtttctatgatgtagtaatattngacctccaatactaaatgccgattcagaagctacagtggagatcggaatatctaacacatcccttgcaattgcttgtagtgttggatactttaactcattcaatttccaccacattaagatatcaaaatatgaacttcttggtaaaacttcctcctctaagtaatgatctaactccgttttcatagttgaggttcttgcccttttctttctttcaatgtatctatcctaatcacacaatttactctttccatcactaaccacatcttgtgattcaaaagaactagtagaatcttgatgctttttggcttgatattccgaaaccaaatcataacacaagtttcagatcctattaacttgtgaaaagaatcaatgggataaattgattcaaagtaaaactc

SEQ ID NO: 222181 - DNA, 333 bp, Glycine max
tactcaagcctcatctctaagcttcttatccacagcattctcttggtggtgatacttcttctttcatgcgctataccctaggggatgtcgcctcctctcacctcttctcctttatcttctgctgcatttccatggtggaaaatcaccatttaaggacctcattgaagctcatagactcagcctccatataagcttcagaagcaagcttccatcaagtggtaataagagcacaagaactttcagtatgtgctccttaaacctccattaactttcaactttacccttctcctcaatggcggctcttcaattttctccatgtatctcctcacatgt

SEQ ID NO: 222182 - DNA, 436 bp, Glycine max
  unsure (1)..(436): unsure at all n locations
agctnnggttttttctatatacattaaggacnaangatatgctagctgacccacttacgaaaggtttgatacctaaagttnttcatgagcacattgctcatatgggtgtggttccttatagtatcttagtttagggggagtaccatttatgctctatgtttttatgttttttcagacatttgtatagattgaattctctataaaataaagttgaagtttatcatttcattctgagcttgttttgtttgcaatatttatgttgtgtttggattgatctctataaagaataaagtttggactagttggaaattaacatgaataagatcacattgcatgttattttcatgtcacttatccatatctgatctatgtcattaagtatatgtgacattggtgatcattgtagctcaatcacattggatagtgatgagaactg

SEQ ID NO: 222183 - DNA, 396 bp, Glycine max
  unsure (1)..(396): unsure at all n locations
ctataaaactcagcttctatacccacanacaaattagaacttgaagcttccataagtgtatagtaaaactatgaagacatgcttatttgcagtgcaatatttttcttggtttaattnttatattcacgggataataacaagaaacatatagaatgtttaaaataattttctgaatgtaaactgagctaggcagctctacacggctgtttctctacttgctccctcgtctctaaacttctgaggagtgaaacaatattttaacatagtaatatgaatatgacatggtaactttccaaagaaactgggccacaatggacaatggttcatagaatatcacaagatcctgctatgttaatacaaactcatttcaatcattaacacccggacagaattact

SEQ ID NO: 222184 - DNA, 294 bp, Glycine max
agctattaactgaatgtgtaatgttccaatttgattttaaacggcgtaatcgattacaattcattggtaatcgattacccgtgtatctgatcattgaaattcagattcaattgtgaagagtcacatcttttcatataaagctatgtgtgatcgattacatgattatcgattaccagtgacaagttttgaataaaaagtcaagagaaggacctcttcctatggttctcaggtttttctcaaggttataactcttccaatggttttcttgaccagacatgaagagtctataaaagt

SEQ ID NO: 222185 - DNA, 436 bp, Glycine max
  unsure (1)..(436): unsure at all n locations
ngatgaggaagtngccaaacaaaaggggggagaaaagtaaaagctattgtctgcatcatctaagggcaaatgtgaaattctcaagaaagcatcagtacagggggattttttatgattcagaattttaactttttccgtagaactttttattttgtacttaaaacacatcttgatgtgaaaatctttatatgaataaaatgagatattttcttttatctattcaaactttatctcaaagtcttataatgcattctgatttgccatgtgtgtgtgtgtgtgtgtattctctccatctgataagactgactaatgcttttatgtaatatcttataagtatgccttcaactnttacatttgtgtttggttgacatcatcaaaaagggagattgttaggtcaaaagacatatgtgtcctaagaccgaatangacccttaat

SEQ ID NO: 222186 - DNA, 408 bp, Glycine max
agcttggttcattcctataattcaaggaattgaaattctgatcgccaatacttcaacaacattttatagggatgaaagactcgggaatacgcatgctatgcatggaaaatgtaattatgagattgagatgcccaaagaaacatcatttcctagttaaccacgcattaggtaccatgctcaatcattttggtttgttatttttttatagaaatgggtttatgatcccaacatggttggctcatggtaccgaacacatgcaactaagaatgtagtgtgaactttcatgcttcctttttttgtttttgttttgcagaggaaaacgcaaggatcatgcatgagtaaacatgaaaataaaaggtatgcaaacagcatgtaagatgtagatacatggtgatgaaatgacttatg

SEQ ID NO: 222187 - DNA, 344 bp, Glycine max
  unsure (1)..(344): unsure at all n locations
nttctcagtcgtctgtaaggatgattgggtgttagaaagcggcgattcctaccgtagactgtgtttctcccatgtgtcagttgtatgtaacttgtattttcttcacagatggggcatgcatgatgacccttaacactgtaaccgctgagatttccatatgctggaaagtcattaatggtacaaaaaagtagtgctgtccttctttagagtccctaanaaagtagtgcacaagctagtctcaatccagagaaatattctttggggaggagattctgaagtggctaagattgcttgggtaaattgggatactatatgcctttccaagaacagagggggtcttggga

SEQ ID NO: 222188 - DNA, 327 bp, Glycine max
cctgagcagcagctgatcttgaggcgactattttcgacctttgactgcaacacccactgagtcttggaaggaatgcggacacatacatcctttttgggatgacacagattgtatcagttaaagagtgccatggaaaaataatttgacatattgaattgccaaatgacatcccaatgtattcccttttgcttcctactattccaatatgatatcttatggttattacactcacagccgctgattttccagttattgatgggattcctctacttgactttttctgatactaacgtccataccgcagtgctgttacctttctttttttta

SEQ ID NO: 222189 - DNA, 352 bp, Glycine max
  unsure (1)..(352): unsure at all n locations
tctgagtcatggtccataacctatatcattgttcaaagaaaatattcaattgagattctgttgtccttctaacatgacaactttttggtaaccatattattgagttatgcttggaatattacaagtatatagtacaatgcaaattcaaacttatcatatatagagaagaagaaaaacgagacaaaccagaagattggtggatatatagtcaagcacttaccatccatacatgaaatcaattgctcgttggcagcatattatctaatttgtatttgatatgcctcanacaatagacactatggtatgcctatactccttttgagagcctgtgaaagtgtggagatgttgtatg

SEQ ID NO: 222190 - DNA, 399 bp, Glycine max
  unsure (1)..(399): unsure at all n locations
agctntgagccaattcaaacgacaataactttttactctgatgttngatatagtcccgtgatataacgagacgctcgaaattgaatgttgaagctctgagctaattcaaacgacaataacttnttactcggatgtctgattgagtcctgtcatatatcgagacgctcgaaattgaatgttgaagctctgagccaattcaaacgacaataacttttttctcggatgtttgattgagactcgtaatatatcgagacgctcgaagttgaatgtttaagctctgagccaattcaaacgacaataactttntactcggatgtatgatatagtccctgtatataacgagacgctcgaaattgaatgtngaagctctgacccaattcaaacgacaataacttttta

SEQ ID NO: 222191 - DNA, 349 bp, Glycine max
  unsure (1)..(349): unsure at all n locations
accttgatactcagcttcacattcaatttcgagcgtctcgatatatgacaggactcaatcattctttctataaanaagntaatgtcgctggaatttgctcagaggttcaacattcaatttcgagcgtctcgttatattaaaggactcaatcagacatccgagtaaaaagatattgtcacctgaattggctcagagcttcaacattcaatttcgagcgtctcgatatatgacgggactcaatcagacatccgagtaaaaagttattgtcgtttgaatttgctcagagcttcaacattcaattttgagcgtctcgatgtatgaccggactcaatcagacatccgagtaaaa

SEQ ID NO: 222192 - DNA, 429 bp, Glycine max
agctatctgttgttcttcattttaagaattacaatcgttaggtgaaagtacgtaaattctctttccttatttatgttttagtatttgagcgtgatgcgtacacaatgtgtatctaacatttttgttccattttcatcttcttcttcgcacaaatgcaacattatgttgtgggtgagtattctataatttttctctttggggtactggagtatgttggcagcaatgactaggcgagataagacagtcatggttaagcaagctcaatgggttacctttgggtactactcatgtgatttaaatttcttccaattataggggaaattaccatgtggaagggactcacacttgacgaggagattcttaaagtacaagtgggaagtgaacgctcacatcgtatatgaatagaagggtggacaccatatacgtgaa

SEQ ID NO: 222193 - DNA, 425 bp, Glycine max
  unsure (1)..(425): unsure at all n locations
acacataaaatactcaagctcggtaagaacttanaaaanatcaagaacaagtttgttctcttttatttctatgtatganatccactctacaaggctngacagaaaggagaccttccatcctataacgccacatggcggacaaaagtggacaggtaactcgaatgaccattattgtcaatgcggaaagtattttgcgcttcactatccatgttcacacattaatatttcttctttttcagtctttgtaagttcacactaacattgaaaaaaaaaacttataggtaccaaattgtaaaattacacacttatatgaacccaaaatgaaccaaaaacaatccatgcattaaacttgaaaaaaatgaaacttatgggaactgatataaatatacacttagagacactaaaataaaaaaatgtgaactatg

SEQ ID NO: 222194 - DNA, 432 bp, Glycine max
agcttgtaacttggaagttggaaccgtattcttttacagccaacccgcgccacgactcttatgttatgacagtgtctcacgacggaactgattcttcttcttcttccgattcttctatttgggtcgggtttaactttttaaaactcatttcatccacctttttttgtgccattattttattatttatttctttaatttgtactcactacactacaatttaaaacgattctaatagcttaaaaatattgattcttttactcaattaattcacatactcaatgacctaaactatttgattcttttactacttatacaataagaatatcacccgtttaagtaatctttgcttcaataaaaaaatctttttcaaaattaagattaataaagtagtacctaatattaaccgtggtttaacacaaattaattagatta

SEQ ID NO: 222195 - DNA, 409 bp, Glycine max
taccctcttcacatcttgttagatatcgcatgcataaggcattgtatttgtatgccccattgccttatcctcatcttgttacccttttccttcaacacttcaacatccctcttgattttgaaccttatgttccaatcaagagatcattccttataggtgcttcagtcatagcatcctttggttatataaaggagtatgatggctcttgggtgaagaagggtgctagaaatgttggtgaagaaggacatgagggagaagattcatctcttctttcgaagattatggacaggtttgatggccttcaaacctttgttggtgagaggtttgacactctggaattgcaagtggatatgcgctttaatgaaatggagtcaagaatgacaaacgttgaagaagaagtgtcatacat

SEQ ID NO: 222196 - DNA, 369 bp, Glycine max
  unsure (1)..(369): unsure at all n locations
agcttcatcaataatgtaatgtggaagaatgtttatcttgtggcagnctatgtatcaagntgtcataatctggttcctccatggaagtgtagcttgcttggaatctgaattgaattgaccacactcattttccaactcatttgtgttttgtctggtaaacttagaaccatttcagcattggacttaagtcagtgtctttgtctttcttgtgcattgatatggtattggaactgaaatgacagatagaagcattggtttggactctggtaatgctatgaataggagttggaaagctaagtaagttcattgatttgcaaatattccattaatggctctgtcctctgacaaatataggaactctttctaatg

SEQ ID NO: 222197 - DNA, 475 bp, Glycine max
tgaattggatgatggcagtggtgttcatgatcaggacgagatttatgttgtgtgttgagatttataagagcttaatgggggataaaacaaaaacgatccaagctattgatatagtggcaatgagagcaggcacccaagtaaaaccagagcaggctgacatgttgacatcgcaagttattgatcaggagattgttaagtccttaaatagcattggagacttgaaatctctcgggattgacgattacggtgcgcatgtttttaaggctagttggaatactataagaactgatgtgattgctgcagttaaagaatttttgagcatgggaagatgacatggcggtaattgacactattaacgctggttccaaacatgacaagacaaaacaattcgaaatatcgaccattgcggctgtctacttatacaaatcattcaaaatttacgagagctgattgtgcctgctacatacagatgatg

SEQ ID NO: 222198 - DNA, 430 bp, Glycine max
  unsure (1)..(430): unsure at all n locations
agcttctactgatgtggctgttttgtgcctcttcagcttgangacccaaccgcgagccttggcctctgttcttcctttctgagatactttcccttttgtcagcttgcgcaggtttatagcctaacccatacttcccgcggtatcctctggtgcttaccaggctgtgtctgccgccgttgttcttgcccaaacccattccgggctcgtagccgtaccccaacatcacccgggccaccatcattgccgtatcagacaggcaaggctgcccagagagggaatctaccgaggaaatgcttactacctcaaaagattggacatccgtttccaatgactccttcgtggctatcacatatggcatagaggaaaggcaacttaccaagacgtccttctcatccgacactatgaccaaatgcctctccactacgaactt

SEQ ID NO: 222199 - DNA, 347 bp, Glycine max
  unsure (1)..(347): unsure at all n locations
ctcaagctggggacttatgtactgtctaggattcacagattgatgtggtatctttcttgacattaaaatatgcacgtcaaccctggtacaggaacatggataccactctcttatcaactgagtcattgggctaataagttgttaatatatttgaactttaatgataatgtcattgtcctcttatcaaattgcaagtacccacttatttcgtagcaatgaattatctatagggctgctacgctactataataagctcaacaatcaaagaccttgggctcccattccactctgtaaaaattaggctctacctctatntttcatttattctcaactcactcacataataa

SEQ ID NO: 222200 - DNA, 407 bp, Glycine max
agcttggtcaactgagtattcttctgccttatctaatttgtcaaactcttaatggaggctcttgtctcttgctgaaattgcatattctggatggtcatttgcctcactaactcctctaaggaaggttgagaaggggcctgacttgcttgttgtctttgtcgctattgctgcattggaggaggaacatatggcctgcttagactagcaacattctataaatgagggacaaattgttgttgctgctgctgttgttgtggaggatttgcccatctcagatttggatgattcctccaacctggattgtatttgttgcttgaaagattataactattctgctgccgtcggtttttctgttgagggggtctattataaatgtctgcagcatatgcttcagggtgctcattgac

SEQ ID NO: 222201 - DNA, 315 bp, Glycine max
  unsure (1)..(315): unsure at all n locations
tagtntaagttagtctaaacctatgagggctgtctanattaatcctatttcttcaagagggatctgaggatgaagcttggattgattcaacctaactagggatcgagggttagtagcttatgctacaacatagaacacaaaagcatgagtgattaaagaaacatcgttatatacatcagcttggttgtataaagacccaacatttttacctactgctgtcaatcttacttgcattctttattgttgttaccctacacttagagtaatattgttctaaaccatcaactatcattgtgtctctcaataatgccctat

SEQ ID NO: 222202 - DNA, 427 bp, Glycine max
  unsure (1)..(427): unsure at all n locations
agcnngggatgatacaggtgttanttcattttatatcacagcccngccgagaagaactttccttttagatggcgaccagatcctatagcctttcaccccatcaccataacccatgaacagactctttcttgatctaagtaccaacctttcttcattgacatgataataggcattgcagccaatatactcttacatttgagtagtttgctgctttgccattccagatttcaataggagttttaagtcctatagcaagagagggtgttctacgactagaaagcaagcttgattgatagcttttccctaaaacttctattgagaccagcatcggacaatagacatcttgctctttcaagaatgctctgtcattccttcaccactccatttcgctgagagggttctacaaaaacaggctacattctttatt

SEQ ID NO: 222203 - DNA, 342 bp, Glycine max
cttgacttgagtcatcaggagattataaatatgtgaccatgtctatgtgtttctataattatcaagaatcatcaatgatctatcatctatatttcaatatcttctttcatctctttcaacagatctttttgattttatttctcttcatctttctaaaagatttttatcaacactttctctttcaagaaaagttctttgttcacaaacttgtgttattcatctttttcattctcttctccctttggcaaaagaacgaaggactaaccgcctgaattctcttgtgtctctcttctcccttacaaaagagtcaaaggactaaccgcctgagaattcttttgattc

SEQ ID NO: 222204 - DNA, 280 bp, Glycine max
  unsure (1)..(280): unsure at all n locations
agctnttgttttacctgctgttaagaacttgtctatgccttgtggggagncgagtccgtggaacgcgaacgatttctggattccgtatccgacttattttcatcctgccaaggatgatgatgtgtttatctggcaggagaggatgacgaggttggagaggaagtgggctgtttctgttgctggagctccgcgaccggataacctgaaatcgataaggggccatattattgagcagtgtacgagaatcaacgttgggaagttgttgaatgtgattttgggg

SEQ ID NO: 222205 - DNA, 411 bp, Glycine max
  unsure (1)..(411): unsure at all n locations
ctanacattctaactggttatgaaactaatctatttcttaactcatgttatatanaacttaaatatcattcatttttggtcggagggaataaaattcaataaataagaagtaaaatttacaaaacttaatgatttttaataaattttatttaataattgttatctctgttataaaaaaattatagtagtatttgagagaacatatgcaattttcgataacaactatttcgataggaaggaataatgaaaagataaaattcaatgacaatacttgttatacagagataaaatgacaacacttttattgaaatatttcgataaagatgatttttcgacaaactattacgcacgtgaaggaaagaagcgcccggaaagaaagtaaaatttattaatattctcaacccatatgga

SEQ ID NO: 222206 - DNA, 433 bp, Glycine max
agcttccataatatccaagcaattcaatttttttatcatgaaactaccctaaatcaagaaaatagggtagaggcagaaaactctgtccaaaacacattcaaataccacagctttccttactcatataccccagtaacattctcttcgctccgattcgttaatcattggatcaccttgaaaattttactggaggttcctggtacataaatctacattttgaccgttgggatctgctagaaatgcctgaaacccgaaatgtactactcttcccatgactagcaatgcacaagcattttctgcacatgttgaaaaattttgagcacaattcaatagcatttttctccaaaatagggcagaatttgaaatccatcttgcccacatccatatttgctcaaattggatcctacaagtcctatatcatgtataaatcata

SEQ ID NO: 222207 - DNA, 332 bp, Glycine max
cttccaaagtggtcttcggctttacatttaaactcgacccattgtctataagcacctttgcgacaacatggtccatacactttaccgatacatgaagagccttgttgtgtcctctcccctctacgggaatctcttcttccgcaaacgcgatataattattggtggttatatgattaacgatgccttcaaaaccctccactgagatatcgtgggctacatggggatcattgaggacttttatcaacagcgtgcgatgaggctcgaagtttatgagcagttcaagcaaccagatcctcgctggagttttattcaggtgctcgactaccttaaac

SEQ ID NO: 222208 - DNA, 469 bp, Glycine max
  unsure (1)..(469): unsure at all n locations
agctattcctctagtngctctgatagggtttcctagtcattatatagaaagagaatggattggagcctcaattatattgtctctgtgcgaggggcatttctttctctacaaacattattttgcacatcccaacggtgggaatatgcggaaatgagttccgaatgtggtgaccaaattctatgatgctccaatggttaatgaatatgggatcatacttttacttacacaagtttgggtgtatgcatgttttgggagaggaagaagcgataactaanttgagaggaagaaagagcgcatagacgtatccgatgtgtcaaaactgacctaatgtgtccatttataactatgagaccgagtctactatatatnctatctgttgctataattaattactncataaaaagagagctctattatactctctatcaaatacataaatataacatcctcttatgttctaaaaacacat

SEQ ID NO: 222209 - DNA, 470 bp, Glycine max
ctagataaggggatttggtcaaggagatgcaattgcagataacaagttatgagcttgagtgcgtttgagagtatggaagagaaacaacactatcattgtcttatcaaagctctgattcagtttgggtagggttaaacaatccaatactcctttgcatgttcatcctaaattcatacctctttaatccaatgctagttgcagaataaatcaacaaacttgttgaaacctagaatataaataatggctttctagtgtcaatctctgcaaaacatggcatgtcccttgtaataccttgaaaattaaaactcatattgtagaaagttatgtgttgtgtgaattatagaaatataattaacattgaaaattaatttcaatgaaagtttaagtcaagtagttaatttaaaattcaattatatgcatgctatctcactgtgataatttagtagaaattagaatttctttaaaacatg

SEQ ID NO: 222210 - DNA, 371 bp, Glycine max
  unsure (1)..(371): unsure at all n locations
agctagttcttgattntttctaagttctttaacaagctntgaacaatatacttgcccttcatttaactgtctntgcgcttggcggccccgctcaacaaagtactttcgacacctactgtacgttgatttaaccaatgctgttatgggaatgttgcgacaatccttcaaaaccttattgatacattctgagaggttggttgtcatgtggccatatcgacgtccttctctatcataagccatcgtccatttttcctttgaaattcgatcaatccatgtggctatggctggactcagttcacgaaaaattttctaaatttgatcaaaaatgtgcttgcaaggagtgtacgctgcataaaattagttatgaataa

SEQ ID NO: 222211 - DNA, 438 bp, Glycine max
gttagtgtaccaggtaacaactaccccagtaagactttcttggaaggaatgtatcaacaattcctcatcttttacgtatgcccccatcttccgataatacatctttagatggttcttggggcaagtagtccccttgtacttgtcaaagtccaacaccttgaactcgggaggggacatgatattgggcactagaaacaactctcctaggttagcaaaggcataatcttcacctccttcaatggccctgagcctttcctctagatgatccaactttcctatttctgccttagcatgagggtttttacttgttgtggaatgcaagaggtgtagttgtgggtgatactgagggccctacaaagtgttatgcatgggtataccaccaactgcttgcccttcagtggcatatccgatgcaaggctcgaagtcggctcagatatg

SEQ ID NO: 222212 - DNA, 204 bp, Glycine max
  unsure (1)..(204): unsure at all n locations
agcttcttactccattntaaaaagctttcttctcattttccactttttcctgcggcattgtctcttgttcgtgggggtagcaaggttgagtgcagcggtgaaggtgaagtttccggcgtcaagctttgcggtggtcggtggcggcaaacaaggtacgcagatggcgtttgttcgtcgcggacgtacggatggcttccggatcaa

SEQ ID NO: 222213 - DNA, 464 bp, Glycine max
  unsure (1)..(464): unsure at all n locations
cagatttagtaatgacccactaacctagaattaaaataacttaatgccattaacctagggaattaaaaaaaacttaatggctgagtgtaactgaaattgtggcaaccaaaagtcacccccaacagccaacttcagccaccatttggtctcccaaaaggctgatgcctaggttgccaattgggcccttattacaacttgaactaaacctaactaaagcccttttagttgattaacccaaaatgtattttggtcagccaactttacaaggattgggccattatttagacaaactaaacactctaaaattgagacaaagtggtgtcatttagtcctcctccatttgggccatgatacaactcacaaccttggactnttctccttgaaacttgngcttgtattcaaatagtatggacaacacttgtngaagagcttccttggctttccttgctctagcccttgtcata

SEQ ID NO: 222214 - DNA, 442 bp, Glycine max
  unsure (1)..(442): unsure at all n locations
agctagagttgtgtttgtgatctttgaaactctcttgatcattgcaagagtttagagatctcatgctttaggtgaccctgacataaaggcactacgattttttttgttgccttaatgtttgttttttttttggtattttaagagtcaaaatgggtgaaaagtctttattggtatatgaattattattttgctttcttgctttctgcttattctcttgttcttgtttgcataatttgatgaactagatctctaatgtttaacgattaatgaaactccaatttcatgatttacattaaattaaaaacagcttgtacatgtgaaacaatgaacttggttagctaatatctctaaatctcgctattttcatattntaagaggcacgagcttcagaacacttccatagttttnnttttttttttgcttaccctaccaaacaatgatg

SEQ ID NO: 222215 - DNA, 431 bp, Glycine max
  unsure (1)..(431): unsure at all n locations
ataactttcactcggaggtccgtattangcgcataatatatcgagatgctcgagattgaacaacgaaagctctcgagaaatttaaatggtcataactatcaacttcgaggtccgattcaggcgcatactatatcgagattcacgaaattgaacaacggacgctctcgagaaattcaaatgatcataacttttctcacggatgtcatgattaggcgcataatatatcgagacgctcgaaattgaacaacggaagctctctaaaaattcaaatggtcattacttttcactgagaggtccgattcatgcgcataatatatcgagacgctcgaaattgaacattggaagctcttgagcaattcacaatggcattacttttcactcggaggtccgaatcatgcgcatactatatcgagacgctcgaaattaacaac

SEQ ID NO: 222216 - DNA, 493 bp, Glycine max
agtcacctgcggcatgcaagcttcttctccaatattttataaggactcagtaacatggagagaagtatgacaaatgctgccagtggtggagccttaggagacatgactcctgctgaagccagaaatttaattgagaagatggcttccaactcccagcaatttagtgccaaaagtgatgttattgtcattagaggagtgcatgaagtaaccacaaattcatcttcatcagccgagactaagaaacttgaaggtaaactaaatgccttggttaacctggtaacccaactggccgtgaatcaaaaatctgcacctgtcgacagactctatggtttatgctcctctgcctaccaccacacagacctttgcccttttgtgcaacaatctgaagcaattcaacagcctaaagcttatgctgcaaacatctacaatagacctcctcaacctcagcagcaaaatcagccacaacaaaacaattatgaacctctcagcaata

SEQ ID NO: 222217 - DNA, 182 bp, Glycine max
gccactgcaactgaattcttacatgattacccgaagtagcttgtgtgcacttcacagatggagcatgcatgaggacccttgacactgtcaccgtatggattcccataggcgggactgccattattggttccaatcagcatggctcgcatcataaacgtctcattgcgaaacgcatctaacac

SEQ ID NO: 222218 - DNA, 425 bp, Glycine max
  unsure (1)..(425): unsure at all n locations
agcttgtcagaataacagtacgtgtgatggtatattgagaggcatggataagtatgcagaatatactgctgaggaaagaaaagaagaaaactatatatgcataattattgtcttaaccaaaggcttttggcatcacaaccactggcatgataacttatggtgattattactatgagtcgcccacgaggggatgacgaaatactaatcatattagagcttttcaattgctctcaccatttcaaattatcagccacttttatttcatagtttttgttactntaaaaaaataatgatgacttcactttaacagtttaactctcttgataacgatattntagttaaaaaggactattttataatagtaatcggtgttattaaaaatagttaactctcatcttctctgtagatgcgggtttaattctcct

SEQ ID NO: 222219 - DNA, 376 bp, Glycine max
gcttgctgaggaagatagagagaaagatcatgagaaaagcacatttgttggagttgaatagcatgaaaagtgaattagctcgcaaagttagttattacaactaattatatagttagatggaagagtgactaactcataactaactaggctaactctagttacatagagactaaccaactaagctaactctagttatattatgattcattctaagaacaagcatccctaatttgtgttactttatctcatacctgatatacacatgcggaatttataaatgctttcttgatttgcagcagtcatacaaaagtgaaaaaataagtcaatcaaaagtatagaaataaaagtattccatgagaagaaacatatcatacct

SEQ ID NO: 222220 - DNA, 439 bp, Glycine max
  unsure (1)..(439): unsure at all n locations
gacaagtggcctcagatatcttaagaagnnnggggnnggtgtcttnnncctttggccnccctccttatcttcgccccttttacacctactgtgccgtgatttaaccaatgctgctattgtaatgttgcgaccactcttaacctctcttattgataccttcctcagagggtggttagcacgtgcccatctcaacctccctttctattaatagccctcttcacttctcttcctcatatcgaatactccttccgtaactgggtctactcaagtctccaacattttctaaaaccttgtaccaaattctttctcaccggcttgctctgcacataatttattttctactaatgtcttcgtaccccttctcctcaatgtcacttttctttcccttaactattctgtctctcatagacgcacccttgggtcttactcatacgccccg

SEQ ID NO: 222221 - DNA, 458 bp, Glycine max
  unsure (1)..(458): unsure at all n locations
taataagtccatctatggattgaaacaagcctnccgccaatggtatttaaaatttcatgaggtcatttcttcatttagctntgaagagaatgtcatggatcactgtatataccagaaggtcagtgggagtaagatttgtttccttgtattatacgtagatgacattctgcttgcgactaatgataagggtatgctatatgaggtgaaacaatttctctcaaagaaacttgatatgaaggatatgggagaggcatcttatgtcataggcataaagatccatagagaaagatctcgaggcattntaggcttgtctcaagaaacctatatcaacaaagttntagagagattaatatgaaagattgtcaccaagtgtagctcccattgtgaagggtgacanacttgctttgagtcaatgccccaaaaatgattttgagcgggaacacatganaaatattcca

SEQ ID NO: 222222 - DNA, 371 bp, Glycine max
agcgtctcgttgtcgaagttcgagcgtctcgatatatcatgcgctttaaacggacctgcgagatgagagctatgaccatttgaatttctcgaaagcttgcggcgttgaagttcaagcgtctcgatatattatgcagcgtgaatcggatgtacgcagggagaagttgggaccatatggatttttagagtgcttccgttggtcaatatcgagcggctcgagatattatgcgcctgaatcggacctccgagatagaagtcatgaccatttgaattcctcgagatgtctcgttgttcaatttagagcgtctggacatattatgcacttgactcggacctccgagtgaacagtttgaccatttgaatgctcaagag

SEQ ID NO: 222223 - DNA, 469 bp, Glycine max
  unsure (1)..(469): unsure at all n locations
tacggacctatgaatctaagctcgtagtatttgttggtataattcgcatgttccattaagctcttaatgtctttagaggttacttcctcgttgacatcttttgtcttgaatggaattgccatgacaggtttattgttactgtctttgatatttggcagttgatattgtgttgcgggaggtaattccgattggattaactcaccatccttcacttgccaatttgttatgagaattgttgttggatcacctatgatgtcttgtttccaagggtaatctatatcctttctgatggcataagcatgaaaccaatcaaagaaaaggacattatatttgactctttcgacaaattcgtagaacttgtcttggatttgttatctgtttgtacccttgtnatgtaggaaaaaccatctcctttaaggttcattctccggagaataaacatctttcctaaggggtttcttatcaatgc

SEQ ID NO: 222224 - DNA, 294 bp, Glycine max
agctttaactcggaggtccgattcaagcgcatatatatatcgagacgctcgaaattaaccaacggaagctctcgagaaattcacatggacataactcttaactcggaggtccgattcatgcgcataatatatcgagacgctcgaaattgaacaacggaagctctcgagaaattcaaatggtcataactttgcacacggaggtctgattcaggcgcataatatatcgagacgctcaaaatttaacaacggaagctctcgagaaataccaatggtcataacttttcactgggatgt

SEQ ID NO: 222225 - DNA, 426 bp, Glycine max
ctatcccatggatccgctacatgggccaccaatggccattgtctcggtcaaagagaaaatgtttagagatattatagttgaaacaaaccagaccttaaattttaaggtataaagatctatagctgggtacaaaatatagtgaagaaaagtcattttatagataaataattgaccatatttgttgggaagacaacaatttacaaatgcaagatgatgcatgcttgggtatcttcaatttgacactatagaagatttgagaaacattaactataaaatgtaatcccttagatgatgtcgataaaagaatttcattgtatagttttatacaaaatgtacacaaccatgctagatattttcaaaataaaattggctaagtgtgagagtataatgacataatttacccaatcaaggagagagaagcattct

SEQ ID NO: 222226 - DNA, 424 bp, Glycine max
  unsure (1)..(424): unsure at all n locations
agcttaacatgtagagattggaacacatcatcgatagtatcccaacaggtatgtgttcggttctgcaagttaaggaggatgaagtataacttctcaatggttcttttgaanaattgcatttgcaggtgcaaganagaaaagtactacctatataagcatgaagtttagccgcttcaagaagctgggacttggctttgatatgcttatgaaggatagggacacaggctagtaaaactatgtgtcgagcaagagtaatgctataaactattgtgcagattatcttcatgtattcattatgaatagaaagggttcaatccttagtgacaccctgatattcgaatatttgaaacgtgtaatttgctaagatgaaattcaatcgtcacgatatttcatctatgcagtagtttgttgtatgttatgactt

SEQ ID NO: 222227 - DNA, 419 bp, Glycine max
gtacagcagatgccactctactccaaattcttgaaggatatgttaacaaggaaacataagtacattcaccaggaaaacattgtagtggaaggaaattgtagcgttgtgattcaaaagatccttccacctaagcataaagaccctgggagtgtaactattccttgttcaattggagaagtcattgtgggaaaggctcttattgacttgggagccagtataaatttaatgccactctccatgtgtagaaggttgggagagttggagatcatgcccactaaaatgactttacaactggctaaccgctccattactagaccatatgcagtaattgaagatgcgttggtcagagtgaaacattttatcttcctggtagactttgtggtaatgaatatctgtgaagatactgacattgctgtata

SEQ ID NO: 222228 - DNA, 418 bp, Glycine max
  unsure (1)..(418): unsure at all n locations
agctntaagcataagcaaactgttagtcgtcttatacagctaactgtggtatagaaaactnttacaaaatgtacatattttccccaatttatggttctttttgtaggattgtaaataaattttgctctttcttatctgggctcagtagacgccttgtgtatggaattaatgtcaatttcaggcaaaaaggagttattttgaagaagtgttaaagttgatgtctcattaagcgagctcaatgcgcttagcgagtgttatccgctaagtgaggcatcagcgcgcttagcgaataggaggaatctggaagggaatatgtcacgcaggcacgcgctcagcgcgtcattagctcgctcagcgagtcgtttgtcaccttccaggcttagcacgagtttggcattgagcgaaaatcacttactca

SEQ ID NO: 222229 - DNA, 289 bp, Glycine max
  unsure (1)..(289): unsure at all n locations
ctatgaaactaagcttctatctagagaaatagctcccagtacgcactttatctgaaaacgcttgtatctcacatagaaaaatacatgatgaacctcttctcctttataatagaggagaccaacaagccttattgcaccatagaataagaagacttagcgtaggcgtgagcccctcataggaatattttatttgtcctagagttntctactcgggaattaaacaagtgtgagggggctaaatcacaaccagcttttatcatagaagagatgcgggagatcatggggatga

SEQ ID NO: 222230 - DNA, 229 bp, Glycine max
  unsure (1)..(229): unsure at all n locations
atgaatccgttgtacacagcgattacatcaganttctaataatctattagggatctactttaatgagagatttgaatcctcatatgggaataatattgtagttgctgaatctgcctacggaatactgactaccactatgtcttttctctttcttttccattaagacatatgccacatcacataaatcttagactagcttcgattctgatatattgcgaccatcacctac

SEQ ID NO: 222231 - DNA, 445 bp, Glycine max
  unsure (1)..(445): unsure at all n locations
ntatcggaacgactagtaccccgtcgaattggtagagacctgtgatcaatgccgaaaatcccagtgccctgttgaacttctctgggtccactgggtgtctcggaggtgcaatacatatgaactagtggatgacatctgagataagctgcaccacatgaacattgatttgggtcatgatcctgtagatcagctgacacttgggtagcgggagatcagagttatggtcactaggaaggatgttactgagtaggagcgtcttctagatttgagtcagatcggtcatgctaatgcgcatgatccgtacccgccttcctgctatgctccgtgcaaaatcatgtcccggggagcaaagtagctgacctataacctcttcatcgaaacttgaaaatngacttcttctctcagcgtactcgcatcgctgtcccttttctaaaccaatggatgc

SEQ ID NO: 222232 - DNA, 317 bp, Glycine max
  unsure (1)..(317): unsure at all n locations
agcttcacatgaagctacatcatttactccctatcaaatgaatgaataaaacattctttntattttcttagaaaatatatttattttatttaccttaaaactattattttaattaataaaactatttcttcttatttatttaattacaacaacatcattattttctaaaactctatttattttaaaataaaattctttttaatttattttacaaaaaatgaggtgttacaaagtatattctagaaagacttttatgggggtaattttacacctctccttggttctcgactccatttgtgactctatgctctctttct

SEQ ID NO: 222233 - DNA, 280 bp, Glycine max
attaattgcgagcatctcgatgtattacgggactcagtctgacatccgagtaaattgttattgtcgagagaatcagctcagagcttcagcatacaatttcgatcgtcttgatatattacgggactcaatcagacatctgcgtcaaaagttatgggcgtttgaattagctgagagcttgcacattcaatttcgagcgtcttgatatatttcgggactgaatcatacattcgagtaaaaatgtaatgactttcgaatttgctttgagccttaacattggatt

SEQ ID NO: 222234 - DNA, 439 bp, Glycine max
  unsure (1)..(439): unsure at all n locations
agcttgtatgagtactgagaaagattcaagaaattgtgtgcaagctgtcctcaccaccagatttctaagcaactccttcttcaatatttatgtgtgggacttagcaacatggagaggagtatgattgatgctgccagtggtggagcccttggagacatgacccctgctgaagccagaaatttaattgagaagatggcttccaactcctagcaatttagtgccagaagtgatgctattgtcattagaggagtgcatgaagtagccacaaattcatcctcatcgggcgaaactaagaagctcgaaggtaaactagatgccttggttaacctgntaacccaactgaccatgaataaaaaatctgcacctgccaccagactctgtggttatgctcctctgctaccaccacatctacctttgcccttctgtgaacattctgaag

SEQ ID NO: 222235 - DNA, 472 bp, Glycine max
agaaagtccttctgactttgtttatatatttctgacttcatgacatgagatgaaatgcaaagattggacctcctgttagttgttatcaataagttgcttaaacacttgtgcttaagtgagacagtagccatgagactgtggtttgagctactttccttgaatttgtcttatgattaacctcatctaattgtattgttcacattttggtctcctctttgtctagctgcatattctgtgaaaacaagggataggtacacattgcttcatctttctcatcatgcaatcaatgaattttgatgcatacacccctgtcgcaacctacccttcggcgggagggcgacgcgagactcgcgggatgcgggttccacgaaaggaatacgcgcggagtcgccaccaacgtttatttgaggaaaacgtcggataaaccggaaaagacgcgatctacaaactcttaagtgaaaggttcgggagt

SEQ ID NO: 222236 - DNA, 490 bp, Glycine max
agtcacctgcggcatgcaagcttcattctacacctgaaaaagaggatgagatagttgcacaaaggagaaagcttcctaacaaaaattttcatgcaggtggaccttcttctagtaattctaacttaccgcagcctcctatccctcttccattcccacctagagcaattctagacaaaaaaatggaagaagtggaaaaggagatcttggagaccttcaggaaagtagaggtgaacatacctctgctagatgccatcaagaagattctaagatgtgccaagtttctaaaggagttgtgcacccacaaaaggaagctcaagggcaatgaaaggattagcatgggcagaaacgtgtcagcattgataggtaaatctgttcctcacattcttgagaaatgtaaggacccaggtactttctgtataccttgcattattgggaacagtaaatttgagaatgccatgctagatctaggagcatcagttagtgtcatgcc

SEQ ID NO: 222237 - DNA, 444 bp, Glycine max
ctatgaaatgattacatgtcctttaataaataagaaggtcattttagaactttcaaaattatagatctaatttagaaatagaaacttagttaacggatcattcttatgtgtttgccgtttctttattagctaatttattctttgtctttaagtttttcatgatatgaccaataaagtgttttgtcaatacttttcgtgtaaatgtgcatgtatgtcatgtgttatgttttttttcattcttttcatgtatgtaatcgcatgttatatgtcattttccataaattcgttatttgccaatttaatatttgttaagatattttttttcgtatgagtattaaatcgttttgttagcccacacacttgtgagtgtgcatgttattcatgtgtcatattcttttaaaaaaatttcaagtatgtaacagtatgtattcgcatttaatgaat

SEQ ID NO: 222238 - DNA, 479 bp, Glycine max
  unsure (1)..(479): unsure at all n locations
agtcacctgcngcatgcgagcttacacaatttatctttctcaaacttgagtttcgaaaggccaagtatgaagtctttcctaactagatgattgagatgatgcatgtgtatgtgtgtagtcctatgatgtcacaaccaagaatcatctatcttaattatcagacaactcatctcatgagatgatgaatgctcaatgtttaacatattgatattacctattctcttgccaatatggacaacctcaccggacatagcttcactaataagacaacgattcttactgaattcaattttgaagccttagtcacatagttgactaatgctcaggaagttatgctttagtccatccacatagaacattctttatctgcgttgtgactaatttccaatatttccttctcccattatctttactttattggtgtctcctgtcacaacctacccttcggcgggagggcgacgcgagactcacgtgtgcat

SEQ ID NO: 222239 - DNA, 451 bp, Glycine max
acttaattcctttgatagaccttttgagccttgtcttcctttccttgttatgaagctcactacaagccttaagtgaaaaaccatgatatcaccatatccttaaggaattttggagctttgaaattgttttgggaataagtgtgggggtttgtgtttcattgaataacatgttttgctggccatgcttcatgatatattctgagccatacttgatgtacattgcatattggttaaatgttggacatgctgaatatgatgttgtttctcaaatgctaagccatacttgatgttcattgcatattggttaaatgttggacatgctgaatatgacgttgtttctgcaaggctaataggaattatagaaaaaattctattacaaatcgaaacagagaaagaaaagccagttagctgagtgaataagatcttaaatgacaaaagaatgatgagactc

SEQ ID NO: 222240 - DNA, 391 bp, Glycine max
catgcaagcttattcaaggtctaaaactttcatagagcagttcactcatgtcatgcaatcaatttatttcagatcaagatatcaagacaaacaaaatctactaaaatgttcaaaacgtagctaccataaaagcgctaaaccaaaaccactgttaaaccaaaaaccaacataataaataaaagttgtctgaaaagagggagaattaaatgaaatcctggtcaatcatcaatcttgtgctggtgtgggccatgggtcccaaagcccctgtgttgcggtgacatctactacataattagtgtccatgcctgccttcgctgcacctgtgtcctcttcaacctcttgtgctggatactgagtctctggagtgtcctcagcatcctgagcctgtgca

SEQ ID NO: 222241 - DNA, 452 bp, Glycine max
tcagactgttcaatggcttcagattgttgcacaaaagggcaaaggtttgtgtgatggtgggcagaggagcataaaccacagagtctagcgacaggtgtagattttttattcatggccagttgggttaccaggttaaccaagacatctagtttaccttcaagcttcttagtctcagctaatgaagatgaattcgtggctacttcatgcactcctctaatgacaatagcatcatttctggcactaaattgctgggagtttgaagccatcttctcaattaaatttctggcttcagcaggggtcatgtctccaagggctccaccattggcagcatctatcatacttctctctatgttactgagtccttcataaaaatattggagaagaagctgctcagaaatctggtggtgagggaaactggcacatacgtttttaaatctcttccagtattcata

SEQ ID NO: 222242 - DNA, 426 bp, Glycine max
agcttatccaaacatgtcctaagtgtaaataatatgctcagggaggtaggtcaagaacgagctattcttcatggaggtgaaatgtattttaccctacatcataacagagaatcagtatcgcagaatgtaagcaagtattgaaaactcacattcccattactaacttctagagtgctggcattctccttcaccagccgtgtactagatctgggatctcctctttcattgtaaaaagttatattaccatctaattctgtaacctctcgtgatacctgatgttgtggaggtttccatgtatttacattaacagaaatattcactatcttatgagatgtgttgggtgatgctgcaagttgctcctgttctcgattccgcttttggcgcacactatcatcaacaatttttgctacactatactgcaccatc

SEQ ID NO: 222243 - DNA, 345 bp, Glycine max
tcttcaagtcccttataaacctgtatattcaaatataaaaactctctctgttactaagaaatccagattgttacctagtgcagagcaagttgaatgtttttgtagttaactaaaggaccttgaagatagtgcacctttactaatgtgttcccaaaatgaagcttgtcctaacttgttaaatttctaatataatttgtcacataagccgtgtcacattacattgtagagaattgaaataattttctgcatcaatttaataaatagtcagtgctataaactaagaagtttgcactgttattgtgacttcattaaatataacagtatgtagcaaccaggcaacaatgt

SEQ ID NO: 222244 - DNA, 458 bp, Glycine max
  unsure (1)..(458): unsure at all n locations
agctttagatngaacgtttaaatgacaaanattacttctcttcttgttctcatagagttccaatattttaagattattattccatttgtcaaatttgttggagaatagagattagtttcagtgtggatacacgtgtagtcttcacactattgaagaaatnttttatgtttcaaaaactcatcaacatgtatatatttagtatgttatctgtttcaatataatttagatgtaaaataaatcttttttaacgcgctgtgtgtattttgaacactctttttttcccttcgattggtatcaaagccaggttcttttgtattaaaattatatttatgaaactgtcacanaggttcatattnntattgctngcacattgaagcagtactcatgctgcatagtgtgtcatttggcatgaagcgttcaagtgatttaacaaaagctatcgtacagtggtgcttata

SEQ ID NO: 222245 - DNA, 431 bp, Glycine max
  unsure (1)..(431): unsure at all n locations
tatccattatcatgaatcaaggagtacaccatatantttattttttactgaatctccacccatcacaagaaatagagctttccacaattatgtctcaaatatttagactgttaaatttcaacctcaaacaactaaaattcataaatgtcaattttttaggttgagatggaatggtgtttctattatggttgctgccttctcacttttggcagtaggtacatcacttattggcaccctcctagccttctcagagttcttcaaggagcaacttaaaaatggaacctggcattcccttcccactaaaaaggtaaaagtaaattatgtacttttaatatctttattaattgcaattngttacatttnttgcctataacacagtcaataaagaatcatgctatgttttaatgaagaaagttctttggacaggaaaa

SEQ ID NO: 222246 - DNA, 614 bp, Glycine max
  unsure (1)..(614): unsure at all n locations
ctaccttatanctnctatcactagcttcncgcgnnntanccngcgactcgncgctaaantannttttntnnnnnnnaagtaannnnncgagtgttgaacctganacanctaganaccgtgatcctctacgtcgacccgaggcatgcnagcttatgatacttgataatgttatcttactaattgtggntatttgatttttgtattaatttcttttataataaactcacccctcgcaattattgtaccgcgtggctggtacttatgatgatcgcaaacttttattcgtgggagcacaatgacagtagtagagtgcgagaagtgagattcttttgttgagccgccgagccgacgtgatgatgttggtattattttgggagagagttgtgttatgttaatcaactcctacatagctagttccataattattttgttgaatcgaggaagtaaatcacacatttaattataagtatgaacaaatttactttacactatgtgaatgatgtgtgcggagttactataccaagatatatatatatatatatatatatatatatatatatatatatatatatatatatatatatagatacatatatatgtatatttacatatcn

SEQ ID NO: 222247 - DNA, 363 bp, Glycine max
tgcgccagctaactggttatctgctctctgggatcatgtgctatatattcttgtcatcccatctgccttcgtcactgagaatccagcggagactctccgccttgatccttataagcgttctattgatccttgctcgaccgtgccaaggactaacctgctgaatcctttcgcgtgtacgctttgccttgattaagaagacggtgctacaccatctgaacattctcttgatacactcactccccatatactagatattgcagaaggacgaagctaccgagaattctattgcttccctattcactacgttttacgagtgtcacaggctgagatccttgtataaccacactggacgggacatcctat

SEQ ID NO: 222248 - DNA, 422 bp, Glycine max
  unsure (1)..(422): unsure at all n locations
agcttgctattggaatcgcgaaagcttcactccttcatcaggattagtacctgacatcccaaacaaacaaatcaaacgtatcaagacaagtatatgtgctgtttgaatacctcacccgctcaagtgtatcacacactgatggcttttctttaatgaaacactctttcattttaccactctaattcccctcgagttcttaggcaatacaagagattatggtcacaccaaagaacaattcaccaatatgtgtaaggtttggctagagagacaaggaaaaggttaaccaagaaaaggctaacaatgtgtttatgcacaaatgaatgaaataaaattcacaagttatgaattcaagtaacaatcctccatgcaaccattatattaccttatagagatttttgntaaagtttttcaagcatgaacca

SEQ ID NO: 222249 - DNA, 461 bp, Glycine max
  unsure (1)..(461): unsure at all n locations
ngaggcttagcaacaaattatggccacaattagaaacaagaccgattgaatcccttggcaatcgaaactgcacgtattgacatatataaacacaggtttagaattcatccacgaatatcatcgtatattcacacaggtttttaccatttatatctaactatctccacttcatttcccttgcacccctggttgtatttcattattctcgaacactgttttttctgtcaatactatgaatcctgtatcaaactatcaatcttttcaaataattgtgtaaatacttcaacaatacatctgaaaagggaacttcattaactttcagcatataaattntccaatgcaataacactcaccattcaacaggaattctactgctaaaaagtcataaaaatattactgtnaaatggaaaacactaaaggggatttgattaaattatattctacggaacgcttcgcgtttc

SEQ ID NO: 222250 - DNA, 469 bp, Glycine max
agcttagacatgactataatttactggcatggtatgcatatggcctctgaggcatgtactggacctggcatagataacttccggctgctaaaatagcattaggaatgagagtgattgtttctaatactctgatatgttgaatcttaacctgcattctattgaagttaacaagcacaagttctctttgaacagtgctgggctgttctagaaatgcaaatgggaaatatcaggagagcaaaagagttgtttgatgctgccacggttgctgataagaggcatgttgctgcttggcatggatgggcaaatctagaattaaagcaaggaaatctaaagaaggcaaggattctacttggtaaaggtcttcaatattgtggacagaatgagtacatataccaaacacttgcacggcttgaagctagagcacatacatatcagcatgctcgatacttattcaatcaggccactaagt

SEQ ID NO: 222251 - DNA, 419 bp, Glycine max
  unsure (1)..(419): unsure at all n locations
ntagtcaaacagaataatccgaaaatgtcatataattgggtgttgaaagagcataacaagactttctgtgattggtttaaagatacaatctctgtagatgagaatgctntagaaacattaagaaagctagcagatgggcctaaaagagatgttattacctggcaaggatacgacataaacaagtattcattttacacaaaagcacaagatgacaaaagtacaatgcagaacagcggggtcaccctaagggctgaatctcaacactttgcaagtgtcaatgacgccaatccctgtgtagctgtcatcccttactttgggttcattgatgaagattgtgagcttaattatctgaaatttacagtatgtgtgttcaaatgtaaatgtgttgacagcaacaccggtgtgcgcaccgatgatat

SEQ ID NO: 222252 - DNA, 264 bp, Glycine max
gatctcaagtcacctgagcatgcaagctttagtcgtgtgtgggtaatttgatcactctctcactcttgttctgaactatgtatatgtgctaataacaaggctatgagcggctgagacaaaaaatctccgcaactgtctatactccttcagccatgacgctctggatgtacatcaatcggtatcatctttacatgaacttgcaaaaatctagtgccgtatcagactcacaatcattcagatgtacaatatcttattattaccacg

SEQ ID NO: 222253 - DNA, 451 bp, Glycine max
  unsure (1)..(451): unsure at all n locations
tcacgagaacatggtattataactttattttgaatcacatgagttacaactgtgtctacgtgcaaaaaagattgaatgttccttgaagatactaaataatacaagttttggagatcttgaggtacttatttgctaacaaaagttaaatgtagggaattaataattctttctaagccctttaactttctactcagtcccccctccactcttcaaaacttgagttacaaagcttatgttcatcaatttatgttctaaaattctntatttggctgtttactagtattgagtgtttttccagctgtgttgacttgaatcgattcaaactctatatcttcatagttcagtaaatgctctattaatgtggttcatttatttcntgagttaatattattccaatttttatttcatgcaacttaatattaatacatgttgataattgatatatatgaat

SEQ ID NO: 222254 - DNA, 244 bp, Glycine max
agcttgtaggccttggatcttcttcatcaatggagtcctttgcttcttgaagatcaatgacaatggaatggagaaggaggaaaggtgattggagactccacttcaaggagaagataagttgagaacaagctcaccaccataggaagccatggataagagcttgaaggtaagagaagatgagtagagggagagaagagggagaatgaggtcttaactttgaagtctaatttctcaaatcatcaaa

SEQ ID NO: 222255 - DNA, 336 bp, Glycine max
tccatcatctaataagactgcattgcacttaattgtcataatatatatcgtatatatgtcttcaacttttacccatgtatttgtttgacataatcaaaaaaaggggagattattaaatcaaaaggcatctatgtcttaaagacgaataggtactcctttttattcttaatagacgcaacataatacaaatgataaaagtagtgtttgttgtgctatcaaatcatggtttgtattcttgcgtttgagttttcagatgatacatcaatataagatgatatagcatagccttaagtagtaaatataagatcttcatttaatactctatgatgcaatcct

SEQ ID NO: 222256 - DNA, 279 bp, Glycine max
  unsure (1)..(279): unsure at all n locations
agctntacaccaaacttgaaacaatccagtattctttgtcctagtggctctaaacaaatcanaagaattgagggttgtttgctcactgactaactcttaattgtcttatagatagatatgaaatctaaacacttagtcttttctctcaagatgtacaaagtgtttcgagattgtttcaaactntacaagaatatacaaaaaaactttttacataaagaatttgaacgatagcacgcaaaaatgtgtcttaggtctttaaagcttttggtattcataggc

SEQ ID NO: 222257 - DNA, 332 bp, Glycine max
ctactaaagctaagcactaacggacccaaccttggcccatgggctcagaaatctaccttgagagtcatgagaacccgacggccttattcaacaactctagcctcttggagcctcttgctcatggctctagtgactggtgccttcctagggaggatagcatcatacccttcccctagaagaggatttgacctcgaatctgtttgttcctgctcctcaatatcagctccacctgcaaaaggaattaaatcagatatgtgaaaagtggtgctgactccatactctaatgggaggtccaatctatatgccatggtattgatgctctctaaaacctg

SEQ ID NO: 222258 - DNA, 204 bp, Glycine max
  unsure (1)..(204): unsure at all n locations
agcttctatagttcccttttttatataaaaaaagtgaaagctactttaattttttttgtttcggaggaggggtggtggcgccacatacctcnccgcggtcacgacaccctgtggacgcctagtggggtgctactgcccacaaccatgcttgatcaattccggcctaacccaggcataatcagtcagtgagaacctgtgacgtac

SEQ ID NO: 222259 - DNA, 471 bp, Glycine max
  unsure (1)..(471): unsure at all n locations
agattcataagacggttagaagctgtccacacatggcattacttaacaaagactagttcatattttctatggtggtgtgtcctcacataatagaaagagtttggatgcttcttatgaaggtaacctcatattaaagccctttgttgatgccatcaaaatcattgaagacatgtcttctaaccctacatcaacttaggggataagagtattatgaagagagacatcaactaagtggagacagatgaatcccaaactgaattggaaaagcagatgcaaattctaccactaaagattgagacactcattagagctcaggctcaagtccctatcactacacctacattccctacctgtgataagtgtgagaatgtgtgtaggccaggagaatgcattgttgatgatgagctagctgcaaccatggatgagattcaacttgtcaggagataaaacaatngttataatcagttacct

SEQ ID NO: 222260 - DNA, 259 bp, Glycine max
agcttctccggtcaatgtcagaccgtaccgataccctcattatcagaaacaagaaattgagaatcaggttgatggcatgttgcagcgaggcttcatacaaccaagcacaagcccgttttcctcacccgtgttgtttgtcaagaagcacgataggtcttggcgcttatgcgtcgactaccgtgctttaaatgctttgacggcgcatgatcagtttccaagtgcgactgtggatgaactcttggacgaatatgaggcgcca

SEQ ID NO: 222261 - DNA, 459 bp, Glycine max
  unsure (1)..(459): unsure at all n locations
gacaacgatcagaagacaaccttttcctgtaagatataattgaaacttattgagtcttacatcctgggtttgaaagatgagatatatcatgtgactaaattatcattcatctcgatcaatacattgataagcaacccttcaattcatgttataccttaaagttgaattcttcatctttaaccttatcgtaaatttgggattcatttcacaccttatctttgcaaagccgaaaaaattattttattcttgatccgtaaaaagaatactctctaaatcattttaaacaatcaccttttttacctttatctgtatgtttaattttttgtctattcttttcaaatattatattctttatcaatctaaaaattaatgttcaatattctattaaatgagaatgtcaataattaaaaataactctatattggaacttaaattgattntataaatctacgtgctcta

SEQ ID NO: 222262 - DNA, 75 bp, Glycine max
tataatcacataaggcttactctcatattcaatcattggcttgataaaagtgttccatggaggaatttgacgagt

SEQ ID NO: 222263 - DNA, 413 bp, Glycine max
ctatgtaggctccacacccttctcaattaagtggccttctactaacgttcctatcccatcttaaaaccaattaattaagcatatgtatccctccctttataaatgaacttatgaaccgcatcaacctccactctcattctcaaactcaacaaccctggtctcaacttatctccccctctctctctttctctcttgtggtaacatacacacacacacacacatatctagctattttggtcccattttcactataactctactaaattaacatggacaaccttcaataatgccaagcgaactacacagcactcacacctttaacgtctttgatgagggctgctgcatgctatgcaaacagaacctcagtgatacatgacggaacccgttacacttgtgcacatacttatgagcgt

SEQ ID NO: 222264 - DNA, 342 bp, Glycine max
  unsure (1)..(342): unsure at all n locations
tgcagctataatcctttctgagtgactcatggcaaccctgagtttacttaaattattgttctttacagaatttctttntgaatacacttaagcaaactcataaatagtcataaactcagaagacttatgatttatgtttagaaggtttgccataattaaaacaccaaggaatttggggtcaacaaaaacctcttgtgccatagcttagaatcaagctcagtcttactacattgcactcatgttcagaaattaaattccaattaacaagaaaagttatttttttaaacaacaagcaataaccactttgcatcatttgacccacacttaataggttctgatcaa

SEQ ID NO: 222265 - DNA, 394 bp, Glycine max
  unsure (1)..(394): unsure at all n locations
ctacgccnaacatgagaccacttccagggtgctggaactacttcacatggattcgatggggcctatgcaagttgagagccttggaggaaagaggtatgcctatgttgatgtggatgatttctccacatttacctgtgtggactatatcagagagagatcataaacctttgaagtattcagagagttgaaactaagactttaaagagagacagactgtgtcatcaatagaatcacgagtgaccatggctgagaataagaatacagcatggtcactgaattctgctcatctgaaggcatcactcatgaggtctctgcagccattacaccacaacagaatgggatagttgagatgaaaaacacgaccttgcaagaggctgttctggtcatgcttcat

SEQ ID NO: 222266 - DNA, 324 bp, Glycine max
agctttatattttcttacgtgtaggtgacttctcatcatgaaatttatatgtgcaaaggttattagataattgaattgactaaaatcatttgaagaaattgattgaagctttattcacattgtaattaggaaattctttaatgtctgagacttcgttgaaatatgtttaggatataggtatacatgtttttcatgcaaatcaatataagtatataatttttgattcgttatatacatatcatatttatttaatgatatgtttgatattattggtattatatatatatatatatatatatatatatatatatatatatgtatata

SEQ ID NO: 222267 - DNA, 429 bp, Glycine max
tgctacccagctcgcccaggcgagctatgttgctccctctagaatgaacttcctggaaggcccaagtgggcctagttgctatttgcactcccctgtttactaaatacacccctacctttttttgcttattctttttctgtaacgttatggaactttacgaattccgcaacgatacttgttttccttctgtaatgttacggaaccttacggattacataatcatcccttttttggctttcggaatgttacagaacctcacggattatgtaacaatgcttccttttgatttccggcatgttacggaacttcacggatcgtgcaacaatgctctcttttgacttttggcacgttatgaaacttcacgtattgtgcaacaatgggtgccaagtacctcgaagcggcaagcaaagggtgatgtcataagcaatg

SEQ ID NO: 222268 - DNA, 326 bp, Glycine max
  unsure (1)..(326): unsure at all n locations
agcttgaagtgagaaagcgtggaagagtcagtcttcctacttttatttgttgaccaccacagagtggtacctggagatatgtcgcggtggtcaggagaccttgnggacgtcaggtggggtgctattgcccaaaaccatgcttgatcaatcccggcccaacccaggcataatcagtcagtgagaacctgtgacgtacctaaacaggcgagctactggcagtcaaccaataaaagaacaaagaccacaaagcaaggaggcttgtgtggtggctggccagctatggatcttaagtggtatctggaatttgacctctggtaatcattacc

SEQ ID NO: 222269 - DNA, 482 bp, Glycine max
  unsure (1)..(482): unsure at all n locations
gacactatgaatctcagctcggaaccttccctntagtgaatgagacatctttttctttcatagctacaatagctaatgcttcttcttcttcttcttcttcttctaagcatcatagagttgagtcacatgaactatcatttgctcttcactcatcttcttaagattgtaagtcatgtcatattgaatagtaggaagttggagaagacactaaataaacaagtagttgtcggcatcctttgtaaagcaaacacaagcatcattgaagtgatacttcctaattggatgtaacacttgaatgaaattgcggtgcacaaatttgtcacttccatcataaccagaggtggaggctcttagagtgcccgtccacacaatctgagtctagaaggtcttggcatagtaagcatcaggagcacaaacaagcttcttaccactgaatagggaactccaactgagaaggcagttgactacttccacctttatct

SEQ ID NO: 222270 - DNA, 432 bp, Glycine max
  unsure (1)..(432): unsure at all n locations
agctntaggagaaaccattanaactaaggtagttcctaaacaaaaatcaattgaggaagcttcgccgagtgtccccattgaaaaacctttattcaaacctttcaaagttagtgataaggctaaacgaaaaattagggaacttagaaaaactaaatccttaattgaaggcgtaggtgacaatcatagcgaattactaaacaagattagtagtttgcttaaggtcattccagatactccccaagcttcggaaaatacttccaaaatggtaacaagaagtacctncaaattaattaatgttattaatgaagatagtgaccaaaacttagataacacaactgagataggatcagtgtcagaaaagaatataaatccattaaactccaaacactggaaagacccctccaaattatattatcaacgtncaactggccc

SEQ ID NO: 222271 - DNA, 249 bp, Glycine max
tgttttcaatttgagaatctcgatatattacgggattcattatgacatccgggtaaaaagttattgtcgtttgaatttgctcagagcttctaatttcaatcttgagcgtctcgatatattacgggacttaattggacattcgagtgaaaagatattgtggtgtgcatctgctacgaactttcgtttttaatttttagcatctctatatattgcgggactcaatcggacattcgattaaaaagtcattgt

SEQ ID NO: 222272 - DNA, 389 bp, Glycine max
  unsure (1)..(389): unsure at all n locations
agcttctccctatttntgctataaataggggatgaagtgaagaagaaaagggttcagccccttagacacttctctctctctcgaaatagctgaggaaaattagttccgtgaagaaaatccaagccgaggccgcttcgtaacgttttcgtgagtaattacgcgaagattctcgaccgttcttcaaggattcatcgntcgttcttcgttttcttcagtcttcaatgggtaagtacctcaaaccaatctttttaattcattctatgtacccgtggtggtccacatcttgtttcatgtatttttattctcgctttcatttactttntataccccctnttggcgtgcttaagccatttatctaagtcatttctcacttaatctaaagataaaat

SEQ ID NO: 222273 - DNA, 420 bp, Glycine max
  unsure (1)..(420): unsure at all n locations
cgtcaggaagctacctagtctataaatagaaacatgtgtaacacttgttgtaactctgatgaatgagagtcttgtgagacacaactcaaagttcaacttctctccctttntcttccttcaattccgtgccccccctctctctttctctccctctatcttttcctccattgaagcatcctctccaagctccttcttccatgacttattccttaatggatggcgcctcctctcacctcttttcctttgtcttccgctgcatctccatggtggaaaatcaccattaaaggaccccattgaagctcaaagatccagcctccatagaagccccacaagcaagcttccatcaagtggtaatcagagcacaagagcttcaagtaggtgctccttatacctncattaatatntttgctttaccttctc

SEQ ID NO: 222274 - DNA, 402 bp, Glycine max
agcttcacatggagctatatcaaagaagaagtctatatcaccacatgattcaaaaagagacctcatatgtaagttactcatttataccaatttaatgatgatcatgaggaccaaaacatttcattcacaagattagtaggctactcaaaagtaggttattgaagtgtgtttaaatgactcgtgttcacaagaaaaatatcagtagggaagaccttaatttaccatacaatttgagaaggggaacaacttgtagaaaacattatctgacaagagattcatacaaatttggatcagtaaagaataaccctatcacctatcatatacccctttggcacaatcaactcattacccttctatagatagcacgatcatgagaaattctcaggataagggatagtctat

SEQ ID NO: 222275 - DNA, 430 bp, Glycine max
  unsure (1)..(430): unsure at all n locations
ctggaagaagttnttcttttacatgcccaactctcttgagtggcatttgtattgattgttgttttgattgtttcattttagtctctatattttcatatgtacatcatgcatcatcatggaggagtaagaagattgttgctaaagttataaacttctacagtgcataagaatcattgttttaattgattacaagactaatcataattgattacacaagtgtttatagcttccagagagattnttgtatcggtttaatcaattactctattcaggttagacaatgactggttttttaggagtctttgctctaatcaattaccagataattgtgattgattactttgtccttaaaattattcctagaagtaatcaagaacactctaatcgattacatcaagaatctaatcgattatattgttcttgaaagaat

SEQ ID NO: 222276 - DNA, 456 bp, Glycine max
  unsure (1)..(456): unsure at all n locations
agctcgngaacatgtgtgtttaggtagaacatttatgaactaaaaccctaaatgtgacccanacattaaatcaatttttaattgatttaaattaaaatcaaaattaaaaatttccctattgtcaatgaataacaaactaaaattaaaaataacaacgcatttgttaagtatgactctgtcacatcatcaaaatgtatagatggcaagaaaaacattggcatgagctacgcacgtgatcagacaagtagaaacttaacgttgcaagtgatagtaaggatgaaaacaatggacggaatacaagtttggggatgttgatgagtctccatcaagtttaaggaccaacaccaaaaatgttgaacagatagaggactaaacaaataattattcctaataataacaacacaagtctcgatccttttacataacatatcttaccttaaacatatcttttcacct

SEQ ID NO: 222277 - DNA, 411 bp, Glycine max
tctacaatcaagagcaagatatctttcaaggataaatcaactggagaagaagataattacttgaattaattagacatactatttgtttataatttcttgtgattatctccttaattgaaccaggccacaattctataaataggaggctaggcattcattgtaacagagtgtagaagttacgagcagttcttagaattataatttagaagttcactcactatatgcctccattattccgttagacactctacgtttcattgtattatctatgtgagtacaatttcatccacctaggagaggaaaggatgaaccttgatgtgctttaattctatcaattcaacactttatgtcgagttctgtatttggttgcatacttaatgttattagttcattggtcatctaatcgatgaa

SEQ ID NO: 222278 - DNA, 498 bp, Glycine max
  unsure (1)..(498): unsure at all n locations
atggatcnnngnnattagacatgagccctgacncntggaaanccccgtacttaagtgagccgagctgcaagctttaatatgttattcattcagcggactatctaatgaattagacacatagagaccattactacatatcctatggcactggaaaacagatgtcacctttcattctgcgtcactgggccctctcactgcagtataatggcttagaccaccaatatccaagcacgtatctcacagcattttcaataacattttggaactacaagccactcatatgattctaacaaagccgttatcgttatcacacagtgcatgaacttgcttattgctgtaagcttatggaatatattatttggattcttctcgtatcaacttttggacggagacctatcttacatgaatgaatgttatacacgtgaagtgacccaccatttttgatacgtagatgttgagtgataagcagacacactacaaatatcattaacatatgcg

SEQ ID NO: 222279 - DNA, 364 bp, Glycine max
  unsure (1)..(364): unsure at all n locations
tgtctattactcccaatagacgtcctcctggtgttgcaaccttcttcaacccaatagacatggctntgctgtcagctgtgaagcaaggtacttttgtagttcaagcagcaggaaatactggaccatcaccaacaagcatgttctccttcagtccatggatctatactgttggtgctgcctctcatgaccgggtttatagcaactccatatntcttggaaataatgtgaccatacctggagttggtcttgcacgtaagtttttgtttctcaattcctggtaaatggttaaccttataagaatttattntagactaactcaccagagggggggtaatgttactgactttaatgattggactttctc

SEQ ID NO: 222280 - DNA, 205 bp, Glycine max
  unsure (1)..(205): unsure at all n locations
agctttntccaagttaataaaaaccatatgtaagtctctntctttgctttggtaactatccatcaatccctgttaaagataaatgacttctgttgtagactttcttggtataaaccaaattgattctttgcaattcttatttcttatctatgaccaatcacttgttctcataatttcatagtgtggtaattaacgttgaaagtga

SEQ ID NO: 222281 - DNA, 431 bp, Glycine max
actaagcttccataggaaggttccaagttagtgtaccaggtaacaactaccccagtaagactttcttggaaggaatgtatcaacaattcctcatcttttacgtatgcccccatcttccgataatacatctttagatggttcttggggcaagtagtccccttgtacttgtcaaagtccaacaccttgaactcgggaggggacatgatattgggcactagaaacaactctcctaggttagcaaaggcataatcttcacctccttcaatggccctgagcctttcctctagatgatccaactgtcctatttctgccttagcatgagggtttttacttgttgtggaatgcaagaggtgtagttgtgggtgatactgagggccctccaaagtgttttgcaggggtataccaccaactgcttgcccttcagtggcata

SEQ ID NO: 222282 - DNA, 463 bp, Glycine max
  unsure (1)..(463): unsure at all n locations
agcttgatggtgttgagaagaaatcacatgtttgtcatcatcaaaaagggggagaatgtgaatgtatgtatacatgattntgatgatgtcaaaagaagaatcaaacaaggctcattntgtttaaagattaatacaagattgtttcaacaaacaaagccttgattcaagatttcttcaagatcaagccttgcctcacaatgaaaggtttcaagtcattcaaggcacatgtaatcgattaccaatacatgtaatcgattactaatggtttgaaagtgtgtaatcaattacacatcatatgtaatcgattaccagagacaatgaacgttgggaattcaaatnttaaatgaaggttcacaattgttcaagaaaaacaactgtgtaatcgattacactaattctgtaatcgattactagagaggattttcaaggaatatcgccaacagtcacatcttatcatttggat

SEQ ID NO: 222283 - DNA, 484 bp, Glycine max
tactcacagctattaatatatgattaatataattaaaaatattctgtgaaattagctgataaatgagtttataaatgttaatagcataaaaatacatatttaattatttaattatatatgtatgtatttaatttgtttccaataacgtgtcatcataaaaactagggcaatattttttttaaaaaaaattgtattataaaactataaaatgtttgagttgtataaagcattaattttctactaatttttctcttctttgaacccaatttttttttttgatatttttgtaaaagttagggagctacatacttttaattgtatttccttcttaacatggcattccttcttaacgtgaattatctttatataaatggctcttttttttcattgactgaaaatattaaagatccgagtgcacaaatgacatatatgatagtaagttactgagctttgtaaatttatacctgaatttatactaacatgg

SEQ ID NO: 222284 - DNA, 478 bp, Glycine max
  unsure (1)..(478): unsure at all n locations
gcatgcaagctntctgctcatagaacannatttnttcttcctctcttaattctccaacatctgaattcaatttctcaaaagtgtgcctaaattctctcttcagggcactgtaagagtgcttcagcctctctttaagctccccttgcttcctactgttgtattttggcatagaccaaatctgtccagtaacaacttcctcttctcttttcactttgtattggccaagtagcccactcaattggccatcatatgagcatttttgctcccacgcatcagcaataaaatcagcagatcctggaacttcaagatctttatcatacggtatatcgccagtcacaaagttcaaatagggagcatcaatatcttcatcataagcatctttgatacgccggtaaagtctacccaggaatttcttcgacctgtaagactggtgccgctctttccccatganatcagggtacaattttggtttcagatg

SEQ ID NO: 222285 - DNA, 460 bp, Glycine max
  unsure (1)..(460): unsure at all n locations
ctcgaaaggaccgaatcatcctcgacctcgaagaccgcctcttctccctcacccgcgcctcccaccaaaccgactccaccctcaacaccgccctcaacgaaaacattaagctttccaaggagagggatcaattggccgccaccgtcaagaagttaagtcgagactttgccaaggtcacttcttttttatttatttatttagttcagaactatttttagctgctagaatcccttcctatgttntacatttttgcaagacattggaatgctgttatcaatcattaaatattaacttcttgtcggtgattatatctgcccgaacattttgttccaattctatcattgtgcggtgtatgcttcaaactctagggtcgtattgaagtttgctttgctttgtgaaaaatgtttctttggattggaaaatctcatgaccgcgaagaattcatattcctaagttcctg

SEQ ID NO: 222286 - DNA, 430 bp, Glycine max
agcttgtatattctgtttgtggtaggctggaactatagttcttacacaaccatggcatgatttgcactgcagaatagatggacctgctgcatatgatgttcttattaattttgagcagcgatggagaaaagcaactaagtggaaagagtttgcgatccttttcaaaaatatcctctcaatggcatggcgatgctttaataagaatagaacgcatctgaaaggataaattggattattatactactctaggggatgaccctgtagtatgggtttctagtgaagctgatcctgataatagcatgttcaggatggacaatgcaatcttagttttgagtgacgtcacttgcttgctatattttcttgattgtggagataaatactttcattacattgtattccaacccttacagatcttacactccgttgactc

SEQ ID NO: 222287 - DNA, 455 bp, Glycine max
acacattttaattttatagggataaaaaatatatacaaaattttacatagataagatttaaacattttaatatttattggaatataaaaacatattttagtgcaatatatatgactggattatgaaagaaacagcaaagagaatattaaaaacatctaatataaaagcaacttttccaactaagaatatatataagtgaatattggatgtaatatttaatttcttaaaatcaaatcaaattaactcttgtgatgatcggaacaaaaaggaagttggcatgaatgcagccttctggcgtactacctgtaatattgtggtaagcgcttctgtacttgatcgtatcaattattctttataaataaaaaaaacaatcgaagttagtatcgacgcgtatattttgaaagttgaagacgtgtttggataaattgtgaaaccgacggtgaccttacacttga

SEQ ID NO: 222288 - DNA, 293 bp, Glycine max
  unsure (1)..(293): unsure at all n locations
agcttgagatgaggaagtgttgaagggtgaaacttcctgctnttatntgtgaccacagagtggtacctggagatatgtcgcggnggtcaagagaccttgnggacgtcaggtggggtgctattgcccaaaaccaagcttgaccaatcccgacccaacccgggcatagtcggtcagtgagaacatgtgacgtacctaagcaggcgagctcctggcagtcaacagataaaaggaaaacaagaccacagagcaaggaggcttgtggtggctggccagctgtgaattttgtgtaatat

SEQ ID NO: 222289 - DNA, 444 bp, Glycine max
  unsure (1)..(444): unsure at all n locations
ccttgaatcttgattcttgattctnganatcaactntcctcttgaatcttgaagtgttcttcaactntcctcttgaatcttgaagtgttcttgattctatcttgaacatcttgaactcattctttgattgacctttgagctttttgtcatcacctttgtcatcatctttgttatcatcaaaacatctttgaatcaatcttgattcatcatgaagctntgcttctacaaagagacttgcttgtgaatcaaggggaaacaacgtgttttaattatgatattttatttttacttgctgtttaatttacaaaacaaacaacccccccccccaattcgttatcgttttattacaatctatntatgaatgttggttgaccattgctcgttgggagacgacctangatcacttcctagatattgcattttaatgtttatttgattcgggta

SEQ ID NO: 222290 - DNA, 454 bp, Glycine max
agctgccttgtcccttgatatatttgagggactcatgatcactatgaatgacaaattccttgggataaaggtagtgttgccatgttttcaaagcccatactaaggcatacaactccttatcataagttgaatagttaagggtaggaccacttaacttttcactaaaataagcaattggatgaccttcttgcatcaatacagccccaatcccaacatttgaagcatcacactaaatttcaaaagatttttgaaagtttggcaacgcaagtatggcggaattagttagcttttgcttaagaacattggaagcatcttcttgtttctctccccatttgaaaccaacatctttcttgagcacttcattgagaggtgctgccaatgtgctaaaatccttcacaaatcgtctataaaaacttgctaagccatgaaaactcctcacctcggtcacggactt

SEQ ID NO: 222291 - DNA, 462 bp, Glycine max
ggagataattagatactgggttgcttgagatgttgtggagttctcttaagtcttaagtcaccgcttagttctcttatgtcttaagtcacagtttttcttttttctttctttggcataaacatcacactcacacgagtgtactaatagtttatttctatctgaattgcttctttatataatcgtttagagcctctcaccgtcaccggggttttgcaatttttacacctttagataaacgttggatcacttttgactctagtaaaagtaactcttgcaggtaaaattgaaatgtttatattaagctttattagttgtcactaaagttattaaattcaagtcaattcaatctaatatttcttaaataaaattaagataattcaaatcaagtttattataaatactaaacttccattaaaagacacaacaaacggcgacggataaatacagggtattttactaatc

SEQ ID NO: 222292 - DNA, 463 bp, Glycine max
  unsure (1)..(463): unsure at all n locations
agcttaggttntaggagagcattcatccatagataaaccttcactttttcattcattcacatcccatactttccttttagttagacagtcagcttaatttcattattttgcagcatacacacttactaatttcatttgtacttacaatttcttttaaacacaatatatacagagatatcatgtgtatgtacataaataatgtgtgtatgctatttactttgaccatttgcattcttacccagtgcctcccccaaatttggaacaaatttaccttgataattactcccctanaattgggacaaatatgttttgaatcgcgcttcttgtggatgatgctctcctacaacctaagtcaaggtagcaggagataacattggataggctcaagggtcaatcaatcaataattcattcaatcaataattcattcaactcanatggggtgcaagggataattcattcaag

SEQ ID NO: 222293 - DNA, 424 bp, Glycine max
  unsure (1)..(424): unsure at all n locations
gacactatgaatctaagcttctcctatttgctataatagggggagaagtgaagaagataatcgtagccgaggcgcttccgtaacgtttccgtgagtaattacgcgaagattctcgaccgttcttcaagattcatcgntcgttcttcgttttcttcagtcttcaacgggtaagtacctcaaaccaagctcttcaattcattatatgtacccgtggtggtccacattgtgtttcatgtgtttttattctcgttttcatttactttatatacctcctttggacgtgcttaagccatttatttaagtcattcctcgcttaatctaaaaataaaataaatttccaccgatcgtttgaattgtatcatctgataattttggttaaaatgaattccgaccggtcggtcgtgccgtaaccatgttggaaatc

SEQ ID NO: 222294 - DNA, 518 bp, Glycine max
  unsure (1)..(518): unsure at all n locations
cggattagccttgagntctgacnncttcgaaaatcccccagangcgnnaggatgaagcttnttaataatctttcatttgttttgttatccaagcccataacattgtgacttatacttgatatcatatattggcttatcttctttcttcatactgtatattcctcctatctctatattcatatatatatatatatatatatatatatatatacatatatatatatatatatatatatatctatataaaccctatttcgggaaacaaaagattgttcaaatcacaagactataattggtgaagatgctactccagcttatctatagaatctaaacctagatatatactggcaactgatgcccatatctttcacatacaatatttactaaaaaaagtaaaaaattagtggagatgtggattattaacactggtgcctcttcgaattacagacgatatagatctgactctataggcgcccattatcccacctttatatatatatagtttgtgaaaaaggacn

SEQ ID NO: 222295 - DNA, 438 bp, Glycine max
  unsure (1)..(438): unsure at all n locations
ggtctntntgtgtntaataatgaccaggtcttcctttatgatgatatcattgctatgcagatcagcgagatattcagcccagtaacctcattcacagttttactctacattttatatttgacattctgtttttattaatattataattaagttgacctaaatgtacatgtatatgtatatatataataagaaaaatgtgaatttctagagggaagtattttccttttgctcacatttgaaccacaatcgtagtggtaaacaactgtgtttgggaattagattttcactaccaataaaaacaaaacatttcagtcggttttacacttctgtaacaaagaaaaagtccgttttacaatttaatcattagtttgtggcgacatttccgtgcgcaataattatatgagcggcattttctaaatttgaataaaagttactttt

SEQ ID NO: 222296 - DNA, 439 bp, Glycine max
  unsure (1)..(439): unsure at all n locations
agcttcgctaacttgtacatttcccaacgtactcacgggaaagcttacacaggctgacatgcacacagaaccacacatgcaatagacaaagaanaacagagaaaataattaaaaagatgctatggcaatattgcatgactttgtatacaaggcagatcagaaaattatgtagtttgaacaagtataccaatattggccctcatagagtcatagtacaattatgttgtccttggcctttgggtatacaacaacttgatgaaagagaaacgaaagaccattccttcactacatcgatcttctcaacttgtttttattcatgcatgagttatgcaattcctgtgaacattaagttagagaatactgttattacatacatacataaatacatagctttgaatctttcaaggaaaatttagtaaaaagcataacaccctaattt

SEQ ID NO: 222297 - DNA, 462 bp, Glycine max
  unsure (1)..(462): unsure at all n locations
ntgcataccccaaggatccattaggaaattacttgtgaaagagagccatgagggtgggctcatgggccactttgggatagacaaaacccttgtcttactcaaagaaaagttttattggccccatatgaagaaagatgtccataagcattgcactaggtgtgtggcttgtttacaagccaagtctagggtgatgcctcatgggctatacacacccttacccatcccatctgcaccttgggtagacattagtatggactttgtccttgggcttcctataacccaaagaggtgtagactctatctttgtggtggtggataggtttagcaagatggcacactttataccatgccacaaggtggatgatgcttcccacatctcacaactctntttcagggaagttgtgagactacatggtatgcctatgaccatcgtgtcagatagagatgctaagttccttagcca

SEQ ID NO: 222298 - DNA, 209 bp, Glycine max
aaatgtagtcagctatcaaatgatgggaaagatgcttgctggttcccggagaggggttcctaaatttagagaaacaacatatttagactaattttgtggaattctgaagatggctgatgcatgaaatgagatgacgaagcatgttgatgtgataccactaatcaaatgttgaccatgtgctaaatgaatatcctcgacccagttggctg

SEQ ID NO: 222299 - DNA, 430 bp, Glycine max
tgtgagagatctattgtctcattagagacatcgatatggaagtaatcaatgaatctagatgctaagacaacatatgagaattcataatccactagttgacgactctttaacattatatcttcaataagaaggacccaatccatttgcatacctgatttcaacccatatacaatttgtaagtcattgtcaataacttaagcaagattgttggaccttaatgctagagtgtatgtaatgagatacactaacattctatctttagccattaaaccaccaactcctaggcgatttcttagaattcttactgggtcaaggagcataactctgtacgtctgcatcttattatagccatccgtagattcctcaaatttgcagactccacccatatgtattgctgcaactactttccaaactacaacaccaatgatca

SEQ ID NO: 222300 - DNA, 431 bp, Glycine max
agctatgataaatcaaggtgaatggacctcgttcattgacatattagcattggtggtgcttgggaccatactatacacaaatgtagacgggctagtggacttagcagcgatcgaagcctttcttgcttgatcatcacaagcaattgaaagccagatcatcactattttagccgatgcatatgatacgttcgacctgagatgcgagaagaacagtgcacgaattgtctgttgcatgcctgctctctatgagtgggtgcactaccacgttgatcgttacgaacgtaggcctgtgacacatatgtatggaatcgcgctgcgcgcggatgaggctctcctacaacctaagacacggtagcatgagattacattgcatacgctcacgggtcactcaatcaataattcatccaatcaataattcattcaactcaaat

SEQ ID NO: 222301 - DNA, 458 bp, Glycine max
  unsure (1)..(458): unsure at all n locations
tatgcgcatacttcttcacgaacgttcacttgcacaagacattcttataactaagaaaaatgcacccatatacaatcaatgcaccttcgttacctagattatttacatgtacttccaaggtgtatctgttacctacatcacacacatttcctttgctaaattcacatacatgcatactctaagcactttggctatcaaaaattgcatacgtgcacatctttgtatttctaatacctatacatacacaaacttcatgatgaatcttgactatctacacaataaggtgctacatttcatgcttattttttcaagtgattttttactacctaaagccgcatgcaaattcatagatatnttcatttgctcactaaaaatgtattcaaattaaaaggtatatttgtaatgtatattctttacataacatgcaacatatntatagattttcgtgagacattgtg

SEQ ID NO: 222302 - DNA, 131 bp, Glycine max
agcttgcattatctatagtgactgctaaaactcttgtcgctgtcatggccgtaagcgtgtcctgtatgacaatggtcgccgcttactattgcacacaacttacgagacgcgaacgtaatgtggaaagactg

SEQ ID NO: 222303 - DNA, 408 bp, Glycine max
  unsure (1)..(408): unsure at all n locations
ngagctngcaaaagaatgctacaagaatgctctcgcaattatgcacacaagagctcatgaaggtgtggcacgcatttatcatcagaaaaatcaaagaaaagctgcatatgatgagatgaccaagctaattgagaaggcagagagcaatgcctcagcatatgagaaaagatcacaatactgtgaccgtgagatggctaacgctgatcttgatgttgtaacataacttgatcctttaaagacctacccatatagatacagggcagcaggtactctccctagtagctcactctactatctgccatttgagcttatcaagtaaccatgttcaatttaaccatctgtagttagattactacttaacaagtttggcatcagcattgaaattaatcagatagtgtgcgggatctg

SEQ ID NO: 222304 - DNA, 482 bp, Glycine max
  unsure (1)..(482): unsure at all n locations
tcttaagtcacctgcangctgcagctntatagaactccnttaaaaaatcacttcggaatttaagtttgattatgcacaccatgctgataaaattntatttaaaacaagttcatcagtttatcttaaaaaaattaatatacaatgtaccgttgaaaatagaaacaattatcaaaagtctattttttctaatttggtgggtatggtaaacataacactcatgattgaaaattagatagatgaaaacatcattccatcatattaatggtgcaggtatatcaaatgttacaccaattagaaagcattatgaatatgattagtaaatgtgtgattatacatttaaattattttttaacatcacaagtgactgcttcagaaatcagaattgatgatantttactagaaaacaaaaaggaacttgagacattattaataactatccagtgttattacaaaagcatatatgttattatcaatcaattacc

SEQ ID NO: 222305 - DNA, 90 bp, Glycine max
gtgtccaattacaatggactggccggcgatgaacctcatcagcactgggaagaccctgatattgcccgactcaacatgattgcagctgat

SEQ ID NO: 222306 - DNA, 462 bp, Glycine max
gcaagctttctttctcaatcaatttgtctactgactaacaattctaattgcaagttcacattcttgttctttctttgtctagcatgcatatttgttcaaactcatgaaaagaaacacaaactccatcaaaatcatgcactcaattcaaaatacagacatacacccattttcataaaaagataaaagtgtttccctgccatgtcataaaaaaacaagtcaaactgttcaaaatgctttaggatgagcaaactaattacccataaataagatagcagtatatgtagacataaagaaaatactgtacgaaaaccaaaaattataataataaatcaagaagcaaaaagtatcatcaagaatcaaaattcctgtgactagtcctgtatatcctatgtttgaccatcctcctcatctgttagctgaagaactggagtaatgggaggagaagtgtccacagcaaggact

SEQ ID NO: 222307 - DNA, 475 bp, Glycine max
  unsure (1)..(475): unsure at all n locations
tcgctgcatgaaatctcctcaactgtttgttgtacccatggtctccagctcctcttccatattgatccaagtgttaggaatttggatgtgttgattatggagagaggcttcttaaactatgttggtggtgggcttattggctgtggagtggaggttggagtttcctcactgttagaaaaactagagccgttagaggatggtattcttattatttctttgagaggcatggacttatgtccatcttttgtcttcctattccttggaaaagaggagggaatgattggttgatcaatcccttgctttttttggacaacaagtacctcttgctccattttttgcttccttgggattatcaaagggcttttatcctctatttcacataaatccctcagcttctaagccttggaggctagctcagagatatgtctntgatatctcctgactggagtggtctatggacgagtcttctgagact

SEQ ID NO: 222308 - DNA, 448 bp, Glycine max
agcttgttctgaactatagctatcgaatggccaacatatattgagatgctatgagcatgtcgactacatagagtagtatatagatgtgggaaccatcctccaccttactatgataaacacatgagtcacagggactttcgatgtcccatgagagacaatgaaatcattaaatctcttgtaccactgccttagtgagtgcttcaacccataaagagatctctttaatctacagacataattttcctttcctttcacttaaaaaccttcaggttgtagcattagaatgtcttcctctagtcttccatggagagaggcagttatgacatcgagttgctctaactccaagtccttagttgccactagggccagcagaacacgtatgaaggtgtgttgactaccagatgtgctttataacatacgtgctgtataaaagatgacttcttcagtc

SEQ ID NO: 222309 - DNA, 471 bp, Glycine max
gaggaggcttcaatggaggaaaagaaagagagagagaaagatagagggggagcacgaaattgaaggaggaaaagagggagagaagttgaactttgagttgtgtctcacaagactcattcatcaaagttgcaacaagtgttacacatgcttctatttgtagactaggtagcttccttgagaagctttcttgagaaaacttccttgagaagcttctttgcgaaaacttccttgagaagatagagcttccttgagaagtttccttgagaaacttccttgagaagcttccttgagaagattcctagagaagctagagcttatacacacacctctctaacaattaagctcacctctttgagatgagaagctagagcttagctacacaccccctataatagctaagctcaccctcatgccaaagatacatgataatacaaaggaagtccctactacaaagactactcaaaatgccct

SEQ ID NO: 222310 - DNA, 151 bp, Glycine max
gagctctcatagctcaattacgagtgtatcgatatgtgaggctccatgatcggacctgcgaaagaaaagttatgaccattagagtctctcgagagctaacttggttcaattccgtgcgtcgagagataagacgcgcctgtctcggtccttc

SEQ ID NO: 222311 - DNA, 466 bp, Glycine max
  unsure (1)..(466): unsure at all n locations
cctacaccaaggctcaaataaacctaaaagttctagacaactttcctaaggtgttggaaccaaagacaacaattataacacctaaaatgaatcacatcggaatgagaggaatctaaaagttgtgtaggtatgtgactataagttgataatgacttaaaggaattaattggtactacttgtaccaacatgatgcatctacttttcagtaacccatcacttaagaacttcataattaagtgtgcttggcttaaagagattatgggatagatgaccttttacgaagttgtacaagggttgcttattgctggaaaaanttgtggacttagagaacttgaagagcgatggagaatctcaaagttttacgacaaactagatgttagaaaattgaaaataaataagcataacgaagcaaaatnttaaatgattatagaaccacacaatatcacttaattacatatagatagag

SEQ ID NO: 222312 - DNA, 477 bp, Glycine max
  unsure (1)..(477): unsure at all n locations
caagcttgtcgggggctcagcaaatcttagtttcagagtcaatagattgtatatgcacattctgcctctaaagcgacaaaaccacatagcagagcctataacctatgctatatactggctacacaactttgcattttcaaatgattaattcatgtcatcaacatttcgttgcttatgcttatgaaggggtgttactgtgactttgagttggtggattcgaattttaaacaatcgatagccatgtctttcttttcactttccactctccagaaccaacatgttcatgaaaaaggacttggttcatgtgcagccaagactgtctccagctctntaattatccaatattcaacttctttagctagttctttctaattattttcttccttcactttctgtttcttcttttgattntcttggctggtaattaaggatgaagagcagaagagaatatatctcatttacaagagcaaacacata

SEQ ID NO: 222313 - DNA, 470 bp, Glycine max
  unsure (1)..(470): unsure at all n locations
agtgtaccacactaccgcagctccggccaagctatcctgaaagaagtgtatcaacagcttttcatctttagaatgagcgcccatcttacggcagtacattttgagatggtttttgggacaagtcgtccctttatacttgtcgaagtccggcactttgaacttcgggggaataacaacatcgggtactaagcaaagatccgtcatgtctgcaaacggatagtccccaaatccttgcacagccctcaatctttcctcaaggagatcgagcttcctcctttcttcagttgccgggggcggcccttccatggacaaaactattggcgaagctgcgatgttgggttgaggcaacgtgcctggtgccggcccttcggggatcgggggataaaactcgacatccctccgagcataatcttgagggtctttatggacttcgtcgggctgctgaggagtctctntttcatggacgggag

SEQ ID NO: 222314 - DNA, 419 bp, Glycine max
  unsure (1)..(419): unsure at all n locations
agctngtattattcatctttttcattcccttctccctttgccaaaaagaattcgccaaggactaaccgcctgaattctttttgtgtctctcttctcccttttccaaaagaacgaaggactaaccggctgaattcttttgtgtctcccttctcccttgtcaaagaattcagaacgatacagtctgagaattcttttgattattcccattcccttatacaaaagtgttcaaaggactaaccacctgagaattcttttgtatccccattcacgaagtatcaaaggtttaaacggctgagatctttgtcataacacattggaagggacatcctttgtggtccaagaaagagacatctacttggtttgactgagaacaaagagggacatctcttggtgatagatctagtggagggacatccact

SEQ ID NO: 222315 - DNA, 408 bp, Glycine max
  unsure (1)..(408): unsure at all n locations
tcactaaaggtagtatcgatgtagctattgtcaangaattctatgtaaacctttatgacccaaaagacaagtcacctaagtaggtgagggttagaggtcatctgatcaaatttgataaagatactttgaacactttnttgaagaccccagtgattctagaagagggggaaaatctttgtgcttattctagattttcactcttgaggcttgatcctcaagagttagtttctaagctctgcatcccacggaggggatttgagcttaatgcagatgacctncctttgaagatattaatgaagaacatgaccactttagttcagacatggagcgttctttccttctctaacttgattcctacctcccatacatctgatgtcacattatatagggccaagttaatctatggaa

SEQ ID NO: 222316 - DNA, 382 bp, Glycine max
  unsure (1)..(382): unsure at all n locations
agctttggctctcaagaagagatcaaccaaaggatggagtattaaatatggatctcatatgatccataattccaagtctgatgtgggaggagntatgaaggtccatcatcatgacatgcctgtcatgttcttggttcattatacagacatacacccatgatcctagagagattagagtgtttccctgtcatgtcataaacaagcaaatcattctgtgcatagagctctacgatgaacaaactaattacccattaataacatctcattctatgtagacatctagagaatacttgtcgaataccaacacttataatcttaaatcacgacgctatttgtatcatcacgattcaaacttcctgcgactagtcccgcatatcctatg

SEQ ID NO: 222317 - DNA, 463 bp, Glycine max
  unsure (1)..(463): unsure at all n locations
tcaagaataatggcctcaacaaacttcttatttccagaaggaaattcaatcaatagacctccaatctttaatggaaagggttaccactactggaaaacccgaatgcaaatttttattgaggcaattgacttaaacatttgggaatccataaaaatagggccttatatacccaccacagtagaaagaaccacaatagatgaaagcacaacaagtggaagcacaacaatagaaaaacctagagatagatggtctaaaaaggatggaagacgagtacaatataatttaaaagccaaaaacataattacatctaccctaggaatggatgaatatttcagggtttcaaattgtaagagtgctaaggaaatgtgggacactctacaagtaacacatgatggcacaacagatgttaaaagatctaggataaacacattaactcatgaatatgaactatntangatgaatg

SEQ ID NO: 222318 - DNA, 468 bp, Glycine max
  unsure (1)..(468): unsure at all n locations
agctntcttaatatcttatcatagtgtggatgtacatgtccatatnttgtgaaagtagcatgaatggaacgatgtgcctatcaaactagagtgtcaaatatgccatttaatgagtgatgagtcacctcttcctttcttccttgggatgtgcttattaattaacactatgtctaatgtatattatattggaggcatatcaaatcatatgacatctcaagaaatgagaaaatttaatcttatcatgtgcaagattgaatggtattcgtcaaaataatctcttctcaatttttcatatgtgtgtgtgagtgtagaaagtatatcaaataagagcttaataggagctaatatttatcatatagaaaaagtgaagttaagattagatntaagtaaaccaattttaattatccatgtaagaatgcatgactaacattaactcctgtcacactagctagatatgctccacatgta

SEQ ID NO: 222319 - DNA, 397 bp, Glycine max
  unsure (1)..(397): unsure at all n locations
ggggtgatgtngcgcgtactgatgggtaccatgaggtgtatgcgtgggtttgacccacacgggtgttgaagagactgcatgggcatcttcttccttcctttgtgcccctgttgccccgattcttttggcattcacgtttgtggaggaaacgtaatcaaactttcctctattcaatccaacctcgattctttccccggcaaacaccagatccgcaaagctggacggcatgtaacccactagcttctcatagtagaacactggcagagtgtctaccatcatggtgatcatctctctctcaaccatgggaggagctacttgtgccgccaaatccctccatcgctgcgcatattctttatagggttcaccctctctcttgaacatattctgcagttgagta

SEQ ID NO: 222320 - DNA, 109 bp, Glycine max
  unsure (1)..(109): unsure at all n locations
tgcttgntcatatcgagatggtgagtggtcattctcatttgagtgtgatggtgcaacatatttgtttgccctagctggaactccagtgcttcacagctgttaatgatct

SEQ ID NO: 222321 - DNA, 98 bp, Glycine max
cgctgcaacctcgtgaaaatgcacattaactgcggtgtgtgactcaaaatcacaaatggcacaagtgagaagactctaaagtagtgatgtcataacta

SEQ ID NO: 222322 - DNA, 508 bp, Glycine max
  unsure (1)..(508): unsure at all n locations
gcccagcgtttggccttgagcgtganacgtgaactcaagcgacgagcatgagcttatctgccctactattccctgtatgccttgttctgtaatacacgataggcctacaggacaagccaaggtctaatggattagccatggtgaattttgaatcctggaatgtccctcctttcttgaaccaactcgtacgacatggcacaccacaatccaatccacatattcgggaccgatctaaataattaaaaaaaacaattatatattttcaccagaccaatagtttattaacttttatgaaacatataatttcataatagcaaaaattttcacaaattgttaattgtcacaagaataagactagataacattaatatcaatttggttctcttttaaaaggttatcttctataacttctcatatgctttctttttttaacaaaagctatttcttacaagactatttaatttttttatggaaacangaagacctaattatttaatacatgtaagct

SEQ ID NO: 222323 - DNA, 472 bp, Glycine max
  unsure (1)..(472): unsure at all n locations
tactaagcttaacatcagaccacttccagggtgctggaactacttcacatggatttgatggngcctatgcaagttgaaagccttggagggaagaggtatgcctatgttgttgtggatgatttctccagatttacctgngtcaattttatcagagagaaatcagacacctttgaagtattcaaggagttgagtctaagacttcaaagagaaaaagactgtgtcatcaagagaatcangagtgactatggcagagagtttgaaaacagcaagtttactgaattctgcacatctgaaggcatcactcatgagttctctgcagccattacaccacaacanaatggcatagttgaaaggaaaaacaggactctgcangaggctgctanggtcatgcttcatgccaaagaactgccctataatctctgggctgaagccatgaacacagcatgctacattcacaacagagtcacactca

SEQ ID NO: 222324 - DNA, 422 bp, Glycine max
gcctccaacattgggatcgcagggcattctgactacctagaggctacgtgtatccacataagacgtttaataatgactatgcgaagtcgaaatacaagaataagacataacaaacagtaacggataccagctaatggatgaagcctgagtaatacaattgtaccaacacccaacgaggatgatcggcggcttatcgattcacatggatcgacgtggagggacaagttgagggagggttctatttaagggtggcgtaaagaactgaatagaattatgatgatgcaaagtgtcatttttagaaatcgacggtgacggcgatttcgatgaggactcactaaagtgacttaaacaaggcaactgggccccctattatgattacggatagatgctgtctgggcccccgaattttcatgggcaccccc

SEQ ID NO: 222325 - DNA, 381 bp, Glycine max
  unsure (1)..(381): unsure at all n locations
ngagatgaggaagtgttgaagggtgaaacttcctgctnttattgttgaccacagagtggtacctggagatatgtcgcgggggtcaggagaccttggggacgtcaggtggggtgctattgcccaaaaccaagcttgaccaatcccgacccaacccgggcatagtcggtcagtgagaacctatgatgtacctaagcaggcgagctcctggcagtcaacagataaaaggaacaaagaccacaaagcaaggaggcttgtggtagctggccagttgtgaaacttgactgatatgtgagatatggtctctggtaatcgattaccaagggtgggtaatcgattacaaggcttaaaaaatgaagacaggaggctaagatggtctctggt

SEQ ID NO: 222326 - DNA, 460 bp, Glycine max
  unsure (1)..(460): unsure at all n locations
agcttcatggtgaatcaaaggtgattcaatggtgttttgatgataacaatgatgataacaaaagatgatgacaaaggtgacgacaaaaagctcaaagatcaatcaaagaacaactcaagtgaatcaagaacaattcaagagttcaagataagaatcaagaagaattcaagactcaagaagaaagtttagattcaagaatcaagattcaaggttcaagatctcaagaatcaagatcaagattcaagactcaagattcaagaatcaagagaaggcttaaccaagataagtatgaaaagtttttctcanaaattgagtagcacatgattnttctcanaacatgtttaccaaagagttnttactctcaggtaatcgattaccagattggtggtantcgataccaatagcaaaaatgggtttgaaaagttntcaaaatggaattacaacgttccaattaatttca

SEQ ID NO: 222327 - DNA, 455 bp, Glycine max
cttgtgaccctgatattctgtttgagatatgattacactcaaaaatttcacagatatattctagtagagattccaaccttgattggctgtaatgtggaaacctgttattaagaattagattctgattgtctgtattattttaaataacaaaaattcactacgaagcaagatagatctgcatattatttatgcttttaagtcctgaagattattctgtgccagtgttctaaatataaaatcattcaagctcaaaaagaaaaaagaaaaacttcaatatatgccacatagaaatgcatactactttgtttgtgaggtgataaagtcttcaaatatgtccacgctaattgataaacactatatgtttgaacatgatgaacaattgccttaaaagctacaaacatgtagtttatctcttcatagcaattatctgacaagacttgagttgacagcttgct

SEQ ID NO: 222328 - DNA, 491 bp, Glycine max
  unsure (1)..(491): unsure at all n locations
atcttaagcacctgagctgcagctatgctgaaacattacaatagacctcttcaacctcaacagcaaaataagccacaacagaacaagtatgacctctccagcaacaggtataatcccgggtggaggaatcatcccaaccttagatggtcgagtccttcacaacaacaacaacaacaatagccttattttcataatgctgctggcccaagcagaccatacgttcctccaccagtccagcagcaacaacaacaacagcagcaacagcaacagtcccaaaaacaacaaacagttgaggctcctccacaaccttcccttgaagaacttgtgaggcaaatgactatgcaaaacatgcagtttcaacaagagaccagagcctacattcagagcttaactaatcaaatgggacaattggctacacagctaaatcaacaacaatcccagaattctgacagattaccttctcaatctgtccagaatcccaaanatatgag

SEQ ID NO: 222329 - DNA, 453 bp, Glycine max
attggtcttcgctagtgaaaggatcaatgtgggtcctaaaagaggcaaatttgatcatcctactaggacgactgagaaaactggggctaatgaagagggtgagaaagagggagaaacccatgctgtgactgccattcctatacggtcaaattttccaccaacccaacaatgtcattactcagccaataacaaaccttcttcttacccaccaaccagttatccataaaggccatccctaaatcaaccacaaagtctgtctaccgcacttccaatgacgaacaccacctttagcaaaaccaaaaacaccaaccaaaaatgaattttgcagcgagatagcctgtagaattcaccccaattccagtgtcctatgatgacttgcttccatatctacttgataattcaatggtagccataactctagccaatgttcatcaacctccatttctccgagaa

SEQ ID NO: 222330 - DNA, 361 bp, Glycine max
agcttctggtgggacatcttgacttgctttccaatctgacattcaccacagattctgccttcttctattttcagattgggaatgcctctaacagcacctttgtcaatgatattcttcatgcctcttaagtgcagatgtccaaatctttgatgccatattttgacttcatcttctttggaggatggacatgtggaggagtaactggtttcttgaggtgtccataggtagcagttgtcctttgatctgttgcccttcattagaacttcattcttctcatttgtcaccaagcattctgactttgtgaagtctacattgaatccttcatcacacaactgactgatgctgatcaagtttgctgtca

SEQ ID NO: 222331 - DNA, 413 bp, Glycine max
  unsure (1)..(413): unsure at all n locations
ctagataatggacacacatgaacagcgctaggcaatgacattcatggtgctccatacaaaggtggagagtggaggatcgccttgagggtcctctcttaggcaatcatgaaactcagctccaaactctaaagtggaggacacatgaacagccctaagcaataacattcatgtggctctggaaaaggatgagaatggaggattgccttgagggtcctctcttangcaatcatggaacacaactccaaactcgaaagtgggggacacatgaacagccctaagcaataacattcatgtggctccggaacaggatgagaatggaggattgccttgagggtcctctcttacgcaatcatgaaacacagctccaaactcgaaaatggatgacacatgaatgacaatgcaattcattcatg

SEQ ID NO: 222332 - DNA, 442 bp, Glycine max
  unsure (1)..(442): unsure at all n locations
tgcggcatgcaagcttgtgaattctatctttccttttattttgtagtgttntaaatttaatcattacgtgtatcatctaatagtgtactgatatattatttaatatattaaatttataaaaaaatattttaattttttatattttaaaaattttcattttgatatattacgtttttaaatttttattttagtatttttatattctaaaaaatttcattttaatcttcttttttcatctgttaaaaaaaccggtgcggcattaatatttaaaattgtgaaatatttaattattttaaccactatttttttaaattgattattttacttatatttaatcctccattgaaaatgtctacaattcagctgaactgtttatgttaaatataatgtaactgaactgcaacatgattaaatagacaactattacatataaatcttcaaa

SEQ ID NO: 222333 - DNA, 467 bp, Glycine max
cttggtgaagagggtgaacaaaaaagaacttagaaaaatcttttagttgctcactcactaagcacacctctcgcgctaagcaccaagtcttcatgcgctaagcgggcacttgctcacgctaagcgcttggacccttgactagtggttggatggtagcgttaagcgcacttcgctgtgctatgcccaattacctctctggaatttgaatttctcgaattgggcttagcaaggtgatgcattaagcacaattccctctctattttggaaatctttggaatagcgctaagcgcaagccatcactgcattaagaagcatgtttatgcactaagcccaccattgttggctaagtgcggattgtaggaccaatccaagctgtaggaagcgttaagcgcttgtcctcgtgctaagcctaaaaacctctctggaatatgtaaattgtgaattgggcttagcgtgagaagtcacgc

SEQ ID NO: 222334 - DNA, 469 bp, Glycine max
agcttggacgaataaggtgatgcatctaggaaacacaacaactaacaagtatgaaaattgtaaatatatattggttttagggtttacacacgaatggataaaaataattgtttgtgttttacaaatgcagggttaagtttgcacattgggccttaaagagactactaccgaatagccttggagacctatgtagtgtttgagaagccatgaacaatatgatcactctacaacatattgaaattaaggcatcgtttgagacaactacacatgtggttgggcatgtttttaaagttaccttatacaagaaactatttggcatggtatcaaggtatgtgttaaaccagattgttgctgagtttgagcatgtaaattatgctagcattgatagttctcattatagatatataatgagaactactcacggtctctcatgtgcacgtgagctagctagatatgttcttggaacata

SEQ ID NO: 222335 - DNA, 463 bp, Glycine max
  unsure (1)..(463): unsure at all n locations
agtctctgcaacttatgtagcatgcattttcttccttgccgatgacaagggcaagtaactaccagttttaattattaacttgttgtgataagtaagcaagaattgtagagccaaacatcaatttgaggatgatatttttgagtaattatagttttctttgtgtgattaacgaaggttaataggttatgttctcactcgccatatggtcatagtcattaaacctgcaaatttatagctaaagaaactagaaaataaaaattgaaatattgaagtcctattgtagcaatagtgattcttgaatatctaggctagaatgtaagtgggtttttgcctctacaatgggagtatatgacgcggtttaattactcaccatgcatgaagaagttaaagttatgtaaattaaaaagactaggaaaaattcaactcagagaagggcttaattatntaccccactatagtacag

SEQ ID NO: 222336 - DNA, 343 bp, Glycine max
agctttgagcaaattcaaacgacaataacgtttactcggatgttcgattgtgtcccgtagaatatcgcgacgctcaaaattgaaaatagaagctctgagcaacttcaaacgacaataaatttttactcggatctccgattgtgtcccataatatatcgagacgctcgaaattgaaaacagaagctctgagcatattggaacgaccttaacttttttctcggatgtacgattgtgtcccttagtatatcaagacgctcgcatttgacttcggaagctcttagcatactcaaacgacaatattctttacctcggatgtccgatagagtcctgcaatatattaaga

SEQ ID NO: 222337 - DNA, 389 bp, Glycine max
atagcataggttcttcattggtaatcagcctatgctgtggttgctaatttgttaatctctcccacacccaagttaggaccaagtagtaaaagggtggccaaagagttaactacaattccaattcttcattaccagtcaaataaactattgttttcttcgataaaccaaaatcatttcatatgttggattaaactgttggtcacaaagctgattctctctatcaagatgaacaacaataaggaaaacaaactttttcaccaagccactatgagagaagccaatcattgccaagcaagttgcatgggatgtttcatgctcaatttcactcccactattgacaaaaatacatccatgctaatgtttatataaacctcactctgtctactctt

SEQ ID NO: 222338 - DNA, 450 bp, Glycine max
  unsure (1)..(450): unsure at all n locations
agcttatccaaacacaataaattctacaccaactcatgtccagtctatttagataaacgttaggttttcaacaattgtgtcaagtttttcctttcatgtgaatcacgtcagtcttaaatgcaataaaagtacatttcacttttgtcaaaaagcatatatcatgtcaatgtaaatttattttaatttcattttcataaatctagatataaacaattttatcaatatttcctgttttagcactaactgtattaaaacacatataaaataaatttatcataataacatttattctccaaactttagtaataaacacagtagccaaacaattaaaaaaaataccaataagtatatttccaatgatattntttttaattcgctaaggttgtgttcgtttaagaaaaaaagactaaaaaatgaanaataaactataaaataatatgagatctatac

SEQ ID NO: 222339 - DNA, 463 bp, Glycine max
  unsure (1)..(463): unsure at all n locations
ggcttgtggggcttctatggaagctggatcnttgagcttcaatgaggtcctttaaaggtgattntccaccatggagatgcagcggaagacaaaggagaagaggtgagaggaggtgctatccactagggaataagccatggaagaaggagcttcaccaccaagatgagccatggataagaagcttggagaggatgcttcaatggaggaaaagaaagagggagagaaagagagaggtgggagcacgaaattgaaggaagaaaaagggagagaagttgaactttgagttgtgtctcacaagactctcattcttcaaagttacaacaagtgttacacatgcttctatttatagactaggtagctttcttgagaagctttcttgagaaaacttccttgagaagcttctttgagaaaacttccttgagaagctagagcttagctacagacacccctctaataactaagc

SEQ ID NO: 222340 - DNA, 460 bp, Glycine max
  unsure (1)..(460): unsure at all n locations
agctattatgaagttaaagaaatctttgtaagctttntacttcttgttatatgtataacccaatctagccttttcgatagcacatttttgttgtgtaagtaaagcttccaaattatctctccccatagtgaacttggataaagtttttagcaagtattctaccttgacttctaaaactttacatccttcacaaggagaagtgacattagtggtgttagtgcaattgcaagaagacttgttcttttctttttctaaaatatcattttttgctctttctttcaaaaattctttttgaatttccactagcttatccacatgccacttcagttttccttttagaagattatttgcaatagacaaattntgtgcttcttcatgtatttcattgaaagcatgtagtagctaatcatagttatcatcaacttccaaatctaaaatgtttacctcactctcaacttca

SEQ ID NO: 222341 - DNA, 458 bp, Glycine max
  unsure (1)..(458): unsure at all n locations
tctaaactntatacaagaatgaagctctgataccacttgttagacaagtggcctcagatatcttaagaagggggggttgaattaagatattacaaactatttccccaattaaaattctatttcactttctattcaagttacaaattcccttaataatgaacttcttaaatattgattcaaatagaacaatttgaatataaatataaaacaataataaataaaggagtttaagggaagagaaagtgcaaactcagatttatactggttcggccacacccttgtgcctacgtccagtccccaagcaacccgcttgagagttccactatcttgtaaaatccttttacaagttctaaacacacaaggacaatccttcctttgtgtttagaattcttttacaacaagagaccctcggtctcttaatcccttagagaattagaaagagaagaagaatgaatctc

SEQ ID NO: 222342 - DNA, 363 bp, Glycine max
ccaatgcgagctctgaccgctgttcgttcttcccgcgatgctccttatcatgttcgcctgagtgggcttatagcctagaccatactggccacgaggtccttgggagactatcacgctagatatgccgacattgattttgcgtaaacccatccctggaccataaccgctccccaccataaattgggcctacagtatcgtcggatacgacaaacaaagtgtgccagagagtggatccacggacgatatgctgaccactttagagactggaagcggctctgaaattctcacttgttccacgcaggcatggagatgggagctaccaagatatcttctcgctgaacgagaccaatgccctccctacaa

SEQ ID NO: 222343 - DNA, 410 bp, Glycine max
  unsure (1)..(410): unsure at all n locations
tntgcttcttcttaattcatcattaagttntttcttacttatctctaagtatattaaggtattctactttatttccttttagaaggactttatgtttaacaaattatactaatcattgtgagggtgttttatattgatactaacctttcagaaggaatacatggtgtaatgtgtttcttggatagcaggggttgtcactgtaatatataactatatgtatataaggagtagcggtgtaatgtttntcaaacaattaaaggggttaatgtaaggataaaaaagataatggtattggagcaaatttaatgaaaccttactaggtggttagtataatttgtatttgcctattgcgagtcttcactcttcacttctagcatntctctagctatgtcgtcattggtggtgttgag

SEQ ID NO: 222344 - DNA, 609 bp, Glycine max
  unsure (1)..(609): unsure at all n locations
gttcctgcgctatctcccntactacgtcngnntctcgcntnctntttgccgtanacaatgtcactcnnnnnntnnntnnnnnntaggnnnnnnngntgnnnattgaatctttgagcccctcgnatcnccgagagaccaccagagnggacccgaacgcatgcaagctaaagagacgcatatacganacacttccttcttcaggtctgaaaataggaaagacaccgtaggtctaacggtttacacacacacatggattgaaaataatgattgggtttcacacaagcatgaccaaggtagggcataggggcatataaagactactaccgaatagcctaggacacctatgtattgctagaaaaccaagaacaaatgaaccctctcgacataatgaaataaagtatcgtttgagacactacacgtgaggctggcatgtttagaagtaccttatacaaagagtagacggatggtatagcgggagagtagtcccgattgaacataacacgagtatgcggtgactctagggtagatgtgaatgttcccatacataaagaattctggccggactgacacgttgcacccttccaaaggtattctaggccacaaacttcc

SEQ ID NO: 222345 - DNA, 452 bp, Glycine max
gcaatgaaacacccggctgatctgcatcgacctagatagcttattaacccattcttttgtacaatctcaatcttttgagtccgaagggaagaacctacttcttatcctacgtcaacatgggatgattgatttcaatgatgcttgaaaatgaatcatatctgaccaatgtggattgagcatatggtgacttgcagtatagacatcggcgttttgactactcgatgactattgatgaagaattactcttagtaatgagatatggtactgcttacgtatcggaactgatccaaaatggtctgcgcttgaatgtaaatgggttttgccgtttcaacttcagttactacccctttaaattctcccattctttacaatcacagtttctctacttaatgacaggtatactccttcacacatggctcacgattttccctcttccccagatcttccttccg

SEQ ID NO: 222346 - DNA, 378 bp, Glycine max
gcttggccatattagacttaataatttgattgttcgagtataacattacaaggaaatgtttttaaagaaatcataacattgatctggtactacaaaaaaattagagattcaactttcttcactaataattaacaactaagatttattgataaaaaaatgatatattattctagaagtattcatagatcaatcaaatgtattgataaaaaacatagatcaatcaaattttatgaagattggaaaaactcaatatggaaaagtgaaaaaagaaatatgtagtattaaacatatttatttaaaagcatgtaagccaagtctaattacattaataaaaaattaacataaaaaaatgtatcccaaacattcagtttggaaaat

SEQ ID NO: 222347 - DNA, 408 bp, Glycine max
  unsure (1)..(408): unsure at all n locations
gttgacggactataccaagctctaggtaaccaggacggagaatgatctatatataggcttgctaagggtagagagaggaagactagagatttggatcaagtaaagtgtgttaaggatgaagaaggcaaagtcttagtgcatgaaaaagatatcaaggaaaggtggaaggcgtatttccacaacttatttaatgatggatatggatatgactctagcagtctatacacaagagaagaggaccggaactataagtactatcgccggattcagaaacaggaagttaaggaagcgttgaaaagaatgagtaatggtaaggcggtggngccagacaacatacctattgaagtgtggaaaactcttggagatagaggtcttgagtggctcaccgaactctttaacgaaattatg

SEQ ID NO: 222348 - DNA, 398 bp, Glycine max
agcttgtttgaaggatagattctcattatacaaatcttgcaggaactagctcagcaaaggccaattatgagtgtaaagcagttcattgagaaggtggcctggcctggagcccgaccttcttttgtgggggataatgaaaatcctacattctacctacgcttctagcacgatccatacatcacaaggaaaacttactttgatgcagctacccagttcaagaagacttgttcttttcttttatcaaatatcatcttttgctctttctttcacatactcctttcgaatttccactatcttatcctacatgccacttcagttctcctattacaagattatctgctatataccacatcttgcgcttcatcatgtttctcattgcaagcacgtagtagctaatc

SEQ ID NO: 222349 - DNA, 374 bp, Glycine max
tctaagcttgaagatcaaactcctttctacagccaagatagttagagttaagccattgttagcaaggagttagaattgctaatccaactaattactaagtgcttgtttagcgtgtgtttgtttttccgataaacttgtagcaacatgaagttcgagactacttcagtatagaaagataggtgttgttgcttctccaactttcccaagggagaattaggaattttttaaaagggaatcaaaatgatcttcatatagttttaccggtgatccaaacacacttagttagcattcaaaactaagtttagagcatccgaaacttattttacaacaacatttatcttaacaaaagacttgtgactaaagtaatttaatat

SEQ ID NO: 222350 - DNA, 349 bp, Glycine max
  unsure (1)..(349): unsure at all n locations
agcttacatcaaggaattgatggtactctntgatgatatatcatctcaccatattcctagagaggaaaaccaagtggtttatgctcttgccactctgtcatcgatgttcaaaataggccctcacatagacttttcgtgcatagacatcaaatgccatattaagcctgtacactgttgtttgatagaagaagatgaggatggtaacccttggtatttcgatatcaaaacatacatcaaggacaaggaatactcgtccgaggcctctgacaatgacaagaggacattacagaggttggcagccagtttcctcctgagtggcgatgccctatataaaagacaccatgatatg

SEQ ID NO: 222351 - DNA, 307 bp, Glycine max
tgcatcactgggagataggaatgcttacggtgaggaaagatggtatggtgagcgttcgcggcggcgtatggtcgcggaaaagcagtggcacggtgtcgcgactgcgagctatgtttgtgagtgggttgcgggctcgtggcatatagtggatctctgtggcgctgtgcctgagtgactgactgagtgggtcgcggcatctagctcgatagtgagtgagtgagtgaattcacaaaacccactctcactctctcttcgctaattgtggctttgcttatttctacagagttcttcttctatctctttgatt

SEQ ID NO: 222352 - DNA, 298 bp, Glycine max
  unsure (1)..(298): unsure at all n locations
agctagannttgtgagttgatttagccttaatttcactttattattatcagctcatttaaaggaactttcaaagtaaaatgtccgattggggtttttttattattttattattatattattattttcagatattttgattattttattattatttttgctttttttatttaaccgaggttacgacatgaatgatcagttggattntattttaaggcggattaaacgagattacgacacatacgatcgattgatattcctttaaacatcgattaagtgaaattactgcttatacgatct

SEQ ID NO: 222353 - DNA, 472 bp, Glycine max
  unsure (1)..(472): unsure at all n locations
tatggatgatgaagacgcaagttttgtgtatcatatttcatacacagatgacagttctgtatgcttaccaacccatccaggatgcttctgcataataacagcaaaagcagtcatctgttctaagataatgaaatcaatcatggaagtatggttggctacaaaaacctgctcaacaaatgaagggaaactcaaattagtaataaatagcatttactctttctagaatatgcaaataaggataatacaacattaaacaaacctgctttggtctcctgctaggcctgggtccatgatacttaacaaccccagtccaagatgcaacaaagaaactgcacatcatctctaccaaagacctctgaaggaaatgaacaatntacaacacacattgatgaacaaaaggagaatgtgccaaagttaatattagaaaccaagaattgatatgagatagaaaagaaagaactttactgaatag

SEQ ID NO: 222354 - DNA, 375 bp, Glycine max
  unsure (1)..(375): unsure at all n locations
agctntataagtgcgggttcgggagacaaaggtcaagcgttcgcgatatgcgaagatgatattccgagtactttggatttggtacgaccatgctctcctgatttccagctgggaaattggcgagtggaggaacgccccggcatttacgcaacaagcataatgtaaacctttacggttttaaaagctctatagttgggcctaggctttagagttttcattttgttaaggctttgtgtcttttgtttttgaatttataaatacaaggatctttcttcatctgttcctgggctctacccattctcattcatttgcatgtttacttctttntctaaaacgacagattcgatgacgagtcctccgaaggcactaatacct

SEQ ID NO: 222355 - DNA, 446 bp, Glycine max
  unsure (1)..(446): unsure at all n locations
ctacgctcgctacccatggagttcctaatatctccacacttttgggtgggccattcttggatggccttgattttctcagggtccacttggacctgatttctaccaactacaaaccctaagaaaactatattatctacactaaaagtacacttgtctatatttgcatagagggtgtttttcctaagaactgaaagaacttgcctgatgtttagccttccatagacatcacaaatagaagaacaaacaaaattgcacatgagagagaagaacatacttgaagatatgaattatatacaaagaacaagtaagagaaaacgagagagaagagnttgatctaaaacttgcactagaagtttctaaaaatgggttctttttacacaaatgactgtaactaactaactaactaactaactctgaanatatactcagtagaaaacattatactc

SEQ ID NO: 222356 - DNA, 364 bp, Glycine max
agcttatgcaggcagagttcgagatgagtatgattggaacattgatgccttacttggactttaaatcaagcaaagcagatgaaggaatatacatacatcaaaccacgtatgtgatggaactgctcatgaagttcgagatggacaatacaatgtcaatgaagacctctactcatccaaccattgtgcttggattggacaatgtgtctaagcaggtgagtgaaactgcatatccaggaatgataagatctcttcgatatctatctacttccagaactaacattatgctcatcgtatgagaggcaacctaactgctccatggcatttgatagaagactccaagacgattatgccatagatgcatgag

SEQ ID NO: 222357 - DNA, 323 bp, Glycine max
  unsure (1)..(323): unsure at all n locations
agtacctgcagaatccaattttaattgctaatcttttccgaataatatggatcataatttttttaaaaaaacagaaatagtataaagattaaatatatgtaacttcccggagtaataaaaagtataaactgcaatgtgatcttacagaacatttacatatttctgatgtcaaatgatacgattgattatttgtnaatatatctcaataacaaaaggttatgaaaagagaaagaaaaagttcataattcacaagatgtgctcctcacttccagtgctgttatacatcactgaattaagaccatatttcactttcacaattgcat

SEQ ID NO: 222358 - DNA, 476 bp, Glycine max
  unsure (1)..(476): unsure at all n locations
agcttggctttaaaaagttcaccttaagatccgtaacaacttcaaagcacctcataattgcctttaatgtgaggacgttcattaaagttggttttcctaggaagagggtatcatccgcaaattgaaggatagataaagaaaagtccccttctcctaagggaataccttcaaaaaagatattgtttcaccgcttctcacatcaagtcaccaagaccctctgccaccatgatgaaaaagaagagggctatggaatccccttggtagagacctcttttacccttaaattcttccgtaggacttccatttatcaaaatagacttataagtgaatttcacgcaacatctaacccacttaatccatattncactaaagtttattctattcataatatagttaaaaaaacgtcacctagtgggcgcttctcacctaatccactctcaataagatgtcctgactattttcatacactctatcaa

SEQ ID NO: 222359 - DNA, 466 bp, Glycine max
agatattatattacatgttattcattaagaatgtaagacataatgaaggatttctattgatattctattacttagatatcaatgagacttatctctagaaaattgcttttgatcattaagattttatgaaattgtggattcatggtaggtgcatccacagtcaagcatagtaaggattttgcaagacatagtgaagctggttgggctctacactatgcaacataatggtgattgtaagttgtgccatgctaattaatagtaaccttagcacgtgtcacaaccagtctggggcaggtaccccactcccatatatgatgctagatatcaccactcatcatatcccattaactctctcaaggatcatgactgacttatgcacaaacattcttctatcataggatctaatgtaccttatttttgtaatatccttcactgtggaactgatacatgattccgcacattggct

SEQ ID NO: 222360 - DNA, 302 bp, Glycine max
  unsure (1)..(302): unsure at all n locations
taataacactggagtcgagaggaactcatttaacttgtctgcctctatcctgaccaaatggcctcttattctagcacatttaggagcttgatttgcaggactatagaaattggcatagacatctntaaccactggcacatcgatgctaatttcctgaaagtggcaacgcatttgagaacacttcgcctctacaattctactttaaactcatcaaactcagaatcgataagtttcacattcctttccggaaggatccttcggtctagaatattatcgatatatcggctccaggctttctctga

SEQ ID NO: 222361 - DNA, 438 bp, Glycine max
gcatctgtgtgcaatacataattcttggtacaccacaacacaatggtgtatcataaaggcgtaatataactttaatggatatggttatgagtatgttaatcaattagactttacctgtatctttatggatgtatgccttgaaaactgccatgtattttgtgaagagggatgctagttagacagcttctaagacgacttatgaactgtggacaaataggatacctagtataaggcatcttcatgtttggggttgccatgcagaaataatgatttataatccacaagagagaaaattggatgcaagaacaatcagtggatatttcattggttatacagaacagtttaaagggtatatgttctattgttataatcatagtatgagaattgcaaaactggaaatgcaaggttcattggaaatgatgaaatcagagggagtac

SEQ ID NO: 222362 - DNA, 257 bp, Glycine max
agcttcctcgaatagtcaatgcaggtcctctagatgtggatagtgttggagtcgtcattggagaagtcaaggcaaaagaggtagatctaggtggagtggatttcagatttggagaaagaaacatcaccaccgttggcaaggcaaactccacctttgccgcgagatacgacgttggcgaggcataggtgaacggagtctttagtcgcaacgacgcctttaacaatgagaagaagttgttgtcactatcgttggacaag

SEQ ID NO: 222363 - DNA, 432 bp, Glycine max
  unsure (1)..(432): unsure at all n locations
ngtgccatgtctaatccttacccttcatgatgagatttcactaacataaccaaccattgctagactagcaaccactggatttcaacaacctgccagtactcccattggactttcatcctaacctcaattagataagcaacaccactggatttcaacttgctagccactgttggacttataactgtaaaggggttctatggtttagactgcatagatacaaattntcaccttccaaagggcttccactcaggaagatacaatcttatacttncatactagatctattacatattacaagctcaatacagaagtgagttactcttaacagagagggttgaagcagaaattgcagatatctcacacagaggttagactcatgttttctcatcgaatgcttaacttgtctcaagatactcttcaacatgtctaaag

SEQ ID NO: 222364 - DNA, 333 bp, Glycine max
aagcttaacaaaatccctttaatcctcagacctagtctccaagagcaagagagaagatggagttctttcccctttgttagtaaaaaatgacgcacacccctagaaattctagggttgtgttgccttatgcagtgggtcttaatctagcttaaattaaggcccaattaggttaggtgtccttatcaaaatgctaataccttcaatcaaaaggtttttcccgctcgaatctatgctcttgcaatgctttatgggtagagttatgggctcttcacaaaggtatcaagctagtaaggaacttgcatctcacctatgcatttttatttagagatggac

SEQ ID NO: 222365 - DNA, 385 bp, Glycine max
taaacgataacataagatcaaaggtagttcactcttcttttctaagattcaaggctagatctaggctctatcagtattggttttcaaaaaataaccgtggatgtgagaactatggaaaaaaaggaattcacaacatgtagtttttttaaaaaaggaggagtttctttttccgacgcggcggcgccgccacccatggccggccagccactgcgccggtatacagcttccggcggtgtgtggttagagagagaagagagctttttaagcgtttctttagaaagaggaagaacatggatttatgttattttagggtttattatcgaatttatactgctgccatgaccaatactatggtgcacgcggatctcttgtgtcccatggacca

SEQ ID NO: 222366 - DNA, 432 bp, Glycine max
  unsure (1)..(432): unsure at all n locations
agcttatgcgcatatttccttacgaacgttcacttgcacaagacattctattaactaagaaaaatgcacccatatacaatcaaggcagcttcgttacctagattatttacatgtacttccaaggtgtatttgttacttacatcacacacatttcttttgctaaattcacatacatgcatactctaagcactntggctatcgaaaattgcatacgtgcacatcctggtatttctaatacctatacatacacaaactttatgataaaccttgactatctacacaataaggtgttacatttcatgcttctttttttcaagttttttttttactacctanagccgcatgcaaactcaagtatatnttcttttgctcactaaaattgtattaaaaaaaaaggtatcnttgtaatggtattcatgcaacatatttata

SEQ ID NO: 222367 - DNA, 446 bp, Glycine max
  unsure (1)..(446): unsure at all n locations
ntatgtatcctcttcttattttataaaagttgccatttgaaaaaagaacaaaatcaagttgttctctttctcagttgatttatttattataattcagatattttttaaccattgtagttatggtgagactcgatgtatccccaaaattcggtcattcggattcaagacttaggtcatctccaatgaaagatgcttcatgagtttttttctaaaaatattattgttggagtaagtctaattggcattgccggtatttaagttttagcatgggtatcttacaagcaggtatcttaagctttgatcattggagatgtcctagtcacattgaaataaaactcaaattcttctttttcttatataaactcaacatatgttatcaactgaattacatttgagtattctgaatcgagattaaatatttttatggattatgctgatacacgaat

SEQ ID NO: 222368 - DNA, 395 bp, Glycine max
  unsure (1)..(395): unsure at all n locations
agcttagtgcacagtgactttttgataaacataacactgcagcatttggaggatataaaacgaggcactatgcnttttggaggaggttggtgaaaggcatgctctgaagcaaaaacatccactttgggagcttttcttctgtcattatctttcatttcctctgtttcatcttttgtttttgagctnttcatgactatgagagactaaattacccattgttgggggctcggataccaaacactctttgatgtaatgatttttactatccatctaatgttatgtcaatatcactgctccctttctaagaatatttccttggttatgcgttgataactcatctacatgtatgttataggcgtctaatcattggaaaatgcttttaacctaaaaacttg

SEQ ID NO: 222369 - DNA, 461 bp, Glycine max
  unsure (1)..(461): unsure at all n locations
ggccgctggagctgacccatcaactgccctaactccttaaggctggtgacatctaggtccttaatcttgacttgatagaatctttttacgatttgagttgtccccatcattaacctaaaaaggggtgaatcaatgctctgatatgaatgatgcaatgcacatgcatgaaatgaaaagaagaaaaacaagtggttatttacatatactagaccgacaaagatccatctntttaatactacgctctaggcattgcggcgccccaacgtatgcattaaaaagtgacacgttacactaaagagacaagatatcactagatatacagcaaaaccataatttatgtgctattcacagaagaatgcatgagaacaaatggtacagagcgtgcttgctccatgcccctatatgggaacctataggataatatctaggggtatctaataactactcccaacgatccatat

SEQ ID NO: 222370 - DNA, 459 bp, Glycine max
  unsure (1)..(459): unsure at all n locations
agctntaaatatataatctggctttatgttaaaatttcatatttttcatctaatacattaaaatatgcaatatttgagaacaaaaaaaatgcaatattttagtttattttaacatagacaggttagttaatagtttttctatatatatatatatcacaagacatgatgataaatagttaacttctttaagttattgtcatagtttaatttaattttttttggacgtaggcacgtagccatagcttaattttttttttttacgcagtcatagtttaatttctgagcatgtgaatgaagagaatcttcttaacagaaataaaatccacttaagtaatctcattatctcgaaaagaaattgtgatgagatatctttagtgaaaaaagttctacatactntaaaatgtttntggtaaactagttaagaaaccaatagtgaattagcatacacgaattaaaaaa

SEQ ID NO: 222371 - DNA, 456 bp, Glycine max
  unsure (1)..(456): unsure at all n locations
tataganatcaaacacgataataaattatcctcacattataatagaaacatatgtgcataaataacaaataagtcataagtcatcaaaacacaaatcatttgtctaagtaacttgcatctagaagttctaattctcttctaatggtgtagaaagagtctttggttagtggttttgtaaagatgtctgcaagttggtttttagtgtctataaattttttaaaacacaatcacctttttcctaagactaagcgctaattgactatcaacacttaccaagatgagtttttattatcataaaaggttntatcatatcaaaataattntgtttgaaatacaatataataattttgaaaagcataaaaaatattttgaacaatcaatcaagtaattcaaacatatcanacaagaattatacaaggattgaaggatatagatcacaggcattatcaaacattc

SEQ ID NO: 222372 - DNA, 350 bp, Glycine max
  unsure (1)..(350): unsure at all n locations
agctagtataatggctatacatgatacatgtcatggcttggttnggatcaagggtaaaagggatgccccacattattttcatgacacaaatgcagaaatgatgatttggaaactctatgcaaaactggtcatgcatgcatctatgcggacactcacatgtcaaaattttatggtcatgtgatgctagggctcacgattcatttcctctatatataaataacccaatgttgccaaaatatgttcttttatcaatgtgtgcattcatccgagtccatttcgggcgtccgggaaatttacagcattcactcttatgcgtagacacattttccataaattggttatgatcaatg

SEQ ID NO: 222373 - DNA, 375 bp, Glycine max
gtatatggacgaaagtgcaatactcctatctgttggtacgatgatggagaagcactacttcttggacctgaaatgctacaacagattaacgaacaagtgaagttgattcgagagaagataaaagcatctcacgataggcagaagagctattatgatagaaggaggaagccactagattctcatgaaggagaacatgtgtttttgaaggtttctcccatcaccggggtctgaagagctctcacatctatgaagttgacgcccaagtatctaggtccatatcaaatcttgaagaaggttgggcctgtagcttatcatatcgccttacctccgagtgtatcaaattcgcatcatgtgtttcatgtctctcaactgaga

SEQ ID NO: 222374 - DNA, 207 bp, Glycine max
  unsure (1)..(207): unsure at all n locations
agctntgatctaattcaaacgacaataactctttactcggatgtctgatagagtcccgtatatatctagacgatcggacatgcattctgaagctctgagctaatatcaacgacaataacgtttagctctgatgctctgatcgagacctggtatctaatgagacgctcccaattgaattatgaagctcatagcttattcaaacgacaa

SEQ ID NO: 222375 - DNA, 433 bp, Glycine max
atatataggttccttccaaactcttagttcgtagtagttgaaaatttaaaatgagaatgaactaaacaaatattatattaatttttaaagttttagtatacattaatttgatacaatcttctataatttgttggtgaagcaaacaaagtactaaaaaaagaaatcaatgttttattagaaatattaaaattagattttttacatgcatgcaatgcaatgtttacataatattattaataatactagtaattgttttcattcttaaaagaaaattaaaattattttttaattaaactaacttgagataaattatattgcaaagatattggttaaattacttattgttgaatgaggtgtttaaattgatcgaacgagatgtgtgaattattttattattaaattctaacttataaattttaaatataaaattgtt

SEQ ID NO: 222376 - DNA, 357 bp, Glycine max
  unsure (1)..(357): unsure at all n locations
agctngcttgtggagcttctatggaggctggatctttgagcttcaatgaggtcctttaatggtgattttccaccatggagatgcagcggaagacaaaggagaagaggtaagaggcggcaccatccactagggaataagccatggaagaaggagcttcaccaccaagatgagccttggataagaagcttggagaggatgcttcaatggaggaaaagaaagagggagagaaagagagagggggggagcatgaaattgaaggaagaaaaatgggagagaatgtgaactctgagttgtgtctcacaagactctcattcatcaaagttacaacaggtgttacacatgcttctatttattgac

SEQ ID NO: 222377 - DNA, 444 bp, Glycine max
  unsure (1)..(444): unsure at all n locations
taagcttcctgctatggatgtgttcatatgcactgctgatgcaactaatgaaccaactatggatgtgatgaacacagttatatcagccatggcactggattaccctcctcagaaacttcatgtgtatgtntcggatgatggagggtctccattgattcttcatggagtgagggaggcttgtaagtttgctatgtggtggcttccattttgtagaaggcacaaaataaagaacaggtgccctaacgctttttttttttattcacaaatgttagtagttcatattctttgttagcagaggatcaaccccatgaactttttctccttctcttctcccttaaccattcaacccatcttatattatcatgtgtcccaaggcttacttctctgctttgaatgataatgatgatggtgatcttgcaacgagtatgtgttgtcatggaagat

SEQ ID NO: 222378 - DNA, 274 bp, Glycine max
agcttggatgatgactgcgatgatgaaaaggcatgtcccatgactcccatccacatgggggctgctaacagcaataacagcattgaagaggttgaatctgatgacaatgtctaagcaatggaatctgatgacactgttcaagcaatggagtttgatgacaaagtccaagcaatggaatccgatgacaatgtccaagcagcagaatctgatgacaatggccatgctgtggaatatgatcaaggaaactggcaattacgttttaatggtgccccca

SEQ ID NO: 222379 - DNA, 474 bp, Glycine max
  unsure (1)..(474): unsure at all n locations
taaatggattttttagctacataccatagactntagataatcttaaacaaggttttntggttgcaccgtatggtgtttcatcaatgtttctatttagaaacgagatatttacatccatctatgcaaaaaattatcaaaatgatctacagtgtcattatagtcctaaaaagtttttctaagaaattagagagaaaatctctttgtgaagaatgccttccttcttgtaaaacttttggcttcaggacaaactttatatatctcaatattacccattgaatcccttttgactatagatatttatctacaacttatgggtttcacactttcaagcaatttgacgatatcccaaatgtcatgttcaaccatcgattttattacattatntatggcatcaatccacttgagagttagagcacaacatgacttgactaaggtcaattagaccttcttagtcaacctaatatcattattatg

SEQ ID NO: 222380 - DNA, 471 bp, Glycine max
  unsure (1)..(471): unsure at all n locations
agctngcatgaattcacattctcccctttctcaagcaaattcttcttgacatgatcaagatcttcatgatttacattctcccccgttttgatgatgacaaccacctgtaggttaggagcaaaaacaaagaaaaatatctgaaattctgataccaatgccagatgtcgtacaggatgtcacgacatcacgcttcagaacatgcagattatatttgagagtatgaacagattaaacaggtaaataacacaagagaattgttaacccagttcggtgcaatgtcacctacatctgggggctaccaagccagggaggaaatccactaaaatagtgttagttcgaagatctaacagccactgtttacaaccttctcacctaaccactacccgtgcaatctctacctaagagccactcttagatatgagaacccctctcactccctctcaatcactcttccgtgtttacaaataaatc

SEQ ID NO: 222381 - DNA, 439 bp, Glycine max
tgtatatatatatttcataaattgagtctttttattcatgggaaaaacaaagctcagaaattgagtttgatctcaagctatggtggttgcattatatttttattcccaacaagttaatgaccaaaaattgatgatttggattaaagagtacaacgtttatatatttatgagagaaggccaatattatgcttatgagacggtgatactatgtgcacccagcattttaagtgaatgggcgataatgctcttcactcaagttgatccgtgcgagtcatataaattaatttgatccgcatgaatcacatggttcaacttaatacatactcatacggatcaacttgatatgtacgactcatatggatcatattgatccgcatgaatcatacgaattttatacgaatcaagttgatccgtatgtttaaattatatttacggatca

SEQ ID NO: 222382 - DNA, 417 bp, Glycine max
  unsure (1)..(417): unsure at all n locations
agctntacagcccagacacctcaacaggtgagacccgacgaggctactcctcttgagcccacacctgcacaggtcgaaccagtgccaactaatccaccatctccagtggcggatccatcttcttccaagcttgaagcagctccctcatcttcacctattattattatctctgaagactctatagagtcagcatctggatgagctactactccttctgctacccctgttttccatctaacagatgaggaggatacacaggaccagtcacaggaattctaaattcttgatttttcctttctggaaattattataactactatggtttagtacatttttttttgtgattttggtttataattataattatatacttgcgtttttcttgcgaatacttagagtgcatgctttgaagcatac

SEQ ID NO: 222383 - DNA, 380 bp, Glycine max
cttgagccaaaatcctgactcaccataaaccttgacccagggtgagaatgtcaatccttaccctcggaagcaaaaaaaagaatagaagggaaatttccaatcaaagaaaaagagaaggaaaatttccaatgaaagcaaaaaaaagaaaagaaggaaaattccccaatcaaagagtgggagaaagcaaaaagaaaagaaaggaaattcccaatcaaagaatgggagaaagtaaaaaaggaagaagaagaaggaaagaaagctcctgatcagggatcgaaggaaaaacagaagaaatgtgcagagaggtctttggaccggacaatatctgaacaatacagaattgtcaccgaatgaacaaaaaagaaggaaaggaaaccacg

SEQ ID NO: 222384 - DNA, 364 bp, Glycine max
  unsure (1)..(364): unsure at all n locations
agcttgcaaagatattntatgggccctaccaaatcgtggaacacatgggcaaaactgcttacaaactccangttgtgaaagatgctcgcattcatccagttttccactgctcattacttaagccctntcatcactccaccatagagcccatcacccatttacctctgcctgtcaattgcatgaactgccaacctctgattgctcccttggtaattctgggttgtcgctgtaacacggaaaattcaggtgttggtgctgtgggacgaccttctacctgaagagacatcgtgggaagattgagagccattgaaagctaccttccaccttaaggacaaggtgcttttccaagccatgaggaatgata

SEQ ID NO: 222385 - DNA, 361 bp, Glycine max
  unsure (1)..(361): unsure at all n locations
ntagatcaattcaaatggtcataagctttcactcggaggttcgattcaggcgcataatatatcgaggctctcgaaatatagcaacggaagctctcgagaaatttaaatggtcataactnttcactcagaggtgcgattcatgtgcataatatatcgagacgctcgaaattgaacaacggaagctctctagaaattcaaatggtcataacttctcactcagaggtccgattcaggcgcataatatatcgagacgctcgaaattgaacaacggaagctctcgagacaatcaaatggacataactcttcactcggaggtgcgattcatgcgcaatatatatagaggcgctcgaaattgaacaac

SEQ ID NO: 222386 - DNA, 440 bp, Glycine max
  unsure (1)..(440): unsure at all n locations
agctnggattgatccagtctaactatggatcgaggtttagtaatttaggctacaacatagaacacaaaagcatgattgattagagaaacatccttatatgcatcagctggtttgttggaaagacccaacacttctacctactgctgtcaattttacttacttgcatttttattgtttttatcctaaacttagtttaattctgttttaaaccatcaattatcaatgtttctttcaacaatgtcttatttctgaatttaacccggtcttagactagttccctaagtttgatactcggattcatccattttaattttaaatacttgacgaactggtgcgctttntggcaaaccagatttcccttgaacatatttgtataaaaaaaaagtgaaccaaaaagtaactacaagggaaatccatcatttccctttcacacacctaac

SEQ ID NO: 222387 - DNA, 321 bp, Glycine max
ggccgtgtcgtcgtcatttcggcctatacccattccgggctcatatttgtccctctacataacccaagccaccagtaaaatgtggttacgccaaatgagattccacataagcattgctcataattcccagtgcttggaatgatgttttcaatgactcttctgcagactcaacataaagcgtagaggatggacaacttaccagtatgtcttcctcccctatcttcggactgcaaacttcaatatgtgcgctactcatcactgcttgtagcagctcctctgccataggacatgtctccacattgtgcgatgtccgcaaatgta

SEQ ID NO: 222388 - DNA, 393 bp, Glycine max
  unsure (1)..(393): unsure at all n locations
agctnntagcgatttggactagcgaactaaccgattgagtccaccacatctgatgaagagcccctccaaagcccttcggtcctagaacctatgaattccactatcaaattttagtttcttgaaacctaacacaagaaaaactttgatatttaggttcaagtacaacatcagttctcataaaactgatgttaacgcacgacactcaacattgattctacataagaccgatgttgagtacaatactttacatcagttcttttaaaattgattttaacaacttccagttattttaaaaaataccactgtgtatttgttaacatcaattntcatattaaccgatgttaactgagcgatataatatacatattttttagtagtgcaaacacaatttaa

SEQ ID NO: 222389 - DNA, 465 bp, Glycine max
  unsure (1)..(465): unsure at all n locations
ctggtgtggacacctacaacaaattcgatacccaactcaatatatagagagaggaagataaaatgtttgtatgtacctaggatttttttttcaacttacactacaagaaaaatgccttatacctacaaacacatttatctacagacatgaattagtgtaggtaaactttaaaaatactttattacctaccattgtttaatgtaggttaaattcaaagacttatacttacagtttttagtataggtaaatcttgataaaatataaaaaaaattacctacaactatgtagtgtaggtaaaaccttattaaaacttatacctacagccaaattgtaggtaaaataaaaaagaattttacttacaaatggatggatagtgtagataaattaatggagatttaagatactactagtatttaattngaattaggtgtttactcttactttaattgtcattgtcagcttctg

SEQ ID NO: 222390 - DNA, 382 bp, Glycine max
  unsure (1)..(382): unsure at all n locations
agcttccatcaagtggtaatcagagcacaagagtttcaagtaggtgctccttanacctccattaattntttttctttgccttctcttccattgttgtttcttaatttttctccatgtatctcctcacatgtcttgttctaaattttgttaacatgattctttagagtttccaccgattaaacttgctatagaagttagatttgattttctatggctcaaatttcttgttcttgttcttgaaccatgaattgtgctgagtttaggttcctttgagttttgtcttgctattttctgaggctgacacctaacccatataattcttacttacatatgtaatctgacgaatacctcataactctagcgtgacctgttcacctacttg

SEQ ID NO: 222391 - DNA, 436 bp, Glycine max
  unsure (1)..(436): unsure at all n locations
gctattacggacactatgaatctaagcttanaatcgaaactaaccggtcgaaggacgatgaacgatgaataacgaacgaagaatggcaaagaacattcacaaatttggttacagaaatgttatggaagtgcctcggccttgattttcttcttctctctccttcttttcactaattttaagtgaaatatgctttccctgggtgctgaaccccttccttcagcctctcacgccctttttatagccaaaataggggaggagcttgctgctcagctcgcctagccgagctagtggcttaagcctgaagtaacatgctcacccaggcgagctggttgcttcatgtagaagcttcctgatgggtgcagggctgaagaacaccccctaaattgatcagttcatccctattttgagttgttggcttatttccttctgaaacatc

SEQ ID NO: 222392 - DNA, 401 bp, Glycine max
  unsure (1)..(401): unsure at all n locations
agctnnttacaaaaggttcatcaagtcatagtgaaatatggaagtaaccatcctgcaaaattggggcaaaagatgaatcgagtcacatcactgcttcgtctactgccaaacatatttaggattggtgatgtccttgttacttccagtttcaccttgacaaagatgtcatggaccatgttgaaaatctaaattgattcaaccccatatcctgcgtaaaaattcgcaatacttcgactgtacatcattcgcatgcatccatgcttttcattggatgcattgctcgttgcattctttccttgaaaaataaaataaaatgaacttaatcattgttataaaaaaagaaagggacacgctttacgacgcccttaccgaactcgtgctatagctagagtaatgggtga

SEQ ID NO: 222393 - DNA, 465 bp, Glycine max
  unsure (1)..(465): unsure at all n locations
nggagtcaagcttgaaaatgatgttctcaccttgaattctttatgcccattgcaaagcatgaaggagtctaagagcttcagcttccctcggctttgaattaccttgaaagactaatgatttagctnttataaattctccaacatggtttctaatacacaggccaacaccaaaacactaatggtcattaaaaattgtgacatcaatattgcatttgaggagtgattgacaaggcttctcctgatgttggaccatattattattagttggttgatgggcaattgattcgaacaaaccgccattcatggaggtattgttgagcttgagaaactaagatctttggatgaacatcagcatcttcctagatcttatcacttatcctcctctacatgcaccatatagtcaaagctaaagactcattctcataatctactcagtccctcaagagagtgaaagttcaatcaata

SEQ ID NO: 222394 - DNA, 312 bp, Glycine max
  unsure (1)..(312): unsure at all n locations
agctnnnttgaaagacacatctcttcaaaccattttgaanaggtacaatggacatatatacatgtgtgtctgaatttgaaaagtaagagagagattntaaaaagagaactttattatcaaatgttctctaaacaactattggccaaacactcgcaaatcaattgaatattcttctaagattntcaacttgtattatcatctctaaaagagagaaattcttctgtatattctaaacattggtgtgatcaagagaatgtttgtctcttgacttgtgagaatcttgaacacaagggagacggatcccacgatgtg

SEQ ID NO: 222395 - DNA, 425 bp, Glycine max
  unsure (1)..(425): unsure at all n locations
ntccttgattaagagcgtcatgccccatgcatgaaaaacgcgtagagcatttttctgtgtcgcatattgcattttgcatagcatgaaatgaatttagcctatgctatgtattttataatttttggttacccttctgttgtgtatggcacaagtaattagtaatttgaactctttaagctaatatttgatatggattatattaaatttctgggtatgtgaggagagtaacacacttataaatagaagagttctttttattaactagtactctacatttttgagagattagttttacggccaccgatgatagatatgtttgaatctaattctgaatctaaaaaaaagaatntagtttaaagtcgagaaaaatattattctaataatnttctaattatcatgtatattaattcttttctattaaatac

SEQ ID NO: 222396 - DNA, 327 bp, Glycine max
tgcaagctgcatggtgaatcataggcgactcaatggtgcggtgatgatcactaggacgatgacaaaagatggtgacataggtgccgacaaagagctcattgaccgatccaagctctgctcaggtgaatcgagacaattcatgagctcaggatgcgaatgatgatgaattccagactcatgaggatacggtacattcctgaatcaagattcatggttcaagatctcaataatcacgatcctgattctcgactcttgattcatgaatcatgagaacgcttaaccaagataagtatgacaagtttttctcaaatattgagtagcacatga

SEQ ID NO: 222397 - DNA, 412 bp, Glycine max
tctgcaactgactcctaacatgagatctatcattttcaacacgggcatgatctctcttcattgcaacaacagtgtaataaacaatcatcttcccaaacctatcatcatcatacaaagccttcttacccttctaacccttgtccatataacaaaccctatgaactggtccaagtccgccgccgatgaattcggtacttctgtctaaaagcaagagttgttcttgctgaacacgtattctagcgtcttcaagtcttggatttcactcatcgcctagatcaagtttagaaagtcattggcagtggcgaagccgatgttcatcaggatcttgatgttaacaattatgggtcatacatacatacatacagtacatcacacacactcacacgcactctcacacacacacacatatata

SEQ ID NO: 222398 - DNA, 326 bp, Glycine max
agcttgtcacacccaatgtccacccttaatgagttctataggcttatatgccacgtctccagtgcgtgccactccacgagtgacacgtatgcaagagcacgacactacgtctccagtacgtgccacttcatgagtgacacgtatgcaagagcacaccacaacgtctctagtgtgtttcactccatgaagtgacatgtatgcaagagcatgccacatctgtagtacatgccactccacgagtgacacgtatgcaagagcacaccacaacatctttagtatgtgccactccatgaagtgacacatatgccagagcttaccaccatgtc

SEQ ID NO: 222399 - DNA, 359 bp, Glycine max
tagagatagtaactaacatcttgactctacaactttgtgcgcttagtgaatcttggatgatggtaaataatctaaatggcgatatctatgttaagaaaccaatttccaaagatacttcaacaaaattggtgcaccagggagaagtttacaaccattgaattcatctacataccaggagataagaacactagagttgacttactatccaaactgtgcaacattgatgaacaacaaggaatgtaggatgtcatacaacagaccattcatactcacaagcatagtactgctcatcgaaagtcagacaagttatatcatgtcaatattagaatacatacaggaagccatttgctcggaggata

SEQ ID NO: 222400 - DNA, 127 bp, Glycine max
aacatcaaagtgaaacgacattcaaacagcacaagctatcacagccaagcaaaacagagcaaaggcagagaactctgccaaaacaccaaccaaatcacaagctttctcacttaaagactccaataac

SEQ ID NO: 222401 - DNA, 445 bp, Glycine max
  unsure (1)..(445): unsure at all n locations
agcttcttatctaaggcactcttttggtggtgaatcttcttcttccatggcttattctctagtggatggtgcctcctctcacctcttctcctttatctttcgctataactccatggctgaaaatcaccattgaaggaccttattgaagctcaaagatcaagcctccatagaagcttctcaaccaagcttccatcactcatgattgtcatgtatgaatgcaaaaactatntactgtagcaattcgtggtatctttcctgacaaagttagggttgccataactcgtctatgctttctttntaatgctatctatagcaaagtcattgaccctagaaaattggatgaattggagaatgtggcttccattgtcctttatcaaatggagatgtattntcctccatcattntttgacataatggttcacttaattgttcatctggcgaggga

SEQ ID NO: 222402 - DNA, 533 bp, Glycine max
  unsure (1)..(533): unsure at all n locations
ngccgccagganaatgatacctgatgacgctagcgacagactgncatgactcagcggtgcactgtatagcagatagtgtacaatccgtcttcacagatggtactctttcacaatttacttcagaagaacatggtgctgaagaatatttccctgcccgatgtcaatgatcaaggcgagtaggcccaccactatgagatacccatctgtggagcattggcatgacaatgcctacctctggtggctaacaccatcctatagttgtatttgtagtgggagacataggcttaacatacgtgtgattaccatattattctaatgaaaggaaataggcgaaactagctgttcgcgaattcaccgattgtgctagtgtttggagggatcaacttatgacttgacggctcaagactgatgataggcctattcgttgatgagaggagatgcatattgcttacgatggagatttgacctagacactatcatctggatctcacataacctgccactctactcaagattctgaggtgaggacactc

SEQ ID NO: 222403 - DNA, 443 bp, Glycine max
agcttacggtccatgacctcatacattcgctcttattgggtatatcccactagttttcttcttaaaagcttgctaattttatgccatgcagataggctatatggaagtatccacatacaacagagggaagttgaaagggcgtagaaactaaacatatttcaagcgtttcactttaacgcacaattgtctaatgaacagagttgcactcatctacaatttcaagctgacgtacagcataagtatccatttccctcgacattaactcaaattttgtgtacagaacataaaaatatttgttactaaatactgattctgactaggacaggatagccatgacatctgaggccctcaaggcaatgtagacagaaccatctctgcccttgaagtcattcgctgcatatctggagtacagaactgtattcccaggcatgacggacaatggc

SEQ ID NO: 222404 - DNA, 457 bp, Glycine max
  unsure (1)..(457): unsure at all n locations
tgtggcaatgctacagtactgacaacattatacgccgctcgctatcactctccanatccatatagccaagagcaatgtgagttaaattgtgaaattcacgcatgtagtattgaagatatacctgcaagggttacatcaaaacaataatctgtcagtatcagaatcccctgttattcttgaaaaagcggaaagtaatgacatagaaatctcacacatcgtatccaatctatgctcataaactcaacattgttaacaacttctaatggaaccacagcatcgggtttatggatatgggctctgaccaacttgcgcaatggtttaaaccgagcttgaattccttccatatcatcataaaattcatcgccatgttcatcgtaaatacagcctaaattctccgcattcaaatcctcaagattaggacactcacaaagaagctcagcagaatgcatagcactta

SEQ ID NO: 222405 - DNA, 461 bp, Glycine max
agctttctctctagtagttttctgtttgatttatagattaaagtgaaaggaaaaaatatatataaaaaagaaaaaaatatataagaaaataagatgattttttgaattgtttaataagagaaaataaaaggaaaaatattttaatgtgttaaaaattaagaaaacaaaaatattgtacccaaaatgacataaacaccctgaaaacaaaatgaaccataatatgtataaaatgtcattttagtctttttattacaaaaacttattttctacttttttctctctctccaatttgaggagatacagatgaggaaaacaaacaattttctctccacttttgctacttaaatttttctttcttccttgttactagatgaaccaaatgagggaaacaaacagaattaataagttttctttcctttactttctaggataaattagtttgtagatttttattctattac

SEQ ID NO: 222406 - DNA, 477 bp, Glycine max
  unsure (1)..(477): unsure at all n locations
ngtatgtaatggacgatgtcatggtttcagccaaaataaagtttgttattcatcgcctttaatagcgagccagctaatagctatactagcttcctgttgagtattgacttgctcatgtcaagaatttaagaagcatcttccacatgattaaaaagaaaaggtgtttaattttgtttaatgtgctaatacctgtaggttcttttgggataaataacacctatgatttttctgaaagtcagaaataaaattccaaattgtgtctaaggtaacttgtagtttttgcttaaattttcaataaatatatagatggagaaaaaatacaataatttttcaagtttctctgttttcaattcttttccattaattgaggtgtataaattaattctaacctgtaagagaaatctgatttattctattttcttatataagtgttngagtagttctcaaatttactctaccaatggttaaatatctgac

SEQ ID NO: 222407 - DNA, 449 bp, Glycine max
  unsure (1)..(449): unsure at all n locations
agcttctggtgggacatcttgacttgctttccattctgacattcaccacagattctgccttcttctattttcagattgaggatgcctttaacagcacctttgtcaatgattttcttcatgcctcttaagtgcagatgtccaaatctttgatgccatattctgacttcatcttctttggaggatagacatgtggaggagtagctggtttcttggggtgtccataggtaacaattgtcctttgatctgctgcccttcattagaacttcactcttctcatttgtcaccaagcattctgactttgtgaagtttacattgaacccttcatcacacacccgaccgacgctgatcaagtttgcagtnagtncctttaccagcagtactttgttcagactaggaagtccatcatgagctagctttcccattccaatgatctttcctttagagccatc

SEQ ID NO: 222408 - DNA, 467 bp, Glycine max
  unsure (1)..(467): unsure at all n locations
ggataggttgacctatatatatgtatatatacttatattattttttgggtaccaatatatacttatattattctttaggtacaattaattatttttttgaaacaagtagactttgattacacattactgttccataacttccattcctataatcaagtaagactttaattacaatttaggtatgagtcatgtgtccctttatattcctcattatttttattggctttcctattcctgttaatgtttccttttcctttaactttcctattaagttcctactactccatagcanaggaatattaatgtgaagaagacttttaaaaaggctatcaggccaagccagactnttaaaaaggtcaggtcgagccaaaataaaagcanttgatagactataggctaggctcaggcctcanaaatttattataggctaggctcaggccttttaaagtctggtctgacctagtcta

SEQ ID NO: 222409 - DNA, 446 bp, Glycine max
  unsure (1)..(446): unsure at all n locations
agcttctatataagctgaaccattgtatcaatatacacaagttgagttttattcagaaaattagagtttatctcttttatcttggtgagagtgattctcctaaattcttgagtgattcaagaacaccctggctgtatcaaaggactttcacaacctttgtgtgttgccctcgctggaaagagtgattctttccttcctatcatctccacccttgttctttcaaaccacaattccagaaaatccacctctgcccaaaattatctcgtgaccataactcccattttacacactcaaattaagtgattcttgagcctaaattgaatttcaaaacgagacctttcacctcgttttggaatcacctcatttggagccctgtagcttccgttattgccatttctatatttctgtccagccaccacttaacctacgttntaccatcccattca

SEQ ID NO: 222410 - DNA, 466 bp, Glycine max
  unsure (1)..(466): unsure at all n locations
cccatcacatgtggtactatgtggcggtcgggcgatggtgcacaacaagttttccacatccacaaagcgcgcataaacccaccatcccctgttgcccacctccaactgagctcacgtactcccacgtagcccatatactcttttctctcaacaccgggtccccatcaatcctcccaagctttcccaacatcaaagtaaaacgacattcaaacagcacaagctatcacagccaagcaaaacagagcaaaggcagaaaactctgccaaaacaccaaccaaatcacagctnttctcacttaaagactccaataacaattccttcgttccggttcattaaccgttggatcgactcgaaaattntactggaagtctttagtacataagcctacattttgaccgttgtgatctactagcaaacatccagaactcgatttacattactcttttcacaaccagcaaatacatag

SEQ ID NO: 222411 - DNA, 531 bp, Glycine max
  unsure (1)..(531): unsure at all n locations
gggcccggggatgatgcttctatctctgtcgcgggatccttagagtcacctgaggcatgcaagctaggaaggtagtcatacctcacaagatatatgtatgtgtgtttaagtagcgaaaataccttggatatgcatgtatgtaatttaggtggcaaaaaaaatacctcaaaatatatatgtgtgtgtgtgtgtgtgtgtgtgtgtgtgtgtgtgtatgtttaagtagtaagataccttggatatgcatgtatatagcaaaaatacctcacaaaacatatatatgtatgtttaggtagcaagataccttggatacacatgtatatagcagaaatacctcaaataaatatacacatgtttaggtagcaaaatacctcatgaaaaaaaaaaacacaagcggacgagaacaaanaatatatctttcggctgaaaagccagcacacttttgaaagaaataacttccagcttttctttganaaagattcaccgatcataacaccagcttttgaaaaaaatgtgtatgcacctgaaggg

SEQ ID NO: 222412 - DNA, 350 bp, Glycine max
aaagcatttctttcaaggataaaaacaaggtccatgtaaattaagaatagctatccacaatcactaaggcataatagttccctcctatactcatagttctaaaaggaccaaacaagtctaaatctaagagttcaagcaatctagaggttgaaatcatatttttagatttaaaagaaattctagattgctttcccttttgacatgcatcacacaagtcatccttcccaaacttaaacttaggaagtcccttaaccaacttattgcctctaagaaactctgagatcaatacatttatcttcccgtgtttgattaccactaagcattgatataaaactaagtctaaaacaaaa

SEQ ID NO: 222413 - DNA, 595 bp, Glycine max
  unsure (1)..(595): unsure at all n locations
agcagatcgcctcatactaaacacatgtgctcaaatnantcgtaaatntcctctcntntntttnnnnnaaggcggcgcgcgatganacgagaccaagnannaccngacacnaannanacngaagcccacnggcacnnccataccaactacgcgggccctttacacttcatcaaaaagaggccatcaacagacgaggcataccatccaaacccaagaaacagcatacgcatgcacccatataaaagaacgtatgaaccggataaaacgaaactgtgattcacaaacgtcacagccctgagctcaagttgctcccccgcgctatctaactcccttgaggtaacatacacgcacacacacacatatccaactatttcgaggcgcacatcacgataacgctactaaattaacatggacaaccgtcggagaagccaagcaaacaacacagcaggcacaccgtgaacggatcagacgaggggctgcagcgtgctaagcaaacagaacctcagagagacatgaaggaacacggaacactcgagcacagacgtatgagcgttgnctgcaactagccctcgcacggggagaaataacaacgaag

SEQ ID NO: 222414 - DNA, 462 bp, Glycine max
  unsure (1)..(462): unsure at all n locations
agctnttcgattcattctatgtacccgtagtggtccacattgtgtttcgtgcatttttattctcgttttgtttactttttataccccctgttgacgtgcttaagccattttacttaagtcatttctcgcttaacttaaaaataaaataaatttccaccgaacgtttgaattgtattatctgttaacttcggttaaaataaattctgaccgttcggtcgtgccgtaaccacgttggaaatcaaaaagaggtaaaaaataatataataatcaaaaaacatctttaggtaaaataaagcggaaaatcaatcggacgttttctctttgggatttctcattcttaatcgaattgattaataactaaaagtgaaactaaggctaaaatcaactcgcctagtcaagctcgtccataaaaataagctcttgaagtttgcatttcattatctcactaagtaaaatggatca

SEQ ID NO: 222415 - DNA, 473 bp, Glycine max
  unsure (1)..(473): unsure at all n locations
tcanaccacagcaacacanaatctaggtgtccaaaacccctcaattcaatgggttttctaggtttgaaaagtgaaattgagaatgaggtaaatttgaagcaaactctcacctcacaccagtccataacatctattgagacttgttcaaactggttttacacctaaaatctcaccgaatcaaaatttgactcttcaacacccaaattttgtcttagaaatagctctttgttcactttggtcatttgtttttctctctagcacagtccaagctttctcataagtcctaaatgacatttcaagctaagatttactcactctaacctctaaatactaccaattccagatttggccttccagccctcaaaaattcactctntttccacttctaacaccacattcttactttctaaccctaggttagttctacccttcatctctaacagtttttcataagcaatttcagcatataaaca

SEQ ID NO: 222416 - DNA, 487 bp, Glycine max
  unsure (1)..(487): unsure at all n locations
ggatctctaagtcacctgcggcatgcaagctntggttaatcaagattcaacttccctaatgtgaataactcacattatgttgatattatgtacacattccaaacaaatcatggatctgtttagaatatcaaccttcaattttttttttctccaactactaaaattatttactttatccttactcactttagaagatctaaatctggttaacaaagttatttgacataaaaaaaatcaatacactacagttaaaaacagtcaagtagtgatgatctttcactactcagctgtaaattaccactcatacacccgtaatcacatgtattattatattctgattctgaactaagttaataaataaacgatcccaactcattttagagggtaaaataagtaattccgattgtttgataaanaaaccaatacaatgattacttactttaatcaacccacatcaccaaaacgataacttcataaacaaataaat

SEQ ID NO: 222417 - DNA, 426 bp, Glycine max
  unsure (1)..(426): unsure at all n locations
gacacttgaaactaagcttctaaggaggtgaacttagttnttagatgggtgtgtgtagcttagttctagcttctcaaggaagttntctcaaagaagcttctcaaggaagttttcttaagaaagcttctcaaggaagctacctagtctataaatagaagcatgtgtaacacttgttgtaactttgatgaatgaaagtcttatgagatacacttcaaagttccacttctttccctcttttattccttcaatttcgtgctccccccttctctctttcttttcctccattaaagcatcctcttcaagcttcttatccaaggcaattcttggtggtgaagctccttcttccttggcttattccctagtggatggtgcctcccctctcctcttctcctttgccttccgctgcatctccatggtgaaaaatca

SEQ ID NO: 222418 - DNA, 454 bp, Glycine max
agctagttacatttgtattagagctggatggtatctgagcttgatctatccagcttgttacataatttgttggatggtattagagctacataaacatccagttattggatcacccgtatttatctacactctagatgtctattcctaagcgtgaggggtggtgttgtttggccaccaacaatttttccacgttccaaatgtccaatcctggaagtgaaggggtatattgtgttcccacattgactagagatatgaccaatgtggtccttataaggcttggacagtcctcaccttacaagtcggttttgtagggttgagtgatgccttaagtatgaattctaagaatccccttcattctcttactctactttttctattctacattcctatctcaccatcccacttctaggttttcttattcacttttcgggccctagcattatgatctgacttg

SEQ ID NO: 222419 - DNA, 414 bp, Glycine max
tatgagaccaaaacatgacagagaatgtttccaacaatcttactatataatattatccaaaacacaaatgaattatatagaaatacttctcacaacatggggagtaaaatccctcacacaatttcacataatcatattaaaatcataggttcaaaaacacaaaaacacaaagagcattcaattttatcaaccagttcgcattaaggcatcaattaacccatcaaacataacaatctcatgattataatcataaaggcataattacaatacaataaacatcctaaaataaacctcaaatttgatcctctaaggatcgttacacatgtttattctaaccccaattgcgataaactcaacccttacctctaagcgggctcacgtgtgtagtccagcaacgatagcggcgtctctaat

SEQ ID NO: 222420 - DNA, 425 bp, Glycine max
  unsure (1)..(425): unsure at all n locations
agctngccaaaggtcgaanaggagcttgtccgatcaattgagcaagaccaaagaaaacatgtgggccatcatcgaccaatacaaggaaaagttaagcctagcggtaactcacaaacaaaggctagaggacgagtacgtgaaggtataagtcctgcaagtggaaagggaagcaagggaaagggtgatcgattcattacacagagaagcaatgatgtggatggataggttctcctttactgaaattctgatactggggacagatgtcgtacaggatgtcacgacatcgcgcttcagaacatgcagcttgtatatgaccgtatgaacagattanacaagtaaataacacaagagaattgtaacccagttcggtgcaacgtcacctacatctgggggctaccaagccagagaggaaatccactaaaata

SEQ ID NO: 222421 - DNA, 470 bp, Glycine max
  unsure (1)..(470): unsure at all n locations
tgaccaggaattatntgtatgggttggatgttgaattctggttgttcctggtgcggagatgatggtacagagggtgaaccangagctgaagtttcttttggtgaggtagccatggaaaagcaaagcgtttggaatgatttcgtaaatttctgagagctgttggggaatgcagaaaacgagattaacacgagaatataagtttgaatgaggaatgtagagggacgtgtgaagcaacggtcgaatttgctttggttcagtagtgaacgtgctattaatgttaagtgattcgtttgggcacgttcagatatcagtagttgctacaattcctctagcagacaaatgcccagcttgcccctcagtttttcaaactgttttgcatccaatgcctttgtgaaaatatctgctatttgttcctcagtgtcaacatgctccagtgtgataactttatcatcaacaagctctctaatata

SEQ ID NO: 222422 - DNA, 128 bp, Glycine max
ttctacaagccatttacttgatcccaggtatgatgtacactttcctctctcaaaaccaacgagcccagatgatgcctatgatttctaaactatacctaaccgccttctcagtggtgagtataccaacg

SEQ ID NO: 222423 - DNA, 473 bp, Glycine max
  unsure (1)..(473): unsure at all n locations
agcttaactaactccaaggcatcacctgctgctttatactccgaatcggtagttctcacctaccagaagttccagaatccagtacagacttctatttcagcttatgtgtgagtaaaatattgctcaaataataaatcatgttgatgttgctattcaggaaaaataacaaaataccaataaattatgttaataataaaggggttggtatgtgttgatggtaaattatggagctacttatttacctgcaacaactccccgcaccctaagctcttttgataacttttcaacaaattgtcggggattgagatgtcgaacgcttgaaaattcaacctcaaactcttctgggaccatgttacagcaataaggaacccaagatgaaagaattcgctttcggtcacatttagcaactataggagccctgttagggaaacatttaacaaaatagacgttattntacacatggagataacaat

SEQ ID NO: 222424 - DNA, 470 bp, Glycine max
  unsure (1)..(470): unsure at all n locations
tcaagatgtagttaagatacctgacaacttctgttcgtgtntgttgcttgatagaaacacagatgctagatataataatatgaggaaggctgcttctcgggcagattccggtgacaactatttatactgtccaagggttgtagatctacaggatgaggatntaaggcactttcagtggcattgggaaaagggggagcctgtcattgtcagcaatgtgctngcaaaaacatctggtttaagctgggaaccacttgtcatgtggcgtgcattccgtcagatgactaagaccaagcatgaacaacatttggatgtgaaggcaattgattgcttagattggtgtgaggtttgtttaatttctcaatcttgaacttcgagggaattttgcacaaattccattgctcatgttcattctcatgaagcttatgtttaaattgtgtaatgttggtacttattttaactggaaccactga

SEQ ID NO: 222425 - DNA, 445 bp, Glycine max
  unsure (1)..(445): unsure at all n locations
agcttcacaagtaaattaacctcctgcctgaagtcctgactgtattaaaaagtaatcagcagaaagaaaaggataagtggctgacaaaaggataagatataaaaaatagttctgaaattacacaagcttaaaccaagttgtctgtctattgctatgaagcaaggactctaacactaacaccggacacgacataaatacttcaacacggctaatgtctaaaatataggacatggggacaccgcatatacacacaaatagagagattctaattaaatgaaatatgagtaacatagtggatgttatggtgaggaggaagatcaattttatgtgcctacaagaaactaagtggacaagtgaaaaagcgaaagaattagacagctcgggatttaagctgtggtatacgggaaaaatcagatcaagaaatggngtagggattattgtggac

SEQ ID NO: 222426 - DNA, 81 bp, Glycine max
tacaagaatgaagctctgataccacttgttgaacaagtggcctcagatatcttaagaagagggggggggggtgtgaattag

SEQ ID NO: 222427 - DNA, 422 bp, Glycine max
  unsure (1)..(422): unsure at all n locations
agcttcccacccagctcgcccaggcgagctcatttcttttatgcgagcaaggttgcttcctccagaagcaacagccttctggaggaaggatctggaaggcccaagtgggccagattgctatttgtacccccctttttactaaatgcacccctcctatttttttggtaattctttttccgtaacgttacgaaactttacgaatttcgtaacgatacttattttccttccgcaaggttacgaatccttacggattatgtatttactttttattagcattcgaagaagttacggaaactcacgaattgcgcanaaacacctcttttcgatttctgcacattacggaatttcacggatcgcgcaagcctgcttccttttgatttctgagacgtctcgtgacttcatttattgtgcaacaaaggacg

SEQ ID NO: 222428 - DNA, 484 bp, Glycine max
aaactaagcttccaaacatccaagcaaaacaacattcaaacagcacaagctatcacagcctagcaaaacagagcaaaggcagaaaactctgctcaacacatcaaccaaaatcacaggttttctcacttaaagaccacagtaaaaattccttcgatccaattcgttaaccgttggatcgactccaaaattttactggaagtctatagtgcataagcctacattttgaccgttgggatctactagcaaacattgagaactcattctgcactagactttccacagccaaccacacacaagcatttttctgcacttgtgcaaaattctgctgcacaatttcacagcaaaaattctgcataagtgcagatttcgaaaatcacacttcctctcatccaatcttgcccaaatcaattcctacaagtcccaaatcatgtatcaatcatgtctaaaccaaattcaagctttaaagcacagcaacacagaatct

SEQ ID NO: 222429 - DNA, 451 bp, Glycine max
  unsure (1)..(451): unsure at all n locations
ntaagaagttgtcaaacattaatgaatagaaaacaacatattgtagttgctactgacaagaaatcaaacttggtgaaaagagaatataggattcatttgatggcaacaattgattgtattcatttctattgaagcaaagattgacatttcgtggtcatgatgaatcaatttattcacaaaatcaagataattctattgagcttctacatattcttgacaatcataatgaagatattgataacgttctaaaaaatgctcgtggaaatctcaaaccagtggcacctaatattaaaaggatattgtgatagctgccgcttgtgagaccaccaaaattattgttgatgatgttagagatgattnttttgccattctaattgatgaatctcgagatatatcaattaaggagcaaatattggttgtttttgttatgcagataanaatggaagtgtca

SEQ ID NO: 222430 - DNA, 488 bp, Glycine max
  unsure (1)..(488): unsure at all n locations
agtcgcctgctgcatgcaagcttccatagcaagaatataacaatgatatattattagtatatggaatgcatggtttcttttttctttagataactatgatagaatgaagagacactatcctaatactatcattaaaaagtttaccaaaggaatctctctagaaaaggctacccatcaaacaaaattttaggcccggttcgtttttactgaaagacagacgatgacagtggagacaaagacgaagaacgataaaagtatctattttcaccgttcatttgagtataaagtaaatagtcaatttggtacaaaatccacccaaataagtttgcatccaaaactgagcgaatttgtgaagaaagaagactgaaattgaggcgtttataaaaaattattcttgtgtganaaatatgaaacacaccgagagcttagattcaaatatgcaccccaatcatattcgaatatggaagacctagagaacaaccaacata

SEQ ID NO: 222431 - DNA, 455 bp, Glycine max
  unsure (1)..(455): unsure at all n locations
tattagttgttacaataattntagactcctcaacaatttacatacatcagtttcgcgtacaaggtagagaacattgtacccttttgtttccagaacatactgtgttacaaatagcttcaatctttcaaatcattgccttctcgaacaatatacacaacactntgtgtttcttcttcaattcgatctcttctttttactcttactttgaggtatatattcttaccttagttacaaacttgcaaccatgtcaatgcccttgctcacaaacttgcaacacattgagacactcctcaatgcaccaaaccccaccgttagtgcatccattaaaagatggcactctgcattcatggccatctattgttcccgagctattatgtcacactccactctcaagaaaccaaacaaaaccaaagcaaaagcctcaccttcaccaacaccaacaccaacaccatctt

SEQ ID NO: 222432 - DNA, 459 bp, Glycine max
  unsure (1)..(459): unsure at all n locations
agctataaataggctctgaatccgtgacgttgttcttatcgccaccctcacgcttagcgcgagtaagtggatttgagcttagcgccagtcttgcactgagcctggctgaagacaactgctgcgcataacacactgatctcgcccttagcgcgcagccttgatattgatgctcttccagattcttcggtcgtgctaagcacgctgaagctgtgcttagtggtggatgcgcgcttagcccactgaagagctaagctcaactgtcacttttagcatttcatgacttagcctctttttcacctagaattgcacatatttcatcattaaatccaatagaaatattctagagacaacattaacaataaaacaagatttatttacaaactactacgaaataaccataaattggagaaactatacaagttttggaaaatgctntatatacaaaagttagtcgtataa

SEQ ID NO: 222433 - DNA, 456 bp, Glycine max
cattatttcttatagagaatacttatagtgtataccataataattgccacaaattgttttttttttatgatttcaagttgttgtaaactaaatacagaaactcaattacaaaagttttacaaatcaaaaacttaattatattttttaatttaaagacttaattaaaaattctcaaataatttaaagagttaccaattagtttaacaaaaacaaatagtaacaagtgaggatccttaaactttttttttttagaacaaagtatctgaccagatataaatataagtaaaaaaatggtttcacgctaactaagtattactagttgttccatcgggatttggcttgagatttgcttattgaaaaccaacaatcaatgcattttttttacttatatttgaaaccaaactattactagttgttcctattgggattggctcgacaatggttatgacaatgatc

SEQ ID NO: 222434 - DNA, 282 bp, Glycine max
tctctactagggtttcctagcgttagagagaaagagaacggattggagcctccattttgttgtctctgtgcgagggacatttctctcacccaacatgttattccaaaaatcccaacggtgggaatgtgtggaactaagttccaaacctattgtacaagttttacaatgatccaactgttaacgagtccacagtcgtaattatatttggatagggatcggtgtatgccgcaaaaataaagttgtgtgcgatggacatttctcttatcacagacattaatcaca

SEQ ID NO: 222435 - DNA, 436 bp, Glycine max
  unsure (1)..(436): unsure at all n locations
tactatgtcccaacaatcctactagtagttcctgtggactcttgttgcataaacattcttgccaatccaaaatcagaaattnttgggttcatattctcatcaagtagtatgttactagctttcaagtctctgtgaatgatttttagtcttgagtacttatgaagatagagtattccttgagaaatcccttctattatgttgaagcgcttcttccagtctagtaacatgcttctagtgcaatcttgtcaattaaaacaaggcagtatgtgttagaatatatactatacaagagtaatacactgcaagacatacatagttatgcttaagataggaaagcataagtaaaggattaaaggaatcatccgtaacaattattgaaaaattcagtcagaanacttgaaatttcctcataagagcatcgatggtatatataatt

SEQ ID NO: 222436 - DNA, 431 bp, Glycine max
  unsure (1)..(431): unsure at all n locations
agctagaattggatatgaaccatgagaactatatttttgtcatatctaaccatcaatggtactattgacttattgtaaatgcataaaaaataatgctttagcactaagagctacaagtaaagaaaactgcatattaagtgactttattctttattaagatatttcaattcgggggccatgttataaatcctactttgcatgatcttatacaatctctaataaatttgttagagatgcagaagaagattatcagattcattacattaatataagatattgcattgctatagagatgctgatcatgctttaatgttcttatctacatgagcaacttatattttcatgggtatattcatagctctagatgatcatatagatcatattatgagagagctntatcatgaaatacaagttgcttgcttgttggaagc

SEQ ID NO: 222437 - DNA, 381 bp, Glycine max
  unsure (1)..(381): unsure at all n locations
taaatcttaataattagtaggatgttcttggcacttctcatgttaaattgttcacattatcttaatatttttaaactttctttcacaaaagtaacaaaataaattattttctataaaatacactgaactacatctaagcttaatcaactttagcaaagtatcattaaattttctcatagatgtatntattttataattaatttatagaaataactaattttcaaaaaaaaaatcatgaaattaacaaaataaactatttntacaaaatacaccgaactaaatatgaatttaataaactttagcaagctatcatttaatctttttcatanatggatttatcttatgatatcatctactcatgtatcaaaattaatttcatga

SEQ ID NO: 222438 - DNA, 456 bp, Glycine max
  unsure (1)..(456): unsure at all n locations
cgtcttgctggatatttatatgcatatttttctgatgatcaccgaggaacaattagggatcaacttgaaacttatgtgcnttaagtgagacgcacatgcttcttttttcanttgtgaagatgttcaaagtttggctatgaagatggttcacactgagaaacatttggtatttccattggtttataaacttattgagctagctntgatattgccggtgtcgacaacatccgttgaaagagctttttcagcaatgaagaatatcaagtctaaattgcgcaataagatcaacgatgtgtggttcaatgacttgatggtatgttacaccgagcgggagatattcaagtcacttgatgatattgatattattcgaacatctaccgcaaagaagtctcggaaaggacacttgcctcgtaatttatttaacccgctttgtaaattatgttatctctttattta

SEQ ID NO: 222439 - DNA, 450 bp, Glycine max
  unsure (1)..(450): unsure at all n locations
tgtgggtggaggacgcatgaacgaaaacacaatttatgggtcttcgtaaaagggttgaggatggagaattgcactaagcaatcactacgcacggttccaagctccagggtggaggacgcatgaacgaaaaagcaattcatggggctccgaaaaagggttgaggatggagaattgcactaagcaatcactacaaacggctccaaactcgtgggtgaaggacgcatgaaccaaaacgccattcatggggctcagaaaaagggttgaggatggagaattgcactaagcaatcactacgcatggctccaagctcctgtgtggaggacgcatgaacgaaaatgcaattcatggggctccgaanaagggttgaggatggagaattgcactaagcaatcactatgcatggctccaaactcgtgggtgaaggacgcatgaacgaaaaccccattcatg

SEQ ID NO: 222440 - DNA, 426 bp, Glycine max
  unsure (1)..(426): unsure at all n locations
agctagagcgtaaactanatgccttggtttacctgttaacctaactggccatgggataaaaatctgcacctttcgccacactctgtggtttatgctcctctaccgaccaccatacagacctttgcccttctatgcaacaatctgaagcaattgaacaacctgaagtttatgctgaaaacatctacaatagacctcctcaacctcagcaacaaaatcagccacaacagaacaactatgacctctccagcaataggtacaatctcgggtggaggaatcatcccgaccttagatggtcgaattcttcacaatagcaacaacaacaacaacagccttattattaaaatgctactgggccaagcagaccatacgttcctccaccaatccagcgacagctacaacaacgacacatcggacccgaaatagcaa

SEQ ID NO: 222441 - DNA, 380 bp, Glycine max
atgaatgagagtctcgtgagacacaactcaaagttcaacttctctcccccttttcctgtgtgagtttcgtgctccactctctctttctctctgtgtttacggccctccattgaagcatcctgtccaagcttcttatccaaggcacattcttggtggcgaagctgcttcttgcatggcttattccctagtggatggtgcctcttgtcacctctttgcctttgtcgtccgctgaatctccatggtgagaaatcaccattgaatgaaggtcacagatgcagccttcatagaagcttcacaagcgagcttccatgactgtggctccctctgcctccactcatcatctgctaccttcaagctcttacccatgggttactatgttg

SEQ ID NO: 222442 - DNA, 465 bp, Glycine max
  unsure (1)..(465): unsure at all n locations
atccttaagcgacgcggctgcagcttgctatgtntatgaattattttggtattcatctttctccacctggnagacgcctctcttcattatcgtcttatctcctaggttgttataggggttggatcacatatcttcaatgatcttgatggcatcagcaagaggttttaacatgatgttacctccacaagcaacatccaaacttgtcctgttgtgtgaggacactccaccatagaaaatatgaacttgcctctgtggggagaagccatgatgtgaacaacttttgatcatctcttgtaacttttttaggctttatgtagactctcttgttccctctacacaaagtttccaatatccgtgatgtactcatccgtcttcatgggagagaaataccttcttaagaaggcatttatgcactggttccatgtagtggtgtttttcgcaggtattgagcacaaccaatcccat

SEQ ID NO: 222443 - DNA, 460 bp, Glycine max
  unsure (1)..(460): unsure at all n locations
tcttatccaaggcaattcttggtggtgaagctcattctttcttgtcttattccctagtggatggtgcctcccatctcctcttctcctttgccttccgctgcatctccatggtgaaaaaatcaccattgaaggacctcattgaagctcaaagatccagcctccatagaagccccacaagcaagcttccatcaagttctcacttaaanatgaaaagatatatataattttctcaaataatattttactaaattctctctttataagaaattgagttttggctattgtaacatattatgaaatcgatgtaattgattacaggttgatgcaacaaattacaaaattaatgtaatcgattacagatcaatataacaaattacgaaatcgattaaaacttagcttagatcaataaaatagtccctaggaaggaattaatcatttacaaacctatgtaatcaattac

SEQ ID NO: 222444 - DNA, 466 bp, Glycine max
  unsure (1)..(466): unsure at all n locations
agcttataaagggatgctccttcaaagtagaatacttgaattanaaaaaaaacaaaattaatgtaattaaaaaagtaaaaatttgacaaataatcaatacttttttatatctaatatatacgagaatcaataagaatatgttttatagcattatttcataactttaattactcatcaatatatctttatagaatatttctctattaatatttcctaataatttaaaaagataaaaattactaacaagggttgagtctaacaaagaggtaaatctttcatgataggaatgacaacgtgggtcaatcatgtcgacaagttgacctgccaacaaaagtgtgtagagaaatacagccctttgataactgggcgggttgaccaacaaataaataaaatgacatgctatgaaatgatgagtttgttggttgataaagtaaacttccaaaaaatagagtgggtaggcataaca

SEQ ID NO: 222445 - DNA, 371 bp, Glycine max
  unsure (1)..(371): unsure at all n locations
tagtgtggctgactggcttaaggaanatgttctctagtctgatgactntagtgtcgactagattcaccttttggttatatggttctaatttttggaaaatttctttactttttgttatcaaactcaaaccaattattgactcaatcagggtactaaattactatgtcaagggtagattaagtgaattaatggttgactgacattgagtttaaaatattaaaaatntctaattaaaaattaaaatatcatcaaatctcagaagagttaacaaaacaacaaataaatatataaacgtctcaattatcattttctaaaatatcacaatngacccatcaccatcatgattgtcgttgtcaacatcataaccaccg

SEQ ID NO: 222446 - DNA, 409 bp, Glycine max
  unsure (1)..(409): unsure at all n locations
agctagctaacccatggaagctcctaatatctctcactctttntgnggtgggccatccttggatggccttgattttctcagggtccacttggaccccatttctaccaactacaaaacctaagaagactatattatctacacaaaaggtacacttctctatattttcatagagggtgttttcctaaggactggaagaacttgcctgagatgtcctaagtgatcatctaggctcctattgtccactaaaatatcatcaaaataaacaactacaaatctacctatgaaatcccttaagacatgatgcataagcctcataaaggtgcttggtgcattagtgagcccaaaaggcatcactagccattcatacaaaccaaacttggtcttgaaagcggttttccactcatcaccc

SEQ ID NO: 222447 - DNA, 492 bp, Glycine max
  unsure (1)..(492): unsure at all n locations
acactatagaaactaagcttaagctcaggaaaagcttgaagatgttttgattnttacatgcctaactttcttgagtggcatttgtattggttgttatctggtatgtttcatcttagtacatatgatattagtattgcatcattcatcatcatggttagtgtgaagaaaagtttcttcaagaggcaaaaactctctgttttaatcgattataggtctatcataatcgattacagcaagatgtttgaagcttaaagagttgagtctcgtatcattntaatcaattacagttgtttcaaaatcgattacgttgttgtttgagacaatgactaatttatttaggagtctctgctntaatcgattaccaagtggtttaatcgattacttctctctcgcttagttgttcaaaagtgaacaagaacacttgaattgattactttgagtatctaatcaattacattgttctttgagttattttagatgttagtaagaaca

SEQ ID NO: 222448 - DNA, 446 bp, Glycine max
  unsure (1)..(446): unsure at all n locations
agctntacgcggacaagcatcgtagggaagtctttttgtttttgggactgggctctggctcgacttcgttcttacaggcagccctctgccaaaggggatcactcaaccaatgtgaagttagctcgttgttattatggcccatttcaggtcacagttaagctcgggcccgtagcttatcgcgtggatttttcggcaggcgtttgcatccacctggtgtttcattgctcgaacctcaaaccttttcggggcgagacagactccaattcctcaattcctttgccacccaattttcacgagaatcaaccactcatatcccctcttgccattctggngtctcgtcgtgcaacctctgatcctcatagttcttggcaggttttggtgcagtggcagggtctcccaccggaggagacgtcgtgggaagattgtgaccagtctttgcaggacta

SEQ ID NO: 222449 - DNA, 466 bp, Glycine max
  unsure (1)..(466): unsure at all n locations
ngaatatcttcatttgagtaatgcaagcctatccaagcatttattgtctttgttaggtgcaagctgtattactgacttcgagggtcagttcctccagaaattcaagggagaaagggaagaattaacaaggtgaggaaaaggggatttcttattattctccctcagcttgttatttacatagtattatatagacattcccataacagaatttggacaattgctctcctacgaatattctagtaacagaatctctattgctattttgcccactaggaaataacgtgctgcaagcatgatttggtggagattctctaatttcccctttatccggtatcgccctcttcagctcagacataatctgcaaggtaggtgggttcacaattcttcttttgttcttggctcttctcccttatgacccctgatgctggtgtttctcttggtatggtctcttctcccttttgcaccc

SEQ ID NO: 222450 - DNA, 471 bp, Glycine max
  unsure (1)..(471): unsure at all n locations
agctntagaaaccctaattngaggaagaagaagtctgttaagaagaaaatatttgacaactttntatattttgcatcaaagtccagtctacgtgtcacaatctgggacaatttgccacgttggatagtctatgtgtcattaaaatttccaacaatgcacctcacttacggcgttacttttaaatttaacggcaaggactattttgcaaaacttatgcaaagatagagactattttttacatttcaaaaagatagggactaatttgcaaaagggatcaaaagtcagggaccaaaatgcctatttactggagaaaaaaaaattttgtcaatgtttgtggagtctaaaagtcccaagggatactcttcaagtatagagccatgtatccgtcaatgatctcaaattggtcggcttanagtctcatgggtgtcatatgttaatgcaacaactattgggtggtagcgattgcagtat

SEQ ID NO: 222451 - DNA, 444 bp, Glycine max
  unsure (1)..(444): unsure at all n locations
gctgagatgtttagaagtttggctttacttgttntagaaagaaaatattgggtattggtggtctacaatggaagacaaaattttggtttatatcattacatatattctggcaccaagatctagcaatcatgctcaagtcaccgatgacgacttgcatatcatatatgggccaaaattaggtattcaaatgatttgggtactattgattgttgaaaagtcgtcgactagtggattataaattttcatatgcaattntgacctcaagattcattgattatttcaatatcgatgtttctaatgggattgtagactttaccaaagcctctaatgagaaaactgaaaggcatctcaagaagcttggcatgtcatatgttgatcatgagtgggtcatggaaggacaacaacccgcaacaacaaacgttgatttgatggaagaagaatctg

SEQ ID NO: 222452 - DNA, 424 bp, Glycine max
  unsure (1)..(424): unsure at all n locations
ggatcttaagcactgagctgcagcttgagcaattaaacgatgataacttttttctcggatgtcggattgagtcccgtaatatatcgagacgctcgacattgataataaaaactctgtgaaaattcaaacaacgataactttttactcagatgtccgattgcgttccgcaatatatcgagatgctcgaaattgaaaatggaagctcgtagcacatgcaaaccacaataactttttactcggatggccaattgtgtcccgtaatatatcgcgatgctcaaaattgaatacaaaagctgtgagcacatacagacgatagtaactntntactcgaatgtccgattgcgtcccgaagtatatcgagacgctcaaaattcagagtagatgttgtgaccacaatctaacgacaataactctttactcggat

SEQ ID NO: 222453 - DNA, 441 bp, Glycine max
  unsure (1)..(441): unsure at all n locations
tatggtcgtnntgaattgcttagaccttatgttttcaatttctagcgccactatatagtacgggacacaatcggacatccgagtaaaaaggtatagttttttgaatttactgagagcttcagttttcaatttcgagtgtctcgatatattacaggactcaatcagacatccgagttaaaagttatggtcgtttgaatatgctacgagcttctgttttcaattgcgagcgtctagatatactaagggacacaatcgcacatccgagaaaaaagttaatgtcgtttgaatttgcacagagcttctgttttcaattttgagcgtctcgatatactacgggactcaatcggacatccgagttaaaagttattatggtttgaattngctaggagctactattttcaanttggagcatttcgattataacgggactcaatcggacat

SEQ ID NO: 222454 - DNA, 302 bp, Glycine max
atattcttcccttgcgtaggcataatgttcaattactgacaaggcttatggagcatccataactagatcaactatattcgaaacgacatttcagttggtaagactgcccaaatctctactctttactcagtcatcaatcaacacgaatggaatatttggctatcaatagctcggcaacattaaaaaggatctctactacggacatcggctgacgcaaataatccagagaagccctcttgataagctcggctaacagttctattcttgcttactcaaatgccatccaactcaagtgagcagag

SEQ ID NO: 222455 - DNA, 437 bp, Glycine max
  unsure (1)..(437): unsure at all n locations
ntatgcatcccttctcaattggatatccacaaccctataagaattgagcctatgaggcaaaacatttaagtatgtttgtaaggtctggctttacgcatctcttcttggtcaagcaatccacattcctctaagcactaagcttataaggcgaaagtgcttaagtatctagataaccatgttcacaataattccatcttttcataattggtgttatatttgttatatcttttatcttcttttgtttcagtttcatagcttatttgctattacatatattttgttgttgggattctagttaggccttgtggctaactaaatagggataaatcttttntttaacttcacatttatctcttgtttggaatgcactagtgtgatgttacctaattagaatatctttctaggagagcgtgaggatgacnatcaatggattctag

SEQ ID NO: 222456 - DNA, 297 bp, Glycine max
agctaagaagagtatggggtacccatctctatgtttatctatggtggcggccaggcgagggtgcacaacaagttctccacatccactatgcgcgcataaacacaccataccctgttgtccacctacaactgagctcacgtactcgcacgactcccatatactccatatatggagaccgggtaccgactgatccacttaagctgacacgacatacaagctcatctacgttcctactggacactctatcacagtcaagctaaaccacatcaaatgcagatatgactgctctatacacac

SEQ ID NO: 222457 - DNA, 427 bp, Glycine max
  unsure (1)..(427): unsure at all n locations
gcttctaaggaagtgttctcaagaaagcttctcaaggaagctacctattatataaataaaagcatgtgttacacttgttataactctgatgaatgagagtcttgtgagacacaactcanagttcaacttctgtcccttgttcttccttcaatttcatgctcccccctctctctttctctccctctttcttttcctccattgaagcatcctctccaagcttcttatccaaggctcatcttggtggtgaagctccttcttccatggcttattccctagtggatggcgcctcctctcacctcttctcctttgtcttccgctgcatctccatggtggaaaatcaccattaaaggacctcattgaagctcanagatccagcctccatagaagccccataagcaagcttccatcatgtggtaatcagagcaca

SEQ ID NO: 222458 - DNA, 352 bp, Glycine max
cttgagcttcgctcattacctgtcataagctatttttacaaagctcggctcggcttatataaaagtgtggctcggcccacgagcctatttaaaagtctgcctaacatcgcccttgattaaccaattatcttaaaacctagcgaacaacgaactataagaagaaccttagtcaaattcgtgtcagtactgtacaaatccaaaaataatggactaacataatcatagtgaattcaagcggcacaacacagcgtacatcatgagaaaataaaaagaacgtcattttatgagacgtatgaattagacatggtttgcacaacatgaattttatcttacgtgcacagtgtgtatgaac

SEQ ID NO: 222459 - DNA, 423 bp, Glycine max
  unsure (1)..(423): unsure at all n locations
gcttctacatcctatgacagtgttgcctcacttttgcttttttgactctagcaatagagacactatatagtggtacctgcactccaagaactttggatacaatcgccttactgattcaaactcggcaatcctntaaagcagctagatgagttttgggtcaatggtctatgggttgaataatgtgataaaaataacgcttcaatagtgtgatacatatacataagattattaacatataatgtataaaataaaaacacagcttatataagcctacatattctaatgtatgtgaaaaaaggatttaatcttatatattatatcttagaagataatctctaagagtataaaactatcgtaaagttaaaaggaataaaagttatattttgaaatatgttcgcataagacttatattaatattatatt

SEQ ID NO: 222460 - DNA, 402 bp, Glycine max
agctatgccacatgctgaacccatatcatgcatatattttacactcaataagaatctcagtacaaaatggcagaagcagacttttctcatgctatatgattgtacctgaggttaacctagacatagtttgattattgatttctgcattctttgattcttcatagctgagatgttatgccaaagaattagcagaatcatcaatgatcaattcacatagtcatagttaatgggtgaactgtactttattcgatcagtgaacaaagcttcttctttcagagtaagctctgcagtcagagaaaattctgcaagaataacatgtaatgggtttaataatgtggaactttaggtttaaaaatgaccaaacacatgtaatgggcaatgaagttggcattacaaatttac

SEQ ID NO: 222461 - DNA, 452 bp, Glycine max
  unsure (1)..(452): unsure at all n locations
tataagaaccaaaatgcctcaatcatttccaaatatgcatgttattttgaagcatcaacaagaatcaagccaaggctattgtgcaagcaatcaatggggcaaaacacaccaaatgattatgatgatggatggctcaaattctcacaaaggtaaactcatcactttcaaattgagctttcaaaactatcatgacatgtagaggagaatcaaagatttcaagtcacaaaatgtcaaaaacttttattttcaaaacaattacccatttcttgaacatatcctataattcaaagaaaaacatgcaaagtagtacatgcgcacggaattggcccaaaatattaaactaaaaatccgacgaaactaacaacattaacaaattaacacaactgacaaattaacaaaaccaacaaaactagcanaaccaaagaacactcccccccatacttaaacaacac

SEQ ID NO: 222462 - DNA, 447 bp, Glycine max
agtcacctgctgcatgcatagcttctaaaaagatctgatgacacttttccttacatggagtgtcttctcttactccaacttagctaccacacctcagatttgaatatgggcagagctaggttggtctatggcttggtaaccaacatggacacgaacattggagcccttatctcagatcagatttcttctattgctcagagtaactcctctaggcttggatttctagccttaatcactgccatatgtagagctagaggagttacctctaatagtctgatctatgagagcttgagctcgaccattaatttggcctacattaagaaaaattgttggaatgtggatgatctaatagttaactttaaaggggcaaggaaggcaagggttctaccaactgatgttccttcttcttttactttaccaactccttgcacttctactacgcctaca

SEQ ID NO: 222463 - DNA, 403 bp, Glycine max
cttgaatgctctattcaatggagttgacaagaatatcttcagactaatcaacacatgcacagtggccaaagatgcatgggagatcctgaaaaccactcatgaaggaacctccaaagtgaagatgtccaggttgcaactattggctacaaaattcgaaaatctgaagatgaaggaggaagagtgtattcatgacttccacatgaacattcttgaaattgccaatgcttgcactgccttgggagagaggataacagatgaaaagctggtgagaaagatcctcagatccttgcctaagagatttgacatgaaagtcactgcaatagaggaggcccaagacatttgcaacatgagagtggatgaactcattggttcccttcaaacctttgagctaggactctcggat

SEQ ID NO: 222464 - DNA, 545 bp, Glycine max
  unsure (1)..(545): unsure at all n locations
cgcgcattgttgctgcgatccnatcgacatccccgagatnctatatagncgacctcgaggcatgcgagcttgcctgtcgacgattatagttattttcttttagcacccaatgctggtgcaataatagttaacgatacgacacgatggatatgcactaatgctactcaaaggacttgcgtttgtatgacggattgattaaatctatgctgcttacacgcactccctcaacactcttaaaacaatagggaagcgacttgctaagccagaagcgcgaacttgattataatcttctaagaaaataagtaaatttgcgtctcgggcgactgtgactacgagctggtccatgtgaggtgaccaaggcatttctcagatcaccatccactgcacaaggtaatgatgacccaccactcatgagctatgtgcctgagcaacaccggtaatgtatttccataaatggttgtagggtacatcgctctaacattacgcaaccgcaccatcgcattctgtcgcagaggtacagacagagatgatcatcgtataggtcg

SEQ ID NO: 222465 - DNA, 503 bp, Glycine max
  unsure (1)..(503): unsure at all n locations
cttgtgctctaggacgctntgtgatatggtaccctctcatactgcatggatattgttgtactagggcgctatagtgctctcttggagtagtgactgaatggactcgtgacgtagaactcgacgctgtttattatgtggctcaccaaacacgattagtatgcttattaggatgcgatgagatcttagatggcatgtggtgatattaacaacggtcagattgacacagagtccactattcgtatttgactattctttactgggaatgcaagacctattgagacggacgggttgtgaaccctgcattctatcatgcacgttgcttagatcacgtgtggaggtccacgctaacggcacatggacattatgttatggatgtattctattatgcattaggacttgcgctgatcaaacatgcactccatgcttgagtcttatactagaggcgtggagcgtcagatacgtgcgtaaatatcatagacacagtcatgcgagggacttcatcn

SEQ ID NO: 222466 - DNA, 391 bp, Glycine max
agctttgttacgtatagtatatcaaattaatatttgttggcaaattaaaattatgatccaccggatgaaaaagcatctaactttatttacatatagtatatcaaatcaataattttttacaaatttgaaattcgatccagtgacgtactgaagtccaagtttcttttaaatatagtatatagatagataaatacgatatgcaacatatcatgtcaatatgtttggaaaaaaatttgttgaaccctaaaataagtaaactatttatatatcaataacattcataaaagtaatttcaagtttttaagggaagtagtataagacttcactacatttacatttgtataattgacttgagctaccggtagtaaaaaaacgtgagtgagttaatgac

SEQ ID NO: 222467 - DNA, 455 bp, Glycine max
  unsure (1)..(455): unsure at all n locations
ctaagctcggagatttatcattggttctactcgatgacaccagaatatatagttggaatcatcaagcttntctgaaatcgaaggaaaagattgatgtgaatgatgagaggaagtggacacagcaaaattgttttctgccattgatgaatccttctaagagattggacattagatcctccaagttctgagtctgtacgaaatgctgttggagttcttcaagagattggggcattgtcagttgatgaacaactcactcagctagggcagaagcttggctgtcttcctattcatccatcaacaggcagaatgcttattttttccatatagatgatatgtcttgatccagctctaactcttgcttgtgcattcgagtttaatgatccatntgtgcatcccactttacctgatgaatagaagagagcttcagctgctagatctgagcttggctctttgta

SEQ ID NO: 222468 - DNA, 465 bp, Glycine max
  unsure (1)..(465): unsure at all n locations
agcttaccgcctctgccgaccaatgaatagatttatgttcattgcgctcaagtatgcttctgtaataataattaaggatacaacaagaaaaagatgcaataattctagtcaaaggacataagtttttatttttccttgattaaatctatgtgaattacaatcaaatcacaacactcttagaaaaataattaattgattttaaaaacttgaagtaggaacttaattaaaatctcctaaaaaaataattaaaatagcatttcgttcacctgtgactacaactcgatccatttaacatttcaaagtaaattcccaaatcaaaatccacagtacagtataattatgacccagaacaatttgttaaatcactgagcaaaccaatattatttggcataaaaattgaagttagatgctntagttatgcaacagaacaagcatctattgaaaggccaaacaaatatgatcatg

SEQ ID NO: 222469 - DNA, 481 bp, Glycine max
  unsure (1)..(481): unsure at all n locations
ntaatatatcaaccaccaatattagatacaattaactaattatgtgtttacttcatctngtttgaattccaataagatacatatgtacagcttatgcactttgatttttgttatcgacatttatagtttgaaacaaaaatgcaaattggaataataaatcatggtagctagacaaatacaattttggttaatttttttaagagataaaactagtttatattcatatgggccgtcttgattaatttgaatttgaatttcaagcgagatttgtgtatttgttaattntggtcaaaaaaattattggttgacgaaattaattgatttaaaatttaaacaaaagttaaatatgttatgaacgaaaataaatatataagcacaattagaaacgctaaattaatctactgtcttagttaaaatcatgctggtgaacacaatctagaggttagtgacatataacgagtggagatcctcttgagtgcag

SEQ ID NO: 222470 - DNA, 392 bp, Glycine max
  unsure (1)..(392): unsure at all n locations
agctagttaaagaacttagaaaaaatcaagaacttgcttgttcgcacatcgttcgcgtgtatgacatccactccacaaggtttgaagtagaggagaccttcaatcctattacgcaacgtggcggacaaaagtgggcagttaacttgaacggtcattattgtcaatgcggaaggtattctgcgcttcactatccatgttcacatattattgcagcttgtgcgtacgtgagcctgaactactaccaatatatagatgttgtttatacaaatgagcacatcttaaaagcttactccgcacaatggtggcctcttgggaatgaagcggctattcctccttntaatgacgcatggacacttatccctgacccaactacaattcgtgcgaaaggtcgt

SEQ ID NO: 222471 - DNA, 467 bp, Glycine max
ctaagcttctaaagaggttagcttagttattagagaggtgtgtgtagttaagctctatcttctcaaggaagcttctcaaagaagcttctcaaggaagtttctcaagaaagcttctcaaggaagctacctaggctataaatagaagcatgtgtaacactttttgtacctttgatgaatgaaagtcttatgagacacacttcaaagttccacttttctccctcttttattccttcaatttcatgctccccccttctctctttcttttcctccattaaagcatcctcttcaagcttcttatccaaggcacattcttggtggtgaagttcgttcttccatggcttattccctagtggatggtgtctcccctctcctcttctcctttgcctttcgctgcatctccatggtggaaaatcaccattgaaggacttcattgaagctcaaagatccagcctctatagaagctccac

SEQ ID NO: 222472 - DNA, 454 bp, Glycine max
  unsure (1)..(454): unsure at all n locations
agctttgatcaataaacttttcttggaagagtatgtgttgatcaaaaacttttttaaaagatgaagagaaatgaatcagaaaaattctttagaaagatattgaaagattgattgaaagatgttgagagatgatgatgaaaaacgattgaaagatagattatagatgattgatgattataaagatgttgaaggatgattcanagaatcattgccatggtcacatatttataatcttttgatgactcaagtcaaagtttgtgactcttggaaatttctttaaaactagtcacttaaaaaagttgtgacttttgaaaaaatcttcagaaacaagtcacttgaagaattgtgacttttggaaatatatttttcgaaattagtcattggtaatcgattacacatcaacagatgtgactcttcattttgaatnttgaaaattaaaacatttagaagctct

SEQ ID NO: 222473 - DNA, 465 bp, Glycine max
  unsure (1)..(465): unsure at all n locations
ngaaggacatacacaaagtgtgactatatgatgtgacaatcggttgtagctagcatatactcacctccccctctaaaatntaattggattgggcttcccccaattcaattaaatttatttcccaatacatacatcaaatattcacttaatgcatgtgaaattacaaagcaacccataatacaaaaattagtctaggtatcctaaaatataaaggctgaaaaatcctatatttctagggtaccctacctacattatgaaaccctaaatacaaggcccanaaaaaaatgaaaccttaatataatatgtacaaagataagtgggctcatacttagtccatgggcccaaaatctaccctaaggccgatgagaaccctagagccttctcttgcatctctggtctaatcttcttggagtcatctatccaatggccttggagggtaggaatgcatcattcccttccccttga

SEQ ID NO: 222474 - DNA, 468 bp, Glycine max
  unsure (1)..(468): unsure at all n locations
agcttttcanatgggtaaaaggctcacattcactttcttctacatcatattcaaacttgtccaaataaataataaagtcatctcgactcaaagaaagtcatataagtctcatacaattaatatagaacctatatgctaatgtcacatcctatcagagcgtggtgttcccgtgtcctctagcatgaggttcttcatagtcatccacctattcatctgctcccccgaacacaagttcaagatcatcacaggatccaaacacaacaacacacagggagtgagttatcacattcctagctaatagagaaacaagacaattaaatatatatattatataaatgagataccacttgcttaaacatagctcacgtaacttcaccacttcgtcattcaaaattcacttttcaattatcaatcacattacacaagaatcccacacttcgatcaagatataataacacatcaattagc

SEQ ID NO: 222475 - DNA, 413 bp, Glycine max
  unsure (1)..(413): unsure at all n locations
tcagctctcagcccanactctnttctctaaatctgatttcatgcttaaatatgtgactntgttcgtgctcgtgcgcttagcgcacattagtgaattttggtttagcgcatgctcttctcgctcaacgaatgaactgaagcggtgcgcttaacgagatgaagcggtgcactcagtgaacctgtacaactcatcttcttcccgattcttcctcgcgcttagccaatgagtgttgcgcttagcaaatgcttgctaatccagcatattggcttagtgagaacgtgaaaaacaacacttcaaaacttgcctaattaacctgaaattgagagaaaatggttattaaatgcacaaaatagaattactaagtatttattatctatctntaactaanagaacttatnacactacaaaataac

SEQ ID NO: 222476 - DNA, 382 bp, Glycine max
cgcctgaatcggacttttctttgtaaagttatgaccatttgaatttctccagagctttcgttgttcaatttcgagcgtcccaatatattatgcgcctgaatcggacttccgtctgacaagttattaccatttgaatttctcgagagcatatggtgttcaatttcgagcgtctcgatatattatacacctgaatcgggcatccgtgtgacaagttatgaccatttgaatttcttcagagccttcgttgttcaatttcgagcgtcccaatatattatgcgcctgaatcggacttccgtgtgacaaagtattaccatttgaatatctcgagagcactcgctgttcaatttagagcgtttcgatatattatgcgcctgaatcggac

SEQ ID NO: 222477 - DNA, 424 bp, Glycine max
tctcgatatatgatgcgcctgaatcggacgtccatttgataagttatgactctttgaatttcctgagagcttgcgttgttcaatttcgagcgtctcggtatattatgcgtcagaatcggacttccgtgtgacaagttatgaccattttaatttctcaagagcattcgttgttcaatttcgagcgtctccatatattatgcgcctgaatcggacttccgtgtgataagttatgaccatttgaatttctcgagagcttgccgtgttcaattccaagcgtctcgatatattatgcacctgaatcagactttcgtatgacaagttatgaccgattgaatttctcgagaggcttcgctgttcaatttcaagcgtctcgatatattacgcgcctgaattgacttccgtgtgaaagttatgacaatttaat

SEQ ID NO: 222478 - DNA, 217 bp, Glycine max
gaccatcaatagggtcagggaatctatctgcgaggagacttgccatgacgaggctgatgatcacatggagaacttattttggtaaaacaccatgacagcataaatgacatattcacgcgccgcgcaacgctatttgaaaatcaatcctgcgttttttataccttcaagatagaacttcgtgaatttcttcagggacaatcttaccctcaactagaaa

SEQ ID NO: 222479 - DNA, 428 bp, Glycine max
actatgaatactaagcttcatggtctctggtataggctctgggactttccattgcaacttatgtggagggcaaagaaggccttcttctgggggccagagccataagtgagacaccactctagaagagttagacttctaaccttgtgtcaggacctatgggccaaggaatagtctcaggtactcaatttttacggaacgtctgttttgatttagctgtttgtagcacgtctcaatgcgctggttgaacgacatgcaatttttacccttacattgaaagggtttcgcattgaggggttttccacttcaaattgtgtctctgttttctttcatttctattatgtgctctatactttattggtactcctgacaggtactcgcaagggtgggaaaatatatgtacgttatctcgtcttactctgttatagatt

SEQ ID NO: 222480 - DNA, 141 bp, Glycine max
  unsure (1)..(141): unsure at all n locations
cttaagcacctgcangctgcagcttagttttatantgaaccgattatcttttttatccatggtcagagctgtgcgctgagtgaaataagtattcaattacactgacacgcaacattctatcccgaagccgtaagaagatat

SEQ ID NO: 222481 - DNA, 144 bp, Glycine max
tctcgcctcaacacctgccaacagcagatgaccgatactcttggtgcgtctagcatggaagaatgagataggtctgtatgaattcctagggatgggaatatcacggtgtgtatgcactgacacgaaccatagggtttcaatgcg

SEQ ID NO: 222482 - DNA, 464 bp, Glycine max
  unsure (1)..(464): unsure at all n locations
agctatatgcaacttaagatgctacctgttattttgaccgtgtcattcaacttgatcggaggagctcgaggtcaggctaaatgacataataatatatttgtattattagtttaatatgattataattatttgtttcaattatgtgtatttatttttaatattgcaagatcttattgatttgtgtattaaatataatttataatatatacgttagataagtaacggtttgtctaaataatattgacaaacaagaacttattaagcatgaaatttgaaataactttattttacttgaagaaatctttaagtaaaatgttcaaacaactatgattgtatttttaatgttttaaatttaattctaaattctaagtcattaaattttacaatataagattaacatactcaaaattaatatacaagtataaattattaagcnacacccatccaagacacaggttatcgct

SEQ ID NO: 222483 - DNA, 475 bp, Glycine max
  unsure (1)..(475): unsure at all n locations
tatacgactnttcaatcagggctgtcctaagcataatgcggttcaagcccttgctnttagcacccnccaataaaagttatttagtattagtattgataaattatattaatatcttgtccagtgtagtggaaactaggagtgctttttatctcggtgaatggggtttgaaccctgttagaggaaaaaagcattttattttttgtatgattcctaatcttttctgtattctctctcacttaanaaaataattactcattaatttcaattaaataggctgtctcttaatatatcaactgtcaccaaatttggcccataaaacattgctagattggctatatccaaactcactctctttgtgcatcttcaatacatcgttgacacacatctaacatatttgttatcaaattactcatcacgcatctcaatatctcatcatcttccttgttagacaatngacaccagtattttttaaatt

SEQ ID NO: 222484 - DNA, 333 bp, Glycine max
ttaagtcacctgaggcatgcaagcttctagagaaaactacatgaagctgcctcgttatttatgctgcccagccttggttgaccgttgtgatcttcccgaaatttggattgtaacttcaaaagacaattgtacatgatctgaccgatgggatccttttgaaaatatatggagtgtgctagagagatccgttccctatagcatctattatttaaacattctctccttagctttcgtgtaacttaggaaggacatcatttgttcttctttctttctataaaagccatagataaagttccaagaactttctccttctctgacatcctccattatcca

SEQ ID NO: 222485 - DNA, 288 bp, Glycine max
agatctaggagagacgtcgcggaggaagggtcttgtgctgcccccgagtttgataaccaccattttcatatcgctgagcaccagcagcgcttcgaggccatcaaaggatagtcattccacagagagaagcgcgtccagctcatggaagatgagtatacagatttttacgaggatataactcgtatacattggacgtcactggttactcccatggctaagtatgaccctgaggtagtcctggagtattatgctaatgcttggcccacagaggagggagtgcgagacatg

SEQ ID NO: 222486 - DNA, 269 bp, Glycine max
aagctttaagttagtgaccaaacttccgtggcttcgtccaagctatctagaaaaaagtgtattaatagcttctcatctttagagtgtgcgcccatcttgcgatagtacatcttgagatggttcttgggacaagtcgtacctttatacttgttgaagaccggtactttgaacttcggggggataacaacatcgggtactaagcaaagatccgtcatgtgtgcgaacggatagtacccacatgcttccacggctctcaatctctcctcgag

SEQ ID NO: 222487 - DNA, 458 bp, Glycine max
  unsure (1)..(458): unsure at all n locations
tgtgcttagagagagcttagtctcttctttggttnttgactattaaccaaattgattcttatcaaggaagctattcctttgtgaagaatccttctttggcctatcaatttttcatggattgtggcgtcgttttgttcatcttcttcatcttatccatcttttattgtttttctgttcttgtgttctttgaaggtcaacaatggtgttcttgaatttgcatccgaaatgatttgaaccaagcgttctggcttggattgcatcacatggtatcagagcttgaatccggagagtagttcgaattatatccatcaattaggtgtagttnttagcattttggttnttcaatttttccaaaaaataagaagctaattttcgttcgattcttgtttgtttgtgtttaattgtatgattcttgtatgtttntgagttaatcttgcacgtgccttcgatttcctatc

SEQ ID NO: 222488 - DNA, 464 bp, Glycine max
  unsure (1)..(464): unsure at all n locations
agctnggaaagttaatatgtatgcaactgaattatattgtaatataaaatcaacgagatggattntaacccgaaagtaaaaacgattaggaggatcttaatgtttggagtttaagatagtgatgtgtaacaaattaagtccatgccgtgcttttttgtttcaaggacagaagaaaaaaaaattaagctaatttattaaagaatatgcaattagtcataactcanaagctaatatatcggtgaaaagaaaatataattaaagttccatattaattgatataattgaaaatatgtgcacacacatatatagcgtgtgtacatgtgtcatgcaattntagtagggggaatcaattagtagaagattagtcaagtttcctcaaccaatcataggtgaaaactgtacaaaactgaaattgattgtcaagaagttaactgccccttatattacaggtactaatatatcaa

SEQ ID NO: 222489 - DNA, 477 bp, Glycine max
  unsure (1)..(477): unsure at all n locations
tatgctntaggcccaccagcaaanannaaaaatgctattagtatttataaagtgaaaaagtctcatatgttgataaaaatgacacatgctagtaaaaagacccaactatttaaagtaaaaaatttcttttaaaatttactttaggcctcgtttatcattggaccaaccatgatacatgtaacattgtcttcacatatggttgttgatgtcattttctttcatgttgggctaaaatttatgcatcattagcttatatgcctattttggcttgtttcacatattgtcatggaattgttgtatcacctcatgtaaacttaagatatatcattatgaggatttgacaaacaacctctaaaataacaaagtacatgcttaaatgtcttcgtattgatgagataattatatttgctagtgaataagtgggaaatgatatatgaggctgtgtatgcatagtaagataccttggtatttcaataa

SEQ ID NO: 222490 - DNA, 362 bp, Glycine max
  unsure (1)..(362): unsure at all n locations
agctagagactntacatgaacacacacactccctgatggagagagagagaaaggaacctgctgaggaactccaagaggggaggcagtgatgtaagagacctcaaattcgtaggaaacgaatggatccgctgcagaagagagtgtgaggagcaaggagacgttgattagaaagaagaagaagaagaagactgctctagaagaagaagaagaagacattgtgtggaacttttcaggttttcctcaaaaaaagaaaggtttagagccaagtttttagtagctttttctttttctgtgattctacattatcaagggaattagaaagaaagaacttggtaagggtttctgtgtggtagagagaagag

SEQ ID NO: 222491 - DNA, 472 bp, Glycine max
  unsure (1)..(472): unsure at all n locations
tcttgtcccgattattcatttattggtttattgttntatcatattgcataaactgtaaagtgtggataaaatgaattttcatttattcttttttcatttatcataagaaatgttggagtatgagggtaagctgatattgatatcacactttgacaaaaactcttaagactntggatcagggtcgtggaaaccataaaagccaatgagaccttngtcttaagccctcaagagttttgttttttacatttttaatatttttttgtcaanttaaattattaagtgataagatttgttaagatatgaattattatttgtaatcattttttcattaataagactacataatcttaagttatgaattaatggttaaatcatttatctaaaattttaactttatttcanaatattaaagaaaaatatctcatatctatcttattcttaacctctcccttatctgaaaaaaatctattaa

SEQ ID NO: 222492 - DNA, 435 bp, Glycine max
  unsure (1)..(435): unsure at all n locations
agcttgcgattcagtccaaggtcaacttcagcttctctgattttcccgctcgngaggaaatactaattcattcataattcttcattaatgatttattcatcgtcctttcgaattgaggttcgaatttggttcgtgtgcacaacataagaaatcgcgtgtttccccaattcttgcattagctgtcaaatctaaacgtgttgatgatttaattgggcgcgctgatggcttgaagtaccttgctgaactttgcttgattaccatgtgaagatggacttgatatgtatattgcgactcaatgagcacccaccataggacttgagatcgtgcgcttctgtgactttgtagaagtatatctcattgaatgcattaggctaggttattgtgccatgcgtgtgagatgacgaccacacatgtgatgatatcgcaaagaaatgc

SEQ ID NO: 222493 - DNA, 517 bp, Glycine max
  unsure (1)..(517): unsure at all n locations
gcccgcggtttgattgtgactctctgacatctgaaactaagcttataaactggcactcattgcccaggcggagccccttgctatttttcattctaccatgggtgaatagcctccagatgcactacatggacacgtgtcgtactcatggtgccgaatagagtgcaaccgaccacgttgaggatataagctcaagcttgtatactacaccatcaggcctgccatcatctatgatagatatattgcacccatcatcagcgtacagttgccctacactcatgtgcattcttagctctagcctctntacccaagatctcgagcaactttatcaacaatactatccgctacttcacagcttgaggctcgatactatgcaaagttcccgtgatcggcagatggacgagtgactccacatcatatcatgtgatcgtggcttgcacatctgaacgtggaagctgtaggtttaactgtgcacacttacacatcttcagatataatgcccagatcgtccgttacgacn

SEQ ID NO: 222494 - DNA, 456 bp, Glycine max
  unsure (1)..(456): unsure at all n locations
agctagacacagaagaaaatgaaacacttcatcttgtttgggatctaaaaataccgccaaaggtggcaacttttcatgtggagattgatcctaaataggttgccatcgcgagataaacttcttcagcacaacatcatcactaatgtaactgatgtttgttggagcaaaataggagaaacaagaaacacaaaaatcaatctaaacacatgaactcgtgagagagaaagattggagggaaattctttttattctattgtatgtattctgttacacataatgatatgtctatatatagactaactcaactaactaaccaccataattactaacaaactagtaactggtttttgaattatccttaacaccctcctttgattcanaaacagtgaatcaacaacaagaacattacaacaacatttactgaacaaaacttcttaatccttcaaactctgaact

SEQ ID NO: 222495 - DNA, 487 bp, Glycine max
  unsure (1)..(487): unsure at all n locations
ngcttatctcttcaggatgctcaacacagtactgcatgtgctccttcaacttagacctacaacaagcaaatagacaagagcatataaatcttctcacaaatcacaacaaattcagcattagcaagttcacatgtcacaaattcaatacccgaattccttgttcaggctgttcgcagccacggttgctgcctttccgccgccgtatttggccacaaagtcatccttcacacgctccagaaaagccacaggcacctgtctcccaatcgattcatccgcaacaacacaataagctacaaaaaacaagtgtgtgagtcagacattcatttccaaaaacacagcaccgaacttcagataagcctataaacaaataataacaacacgaatttcatttcagttcattttcaaacacatcaccgaacttcanaatagcctctaaacagatcagaacaacacgaaattcatttcattttcaacacaacaccgaact

SEQ ID NO: 222496 - DNA, 468 bp, Glycine max
  unsure (1)..(468): unsure at all n locations
agctnggagaggatgcttcaacggagganaagattgatggttataaagagagagggggagcacgaaattgaaggaagataaagggagagaagttgaactttgagttgtgtctcacaagactctcattcatcaaagtttcaacaagtgttacacatgcttctatttatagactaggtagcttccttgagaagctttcttgagaaaacttccttgagaagcttctttgagaaaacttccttgagaagctagagcttagctacatacacccctctcataactaagctcacctccttgagaagcttccttaagaagattcctaaagaagctagagcttagctacacatacctctctaatagctaagctcacctccttgagatgagaagctagaacttagctacacacccgctataatagctaagctcaccctcatgacaaaaaacatgaaaatacaaaataaaattccttac

SEQ ID NO: 222497 - DNA, 451 bp, Glycine max
  unsure (1)..(451): unsure at all n locations
ntgagaagtgaanatgagaatggngtaaatctggagcaaactctcacctcacacaagtctataaccttaatctaaacttgctcaaactgccaccgaatcaaaatttgactcctcaacacccaatttaccctagaaatggctcttgtcttcactttggtcactcattttcctcctttgcacaacccaagctttctcacagtcctaaatgacatttcaaactangaataccttactctaaacctcattaccactaaatcagattggctttcaaatcctaaagcatacactttccactcatatcactacattctacttttaaccctaggtaactctaccctcatctttatagtttccatagccatttagcacacaagcatcatataaaaaccctaaacagaatggtaagctngactcnaccaaacatgacacattagcatgctntcataaattc

SEQ ID NO: 222498 - DNA, 462 bp, Glycine max
  unsure (1)..(462): unsure at all n locations
agctntgagcaaattcaaacgatgataactnttactctctgatgtcggattgagtcccgtaatatatcgagacgctcgacattgataataaaaactctgtgaaaattcaaacaacgataactttttactcagatgtccgattgtgttccgtaatatatcgagatgctcgaaattgaaaatggaagctcgtagcaaatgcaaaccacaataactttttactcggatgtccaattgtgtcccgtaatatatcgagatgctcaaaattgaatacaaaagctctgagcaaattcaaacgataataactttttactcgaatgtccgattgcgtcccgaagtatatcgagacgctcaaaattcagaataaatgttctgaccaaaatctaacgacaataactttttactcggatgtctgaatgaatcccgtaatatatcgagacactcgtaatctaaaactaaagctct

SEQ ID NO: 222499 - DNA, 375 bp, Glycine max
  unsure (1)..(375): unsure at all n locations
tattgtcgttnngaattgcttagaccttatgttntcaatttctagcgcttcgatatagtacgggacacaatcggacatccgagtaaaaaggtatagttttttgaatttactgagagcttcagttttcaatttcgagtgtctcgatatattacaggactcaatcagacattcgagttaaaagttatggtccgttgaatatgctacgagcttctgttttcaattgcgagcgtctagatatactaaggcacacaatcgatcatccgagaaaaaagttaatgtcgtttgaatttgctcagagcttcggttctcaattttgagcgtctcgatatcctacgggactcaatcggacatccgagtcaaaagttattatggttt

SEQ ID NO: 222500 - DNA, 109 bp, Glycine max
  unsure (1)..(109): unsure at all n locations
aaaactgcnttatccccactccgcgccgcactcgccactatagcagtactgttgttattaattaagaatttagatgaatggaagtctgacaaaaggatgatgacctgat

SEQ ID NO: 222501 - DNA, 394 bp, Glycine max
agcttcttctactcctgtattagattatgtttttactctatagatgtttcactctatgatgcagagcctccacagaggtcatgttaatatcatgccgagtcttcagagctgaggcctgccatttattatgagcacagatgagttcctgactcaggtggtttggccagtagaccagccttctccttctggagggggtgggatctccgtaacccaagagcctgagcaggcaacagaaaagccagttatagcataggatgagctcactcctctttagccctctttaattgctgcagatacatctatggctcacgaagaggaatcttcacaatatcccatgccggagccataccctccaacccattcttcatgatgcaccagctactccagcgctgga

SEQ ID NO: 222502 - DNA, 394 bp, Glycine max
tcttatccaaggctcatctaggtggagaagctccttcttccatggcttattccttaatggatggcgcctactctcacctcttttcctttgtcttccgctgcatctccatggtggaaaatcaccattaaaggacaccattgaagctcaaagatccagcctccatagaagccccacaagcaagcttccatcaagtggtaatcagagcacaagagcttcaagttggtgctccttaaacctccattaattctatgtgctttaccttctcttccattatagtttcttcattgttctccatgtatctcctcacatgtcttgtgctaaatgttgttaacatgattatttagagtttccaccgattaaacttgctataaaagctagatttgatgttcaatgg

SEQ ID NO: 222503 - DNA, 453 bp, Glycine max
agcttccaaacatccaagtaattcaacattcttatagcacatactatcacagccaagagaacagggcaaaggcagaaaactctgcccaaaacaccaaccaaaatcacagcttttctcacttaaagaccccaataataattcctttgttccagttcgttaaccgttggatcgactcgcaaattttactggaagtctctagtacataagcctacattttgaccgttgggatctgctagcaaacattcagaactcattctgcactaccctttccacaggcaaccacacacaagcatttttctgcacaaagccaaaatcctgctgcacctatttgacagcaaaattctgcataagtgcagatttcgaaaatcacacttcccctcatgcgatcttgcccaaatcaattcctacaagtcccaaatcatgtatcaatcatgtttaacccaaagtcaagct

SEQ ID NO: 222504 - DNA, 451 bp, Glycine max
ctaagcttctccaagtggtcttcggcatcacattcaaacttgatccgttgttgattagtacctttgcgacaacatggtccatacatctcaccgacacatgtaaagccttgttgtgtcctctcccctcaacgggaatctcttcttccgagaacgcaataaaattattggtggttatatgattaacgattccttcaaaaccctccactaagatatcatgggctacatgggcctcgttgaggacctttattaatagcgcacgatgaggctcagagtttatgagtagttcaagcaatgagatccttgctggagttttattcagttgctcgactaccttaaactcgcttttttggatgaggcgaaggaactcatgagcttcttccaaagccactatctttccttggagaccctctttcttttcagtcccttctactaccggaggaatcacttcttt

SEQ ID NO: 222505 - DNA, 479 bp, Glycine max
  unsure (1)..(479): unsure at all n locations
gtcacctgctgcatgcaagctttagactaaaggatatcatgaatatttctatagttagagatgagattaggtcaggtcagaccacgctaggctttatgtaaataggcctagattgttttataaaacaaagacctaagcttgacctattatctattagaggcttttttctttgtctagcctaacctttttaaaagtctagtatgacctattagcttatttaaaagctcattttatattctttccaaagtaaaactcacaccacatattagtttttcagcaaataagaaactaacaatcaacaacatatttgcatatttgatccattgatcacgtctttcaattggataaaattatctatgcatacatgctatgttccnttttagtattttgattcttcatctattaattaagtttatgtccagatcaaaaagaagagaaataaaacaacatttattccagaaacttaacctgcaataata

SEQ ID NO: 222506 - DNA, 459 bp, Glycine max
  unsure (1)..(459): unsure at all n locations
ngtcagatattccttctcaactactacacttctctcaatataatacgtagatgtgtaatgttagtagagctggatgctgatcaaataactaaaataaacaaaaagtttcaaaagctggaagatgtatgtcctgccatggaaaaaaaattactaagtgactaaagttcttctaagcagtgaaaaggagctccgtgaaaggcttgtgggttttagtttttctgctttccgaactagcatgtccaatcaagaagcanatcccanatctggttgttggtatcctgtnggactagcacagatggaacaattgattggtttagatcangaacatttacgtgaccagttgaaagtcattgcaccagaagttaagcatgagaaaaggtacttcttagatttagatcttgtttctttttctatgtctactgacaaatattttcatacttcgttatcacanaaactttt

SEQ ID NO: 222507 - DNA, 413 bp, Glycine max
aattgagctaagtctattcttcttgttgatgcaccttacttggtggattagcacgccctcttttttatgtgtaagcaagctgtctattgagcttggtggcttaatatatgatggactcaggcttaaatagcgccgtaattaataattattctttataactttattaggcatatgtttactcataatttacgatcctatttatcttctaattaatacaacataatgatcagtatcctgatttcttgcgattgatcaatccacacttcttatcgcatgactgagggttcttatatgcatatacactacgagtgactctgtctattctccatcgacgctagatttcagtagtgcaagcctatgatggcctttatttcattcttactcttctaaaaatgagagatgcgtctttgtca

SEQ ID NO: 222508 - DNA, 436 bp, Glycine max
  unsure (1)..(436): unsure at all n locations
gcttggagtttccagtgccaattcgtcttcttctttagtccagtcttcttctggcttcagttcattagagggctttccttctgtgtccagcatcttgggatgttcccagcctttgatgacagctttccaggttctgctatctagtgatttgaggaaggccaccattcttgctttccagtattcatagttggttccatcaagaaatggtggtctgttcactggtcctncttctntctncatgttcatcagaaattatcntcctagatctcactcagtgatttcgagtgcctgctctgantaccaatgaaattcttgatactgggacagatgtcgtaccggatgtcacgacatcatgcttcagaacatgcagatngtatgtgtccgtatgaacagatttaaacaagttaataacacaagagaattgttaacccagttc

SEQ ID NO: 222509 - DNA, 408 bp, Glycine max
  unsure (1)..(408): unsure at all n locations
agcttaatntcagccttcattacatccctccaacattgtntttgaagggctttctgataacttaaaggctcaatgtcagcagataaagacattaaataatgattatgcgaattagaaatagaagaataagacataacaaaatgtaatggatacaagcaatttgatgaagtttgagtaataagattgtagtaacagtcaacgaggttgatagggggtttatcgattcaaatggagcgacgtggagggacaagttgaggtagggctctatctaagggtgggtaagaaaatgaatcagaattaggatgaggcaaagtgtcattnttataaatcgagggtgagggcgatttggatgaggatgcacaagtgtgacttatacgaaggcaaattgggctcgctatntatggattc

SEQ ID NO: 222510 - DNA, 473 bp, Glycine max
  unsure (1)..(473): unsure at all n locations
tattaatatatgattaatataattaannaatatttgtaaaattagctgataaattagtttataaatgttaatagcataaaaatacatatttaattatttaattatatatgtatgtatttaatttgtttccaataacgtgtcatcataaaaactagggcaatattttttttaaaaaaaattgtattataaaactataaaatgtttgagttgtataaagcattaattttctactaatttttctcttttttgaacccaatttttttttttgatatttttgtaaaagttagggagctacatactnttaattgtatttccttcttaacatggcattccttcttaacgtgaattatctttatataaatggcttntttttttcattgactgaaaantttaaagatccgagtgcacaaatgacatatatgatagtaagttactgagcttttgttaaatttatacctgaatntcatacttaa

SEQ ID NO: 222511 - DNA, 189 bp, Glycine max
cgcggcagtgcagcgtttaattatactcgccgagcttgattgttatgtatgacagagttaagcctatgacagatattaagtccaactcacgcctgatgtgttcaactcaattcaagtttgggtcactcatttcctcccctcgtgaatgcccacactgacaagcttgactcctttcgtcatttgatgcat

SEQ ID NO: 222512 - DNA, 422 bp, Glycine max
  unsure (1)..(422): unsure at all n locations
tcgaacccgttagtgacgtataccttactgttcataacgcttgatacacgaatgttgacggagatgggcgccacttccagagatggaagataagtcacggtgacgccacaaggaatcaaccttgataagtcagaatttggttcaacagaaaccctgagagaagctttctcacgtatttgaaaagaatgtcaaaagtctctttcattcattctgaagaaaatatatatagttcaccaaaccctaaaaacaaaataaattggtgcaactaanaaggcataggtttcagccacaaccaccaattttatgtatttaattgcaaagattaaataataaaatagagataaaaattatggaaaacatgggccttcaatcatcatcaatggcagatatacaaatgaccagtcttcgctctattgacgtgt

SEQ ID NO: 222513 - DNA, 426 bp, Glycine max
agcttgtgcaaatcaagtcactcccgcattttatctctagcatgcattgtatgttggtctcgtcctttgtcacgggaagccggaaggtccatatcaccttcttaattgtacacatggggcactgcgcccccaaatgcacaagtaagaagagataattttccgggctctcgtgtccgtaaaatgcattcatatcatgcaccacataagcatctcttcataacatcataatggacatatcctgcatttgtccgttatcatattccagcctcacattttgcatgagtcatggcatcatcatgcatatgcgttcaacaaactttgtgatctgcaaaattgcataccatttgttatcatgtttgctcatccttgcggtttcctctacaaaacaaaaacaaaaaagggggaagcgtgagacttcacactaca

SEQ ID NO: 222514 - DNA, 336 bp, Glycine max
  unsure (1)..(336): unsure at all n locations
agcctcaaagaggtccaggaaggacaaggcagccgaaggaactagttccgctccggagtatgatagtcaccgctttaggagtgctgtacaccagcagcgcttcgaggccatcaagggatggtcgtttctccgggagcgacgcgtccagctcagggacgacgagtatactgatttccaggaggaaatagggcgccggcggtgggcatcactggttactcccatggccaagtttgatccagaaatagtacttgagttttatgccaatgcttggccaacagaggaaggcgtgcgtgacatgagatcctgngtaaggggtcagtggatcccgtttgatgc

SEQ ID NO: 222515 - DNA, 457 bp, Glycine max
  unsure (1)..(457): unsure at all n locations
agcttgtagaatggttagacatgatacatgtcatggcttggtttggttcaaggataaaagggatgccccacattatttccatgacacaaatgcaaaaaagatgatttggaaactttatgcaaaactggtcatgcatgcgcctatgcagacgctcaagtgtcaaatttttatggtcaggtgatgctagggttcaggattcatttcctctattttaaatcaacccaatgtttccaaaatatgttcttttatcaatttgtgcattcctccaagtccatttcgggcgtccggggaaattttcacagcattcacccttcaggtgtagacacgttttttcttcaaaaatctgttatgatcaatgaattttntttcaaagaaaaggtggaaatcatctcttttcaaaagcatgtcnggttttagctagacaacttattntctctttttccacctttatccttac

SEQ ID NO: 222516 - DNA, 489 bp, Glycine max
  unsure (1)..(489): unsure at all n locations
ntatcaaatggatgttaaaagtgctnttctaaatggcttaattcaagaagatgtatatgtagaataacccccaggttttgaaaactcagacaagcctaatcatgtttataaattgaaaaaggctctatatggattgaaacatgccccaagggcttggtatgagcgtctgagtaagtttttgttagataaaaacttttctagaggtaaagtggataccactctttttataaagagaaaattaaatgatattctactagttcaaatatatgttgatgatattatttttggatccactaatgattcactatgcaaggaattctctcatgacatgcaaagtgagtttgaaatgtctatgatgggagaactcaacttctttcttggattacaaataaagcanaccaaagaaggaatctttgtcaatcaatcgaaatactggaanggaataattcaaagatttggaatgcaaagtgctaagcacatggctacacn

SEQ ID NO: 222517 - DNA, 358 bp, Glycine max
agcttcaagttgcttgcatagcaactagttatattcctacaaagcgtcctgtgatgaaagatccaataggcttcttttggatgggatgtgtgctctatcacgcaagattgcatggtcactagcagccggattctcaattaatcccatggcttcttcaggggtcttaaattctatttctttccctgcagaagcatctaatagctgcttggcttgaggccgtaacccgtgaatgaaaatactgagtcggataggttctgagaatccatgagtaggcgtgtttcttagtaacccacgaaatctttccaacaccctcactcaaggactcgtctggaaattgatgaaaggatgagatgacagc

SEQ ID NO: 222518 - DNA, 364 bp, Glycine max
tcctagacataagaatgcgcatcacgtaacaacttcttctgatgatgccagataaggtcatgagggataatctcagctaccttgaagttagcagatggctaagtaaactctctgtttaggtggtagcaaagctcatatgtgcatcatttaggactttactggcatagtaaatagagcgaagcatcttatacgcctctgtcctagcactgcaccaacaacgtagtcactagcaccacacatcatttcagactctaggctgcaatttggggccacaatcactggagctgacaccagcctccctttcatggtgtgaaatgctagcatacattcttcatcgcacttatacacagcatctttgttcgat

SEQ ID NO: 222519 - DNA, 468 bp, Glycine max
  unsure (1)..(468): unsure at all n locations
agctnnttgaaaagactcatcccttcaaaccattttgaaaaggaacaaagggcttatatatatgtgtgtctaacttcgaaaagaaagagagagatattctaagagaaattaattgccaaatgctctctcaacaactcttgggaaaacacttgcaaatctattgagaattcatccaagaacttcaaattgtattatcatctctaaaagagagaaattcctttaggaacttcaatttgtatcgtccactctaaaggagagaaatctttctgttcatctcagaaagtcatttgtagtcaagagactggttgtctcttggattgtgagaattgtaatcaagagacgggttgtatcttggagaatctttgaacacaagggtgagggatcccaaggtatgttcaaagtctgtaaaggatttacagagatagtagaaaatctcaagtaggttgcttgagaactggacgtagacat

SEQ ID NO: 222520 - DNA, 419 bp, Glycine max
  unsure (1)..(419): unsure at all n locations
tctcccanaaaatggtgtcgtcagcaaatgggaggatattcactagaactcttgttcttccctaccaagaagctntggaagcaatcttttattgttgcttccctcatcattcctgtcaagccttcaacaaccaagtcaaacaatagaggggccaaaggatccccttngtctcaaatctcttgaggcttaaattcagaggttgagcttccattcactagaatagatatagaggctgatgtgaggcaccccttaatccatccaatccatctgtcatggaacctcattcttctcatcatatganaaaggaattgccaagacactaaatcataggctntttcgaaatccactttaaacaccatgcaggacctcatagacctcctangcctctcaagtacctcattagcaaccanaacaccatg

SEQ ID NO: 222521 - DNA, 449 bp, Glycine max
cagcataactgtagtgaattttatgtcgtatggaaccaagtgttgggcggcggcaaaaaagaataacctgaatttcactgtggtcatcactttgaaggattatgttgataacagcattaaaagagacatcatatattgctttcactacatcatcaggggcattctgtataaagcaacaacatactgagatgagaaaaccataaagataaaaaaatgtgctcagaggtcaaagatgacatgtttccaagtataattgccttcaataacattgttaccaaatctaatgatccagctaccaaaccatcagcctgctcttggggctataagaacatctacagaagtgtataagcaacaaaattattctaaaataactaaccagacactgtaataactcgaataagtcatactttattcaaaattgttccaatatatggcaaaattctagaaac

SEQ ID NO: 222522 - DNA, 294 bp, Glycine max
  unsure (1)..(294): unsure at all n locations
ggtacgaatgtaagagacatcttctacgaccttggtgatccttgactctatctcattgaatcgcatgtccactcgtaactccaaagtatcaaacctttcaccaacaaaggtttgaagaccatcgaacctgtccaaaatcttttgaagaagagaggaatcttctccaccatgtaaatgtccttcttcatcaatgggatgagcaccctttttcacccaagagccatcatgctctttacngtaaccaaacgatgcaatcacatcagcgcctattagaaagatctcttgatggaacat

SEQ ID NO: 222523 - DNA, 326 bp, Glycine max
actcagctgacacctgtgcagtgagcctgcatgtggaccctcaccttttgtttatgtaggtcacgaacgattggacatcaatccctttgaatgtaatcatacatgacgtcacctattgacattagtctgctatcttgatgaaaacaatgtcgtgttgagaaccgacattgctagattgctaagctaccaatctaccatctcctattagctcatgaatggattgacctataagaaccaatatcttgatctcttcggttacagaagagctagctgaaggccgagacacgattgccgttgtataggagacttcaccattgtgaatatat

SEQ ID NO: 222524 - DNA, 464 bp, Glycine max
agtcacctgctgcatgcaagctaatacacttgacagtagtcctaagacaactcttttgagcttattgtatgcacctcagaatgcatgcacacatctacttttcaaagatgtttaaactataagagtctatatgcaatgctgatcatgcctcaaattatgccatccttacaacatgcattgctaatggtttggcataactaagactaaggatgtatactctacacatgtctcaactctcaagttgtcgcatcattaaattctatcaacattaatcttctaatgagccctttatgtgcgtggctacacattgaagaagcgatgacgccaattgcagtcttacaatgaacccactttgtatgtggatgcataaggaagacaagatgttagacactgcaccattctaatgttgctaactcaaagtttcagaagaaccaactatgtttgtcactgcatatcgaacacat

SEQ ID NO: 222525 - DNA, 187 bp, Glycine max
acaaaccatcattgttctccattgaaaacccacactgagaggaacccttcaaccaaagcggaatcttccaacttggctggcggtttcggtagagaaggaaaacactaatctgacctttcgttatcttcgagaggcttctgtggaatcgaagagcaaggacaagaaggaatcttcaagtgacacgacg

SEQ ID NO: 222526 - DNA, 454 bp, Glycine max
agcttcatgctgaagtatgtatgacaaaactttattactgttattcaacacatacaagtgagcttgtaacaaatcttctacacttggagtgataacatgcagtccttttgaacccttaccgcccactctgtcgtcatggcgagactcaggaaggccaataggtttagccttttcaatgtactctgaataaaattcaatggcttcttctgcaatgtacctttcaacaatagatgcttccagacgatgtagattcttggtatacccttttaagatcttcatgtattgctcaaccaggtacatctaacgcaaataaataggaccacaacatttaatttctctgacctgatgaacaattaagtgaatcatggtgtcaaagaaagtaggaggaaaatacatctccagttgacacagtataattgtggcctcattttccaggccatcaaacttgacagga

SEQ ID NO: 222527 - DNA, 469 bp, Glycine max
  unsure (1)..(469): unsure at all n locations
tgaagaggatgctntaatggaggataagaaagagagaatgggtgatcacgaaattgaaggaataaaagagggagagaagtggaactttgaagtgtatctcataagactntcattcatcaaaggtacaacaagtgttacacatgcttctatttatagactatgtagcttccttgagaagctttcttaagaaaacttccttgagaagcttctttgagaaaacttccttgagaagctagagcttagctacacacacccctctaataactatgctcacctccttgagaagcttccttgaaaagattcctaaagaagctagagcttagctacacacacctctctaatatctaagcttaccttcttgagatgagaagctagaacttagctacacgcncnctataatagctaagctcaccccatgacaaaatacatgaaaatacaaanaaagtccctactacaaagacgtactcaa

SEQ ID NO: 222528 - DNA, 445 bp, Glycine max
  unsure (1)..(445): unsure at all n locations
agcttcatgtcttcattcattgtcgntgttttttatcttttataaggacatggttgtagagacccacattgttgttgttggacttatttatccatcttggtgtgggagtagagacccacattgttcttgtctacactcaactgcacccacagggtttgtggctagtctttggacttattttaatgatgccataaatatatcactgcgaactgggtttaattctattaaaagcaccttaggttgtatacacatatgcacctatcaaccctagccaacccaggttaatcataaaatgtatgttagagtgtgaggattctctatgctatagtacctttgatagatcaatgtagtataagcacctttctcacatgaatggatgcgtagtatatgcattctaataaccacaatgaagatgatttgtgggtatgatattctagcaaagaca

SEQ ID NO: 222529 - DNA, 435 bp, Glycine max
  unsure (1)..(435): unsure at all n locations
tataacanaatntaatccncataacacanatggtcttatatatttctaaaaatgagaaattgatttccagcagctcataacctttgtaaggtagaaaatacctttgtgtgttttttacttttaatattatgcatcatgatgatgaagtccctacattatatgcacttatcatatattttttgtatcattctgattttcaatcaatttcactctattagttttcttaattctggttgttctcttgggcacataaaccaggaaaaaaaaagctagtaataagatattgaaattcanaaacaactacatatgggtggaagtctgtgaaattcaaggacttgcacgccttgttagagtttatttcactttgaatanttgncgcagtggttagtttggggtttgatcttggtccatgtttgtggagtcatattgtggggc

SEQ ID NO: 222530 - DNA, 433 bp, Glycine max
  unsure (1)..(433): unsure at all n locations
cttaagtcacctgaggcatgcaagcnttgagccaaaatcctgactcaccatatactcttgttccanggtgagaatgtcaatccttaccctcggaagcaaaatagaatagaagggaaatttccaatcaaagaaaagagaaggaaaatttccaatgaaagaggaaaaagaaaagaatggaaattcccaatcaaagagtgggagaaggaaaaaagaaaaggaagacaattcccaaccaaagaatgggagaaagtaaaaaaggaaggaagctcctggtcaaagaaaccacaagaaatgtgcagagaggtctttggaccacacgatatctgaacagtacagaattgtcactaaatgaacaaaaaggaaggaaaggaaaccacgacctagaatggtcttctccctttaattaccaaccaaaatcccgtgcgctagcgac

SEQ ID NO: 222531 - DNA, 381 bp, Glycine max
  unsure (1)..(381): unsure at all n locations
tcaaaggtcgagatgttagacaagtggcctcagatatcttattattagggggttgaattaagatattccaaactacttccccaattaaaaatctatttcactttctttttaagttataaattcccttaacaatgaacttcttaaatattaattcaaataaaaaaattgagtatgaatataaagcaataataaacaaaggagattaacggaagagaaagtgcaaactcagaattatacttggtccgccacacccttgtgcctacgtncagtcctcagcaacccgcttgagagttcactatcttgtagatccttttacaagttctaacacacaaggacaatcctntctttgtgttagaattccttacaacaagagaccacagt

SEQ ID NO: 222532 - DNA, 363 bp, Glycine max
  unsure (1)..(363): unsure at all n locations
gtcacctgaggcatgcaagctatagactggacaagatgctcacatttttgttgtattttaaagcacaatctcaatacatcgaggaacaatcttttgaatatctgtgaacaatgagagggagagacaacacatcactgatacacagtggaatacgtttctaaccaataataagccaaatacgcatacatacaaccaaattatattgattacacgaatacatcctttgcaaatgaatccacaactatcatatatataaccctcccaaaccaagaatagaatngcagctccgccacatggacggctgaaaaaggccaacttggatcatgaaaagggctctactgtattagtcatttgagatagagc

SEQ ID NO: 222533 - DNA, 357 bp, Glycine max
  unsure (1)..(357): unsure at all n locations
tttatttatttatttattttgctaactagaccttctcctataatgagttcggtctctgaaatactaataataatacattctttaatattccgttttttttttacccactctcttgttaaaagaaaatttgttcgggcttcattaaatatgagaatctcattattctatatgtattcgcggagtcttatttctaaaatggtggaattaattcacataaatntcaagagagttggtacattaaatgtaacggagtttgtggtgtgattcggttcgattttcacataaatagtatttgaattaaacataaaataaatatgcgatttaatttgatttgatacgtttaaatacacactaaat

SEQ ID NO: 222534 - DNA, 321 bp, Glycine max
  unsure (1)..(321): unsure at all n locations
agctntataagcgcgggtctgggagtacgtatgttttgtggtcgcgatatactaagataatgttccgagtacattgtatttggtacgaccttgcccttctgattttcagctggggaattggccagtggaggaacgcccctacatttacacagcgagcataatgtacacctttacggttttataaagctatatagttgggcctaggctttagagttcttctcttggttaatgcttggcgtatcttgattttaaaaatataatacaaggaggtttattgatatgttcctacgcctctactcattctcatccatttgcgagtga

SEQ ID NO: 222535 - DNA, 477 bp, Glycine max
  unsure (1)..(477): unsure at all n locations
ctaacacttgcctcaaatgatccacatgaaccatctcatctttgctatagattagaatgtcatcaaaaaataccaaggcaaattgcctaaggaatggcctcaatacgtcattcataaagccttgaaaagttgatggagcattggtaagaccaaaatgcatgaccacaaactcataatgccccttatgagtcctaaaggctgttttctcaatatctgaatctttcattctgattaggtgatatccagccttcataatcaatttagtgaagatagtagctccaccaattncatccaaaggctcctctattattggaattggaaaattattacgtatggntatcttgtttaaagctcgataatccacacaaaatctccagcccccatctttctttctgacttagataatanggctagaataaggacttatgctangccttatgacccctaattncatcatntccctaaccatcctttcat

SEQ ID NO: 222536 - DNA, 462 bp, Glycine max
  unsure (1)..(462): unsure at all n locations
agctntgcggatttggtcttcgccagtgatttgatcgatgtgggtccgaaaagaggcaaatttgatcatcctactaggacgactgagaaaactggggcaaatgaagagggtgagaaagagggagaaacccatgctgtgactgccattcctatacggccaagtttcccaccaacccaacaatgtcattactcagccaataacaaacctcctccttacccaccacccagttatccacaaaggccatccctaaatcaaccacaaagtctgtctaccgcacttccaatgacgaagaccacctttagcacaaaccaaaaaaaaaaaaacaccaacaaaaaggaattttgcagcaaaaagcctgtagggttcaccccaaattccgtgtcatatgctaaacttgatcccatatctacttgataattcaatggtagccataaccctagccaaggttcatcaacctccatt

SEQ ID NO: 222537 - DNA, 436 bp, Glycine max
  unsure (1)..(436): unsure at all n locations
taatggatgaagggttaattggtgtatgtgttgcctaatcatatattgacagccctaagttggttttcgcttagtaaattaaaatagggttggattaagtggttaactgttagggacgaattctccataacctangacaagagagtggcttctgaataagaggaaacaacccatttttaatactattaattttgtattctagtttgcttgttctttatttcacaaaacaaacaacccccccctaatcgtactattaatgcaagtatattatgaacatttggttatcattgctcgttgggaaacgacctangatcacttcctagttattggcatttcatgtttattngattcgggttnggtctcaatcacatattcaactatttttgctacctaaattaacacataaatgaacanggcatttttctacctaaataac

SEQ ID NO: 222538 - DNA, 465 bp, Glycine max
  unsure (1)..(465): unsure at all n locations
agcttgtccataagctctntntcatagtaggatgtaatgtgtattttcctaagggcactcttaagatcattccaatactcaactggaggatccccatgaatccttcgttccctaacaagggaagtccaccaatagagggcatacccttgaaagctaagggtagccaatggaacttttctctcttcgctaatatgatagcaagaaaagagttgttcaaccttcatttcccaatctaagtaggcctcaacattatcttttccatggaaatatgggaggctaacgttaacctcttgatgccttctatccttttcttttctttaggagtgatgtttagtatgtgaactatggcgccctctataatagttgctaagttcttcacttaaatcttgcaagagtcatgactactataggaggcatgttnttctcttttcatttctttcattattnttcttctttcttcctctc

SEQ ID NO: 222539 - DNA, 376 bp, Glycine max
  unsure (1)..(376): unsure at all n locations
ngagtgaagttaagcattctaaacaataacaaaaaatagtgcttaattggtttgtacatatacattatctttaacattgccatgtagcttgcacaagatatatgaatccactttagttattttatagacttaaagtttaatgtctaagctattgaacttaattaaccttgttccattactttcttctacaatttataagaataattaaattaagacatgttaaaaacggcattggataatgatgtcttgcaaggggcacctanactgagaagacagggagggccaatcacaaaaaataaacacatccaatannatttttgctgaataatacattcaacaaaatataccattatttttatacaaaatattataattg

SEQ ID NO: 222540 - DNA, 408 bp, Glycine max
  unsure (1)..(408): unsure at all n locations
agcnttgtgtaatcgattacacatatttggtaatcgtttaccagtgttngtttctgaaaaatctaaagatgtaactcttcaaaaaggttttgactctttcaaatgggttttaagcttttctaaaagatataactcttctgaatggctttcttgaccagacatgaagagtctataaaagcaaggctttgttttgaattttgaatcaattattccaagtctttctaacaatctcttacaatcctttactagccttgaatctctttaaacttcttcttcttccttgtaccaaaagttttctgaagttttctggttttctaaaccttgaaaacttgtgctattcatccttttcattctcttctccctttgccagaaagaattcaccaaggactaatcgcctgaattcttttt

SEQ ID NO: 222541 - DNA, 262 bp, Glycine max
  unsure (1)..(262): unsure at all n locations
tatgcacatatttccttacgaacgttcacttgcacaagacattctattatctaagaaaaatgcacccatatacaatcaaggcagcttcgttacctagattatttacatgtacttccaaggtgtatttgttacttacatcacacacatctccttggctaaatttacatacatgcatactcaaagcattttggggtaccaaaaattgcacatgtgcacatcttggtatttctaatacctatacatacacanacttcatgatgaa

SEQ ID NO: 222542 - DNA, 425 bp, Glycine max
agctagcctgtccaatgcagcagtaatgatggtccgagttatgttgaggaacggctacaaacccagaatgggtttatgcaaagacaacgacgtgataactagcctgatatatgccaaaggaaatcgagggaagtatggttgatgctataaacccactcatgcagatataaagagaagcatcacgggaaggaagagcggtggtcaaagctcgcggttgagacaagaaagtgaagggagcccgccctggcacataagtagaagctttataagcgcaggtctgggacacgaaggtcaagtggtcgccatatacgaagatgatgttccgagtacatcggatttggtacggtcatgccctcctgatttctagctgggaaactggcgagcggaggaacgccccggcatttacgcaacgagcataatgtaaa

SEQ ID NO: 222543 - DNA, 463 bp, Glycine max
  unsure (1)..(463): unsure at all n locations
taagctcgatgattacatctccacctttctcaagcaaattcttcttgatatcatcataatcttcatgatttacattctccccctttatgatgatgacaaccacctgtaggttaggagcaacagcaaagaaaatatctatttgcatatagttttactcccccttggttttacattgattgcttatatgagacaaatgaagatttcatagttttcatatataataaagttgtctcataaaacaatagataacttcttcttactagtnaatcttatatctttctctcccgctttgtcaacatcataaacaaatcatgaatagagaggagagagatgttaccacttgttgcaatgtatgagaatcaagtgataccaaaaggcattataaacaatcattcaatattaatcaagcaaaaacacgtacaataacacatcagtcatacacaatcaaatacaatcaatcatc

SEQ ID NO: 222544 - DNA, 389 bp, Glycine max
  unsure (1)..(389): unsure at all n locations
aaaatcatggctaagagaaaaatagtgtagaacgaatcatttctttccctcaagcagacaatgttggacaagtggctctaataacttaagagagggtgaattatgttaaaatttcttgtttaattgacttctaaatctccttttaaatctatatgttaagactattgaagatgatgataaagatgatagttatatcaacataatacttcaagtgtgcaagataaataaaatatgcacgataaagtaatcaagatagggaagagaggaatgcaaactcagtctatccatcttggttcagtcacttcctgtgcctacgttcagtcctcaagcaacccacttgagaatttcactaactttgtaaaaatcctttntagaacttctgaacaccg

SEQ ID NO: 222545 - DNA, 447 bp, Glycine max
  unsure (1)..(447): unsure at all n locations
ctgatatggatattagattaaaggtaaaagctggcacatattatacattgtgtagggtaatgagtgcagaaagttgtactatgcctaagtgggtagcattaacaagatggccatttggtagcttaacactaatgggactaatttgacgatatgaataaaaatttgttaaagaagaagaaacatggtcagtggctcctgaatctaagatccaagaggtagagttggatttattcgtaagacaaaaccatacctgttggatcgttattggtgcaagacgaaatagaggcaacctgtggtttaatggacgctgaggttccggccgacggctgttgtattaaagctagaagtgctatgtactgctctgatgaanaacgaacctgttcttgtgattcttggggatagtattggtcatctgtggccttcccttcagttgccactacactatta

SEQ ID NO: 222546 - DNA, 434 bp, Glycine max
  unsure (1)..(434): unsure at all n locations
acgatgatgttaagaattaaatattataaagcaaatccgccaaaggcgagttaagaaaaaagagacaaaagatctccaaattttacaaggaaggcacaaaagtgcaataaagattaatgaataagacaaaaggagtagatcccaacccccctaaaaaaattgaaatgaataaaagtacaagcaagacactcaaggttcttactcaatataacccttaaatactctttgagtctctctgatcgtttctttcatagccctcttacccatgaccacgttgcaagcccaataaagcccatgtggatcaaggaatgacntaattttcttttaagtttagaatatggaatggaacgcgcacacacttgtgactatngaaaaaaaataaaanaataataataataaaggagaatcctcgagggtttgcactttcatatttg

SEQ ID NO: 222547 - DNA, 472 bp, Glycine max
  unsure (1)..(472): unsure at all n locations
cgcttgtggggcatctatggaggctggatctttaagcttcaatgaggtcttttaatggtgattttccaccatggagatgcagcgaaagacaaaggagaagaggtgagaggagacgccatccactagggaataagccatggaagaaggagcttcaccaccaagatgagccttggataagaagcttggagaggatgcttcaatggaggaaaagaaagagggagagaaagagagaggggggagcacgaaattgaaggaataaaagaggtagagaagtggaactttgaagtatgtctcacaagactctcattcatcanagttacaacaagtgttacacatgccttctattatagactangtagcttccttgagaagctntcttaagaaaacttccttgagaagcttctttgagaaaaacttcttgagaagctagagcttagctacacacacccatctaanaactaagctcaccttc

SEQ ID NO: 222548 - DNA, 322 bp, Glycine max
ctgctgcatgcaagcttcttatccaaggctcatctaggaggtgaatctccttcttccatggcttattccttaaaggatggcgcctcctttcacctctattcctttgtcttccgctacatctacctgggggaaaaccaccattaaaggaccccattggagctctaagagccaccctccatacaagccccactagcatgtttccatcacaatgtacacgtctttagagggctacacgcccatgcctttagaggactacacgctctctccttaggaggactacacatcctcacctttacaggactatacgtgaatccttggtttt

SEQ ID NO: 222549 - DNA, 294 bp, Glycine max
  unsure (1)..(294): unsure at all n locations
ttacaaagttgtagttctagtcgctaatcttangctcttaaatttagtacacgctcatgattttcttattcctataatctatacatcaacatatcagagatatttttatgtgtaattatctagtgttgctctgcttccaaattaatgtatttgataaaccatacggaatgatcatgtcattggccgataattagatgcttacggggctcatcaacaagtccattgganataagtatgggcttgcagatgttggtgactttgtgagaatgaagtgagtttgtgaaactagctaag

SEQ ID NO: 222550 - DNA, 354 bp, Glycine max
  unsure (1)..(354): unsure at all n locations
agcttagatcaggcatccgagtcaaacgtttgttgtctttaatatgcatgggcattncatatcaacttttaatcgtcatgagatattacgggcctcaatcggacatgcgagtcacaactttagcccgccagaattcacccgagtcttccatgttaaatattgagcgtctcgataggtgacttggcttattcgaagatccggaggagaagttatggtcgttcgtatttgcgatgggctttaatattatcctaagagcttctccatatattatgagctctaatcgggaatcctagccaaacgttatggctgttccacattgcgtggtcaggccattcatacttttcagggcgatga

SEQ ID NO: 222551 - DNA, 440 bp, Glycine max
  unsure (1)..(440): unsure at all n locations
acttagaaatcaagtgatcatgtattccgtatatatatgttgagaaaacggatgcacattctatctatatacagntgtttgctggttgcttgaatcttgatttcacgtattgtattgtcatcatcaaaaagggggagattgtagatgcaattggctctgatgttctgatgatgatcatgatgatgtgttgcaattgatgcaaatgggcttttcaagaataaaattcaagacaatacttctagattacaagtcacaacatccagatgatcactagaatattangaagggaatcctaattgaataacacaggttcgccaagtgattaaaataaaagtgtttttcaaaggtttactctctggtatcgattacanaggatgtatcgataccagtggcaaatacgtttataccactataaaattggatccaatttaaacctgaat

SEQ ID NO: 222552 - DNA, 457 bp, Glycine max
  unsure (1)..(457): unsure at all n locations
caagcttgagatattnttaagccatacaatgtctttntaatttgtacactntgtcttcctggccatcaacttgaaaacctagaggctgatcaaaaaacacatcttcttcaagaggaccatttagaaaagcagacttgacatccaattgatgcattggccaccttctcaaacttgcaattacaactacaagccttattgtatcaatccttgctactggagcaaaaatttcaccataatccacaccttctctttgcaagaaaccctatgctactagtcttgccttgtgcttgaccacctctcctttgggattcttcttcactttaaagacccatttaactacaatagctcttttccctttcgggagagtcacaagatcccaggtatggttcttcttaattgagcttaattcctccttcattgcttgaatccattgaggttcttgcaatgtttcctctac

SEQ ID NO: 222553 - DNA, 466 bp, Glycine max
  unsure (1)..(466): unsure at all n locations
ggctctgaaggaagggtccgtcaaaatttatctgatcataattatggaatctgatgtgtccacgcaaaatgtaaactaaactagtgtaattagttttggttgagtaggcggacattttgggataaaaatcgtgttacacttgattggtaagactaatataaggaggaggataacaaaatatactttcactaattgaatgtatatttttttcttaacatggaaaataaatatccaatccctttctctctttgttaagcaagaataaattaaattaaattatagtacatacttttcgttcttcacgtgtattttgaggctgatattgacaacactaggagtattgaatagtttgaattcattgctgccagtatggatcggcatanagtggaanaggaagagagnttgttcaatgcttctcaatactttgacaaaggatgacaggggtcagtcttcagttcattaaatg

SEQ ID NO: 222554 - DNA, 468 bp, Glycine max
  unsure (1)..(468): unsure at all n locations
agctagcctcanagaggtccaggaaggattaagctgccgaaggaactagttccgctcctgagtatgacagtcaccgctttaggagcgctatacaccagcagcgcttcgaggccatcaaaggatggtcgtttctccgggagcgacgcgtccagctcagggacgacgagtatacggatttccaggaggagataggtcgccggcggtgggcatcactagttacccccatggccaagttcgatccaaaaatagtcctcgaatttatgccaatgcttggccaacagaggagggcgtgcgtgacatgaggtcctgtgtaaggggtcagtggatcccgtttgatgccgatgctatcagccagctcctgtgatatccgttagtgctggaagagggccaacagtgcgagtatggccagaggaggaactggtctgatgggttccacgaggaggccatcggccagatgctatgtctacc

SEQ ID NO: 222555 - DNA, 446 bp, Glycine max
  unsure (1)..(446): unsure at all n locations
ngtagaatggccagacatgatacatgtcacggtttgatttggttcaagggtaaaagggatgccccacattatttccatgacacaaatgcaaaaatgacgatttggaaacttcatgcaaaactggtcatgcatgcacctatgtggacactcaagtgtcaaatttttatggtcatgtgatgctagggctcacgattcattccctctattttagtcaacccaatgtttccaaaatatgttcttttatccatttgtgcattcatccgagtccattttgggcgtctggggagaattcacagcgttcacccttcgggtgtacacacacatttttttttaaaaaaccagctatgatcggcgaatttcccaaagaagagttggaagtcatctcttttcaaaagcatgtcggtttttcagctaaataacttatttctcttttctttttcctcttt

SEQ ID NO: 222556 - DNA, 370 bp, Glycine max
  unsure (1)..(370): unsure at all n locations
agcttggacttnctgtgttctgggaacctctttttctttaagtgtacccaaacccaatcacctggttcaggcacgactatctttctgcttttgttggcttgccttgcatagctcgcatttttcttttcaatttgagccttcacttgctcatgcagcttcttcacatacttagctttagtctatacgtccttatgcttaaccataacaatgttaggcataggcaacaaatcaagaggagtntaaggattacccccatacactatctcaaatggtgaacaattacttgtgctatggataagccgattataagcaaactcaacatgaggcaaacatgcttcccaagatttaagatttttnttcaaacaatcct

SEQ ID NO: 222557 - DNA, 425 bp, Glycine max
  unsure (1)..(425): unsure at all n locations
tgtagccattagaatagaatgagcatgtgattgtaagtattactgaaaatgttagttagcttgtcagattgattatgaaggaatgcattaactgtatcctggtgagagtgtgatccttaaattttgagagaaacgactatcatttagtactgatttttgcatgaatctttgaagtatggactgaatgcatgaaattgaggatgatgaaggccatgtttgattgtgatagccacttagccaaaatgttgaccatgtgcttgaatgaattatcccttgtacccagtttgagctgaatgcattattgattgattgaaccctgagcctatacagtgttatcttctactaccttgacttcggttgtaggagagcatcatccacaggaagcatggttcanagcacaattgtcctaaatttggggagtatta

SEQ ID NO: 222558 - DNA, 388 bp, Glycine max
  unsure (1)..(388): unsure at all n locations
agcttctacataaagcttattaanaattgcttttagaacttatcggtgtgtcaaaactcataagccattattataagctcaaatatatcacatgcccgccaagagcatagtgttggtaatacaaacaattttcataatatgctctctctaaccactccgtaaacaacttaaatgcagattacagccaacttctgaagacacaagcgtggaaaatatattaaacagtgcgtgaactataaaactttgtgacagccaaggacaaatgtaccactaagaatatcttgcgtaagctatgcatacctcataataccctaacccagattacctctgaaatattaaccaatgaaagcatcgtgcctaatctataactagaagaaaatgcttatgg

SEQ ID NO: 222559 - DNA, 314 bp, Glycine max
tatcagaaggggaatggtaaaataccacctcatgctgatatttataaggtggcaaagtgtttctattgcaagatgcaaggacacatgaaaaagaattgccccgggttccaaatatggctttgcaagaacggtaaatcaatctcattaatatgttatgaatctaatatggttagtgttaatattaacacctggtggattgactctggatctactattcatattgcaaattctatacagggtatgcaaaacctaaggaaaccagtgggaagtgagcaaagcgatttatcaagctataagctatgctcacatgtgga

SEQ ID NO: 222560 - DNA, 443 bp, Glycine max
  unsure (1)..(443): unsure at all n locations
agcttagaataccttagctataaatgaagacatattaagttagcctttatattcacgatatgtttttatgctatctcttcctnccaaatacattcttcattctttctctctgagaagcctttctttttcccgcatacactcaaatctatcccaataaaactacgatcccgaactcgttgaccgttggataatcctaaaatatgaacaccaccttcgaaactcatttacacacatctgcaccattggaacttgcaaaataatgtatgcagatagataaatgatccttgcacaaagacagtgaaattgagggcttaatctcttctcctctctaacacttagaaatcctagcagaacaactagaggaaaaacgtgagaaatcttagagaactactagacacatcgatatcactgctagagtacacacgtgagcccgcatataagta

SEQ ID NO: 222561 - DNA, 388 bp, Glycine max
  unsure (1)..(388): unsure at all n locations
tcaacttaaccctttgagttgattatgtcacacttaataattcattgtctttcctccagattatgtctttcctccagattatatgtcatcccccacgaattcagagtgtgttctcaagtgagttataattattgaattcaataattttgtctttaaccataaaaaaaagggtcaaatagaataataataataataataataataataatagtagtaatgaacaagtcagattttgagtttggtacaataagagcacctttctttgttgtttttcaatncaaaaatcaaccccagaagatccgccagattcttgatgaaatctgtcggatcttgctgtccaaactgtcagatttccttggtggcatattgtatccttctcgactatgat

SEQ ID NO: 222562 - DNA, 465 bp, Glycine max
agctataacctcattgtctctcacagtctttagtatttgggatccaatccaatccttgtgttcggactctcagccacttatgatagccgccgatgatcccattactgcttcccctaagctctctgtcctttcttcacgtcgcatcccatgccttgcgaactccttggagtaccctcgcgttgtggtcactgaaaccccgtgtgatgaaaggcgtgatgcttttgtctgatggcactcctctcatggggtagccaagtggtcttatggcgaggacgggattataattaatacaaccccttgttcccatcaagggaacatttggacatccttcgcatgaagatagaatcctgattcttccttccttctagcgagggaaccaattaacagatgctccttctttgcttgctaagaagtgatcccaattcacccttcgtttctcagtgcatgaacggtggctttctaatg

SEQ ID NO: 222563 - DNA, 464 bp, Glycine max
  unsure (1)..(464): unsure at all n locations
ggctaagtcntatttgatgatgccaaagactcaagtcaagaatcaagagtcataacagtttcaagaatcaaagagtccttcaatcaagaatcaagattcaagtgaagattcaagagaagactcaagatatgcaagaacttcaagaaaagcatcaagataagtataaaaagattctttcaaatgaaaagattgaatagcataaacagaagcacaaacaattttataactgtttcacaaagtagtaattgattaccatgggcatgtaatcgattaccaatgtttttgaatgttggatttcaaatttcaagagtcacaacttgtgataaaacattttcatatttgtgtaatcgattacacaacatttgaaatcgattaccagtgtttctaaacattggtattcanatctaaacatgaagagtcacatctattgatgtgtaanntgatacactaaatggaaatcaata

SEQ ID NO: 222564 - DNA, 459 bp, Glycine max
  unsure (1)..(459): unsure at all n locations
agcttgcctgtccaatgcagcagtaatgatggtccgtgttatgttggggaacggttacgaacccagaatgggtttaggcaaagacaacgacggcataactagcctgataaatgccaaaggaaatcgtgggaagtatggtttaggctataaacccactcaggcagatataaagagaagcatcacgggaaggaagagcggtggtcaaagctcgcggttgagacaagaaagtgaagggagcccgccctgccacataagtagaagctntataagcgcaggtctgggagacgaaggtcaagtggtcgcgatatacgaagatgatgttccgagtacattggatttggtacggccatgccctcctgatttctagctgggaaattggcgagtggaggaacgccccggcatttacgcaacgagcataatgtagacctttacggttttaaaagctctatagttgggcct

SEQ ID NO: 222565 - DNA, 481 bp, Glycine max
  unsure (1)..(481): unsure at all n locations
ngcatgatntacatctccacctttctcaagcaaattcttcttgttatcattaaaatcttcatgatttacattctccctctttntgatgatgacaaccacctgtaggttaggagcaacagcaaagaaaatatctatttgcatatagttttactcccccttggttttacattgattgcttatatgagacaaatgaagatttcatatttttcatatataaaaagttgtctcataaaacaatagataatttttcttactatattatcttttatctttctctccccctttgtcaacatcaaaaacaaatcatgaatagagaggagaaagatgttaccacttgttgcaatgtatgagaatcaagtgataccaaaaggcattaaaaacaatcattcaatattaatcaagcaaaaacaagtacaataacacatcaatcaaacacaatcaaatacaatcaatcatcaaatagttcaaatcaaatttaata

SEQ ID NO: 222566 - DNA, 469 bp, Glycine max
  unsure (1)..(469): unsure at all n locations
agcttgtctcanagaggtccaggaaggacaaggtggtcgaaggaactagttccgctcctgagtatgacagtcaccgctttaggagcgctgtacaccagcagcgcttcgaggccatcaaggggtggtcgtttctccgggagcgacgcgtccagctcagggacgacgagtatactgatttcctggaggaaatagggcgccggcggtggacatcactggttactcccatggccaagttcgatccagaaatagtccttgagttttatgccaatgcttggccaacagaggagggcgtgcgtgacatgagatcctgngtaagggtttagtggatcccgtttgatgccgacactatcggccagctcctgagatatccgttagtgctggaagagggccaggagtgcgagtatggccagaggaggaaccggtctgatgggttcgatgaggaggccatcgcccagctgctatgtatacc

SEQ ID NO: 222567 - DNA, 466 bp, Glycine max
  unsure (1)..(466): unsure at all n locations
ntgcacgtatcagtcaagtgtatggaccatatcgtagccaatgtgctcatcgataatggttccagtttaaacgtgatgcctaagagcactttggagaaattaccattcaatgcttcccacctaaagccgagttcaatggtggttcgtgccttcgacggcacccgccgagaggttaggggagagatcgatctcccagtacagataggccctcacacctgtcaagttaccttccaaataatggatatttaacccccctacatctgtctgttgggccgtccgtggatccactcagtgggagttgttccctctacactccaccaaaagttgaaattcgtagtggaagggcatctggtcttcgtatcaagcgaggaagacatcttggtgagctgcccatcctctatgccttatgtggaggccgcagaggagtcattagaaaccgctttccagcctttcgaggtggtaagca

SEQ ID NO: 222568 - DNA, 471 bp, Glycine max
  unsure (1)..(471): unsure at all n locations
agcttagaatntaacttttgtcaccatttattcttcatataaaaaaaaatcagtaattgagtttcagttcttgatcttgacattatcatcattgttgttgttgcttgataaaaaagaatcaaaatgttttctctatagctttgtaccgagagagagacttggctggataggttagtctctaatatgactgattcaccttcttgtatctgtgttctacacataagatagggatatgggcacataagaggataagcccagcccattgcatgttaactgtcattttcaaatgagtgctacaaacatgtttggccctgcttaattgctatgttggtgaaaatgatttatttttatgtgtttcagtgattattttgtatacaaaattgcaatgatttgttttaaggcttaatgaattggcctcaacaaaaacaaatgagattaaaaaanaaatgagaattacaaaaaaatctttct

SEQ ID NO: 222569 - DNA, 486 bp, Glycine max
  unsure (1)..(486): unsure at all n locations
tataagaaccaaaatgcctcaatcaattccaaatatgcatgtgaattatgaagcatcaacaagaatcaagccaaggctattgagcaagcaatcaatggggcaaaacacaccaaatgattatgatgatggatggctcaaattctcacaaaggtaaactcatcactttcaaattgagctttcaaaactatcatgacatgtagaggagaatcaaggatttcaagtcacaaaatgtcaagaacttttattttcaaaacaattacccatttcttgaacatatcctataattcanagaaaaacatgcaaagtcgtacacgcacacaaaattgacccaaaatattaaactaaaaatccgacgaaactaacaacattaacaaaataacacaactaacaaattaacaaaaccaacaaaactagcaaaactgaagaacactcccccccccccccatacttaaacaacacattgtcctcaatgtagcacaaataaat

SEQ ID NO: 222570 - DNA, 365 bp, Glycine max
agctatagaatggctatttttccctccttatgttcttttccaatacttagaaagcaatattttgtaattcgtattaattatgtgcccatttttcttgaaatttactatcttgtaggggtgggcatggatttgattttcataagtccaatccagatccatttaaatggattggattttaaatccagatccatattttgtaaaaaaaacaatttggattgtttggatccatcttaaatccagttttaaaatcaaaaaccatttttgcctgaacttaatcgaggcaatttttggccgatgtcgggcgctgtactttttggtcgacattggtcagagctattttcagctgacatcagttaagatgacta

SEQ ID NO: 222571 - DNA, 434 bp, Glycine max
  unsure (1)..(434): unsure at all n locations
tgtgagatggtggaggcgaaaccctctgtatctctgaacattatcaccacgatgggagctaccttcatttcaacctctattctttctcttactactaaggtggaaaatagacttgtgttaatataaggcgtgtcatttcgattatttaagttgtgattgaaatgataaataattaaatacattttatttcatctcactttattatctaaaaatatacttttgttttgttttcaattacggaattctaatgtatattatttttattttttcccgctataattttattattttgatttcaattctcttacacatttaccggcatgttcattcaagtagagttagtctcatatcccttaaataatgtctcatatttgatccgtaagacatcttgaatgaaaatnttttaagcaactcatgttaaatttcttaaacac

SEQ ID NO: 222572 - DNA, 455 bp, Glycine max
agcttgtaagaatgatagatatcaaggaatgatctataaccaaagcctcacagtcattgtttcactcaagctcaagtgattaggctcattccattataaacaactaacacaagtcctaacctttgcatttcatctcataccatacagaaataaaaacacaaaatgaatccgaaggactttctaggcttgtaatgaggttaggctgccaacaaatcatggttgttctaggattcaaaagcttaggttctaggagagcatccatccatagataaaactttactttttcattcattcctaccccaatacttgctattttttaggcacttagcttacattgatttgatttgcagcacacacacttttatacattgttatttatacttacagtcttttttaacatatatatagaaatagtatgtgtatatacaagaatggtgagtggatgctatgtactt

SEQ ID NO: 222573 - DNA, 362 bp, Glycine max
  unsure (1)..(362): unsure at all n locations
tctagaagatgacgaggtttactccgttcttctttcattattttgtttaaaaaggagaaaaactttggtcttatcttactgaattgnggttctgcttatccttccactgtgttcgattgatcacatgatgaagcaatgcattcaggggtggatgtggaagccttccaagctgccctaaatagagatataggtanacagatgcncanacaantttataactgtttcacaaagtantaattgattaccatgggcatgtcatcgattaccaatgtctttgaatgttggatttcaaatttcaagagtcacaactcgtgataaaacatcttcatatttgtgtatttgattacacaacatctgaaatc

SEQ ID NO: 222574 - DNA, 461 bp, Glycine max
  unsure (1)..(461): unsure at all n locations
agctatatgctcctccaatgcctccttggttatttctatttttngattacactattttactctaatccatgtaggatgatggcttaaatcctaatccatgttgagcaaccaattcaaacttcttgtcaaattcttcactctttgtcacattgaagggaataacactgctttaaagtaatgaagaaatttcttgactagcttcctccctcaaattattgaaaatgttgttgatggtgtattgagtgctcactcctcttaccttaaaaatattgtcatgactcccacccacttattgctttgaatcctttctcaccatcttcctcattttctttgggccttggtcctccctcatctaccttaattttttcattaatctctcttgcaaggtcaagtttaccacattcgcttcctcacctcatcactgacagctttgaagctaaaacatccttctgtattcatgc

SEQ ID NO: 222575 - DNA, 400 bp, Glycine max
  unsure (1)..(400): unsure at all n locations
tttgaaccccaatggtcacatcatgaaatgggagcttatactctttagccttaaggtcagataagcaactaattacacttattacttctctgctattcgtctttggcncggatgttccacctagggaaaaaaaattatcttctcttgataaagacaagcaaaacttttcttcttagagacaatatatcagttacagaaaatgtcataaaaaacatacaagacattggtaatcggcacatataaggaattcttgaatttttttctcacaatataatcaatgtcattggtaaataaggactaaggacttaactgtccaacatattaaacaaatcaatgttgatgcataaatcattgatctaaagaatcaggaacaaaaaactaagtgtaagcaatcaacata

SEQ ID NO: 222576 - DNA, 409 bp, Glycine max
gtcacctgctgcatgcaagcttgaagtttgatgttggagataaatattatattctatttcctctccctttgatgttgcttggctagccatggagaggtaaccatttcttcttcctctctttgactccatttttgagtttcacatacagcatccatggaagctgataaaaaaaacataggtttcgggtttatgatcccattactggtaattcttacgtgatgcttttgtgatgagattgctattgtagtggaggaagcatatgctcggacccaaagctcattcctttatccttcttcttcacagagcgctcttcatgatcccatagaagtaagggaagttcaccctttttccttgctttatgatgagtctgggctgggtgactcgaatcatgggttgcgggtgggggatt

SEQ ID NO: 222577 - DNA, 400 bp, Glycine max
tgttcatcttgagctagtacgtcgtcatcctaatttgaagttgttggtgcaacatatttctttggcctaataggaactccaatattgatgcagcttctgatgttatgattggtttggccacaccttccacatgtaaagtcacgcaatactctctttaccctatgtcctttgacattgacttcatctgcatctctccttctatttttcttaggccttcctctctggaactttatatgtggtggaacacgttgtgcatactggtgttgggcccaatattgcggtccttggactggctgaataaaatggtgatatgtcttattataagcctctatggacagccagtcatgacacatgtcctcaggcttgcctcctttgtgacttaatactgtaatggtatgtc

SEQ ID NO: 222578 - DNA, 454 bp, Glycine max
  unsure (1)..(454): unsure at all n locations
agcttcaattcataagttgattntagcttatggtaaatgtgcaattcattttacaaagtgtttgtgcttggcttattcataagttaatcttaccatgcatgataatttttttattggatgatagtgtacaaaaatgtttgcgtcggcgtattctaattaaattctaaaatgaaatgggaaatttatggattgtttctattgttctgaatgtacagattcagtgccttggggctattttaaattgtgagatggatgatgatctccatgtacacatcanagacatgcatagtttaatttatgttcttgttatgggccttcaactgtcgaggtattattgtccatgtgtattggatgttgtggttagtgttaacttgccatactggtgactttcaaatgtgtttctcatgtggcgagtccttttctcccatggtgtagtgaggagattcatatggag

SEQ ID NO: 222579 - DNA, 461 bp, Glycine max
  unsure (1)..(461): unsure at all n locations
tcagtcatgctaaacttagtctcaggtttatatactatgtttttattcttttatataatatactaagagaatctctcaaaaaagaataataatcagttagtctgagttcagtgacaaaatcatgaatgcaaaattgccctgtcatgatcatgtcatatttagttctttccaaatttgctaatagccatcattaatcagttagtaaaactcttcattccctttcctttgatagcagctgccactgactcgccccaactcaccanaactgtcccagagaaggagctgtggtgatgctgccggcatatccccagaaatttctactcgaggacgtcgcagtgttggcaataaccacaaacatggtagccttctccctcccaaaaacagggtttggtgggtcatcagtgcaatggttagtgtgggactatgcaacggtcacattatnnaatatactnnatatatta

SEQ ID NO: 222580 - DNA, 463 bp, Glycine max
agcttggagaggatgcttcaatggtggtttagtattagagagagagaaagagagaggggggagcacgaaaatgaaggaagaaaagaggaagaaaagttgaactttgaagtttgtctcacaagactctcattcatccaagttacaacaagtgttacacatgcttctatttatagaataggtaacttccttgagaagctttcttgagaaaacttccttgagaagctagagcttagctacacacacccctctaataactaagctcacctcttgagaagattcctaaagaagctagagcttagttacacacacctctctaatagctaagctcacctccttgagatgagaagctatagcttggctgcacaccccctataataagctaagcccaccccattccaaaaatacataaaaatacacaaaaaaagtcgctactacaaagactattcaaaatgccctgaaatac

SEQ ID NO: 222581 - DNA, 465 bp, Glycine max
  unsure (1)..(465): unsure at all n locations
ntataagcacgggtctgggagacgaaggtcaagtggtcgcgatatacgaagatgatgttccgagtacattggatttggtacgaccatgccctcctgatttccggctgggaaattggcgagtggaggaacgccccgacatttacacagctagcttaatgtaaacctttatggttntaaaagctctatagttgggcctaggctttagagtttttcttttggttaaggctttgtgtattttgttttttaaatttataatacaaggatctttcttcatctgttcctacgcctctacccattctcantccattgcatgtttacttctttatttctgaaacgacaaatccgatgacgagtcccccgaaggtactaatacctgggacccgcctatcaacttcgagcaagaaacgaatcanacggaagatgaagggaacgangatgtgggacttcccccagaattagaaagga

SEQ ID NO: 222582 - DNA, 452 bp, Glycine max
  unsure (1)..(452): unsure at all n locations
agcttgtgctattgttgccaaaatttaagctgttttgngaatgccaaagttgccgatttaggaatttctccttaggattaattgtgttttcccaaatgatttgatccttcctctggttactaatagggaaaacacacaaggataagtgtaagaagaggcttcatgagcaccgaaaatcccctgaagaccttccaacccattgttctaagagattgcaatagtaaacccaaaactttagttctgtcgattccctagttcctttcccctcataatgggtggaggatttttctccaagaatttgaattcgtagaatatgattggtcatggtgacgtttctgttgtcgtccaagacatcatgggtaatgtcaaccccactcctaattgggtgtgctactccgagctgtacaccctgaaatatactaattataaatgatgttaatcgtattatatgt

SEQ ID NO: 222583 - DNA, 466 bp, Glycine max
  unsure (1)..(466): unsure at all n locations
tatagcttacttattatccacaaaaagcttcactccatcactttccttgattnttaattcttgtaataatgtgtccaacgagacagcttggcaagcactcattgtagctggaacatacttagcttcacatgttgataaagccactatggattgcttcttagaactccatgatattggtgttgcaccatacatgaatatgtaacctatagtactctttctgtcatctctgtctcctccccaatccgcatcagtatatcccactaattcctctgagttgttgttgtctttatttggaaatagaattccagtattgatggtcccttttatgaaccttagaatcctcttagcagttaggagatgaggaattctgggtcttttcgtatatgtacttaccagtccaatagcaaattccaaatcaggtctttgatgacacaagtacctgagagaaccaacaatatgtttgaac

SEQ ID NO: 222584 - DNA, 413 bp, Glycine max
  unsure (1)..(413): unsure at all n locations
tactaagcttccaaacatccaagcaaaacaacattcaaacttcacaagttatcacagccaagcaaaacagggcaaaggcagaaaactctgccaaaacaccaaccaaatcacagtttttctcacttaaagaccccagtaacaattccttcgatccaattcgttaaccgttggatcaactccaaaattntactggaagtctatagtacataagcctacattgtgaccgttgggatctactagaaaacatctagaactcattctgtactactctttccacagcctaccacacacaagcagttttctgcacaaagccaaaattctgctgcagcctatttgacagcaaaattctgcataagtgcagatttcgaanatcacactttctcttattcaatcttgcccagatcaattcctac

SEQ ID NO: 222585 - DNA, 284 bp, Glycine max
  unsure (1)..(284): unsure at all n locations
gagtacgacagtcatcgctttaggagcgttgtacaccagcagcgtttcgaagccatcaagggatggtcgtttctccgagagcgacgcgtccagctcagggaggacgagtatactgatttccaggaggaaatagggcgccggcggtgggcaccactggttactcccatggcccaagttgatccagaaatagtccttgagttttacgccaatgcttggccaacagaggaaggcgtgcgtgacatgagatcctgngttaggggtcagtggatcccgttcgatgctga

SEQ ID NO: 222586 - DNA, 408 bp, Glycine max
  unsure (1)..(408): unsure at all n locations
ctgcaatagatgccactnntactcaatttttaaatgatatgttgacaaggaaacacaagtatattcacaaggagaatattgttatggaaggaaattgcagtgctatgatacaaaaagatccttccacctaaccataaagaccctggaagtgtaaccattgcttgttcaattggtgaagccacccggggaaaggctttcattgatttgggagccagtattaacttaatgccactctccatgtgaagaacattgggagagttggagatcatgcccactagaatgactttacaacttggtgaccggctcattaccagaccatatggagtggatgaagatgtgttggttcgagtaaaacattntatcttcccagcaaactctatggtaatggatatctatgaagataatgac

SEQ ID NO: 222587 - DNA, 389 bp, Glycine max
  unsure (1)..(389): unsure at all n locations
agcttgagatgaggaagtgtagaagggtgaaacttccttgctttattcgttgaccatagagtggtacctggagatatgtcgcggnggtcatgagaccttggggacgtcaggtggggtgctattgcccaaaaccaagcttgaccaatcccgacccaacccgggcatagtcagtcagtgagaacctgtgatgtacctaaacaggcgagctcctggcagtacacagataaaacgaacaaagaccacaaagcanggaggcttgtgtggtggctggccaactgtgaactttgattatatgtgagatatggcctctggtaatcgattaccaagggtgggtaatcgattacaaggcttaaaaatgaagacaggaggctaagatggtctctggtaat

SEQ ID NO: 222588 - DNA, 476 bp, Glycine max
  unsure (1)..(476): unsure at all n locations
cggccccccggnatgactgtgactacggaccttgatactaagcttacagattatgttgtgcgaaggacaatggtttagaaaagcaaatttttatgctgttgatgatagaaagcctagggtaatggagaaaataaggaggagggagaaacccatgtgtgacagtcgttctacatgggcagatttccactagctcacaatattaatactcagnccaatatcaatccttctcatttaccaccaccttaccagccaagaacacccaatcatccacaaaagcccgcctaaatcagaacaaacccaccgctgcacatcaaagcaacacaccttatacgaccaaacaccaccaagaaggaatttctagaaaagaaacttgtagaattcaccctaactctggtggtgtatgctaacttactcccatatctactcaataatgcaatgggagccataaatcccagcaaagactccttatcctcatn

SEQ ID NO: 222589 - DNA, 436 bp, Glycine max
  unsure (1)..(436): unsure at all n locations
taacattctggtttgctgattgacatgtttggtaaaaaatcttgcatagagcagaaatatcaaagacanagtagtacacatgtttttgtatattggaaaaaaaataaatctgacattggctacagaaaagacaaagatagaatatataagtgagggacaattctcatcccctgagaatttttggggttgagttagtccaaactcacattctgaaagactgtaaaactgaatttttggcatttatgtacaactacaagagaaaagaattaataaaacaccttaaacaatcaatgtgagttgcagggagatctgagattcatcttgactggaagaggagactccgcatngctcttggttcccgcagaggacttgcatacttacatgagctttgcaaccctcccataantcacagagacgtgaagtcgactaatatatt

SEQ ID NO: 222590 - DNA, 369 bp, Glycine max
  unsure (1)..(369): unsure at all n locations
agctnttcaaagaagccacgaggaagcttcttgatgaagcctcttantgaagcttcttgaggaagctacatgagctgcctcggtaaaacgcttcccatncttagttaaacgttggctctttagggaaattggtatccagctttacaagacacttgtccacgatctgaccgttgggatcttcaagaagatgtctggagtgtgtgcgatgtttctgtgtccgagaccatttctcacttaagcgttttcagcctttgctctcgtgtagcttaggaaaaacaccatttcttcttccttctttcttcctaagccatttctaacgtcccaagcactttctccatcacccacagccaccgttagccaccacaaact

SEQ ID NO: 222591 - DNA, 433 bp, Glycine max
  unsure (1)..(433): unsure at all n locations
tccatcaagtggtaatcagagcacaagagcatcaagtaggtgcttcttaaaccttcattaattttttgctttaccttctcttncattggtggttcttcatttttctccatggatctcctcacatgtcttgggctaaatggttttaacatgattctttagaggtttcaccgattaaacttgctatagaagctagatttgaatttctatgggtcaaatttcttgttcttgttcttgaaccatgaattgtgttgaagttaagttcctttgagttctggcttgctattttttggggctgaaaactaaatcataaaattcttacaaaatcattaaagtagaagaaaaccttaaaaatctagagtgacttcgtcacctattgtagttttgttatagaagtcatgtctagtcatgaaacttgtcacataagatttcttat

SEQ ID NO: 222592 - DNA, 251 bp, Glycine max
  unsure (1)..(251): unsure at all n locations
agacttgtatgcaacattggagaggttaatgaatcaacgagatgatgcgctccatgagagggtggatcaaatggagaatagagatcataatgaagaagaaaggacgagaagagggaatgatggtgttcctagacaaaaccgaattgatggtattaaactcaacattccttcatttaaaggaaagaatgatccggaggcctacttggagtgggagatgaanatagagcatgttttctcatgcaacaactatg

SEQ ID NO: 222593 - DNA, 442 bp, Glycine max
  unsure (1)..(442): unsure at all n locations
tntatataagctgaaccattttatcaataaacacatgttgagttttattcagaanattagagtttatctcttttatcttagtgagagcgattctnctaaattcttgagtgattcaagaacaccttggctgtatcaaaggactttcacaacctttgtgtgttgccctcgctggaaagagtgattctttccttcctttcatcatcacccttgttctttcaaaccacaatttcagaaaatccacctctgcccagaattatctcgtgggcataacttccattttacgcactcaaattaagtgattcttgagcctaaatcgaatttcaaaacgagacctttcacctcgttctggaatcacctcatttggagccctgtagcttcagttattggcatttctatatttctgtccagccaccacttaacctaccgtttaccattccattca

SEQ ID NO: 222594 - DNA, 394 bp, Glycine max
  unsure (1)..(394): unsure at all n locations
agcttctttagaattgctgccagtaccatttcctaatctttcagagaagatatcagcatattcaactattcatatctattntaactttcttttgatgtcttggatgttgaagcttccacctatgtccaacaagtctgaagttacgggatgaatttgtaaatcatccatcatcacgtaagttttttcaccatatttcttctttggaaagaaaatgcccctccacatttggatagagaattttaattgagaaaagtaatttatcagaagaattgaatttctgtattggttggattntttttgtgaagaaattaaaattttggaattttaaataactaanaatctgaaatttcaattttcttctaaaatgtgagaaaatgaaattctattcttacag

SEQ ID NO: 222595 - DNA, 423 bp, Glycine max
  unsure (1)..(423): unsure at all n locations
gcaattaaacgaaataattttacgcacatgtcatattgagtcccgtatatatcgagacgctcgtattgaaaacgggagctcgttgcaatggcaaccgaaataacctttaactcggatgtncgatttgagtccgtaatatatcgagacgcttcaaattgaaaacagaagccttgagaaaattctaacgagaattattttttactcggatgtccgatggagttccgtaacatatcaagacnctcnaaattgaaaacggaagctcatagcaaattgaaacgaaagtaacttttaactcggatggtccgattgagtccgtaatatatcgacacgatcgtaattgaaacaaaagctcgtagcanacgcanacgacaataacattttgactcggatgtccgactggagtcccgtatatatcgagacgct

SEQ ID NO: 222596 - DNA, 312 bp, Glycine max
  unsure (1)..(312): unsure at all n locations
agcttgccataggagggaatgtgtttagtcattagacatntgtgtcttaagacaaatgaggacccttaattatttngattagatataaacaaatacaaaggttaaaagctgcatcttatgccctatcaaaacatgttttgcaaattctgtgtttgatgntttagacgatatcaagatgaaatcatgatctgatacaacattaaagatgaaatttaagacttcatttaatactttgtgtctgagatatattttgcaaagacattctcataggatctattgaatcctatgaagaataaatgaagtcaagttatg

SEQ ID NO: 222597 - DNA, 319 bp, Glycine max
  unsure (1)..(319): unsure at all n locations
tgattctgtanaanaaaacaaaactgaaaacttaatcccattctctcttcggttttcaaactctcttatatatagtcttttatttttatttttaatgtataatattatcttttgatttgttaagcttgacgaaattctcagtcattagagtgattgaatttaaatttaatgtttctaactttagagactaaaaaactgtcattcattaaagcacaaaatacgttaattacatgttaggtataagaaattatatattcttctaaaaaaaggaaattatatacaagaaattaaattccttctctgtaattgattgaagcca

SEQ ID NO: 222598 - DNA, 403 bp, Glycine max
  unsure (1)..(403): unsure at all n locations
agctttagaagaatatcggcttctgtttatcaactgncctacttgaatttccaagttcttgatagtagactctgtgctcttgtgattggacatagtaacctgcaagaactgaacacaagtctcttccaacttggttgttctctcataaaggctaggcgctcgtatttgaggcctgctggatgatcctacctggtctttattgaagtggttttcaggatgagacctccattgcccttgattctgattaaaattggaaccttgctggtaacctactaatcctctaacattaaatcctggccggtgctgatttcccgtataaatcacctcctttgcagcttcatcaagagatatacagcaaccagattcatgagctcttccatatatgctacatcctccaacctac

SEQ ID NO: 222599 - DNA, 394 bp, Glycine max
  unsure (1)..(394): unsure at all n locations
tgaccctggtaganaaatgaagataatgagcttactacgctttagctctatagcttgagctcaacctctgaataanaataaagaaaagactctagcaaaacttaagcattagagcttaagctcgagcctataattaaaagaagaaaaatcacttaccaggcttaactcgaggctcaaagaanaattaagaaaataggcttaagattgacccttgaagaaaaatgaagaanagactccgacaaaacctaagctttggagattaaactcgaccacacaagaatgaagaanatgaacttacaaggcttaagctttacaacttaagcttgaacttgaaagaaacatgaagaacagactntaacaaggcttaagctctatagcctaaagttgatccttg

SEQ ID NO: 222600 - DNA, 403 bp, Glycine max
  unsure (1)..(403): unsure at all n locations
agctttatataagctgaaccatnttatcaatatagacaagttgagttttattcagaaaattagagtttatctcttttatcttagtgagagtgattctcgtaagttcttgagtaattcaagaacaccctggctgtatcaaaggactttcacaacctttgtgtgttgccctcgccggaaagagtgattttttccttcctttcatcttcaaccttgttctttaaaaccacaattccagaaatccacttctgcccagaattatcttgatgaggacatgttcaagagcaagggcaaggatccacttgaaggacttggaggacctatgacaagggctagagcaaggaaagccaaggaagctcttcaacaagtgttgtccatactatttgaatacatgcccacgtttcaa

SEQ ID NO: 222601 - DNA, 314 bp, Glycine max
tatcgagcgtttcgatatattacatgactgtatcagacatccgagttaaacgctgctgtcgtttgaatttgcttagagctctggtattccatttcgagcgcctcgttatattacgggactcaatcagacactcgagtaaaaagctactgccgcttgaatttgctcagagctttcataataaatttcgagtgtctccatatattacgcgactcagtcagacaaccgagtaaaaagttatggtcgtttgaatttgctcaaagcttccgcattcaatctcgagcgcctccacatattacgggactcaatcacacatc

SEQ ID NO: 222602 - DNA, 328 bp, Glycine max
  unsure (1)..(328): unsure at all n locations
gggggggttgaattaaagatattccaaacttttctcctaataaaaatctatcttacttttacttaagtatgaatccctttatgacagtcttcttanatattaattcaaatgaagcaacttgaatatgaatataaagcaataataaataaaggagattaagggaagagaaaatgcaaacttcagtttatactggttcggccacacccttgtgcctacgtccagtccccaagcaacccgcttgagagttccactaacttgtaaatttcttttacaagttctaaacacacaaggacaacccttcctttgtgtttagagattctttacaaca

SEQ ID NO: 222603 - DNA, 263 bp, Glycine max
  unsure (1)..(263): unsure at all n locations
caatttaatttttcttaccagatgaacaattaagtgaaccatgatgtgaataaatgaacgaagaaaatacatctctaactgacacaagataatagcagccttccatcatatgagttgtctncacgtgtcatcggactcgattgtctttggatgacaaggtgagactaaagtagtctcggttgatagacattgagtcttcgacgaaaagaacagatgaccatatttgtctctgcgtgtcatcggacttgtcgtctctagatgac

SEQ ID NO: 222604 - DNA, 439 bp, Glycine max
  unsure (1)..(439): unsure at all n locations
agcttcggtgggctgccaaattcctcanaaccttttgttctcgaaatgaacactttaggggtcgacatgggcgccgtccttgtccaatatggacatccaatagccttctttagcaagacgttctgtctgaaactccaaaactcgtcgacctacattagggagctcgttgccattaccacgacagtcaaaaagtggtgccattacttattgggccatcacttcacgattctaacggatcatagaagtcttaaagagctaatgactcaggttgttcaaacacctgaacaacagatgtatttagctcgtctattgnngtacaactattcaatccagtatcggtcaggcaagaccaacactgccgctgacgccctatccagaatcacggaactagtagcgggacaatntctaatgctaacaataccctaacctttgttttttt

SEQ ID NO: 222605 - DNA, 453 bp, Glycine max
  unsure (1)..(453): unsure at all n locations
tgaagaactacaaagttcacttgaagcacatgagcaaagattaagagaaaggaatcctgagaagcacaatgatcaagccttacaagcccaaacaagcagaaaatttgacaagcaaggagacaaatccaaaaataaaaaaggaaagtggcatgatgagaagtggagaaagactgaagattcaaaatgtggtgattctggatcatcttcacagaaagctgtgtcaaatccaagaagccaattctcacggaaaaagaaatgggtcgacaagaagaaggtgcagtgttacaactgcaggaactttggccattntgcagctgattgtagattcagtagaggatttcaagtgaaaggtgaagaagcaaggttggcacaagaggagaatctagaagatgatcattatctgctgatggttaccaccaaaaatgatcttcagtgtgctaacttctggtacct

SEQ ID NO: 222606 - DNA, 328 bp, Glycine max
  unsure (1)..(328): unsure at all n locations
agctntaacctcatcgtccctcacagtctttagtattgggagccaatccaatccttgtgttcggactctcagccacttatgatagctgctgatgatcctattactgcttcccctaagctctntgtcctttcttcacgccgcatcccatgccttgcgaactccttggagtaccctcgcgttgtggtcactaaaaccccgtgcgatgaaaggcgtgatgctttcgtctaatggcgctcctctcatggngtagccaagctggtgcacaacaaacaattcttgcgccgctcttttcacatccccggtcgaacgtgtcatacatggccaaaat

SEQ ID NO: 222607 - DNA, 388 bp, Glycine max
  unsure (1)..(388): unsure at all n locations
agcaacacanaatctaggtatccaaaacccttatattaatggatnntcaatggttgagaaagtgaaattgagaaatgggataaatttgagcaaactctcacctcacacaagtctattacatcaatttaaacttgttcaaactggattttacgcctaaaattcaccgaatcaaaatttgactcccaacacccaaatttaccctagaaatggctctttgttcactttggtcatttgtttttctctctagcacagcccaaactttctcataagtcctaaatggcatttcaagctaggattaactcactctaacctccaaataccactaaatccagatttggccttccaactctcaaagtctcactcttttttcacttacaacaccatactc

SEQ ID NO: 222608 - DNA, 429 bp, Glycine max
  unsure (1)..(429): unsure at all n locations
agcttcgcacgtaagatcatcgcgtcagagaacttaaccatttataaaagaatggtgaanaatatatntgtaaacttatcgaatcaataaatgctatggagggtacctattttttatgattctgtagatcatgatcttgctcatgattatattttaaatgctttaagaatgaattctgattctattctttatccagaggtaattagttctctggttggtttatcacanagaaaaaataagaaatcagaattataactttcaaaatagcataatagactccttatagagtataaagatatataatcggaaataatattgggcataacctttttttcgcatgtctcttttatgttggcaattacatcattagaaatcattaattattaattcaatacaagatcatatttcatgtgtctctattatataaag

SEQ ID NO: 222609 - DNA, 302 bp, Glycine max
  unsure (1)..(302): unsure at all n locations
cttcactagagagatatgagaattggtgtgtctttttcttctgcttcctactccttttataggtctaaggtagcttatttttcatgttgacttcgcactaaacgcgcactcctgggcttaacgagaatggcggtttaatcacgtgctcaagacagtgtgcgcactaagcgcagccttgggcgttctcgtgggccttcttcgtgctaagctggtcgctaagcgagcacgcacgttgggcctgtctcgtgcgctaaaagagctgttcatntattttaacttttcttcaaggctttttcttttag

SEQ ID NO: 222610 - DNA, 168 bp, Glycine max
tcatgtaagtctgccattctccgggtattatacttataaggcgaccaacccgcgtcaatggcacaataccgcttaatatattccccatcctaggctcatgcatactgtgtcttcattaatatgtgtgaatggagccttacatcgcgtgtaacctgatctacgaggact

SEQ ID NO: 222611 - DNA, 189 bp, Glycine max
  unsure (1)..(189): unsure at all n locations
cgagtatgaaatgagtgaacgccatatatcttgcatatacattgcttgtatctttgattcaaaaattaaattgtcatcatacaaaagggggagattgtagaaacaagactttgcctttgatgtttgatgatgcatatgatcatgatgtttgatgccttataanatgccttctcaagntaattcaagaca

SEQ ID NO: 222612 - DNA, 461 bp, Glycine max
  unsure (1)..(461): unsure at all n locations
ctaagcttgatgcaccttataacatattgtttgattgcaattttgactgcatctttactatcaaattccatgccaacatataattcttggccaacattaaagttcgacggcatctccaaaccgcaaatgtccttctcatcaggataagtccagttgatattgttataatgtgaggcatcattccaaaatggattttcaattcgttgtgcacctaacagttcaaaataagataaaaaatccaataatacttatttagcattaaatacaattgtcatcaaataataaatgtattgtctaattnttttatacaacacattataccttctgctgggtgaacaattcttactggttganngaatgtggtgacttcatcgtctgtgtcagatatatcgtcaacactgtcatcttcgtctaaagactcttcaacatatgagttagacacaagaatatcatcatcatca

SEQ ID NO: 222613 - DNA, 95 bp, Glycine max
agcttggagagaagtgagatagtgttcgtctattacatgccatacgccgttgaggaacagagggatcgcaagatatcttgcgtgtacattgctag

SEQ ID NO: 222614 - DNA, 442 bp, Glycine max
  unsure (1)..(442): unsure at all n locations
agctgttagcattgaatttgtgctaccagcctatcactattcactataataaagtgtggtttaatctatagaatagatgttagatatagacaataatttaattatgactgacctgngtgtttttttggcagctaatcgaaaaagtactccctattgtgaagaagcaaaagccaccatgtatactccgtagggctcattccttgcaatggtagatcaaaattgctaggggtgcaagataggaattgaatattaaccacatctattgtgggacatgagcatattaatcatcatctcttaaaaatcatagttctcagcctaatggttactcctaccatgacaagctagtcacaattctcaaattattcattcattttttcaaaaactaaacctacgtagtttaaagtgtctactcgctcccctagccttaagaaacaatcctcat

SEQ ID NO: 222615 - DNA, 381 bp, Glycine max
  unsure (1)..(381): unsure at all n locations
agctgaccgctaaacgaggcgtcatgctggactttgtttgcacgctaaacgagatgcaattgncctccgaattcttgcatcaaattttgcattaatttaacttccaaacacttgcaatttcccttcttttgaatcctgttggtccagaattaaaatgatatcaaaatcctcattattctcttaaaaataaatagtaaagtcgaggaaatctagtcattcttgtttgattcgactatcaattaaacctaaatttcacagatatcatgatgaagttagagattctaatgagttagatactcgagatggaagtgacgatgaaagtaatccacaagtcaaatttctcgatttaacgtgtctgaaaatgatgaagatgtaagtttg

SEQ ID NO: 222616 - DNA, 406 bp, Glycine max
  unsure (1)..(406): unsure at all n locations
agcttcacaaacacccacgggacctttcattttgcagcatcttcaagctttttctgcacatttgcctcaattattttttcattccctacatcccattcaagtaagtgccatctccatctaattntacctttgccttgagatgtttggtgctttgtttgttgttatctttgtaatgtttgtgagatgagttgtgtgtaaacccatggtccaatgctttgattggtggctgtactagatggctctaggcctatctttgtttttttttttacagatttgcatgtcatgttgctccttatccctcatatatacatgcattaacatatgcacaccaactatntgatgaaataacacaattgctattctacgtgnntatttgatgcttgaaatgggtaatgatattacacat

SEQ ID NO: 222617 - DNA, 460 bp, Glycine max
  unsure (1)..(460): unsure at all n locations
ntctcccaagtcctanatgacatttcaagctagtattaactcactntaacctncatttaccacagaattcagacttaaccttncaaccctcaaagcctcactctttttccactcataacatcacattctcactttctaaccctaggttagttctacccttcatctctaacagttttccatcagcaatttcagcatataaacatcacaaacatcatcacaaaaaccctaaaacagaatgggtatgtttaactcatccaaacatggcaatttcaacaagctttcaacaagagtcttcacaaataactaccatgaagcagaaaactaacaaaactacccatcatatctnccaaaaccccatacccacgaaaatcaaaagagaaagaagtcacccacacctgaaaattcgaagtcccactcgtagacacgcacttcaagacttcgaaaatggctctctttcgcg

SEQ ID NO: 222618 - DNA, 444 bp, Glycine max
  unsure (1)..(444): unsure at all n locations
agcttaagggattgtttttccttttaatctatttatattaaacaaactactataagaattaagaaagatctgttntggaactttcccatataataaataatgcaaataacaccgccttcgatctatggaagctactccaattcccaacatatgaatacaaaaactaaagttacctcggccatggtgacgcacattttctgtctccattccaaatcttccatcaccatctctggacaattttcattttccactttcattttcaacacgcaaaagtaataccaattaatcttcttgttcttggtctcgagcattagtagtacctggaaccttctctgtcgtctaatatcatatttattcgattctagctttctagtactcttctcaatcaaccacgcactataagggtttctcttgataatttctgctgcttaatctcaatcatat

SEQ ID NO: 222619 - DNA, 222 bp, Glycine max
actctagcatgcactaaattggtgtggatgtctttattattcacgctggactaaagccaaactatgtggatgggtataagtattgaattcaccaatttcaaactttaatcatattgactcataaacactcctaattcttaggacttttttaactttattttggctttctttatacgaaaaaaaaatgctaacacataataacactatgtaacattttatttt

SEQ ID NO: 222620 - DNA, 372 bp, Glycine max
  unsure (1)..(372): unsure at all n locations
agcttctagaaatagatgtgtgtgtgtgggtgttattcagncccccanaacataccacaaacatactaggaagggactcagcactcacctgctggtgtgtcgcattaattatattgatcagttttggacggaatatggcaacattgatggtttctagtatgaaaataagactaaacagaacccatgctcgctctggagtacccgcaatgtgatgcatacaagtctgcacaactgaagccactttctaagcccatgtatcctcaattcttcacataatgaaatttgattaggcatggcattgcaacactggcgttatcagtatttcattatatctctatctgcatcatgctactcctttgaacaatgccagat

SEQ ID NO: 222621 - DNA, 376 bp, Glycine max
  unsure (1)..(376): unsure at all n locations
tcctagcgtacctctgattgctcaangacttgcgatccatttcttcggtgtatgtgtggtgccagggaggtggttttgggtttcttgatgccattttcgggactttttaagactggttgtatgcaattgctttctgcacctctttnttcctattgcagtccttagaagacaattcttatgcgcacttcattgcggctgtgacaattcacaccgtaccttattggtggcataagagccttacatgcaatctgccttgttatcttaaaaaatggcattcgcaaatttgattcaatcgcaatccaagatccgatgaaagggtattattaaactactataaaattttccctcaccagaagaatgattttaatgattcgat

SEQ ID NO: 222622 - DNA, 310 bp, Glycine max
  unsure (1)..(310): unsure at all n locations
agcttgggtgatgttgcgcgtactgatgggtaccatgaggtgtttgctgaggtttaacccatgcgggtgttgaagagacggcatgggcatctccttccttcctttntgcccctgttgccccgattcttttggcgttcacgtttgtggaggaaacgtaatcaaacttttctctcttcaatccaacctcgattctttccccggcaaacaccaaattcgcaaagctggacggcatgtaacccactatcttctcatagtacaacactggcagagtgtccaccatcatggtgacattctcttcttaaccatggga

SEQ ID NO: 222623 - DNA, 384 bp, Glycine max
  unsure (1)..(384): unsure at all n locations
ttctccccattntcctataaataggggaagaggtgaagggataaaatgttcagccctcctggtaattcgagaatcacttgaaattagtgaaaaaaattgtttccgtgaagaaaatccaagccgaggcgcttccgtaacatttccataacgtttccgtgggtgatttcgcgaagattttcaaccgttcctcaacgttcttcgttcgttcttcatcgttcttcggtcttcaaccggtaagtacccaaaatcgaacttttcaattcattntatgtacccttagtggtcctcatttgttttcacatgcttttatcttcatttcatttactttncgtatccccttttgacgtgctttagtcattttcttaagtcattctctcgcctaat

SEQ ID NO: 222624 - DNA, 474 bp, Glycine max
  unsure (1)..(474): unsure at all n locations
gtcttaagcactgagctgcagctataagaattggtcataaaatttaagtcctaatatgctgataanaacacnctttaatctttctttccttcctcaccgtntccttaacttgatgcctncattatttctttctcttgcatcgacgaagaccagtaccaaccatatgttaaataatggtagcatgtcggatgagtataaaatatatataatatcacatgatgtnctctaattaaaaattagacattgaatcattatactntcctctctctntctttntcaatgccccaccaattttttgctataaatacccaagaaatcatcccgttttctcacagacttcctttgctcanagccaaaccaaatnttctctctttcacttagttattgactccccaaaagcttttcanatatctctggtcctctctcacgtaccttctccctatctttcactccacttcttaacaccacaaaaca

SEQ ID NO: 222625 - DNA, 492 bp, Glycine max
  unsure (1)..(492): unsure at all n locations
cacgtttgaaccgtcacncnctganncccttgaataacgcgcactatgatactaagctctctaaatctacgnggtatttattgacttcatcgggttttgtatcccttgaatgggtgagatatatatgccttgtagaaacaccctggtatggaacatnctattatttttttcttgtgctgggggaatcatatagactatataaaattcgcccttttagaagatggaatatggaattttttttttttaatgggagaggaaataaatttgaaactttgtattaatattcttcaagtaaaaaattaaaaaaatattattgtggaaaacaagatttaaaaaactaccaaaataaattccttctaattgtggtcatcaaagtcaatagatgctttccgtgattgccgtcaagactaaatggagctgagtgactcaatagatgaccactcttggtatccccctttccacccaactcttctttcttaatgatacaaatcn

SEQ ID NO: 222626 - DNA, 466 bp, Glycine max
  unsure (1)..(466): unsure at all n locations
agctntgcttctacaatatccnncttttntgatgatgacagcttctggaatcaagaaacacacacacacactttntcctagtcgatctctcacataaaattccattcttccccttttggttntgaaatntatgctttctcttaaaattaaagtgattactcatgtgagttcttgatttaatccctatttctcttccnctttggtatcaacaaaaagccaaagtgcataacaattttgaagcattcaaatataactaagcatccatacaacattcatggaaaaatatcaaccaaatcatgaagcaagaaccatgaagcaacaatcatgaatagattaattataaaatccacatagtcaaataacatactntaatattgttcaaacaccatgcanataaagaaatagggaaatgttcanatatcataataatatagattatttggataagtcactgacatctattagt

SEQ ID NO: 222627 - DNA, 448 bp, Glycine max
  unsure (1)..(448): unsure at all n locations
ctccaaagttntctggttnttctaaaccttgaaaacttgtgctanttcattttttcatctcttctcctttgccaaaagaattcgccaaggactaaccgcctgaattctttntgtgtctctcttcttccttttccaaaagaacaaaggactaaccacctgaattcttttgtgtctcccttctcccttgtcaaagaattcaaaacgacacagtctaagaattcttttgattcttccctttcccttatacaaaagttttcaaaggactacccgcctgaaaattcttttgtatccccattcacaaagtatcaaaggtttaatcgcctgagatctttgtcttaacacattggagggtacatcctttgtggtacaagtagagggtacatctacttgcgttggtgattgagaacaagagagggtacatctcttgtggatcagttctagtggaggg

SEQ ID NO: 222628 - DNA, 341 bp, Glycine max
  unsure (1)..(341): unsure at all n locations
agcttagacccttatagctatgatgcagaagaaatgaagaaagtgataggcattgctttgctgtgcactcaagcattggctgcaatgaggccaaacatgtctgaagtagtagtcctacttagtagcaatgacttacttgagcatatgagaccttccatgcctatcattattgagtcgaatttaaggccccaaagagatatctcttcttcaactgcttcctctacgactaatgcaactatctccaattcaatagtacccgctcgatgattaaatatatgatgtaaaantnnatttttttgtccagttcattattaaggatgattattggtaaatcttactta

SEQ ID NO: 222629 - DNA, 330 bp, Glycine max
tactaagcttatgatgaatcaagaatgattctacgagtcttgatgataacttagatgatgacaaaaagctcaaaagtcaagatcacttcatgataacaaagatgatgacattcaagaatgagttcaagtttgagttcaagattgagtcaagaacacttcaaggatcaagagtcaatttgatttctagaatcaagattcaagaatgaaaaataatcaagatcaagattcaagactctaagattcaagaatcaagataagtattaagaagtttttcaaaacattgagtagtacaagaagtcttcacaaaatcattaccacagagttttactc

SEQ ID NO: 222630 - DNA, 332 bp, Glycine max
ctataaattctaatatcttcataccctacttttaacacacgatacatagaaacaaagtgcaggtgaatcacaaatttcgtcttcaaactattactctctccgctaaataaatgctaaagtaataacactattcaaggaatccctagagtattgaatattcatcaattgagtccctacgtggatgtattggtttactgtttaaggaatattgtgaggggtattctaatattaaagggaaaactttgtctaatttctaataattatacgactacttaagtagttcgttttactataaggatattttacttaaggtgtgggcaatcttcatcata

SEQ ID NO: 222631 - DNA, 375 bp, Glycine max
  unsure (1)..(375): unsure at all n locations
ctaagctattatctggggtacaactagatacgatacatggttttaatttacgactttattataactacggttacactcagggtctactttgagcccttatccttttaccttgatgttggatatgcttattaaacatatcccacagctagagctacaatgtgcgctttntacaaatggtatagctttagtgtgccagtggagatcgattattcgtacgattaccgtaaaaagatttggaagcacattacttctgattatgtatgaacaaaatgaagcatgtctaatggcagttcatgaagaccaacactattgccactgtatacgtgaacattgaaaatcacacccttccactggtctcaacacgtcttggatcta

SEQ ID NO: 222632 - DNA, 193 bp, Glycine max
tattacacaacgtggcggacaaaagtgggcagtttacttgaacggtcattattgtccatgcggaaggtattctgcgcttcactatccatgttcacatattattgcaacttgtggttacgtgagcctgtactactaccaatatatagatgtcgctatacaaatgagcacatcttacaagcttactccgcacaat

SEQ ID NO: 222633 - DNA, 349 bp, Glycine max
ctaagcttctaaagaggttagcttagttattagagacgcgcgcgtagtttagctctagcttctcaaggaagcttcttaaagaagcttctcaaggaaggttctcaagaaagcttttcaccgaagctacctacgctataaatagaagcatgtgtaacactttttgtacctttgatgaatgaaagtgttatgagacacacttcagagttccacttttctccctcttttattccttcaatttcatgctcccaccttctctctttcttttcctgcattaaagcatcctcttcaagcttcttatacaacgcacattcttggtggtgaagatcgctcttccataggctattcccta

SEQ ID NO: 222634 - DNA, 426 bp, Glycine max
  unsure (1)..(426): unsure at all n locations
ctaagctntctcgcggcttctttgagaagctttctcgagcagcttctatgagaagctaacgttctaactactaacacccttgttaataactaaacccacctccttgaaaataattacggataaaaataacacaacaaatataatcaaacatcaagcataattactaaatatatatagatatatatatatcagggtgttacactaagcgcgagatcagtgtgctaagtgcagtanttgtcttcaaccaggctcagcacacgactagtgctaagctcaaatccactcactcgcgctaagcgcgagggtggcgctaagcgcaacatcgtgaattcaaagcctatttaaagtctgtcttgtgaaaattacggtacaagttttataataaccagtgcacaaaattccacagcacaccacaatgcctatttc

SEQ ID NO: 222635 - DNA, 201 bp, Glycine max
acaattatgatgttgacagcttataatcaatttctgccttcttcatttattatactaattaagggtggcaccaggcctctagggccccatatctgcttaaaaaaatacgccccgcctggcactattgcagacttgtgttattattaacattctgcgacttggaccattcaaacggttgattacctaatcgccttggtcact

SEQ ID NO: 222636 - DNA, 374 bp, Glycine max
ttacaacgtagtgactgggaaaaccctggcgttacccaaaataatagccttgcacgacattctcctatcgcgcgctgggcgtatatcgaatatgcccgcaccgatcgttcttctcaacagttgcgcaacctgaatggcgaatggcgcctgatgcggtattttctgcttacgcatctgtgcggtatttcacaccgcatatggtgcactctcagtacaatctgctctgatgccgaatagttaagccatcctcgacacccggcaacacctgctgatgcgaatcccttgagacaccaataacatcttgtgtcatatcgccaatttactgactcttctcttataaactcactctctccttagaccacgtcctgccctcg

SEQ ID NO: 222637 - DNA, 465 bp, Glycine max
  unsure (1)..(465): unsure at all n locations
agctngaggactatacctncgaccgtacaccgttgtggttctatctcggcctaagtttattgtgggctgtagcaccgggtccgcttacctagctgtattggaggcgcgcgccgtggcattatactctatagatctctgaagctctagcatggccttcgtgatagaagccatttgatctttaaaggtcgataggtcggccttcatctgttcttgcactccctcttcattatccattattctggatcgagtgttataggggtgcctctgcactttcttagttattgtgagttccctaaagaaacaaacaatggtgagtatgccaccaaaacatgaatatgctaatgaatgatcggaccacttggatccacctcaagattttagataacgtgatgagttcagaacttctcgtttataaaaggaacaagctttatctaccaagacatacaaagtgtacacagacctaca

SEQ ID NO: 222638 - DNA, 316 bp, Glycine max
  unsure (1)..(316): unsure at all n locations
gtctaggatctcaaattaagtcttggaagcaataaagatcaattgccattcaacatggaagggtttgtaacacaaaacatacatcagaatactaaaaaattattaaattcttactcgttactttttttgaaaagagaaacctaagcatacaaaaagcacatcatcctacccactangtgtggcttttgtgaatgagctaccggttaccacttagaactctctgtcctactttagacaccaaaataaaaatgtattatgtatagcccctctatacttaacacaaataccacaccacgactaaggttagtgtctggtc

SEQ ID NO: 222639 - DNA, 286 bp, Glycine max
agcttccacgtctaatatggaatttattttcttttttagtacgaaaaatatctataatgaatagagtaatatgttttaacactacatgtgtaatttggagcaaagcatcatgtgtatgaatctagaaaagaagagaatgtggatttcaattaccaacgcttgaaaatgaatcagataacccatgtcgtggacgcctgactctaaaaccgatcttccctttcagctatttgtttctttctaactttggacgccattgatgccatataatcttcttatgcagcaaaaa

SEQ ID NO: 222640 - DNA, 154 bp, Glycine max
tcttcttcttctaatgaccgcttctctttcttcactttcggttatggtaacaactaaagtgcaacactcaggtatcgccatcgtttaatctcacagagcctgcaagagtgaagttagataactatgatgatctagtcttggagctgaatgagcg

SEQ ID NO: 222641 - DNA, 459 bp, Glycine max
  unsure (1)..(459): unsure at all n locations
agcttcccaaccaatcttcgatatctttcaggatcagaataaggctccccatgattgggtagcaatttttgatttggatccataggagtatcaattggtctacaatctgacataccagtttctttaagtatgtctaacgcatacttccttagtctaaaaatgactaaataaatgttcttttagttgagcaatttttccttggtcatttcttatgatgactatatcatctatatagaccaccaagtaaaaacatctactcgatgaggtatgacaataaaaaactgaatggtctgcttcacttcgttttatcccaaaagcctgaacaactgagctgaattttccaaaccaagcacgtggggattgtttgagtccataaagagacctncaaaatttgcaaaccaagctagacttcctctgagcaacaaatcccggtggttgctcatataaatctctattcta

SEQ ID NO: 222642 - DNA, 443 bp, Glycine max
  unsure (1)..(443): unsure at all n locations
ctagcttctcaaggaagttntctcaatgaagcttctcaaggaagtttcctcaagaaagcttctcaaggaagctacctagtctataaatagaagcatgtgtaacacttggtggaactttgatgaatgagagtcttgtgagacatacttcaaagttccacttctttccctcttttattccttcaatttcgtgcttccccctctctctctctctccctctttcttttcctccattgaagcatcctttcaagcttcttatccaaggctcatcttggtggtgaagatccttcttccatggcttattccctagtggatggcgccttctctcacctcttctcctttgtcttccgctgcatctccatggtggaacatcaccattaacgaacctcattgaagctcacagatccagcctccatagaagcaccacaagcaagcttccgtcacat

SEQ ID NO: 222643 - DNA, 470 bp, Glycine max
  unsure (1)..(470): unsure at all n locations
agcttccttaatcacctcattaaggactagaacaccatgtaggatgtgtctgttntttatgaaagttgtctgcctctcatcaataagaccagatatcacttgtctcaatctatntgctaataacttagctatcaccttgtacatacatccaatcaaggagatgggtctgtagtcatcaaatgactggggatgtttaattttgggaatgagagctatgaaggaagcattactgcctctagggaaactgccatgtacatggaattcatcaacaaatcttctgaagtcagctttcagcatatcccanaattctttaatgaatttgaagttgaaaccatcangtccaggacatttgtccncatcacaactccatactgcttctntgatctccaaatctgaaaaaggaacaaccaaagactccctctgctcctgggttagtgaagagaaatgcactccatcaagagtgggtctac

SEQ ID NO: 222644 - DNA, 456 bp, Glycine max
  unsure (1)..(456): unsure at all n locations
tangctaaattangctaaactttcataagctgcttgagctgagtctagtcttacaagagggatctgtggacgaaatatagtttaagttaatctaaacctaagaaggttgtcttaattgggcatagtcgaacaaaaaggatctgaggacgaaacttggattgatttggtctaatgagggatcgagggttaataatttacgctacaacataaaacacaagagcatgattgattagagaaatatatttatatgcatcagcttgcttgttagaaagacccaacatttctacctactgttataacttttacttaccttgcattntatagtttttaacataaaggtttagtttaaattctgtttgaaattttcaatcatacatgttctcttaacaatgctttatttctanacttaactcacgctaacattagttccctgtgttcgatactcggattcattcg

SEQ ID NO: 222645 - DNA, 319 bp, Glycine max
aaatttccttttatgaatgatgctctcctacaacctaagacaaggtagaaggagataaactgtacaagctcaaggtttaatcaaacaatcatactttcagctcacaatgggtgcaagggataaaccaatcatgccccaggtaagctttctagctaagtggctatcttcaatcaaaacatgggcttcatcctcttcaaactcatgtgtattcattccatactcagagatttatgtaaaagccattacttactgctagtcgttctctcacaattaaagatcacactctcactgggttgcggctaatgcattccttcacaat

SEQ ID NO: 222646 - DNA, 299 bp, Glycine max
tcttactttattgacacgctctctttgagggctatacatctataattctttaaatggcttggttatgaaagctaggagtcacttactgacaaaacaatacttgaatgttcttacgttcaaggggaagctaagggttgtgttagtagtgacctaaagaattcttgtcagacaggagagggtatggtagaatatttaattgaatcacatcattgattagtggaaccatttactattttattaacgagaactacacatacgctagattgagtgaaataatataaactaagcgcttctactac

SEQ ID NO: 222647 - DNA, 363 bp, Glycine max
tgatcaaaacaaacatctaatcattccagtccactcaattcatacattctctcattcaagtcattcacaaacacttcattcataagaaatcacaccactgaatatcataattaataagttcactgttcaaacatgcttttgtacaagctatcaacactcaaacaaccaaaatttaaaagactaaaatttaaagactaataaagcataaacaaataattgacatgaactacataattgataaaagaaactattcataatttgcaaaattttaaaaactatgtagaatttaaaactcatgatcatcctactgctgatcttctgcatgctcgttcagatccagcattggagcagctggtggatcct

SEQ ID NO: 222648 - DNA, 299 bp, Glycine max
  unsure (1)..(299): unsure at all n locations
gcttgcnaagctcacataaatgagaaaagaatcataaaacgtaccttgcgttgatgtcggactccaacggaggatgctccacctcgcggcagtcacgaaccccaatggcagtcgtgaaccccagcaacaacgatggtgaggaggagatggtggtgacaggtcgcaaaaggcagtcacaggtagcataaaacgatgataggtcttgcgggtganagggagaagaggaaggcttcgtttgcaatactgagcgcgcgggagaaaaagtggttttgggttttaatttatgtataacacaacat

SEQ ID NO: 222649 - DNA, 443 bp, Glycine max
  unsure (1)..(443): unsure at all n locations
tatacaagtggattcaaactttctaacttgtttttctttttttaaaaatcaaacaggtcccttaagaacaaagcttaaccaagttttcaagttatacttctattggatctattaagcacataaaatgaatgaccaagaaagtcaaattacttggttttgcatctgcaaccatcgcggtccataataatcatattgttgtccatagcccgtatgtgctcaaggcaattacagaacacaacattgataattcaaccaacatttctgtacaaaagcaatntgaattggtacaaaagcaaggcaatatctaaacctacctctctgggcacaatattaacaaaatcaattcaccactataatattcatcaacatcaacatanagggtacacaataaaaaagaataagcacatgcacaattataatgacttgacaattacccgcggagc

SEQ ID NO: 222650 - DNA, 409 bp, Glycine max
  unsure (1)..(409): unsure at all n locations
agcttgttgcattntagtgaaagaacaccgagtactatttagtctcacaaatgcaagaactacgtaggtctgagttcctcatcacaaattgaggatacgtaggagcaaaagccccgcttttgtcgaccacctcgccttttgctatcgtgacctgtgagtccggtggcacgcggaaacacccgatggttatccgcgcacactntttgctatcccatgacctatgagtccggtggcacgcggagacacccgatggttatccgcgcacactctttgctatccaatgacccaagggtccggtagcatgcagagataccttcgggttatccgcacctttcgccagctagaggcaagcgagcccgttgacatgcagagatcaacgtggtcatctgcacctttcctggagatgtca

SEQ ID NO: 222651 - DNA, 458 bp, Glycine max
  unsure (1)..(458): unsure at all n locations
tggagaggatgcttaatggaggaaaagaaagacggagagaattagagaggggggagcacgaaattgaaggaataaaagaggtagagaagtggaactttgaagtatgtctcacaagactctcattcatcaaagttacaataagtgttacacatgcttctatttatagactaggtagcttccttgagaagctttcttgagaaaacttccttgagaagctttcttgagaaaactttcttgagaagcttctttgagaaaacttncttgagaagctagagcttatctacacatacccctctcataactaagctcaccttcttgagaagcttccttaagaagattccttgaaattctgatactggggacagatgtcgtacacgatgtcacgacatcacgctttagaacatgcagattatatttgacagtgtggtccgtttaaacaaatagataacacaagagaa

SEQ ID NO: 222652 - DNA, 442 bp, Glycine max
  unsure (1)..(442): unsure at all n locations
agcttctccncaattntctataaatagggggagaagtgaagtgaaaaagggttcagccccttaggcacttctctctctttcgaacttgcttggaaaaattgtttccgtgaagaanatctaagccgaggcggttccgtaacgtttccgtgaggaatttcgcaaaggtttcgaccgttcttcgacgttcttcattcgttcttcatcattcttcgatcttcaacgggtaagtacctcgaaccaagttnttcgattcattctatgtacccgtggtggtccacattatgtttcgtgtatttttattctcgtttcatttacattttatacccccttttgacgtgcttaagccattttatttaagtcatttctcgcttaacctaagaataaaataaatttccaccgatcgtttgaattgattatcccgtaacttcggttaaatgaattc

SEQ ID NO: 222653 - DNA, 389 bp, Glycine max
ctaagcttcttggaaacttcttgagaagcttctttagaaaactttcttgagaagctagagcttagttacgcatacccctctaataactaagctcacctccttgagaagcttccttgagaagattcctaaagaacgtagagcttagctacacacacctctctaatagctaagctcaccttcttgagatgagaagctagaacttagttacacaccccctataatagctaagctcacccccattccaaaatacatgaaaatactaaaaaaagtccctactacaaagactactcaaaatgccctgataggctaaaaccctatactactagaatggccaaaataccacgcccacaagaggaaaaacttattctaatatttacaaagctaaaata

SEQ ID NO: 222654 - DNA, 272 bp, Glycine max
  unsure (1)..(272): unsure at all n locations
ctcgacgacatcactattaacccacagatagaagatgccacaataatgttattgttggtgtagattcgcatcttcttttagtgcatgacaccgaggcatgcacttctcgacggtcctcaacaatggcgatgttgctgcaattatgtagatctactcttttcgaactgttgttttanggaggatgagaggtgaacgtggagcaatcattgagtgaggggcacatgaataaacaatgtataccacaactagggatttctaaagggtgaaactga

SEQ ID NO: 222655 - DNA, 379 bp, Glycine max
ctaagcttgtaataagaatacatagaatcgtatattaatgagataaaaaatatatttaaaccctcgatatgtgtgataatgacttttttcttacttttacgctaattatactacttttacatttaattatgtaaataataaccatcactcacctatatagttgttttcaagataaaagactaaatcttagacattttgatcattcgcctattgtgatttcagataaaagtctatgatgagtgacataaagtaagtgaaaaagaaggtgtaaagaaaaaaacctcgcgagaaatgcaacatttaactgtatatgcagcctaaggatacatccacgctctcttattacaaatatcatttgataacttcttattatacacac

SEQ ID NO: 222656 - DNA, 354 bp, Glycine max
  unsure (1)..(354): unsure at all n locations
agcttatgctgcanacatctacaatagacctnctcaacctcagcagcaaaatcaaccacagcaaaacaattatgacctcttcaacaacagatacaatcccggatggaggaatcaccctaatctcagatggtctagccctcaacaacaacaacaacagcctgctccttccttcaaaatgttgctggtccaagtagaccatacgttcctncttcagtgcaacaacaacaacagcaacagcaacatcaatagagacaacaatccactactaaggcccctcctcaaccttcattggaagaattagtgaggcaaatgacaatacagaacatgcagtttcagcaggagacaacctcaatt

SEQ ID NO: 222657 - DNA, 412 bp, Glycine max
  unsure (1)..(412): unsure at all n locations
tttggtacanaagaagaagaagaagaacttcanagagatttcaattgcttgttaaggattgattggaaaagcaaaagtattcaagattgttgctagaaagattgattgaaaatgcaaaacaaagccttgattttatagactcttcatgtctggtcaagaaggccattcagaagagttataactttttagaaaaacttaaaacccatttgaaaaagtcaaaacctttttgaagagttacatcttttgattnttcagaaacagtcactggtaatcgattaccaaataagtgtaatcgattacacaaagcttttgagtgaaaggatgtgactcttcacatttaaattttaatttcaacgttcaaggtgtcgcaacctacccttcggcgggagggcgacgcgtgactcgcgggatg

SEQ ID NO: 222658 - DNA, 61 bp, Glycine max
agcttggcatctcaagcatcagttctgctgctttaactccttcttccaacttttcaatttc

SEQ ID NO: 222659 - DNA, 417 bp, Glycine max
ttgattctagttgacagcatgatgcctatgcattatatttcgtgtataatataagggaaaaaatatttctctgtcgtgctttggtacaacttcatttggccatatatctggttacatggtttatcacttgctttgaactggtttctcttaaatgatctggcatttttaataaatctatacgttttaattgaaagatttgactttttcttgaacttcattcaagacttttgagttaagctgtatgctttcgtttgaaatattaactacttgtatacttaatttggtgtaatgcacttgtgtaataaatgagaagggttacattctaatgagtcatgattatcgattcttgtataaatttcggatttacgtaaaatatacaagctatgatgaaattgatgaagagaaaacgtggtggaa

SEQ ID NO: 222660 - DNA, 254 bp, Glycine max
caagtgggtctggtttctatttgcacacccttttttactaaatacaccccctttacttttttctgtgcatcttttttcgtaacgttacgaaactttacgaatctcgtaacgatacttattttcttttcgtacgttaccgaaccttacggatcatgaaaatactcttttttagctttcgaaaaagttacgaaaactcacggattgtgtaacaatactctcttttgatttctgtcacgttacggaatttcacggat

SEQ ID NO: 222661 - DNA, 422 bp, Glycine max
  unsure (1)..(422): unsure at all n locations
tctagtcgtccatagacctnctctgtggtacggtctagcanacgttgcatctgtgcattcatcgcatccactaacagacgttgagcgccgtncaactgatggtacttgtcaccaccaccacctgcttcaaccataattcaacaggaaaaaaaaaatgtgcaataaaaattattaaggtttcaggacctcacaacactctactcacgtctcttagatggtagtacactcgtgtttaatgctctcaataggctcttgtgtaatgtattccctcttgccttttaccactcgtgtttcctcttaagttcctggatggaccacattagacacacaaggtaatataaaataaaaggaaagacaatataatgatcacaaacagatttgatttgggataacaacttggacttgattnggataataatata

SEQ ID NO: 222662 - DNA, 484 bp, Glycine max
  unsure (1)..(484): unsure at all n locations
agcttgttggtggcaaagtcaaaatctaatagaatgtatacttgaatcaacctgtagctagctatttttgtattcattgtaactaacggagattctaaatttccacttaatatgtgaagatgtaccttttctgagaccttattgctactaccatttagtagctctggtgccatccaaggtagagttccacgaacaccaccagacaccaaggtatttcgcttaatctttgataggccaaaatcaccaacctggtgaaaagcaagtttcttagctttatcacaatgaagacaatgtaatagaatgaataatccacagcttgaaaagataccttgcatattggccgcatatgatccttcaagttcacgagcanatngtcacatttcaagtcanaatgcacaatatttttcgagtgtaaatattccactccaaaagcagcattcatgggcaatatcagtctcttgcggcgtcaagatacctggaataa

SEQ ID NO: 222663 - DNA, 462 bp, Glycine max
  unsure (1)..(462): unsure at all n locations
nntttgtacgacaccttgtacgcaaattgactgttaatcctctcttgaatcaatgaaatttttatcgatggatcttctctaatcatgcctgtcaatagaataacaaaatttaaatgacaattaaggcttaacaataacataatatgaacctaaaatacgtacctactacacaagtcacaattaaatctgaatcaagtttctcgtgatcttgggtcatggtcatattgagacatgtgtgtggtccaccccattgagtgactttccatgaatcagtctttttagatagaattgccctcatgtagaaaaggcaaggacaatctgcatttctattaagcaacanaccacatacttgtcccatttgctttcaaccactttgaaactttgatgcaccctcataacataattgtttgaccgcattctttgaccgcatctttactatcaaattccatgccaacatataat

SEQ ID NO: 222664 - DNA, 374 bp, Glycine max
  unsure (1)..(374): unsure at all n locations
agcttncatggctggcccttagcattcaaaactaaccccttgtggggaatacaaagcctagcttcaatctcttgaggattagtcctcaacctgcaaaatctagagtaaatgggtaaagattccccctcttccaataccactggcgtctgaaggaactcattcaggctgtctgcatctattttgatcaagtgtcctcgtactctggcttgcttgggtgcttcctcctctgtgctgtataaattagcataaaactccttcaccatagctacatctatacttccatcttggagattggcgaggcgtttgtgtagaatacgcctctccaattccactttaaactcgcaaactcagtatgataaattgcacatttctct

SEQ ID NO: 222665 - DNA, 361 bp, Glycine max
  unsure (1)..(361): unsure at all n locations
tcatgatgatgaatcatgtganttcaagtaatttgataatgacatagatgatgatcanaagccccaagaatgatttcagattgagtcaacaattcaagatccagtttaaattgatgtttcatgagaagaaatcaagaacgatcaacggataagagaagtttgattccaagattcaagagaagaagaattcacgattcctgagaagaaatcaagaagacttcacaagggaagtattgaaaagatttttcaaacaaacaaacatagcacaattttgtttttcaaaagagtttttctcataattttaagttaccagagtttttactctctggtaatcgaatacctgtttcctgtaatcgattac

SEQ ID NO: 222666 - DNA, 305 bp, Glycine max
  unsure (1)..(305): unsure at all n locations
tgacgcggtgaagganacgagtgatgagataagtanacagttttacgcgttacggctagaggttctggttctggactcgtaacgttgtcttcttctcttttagaacttaatatataatccatgttttggaaggaatctgttggttcatactcgtgtcgcgttcctccgaaatcacttgaacttgattcttcatctcttgcctcctaataaatactctaacagcttcgcttgatttcaaactccgacanagaacaaccttgtcgacacagcaaagcacagtaacatattacgagaagaagatgtgt

SEQ ID NO: 222667 - DNA, 431 bp, Glycine max
  unsure (1)..(431): unsure at all n locations
cagtcttccttacttttgttgttgaccacanagtggtacctggagatatgtcgcgggggtcaggagaccctgcggtcgtcaggtgggatgctatttgcccaaaccaagcttgaccacatccgacccaaacccggcatagtcagccagtgagaacctgtgacgaacctaacaggcgagcttcctgcagtcaaccaataaaagaacaaagatcacanagccaggaggcttgtgtggtggntggccatctatgatatctgagtgggatctggcatttggcctcttgtantcgattaccancggtgtgttatcggatacaaggcttaataatggagacaggaagtaataccgcctttggtatctactaccacggtgtcacatcgcttactcgctataatcgatactggtgctaggacggctcgttatccgctccn

SEQ ID NO: 222668 - DNA, 338 bp, Glycine max
  unsure (1)..(338): unsure at all n locations
tgagatgaggaagtgttgaacggtgaaacttcctgcttttattgctgaccacagagtggtacctggagatatgtcgtgggggtcaagagaccttggggacctcaagtggggtgctattgcccaaaaacaagcttgaccaatcccgacccaacccgggcatagtcggtcagtgagaacctgtgatgtacctaaacaggcgagctcctggcagtcaacagataaaagaaacaaagaccacaaagcaaggaggcttgtggtggctggccagctgtgaattntgtgtgatatgtggattatggcctctggtaatcgattaccaagggtgggtaatcgattac

SEQ ID NO: 222669 - DNA, 486 bp, Glycine max
  unsure (1)..(486): unsure at all n locations
gcttcagctctggccactcctgatagatntagacatgcccaacacaatagtccctatatgactgaagaagggacaaatcaattggacctcctccaaatggagggccaattatcctaccaagatgtggccctgactatggttgtggctccgacttttgctacagcttctagtgctgacatatcaacacaatcgctttgtgatgtctctctgcaccatctttcctttgtcgcgataggcctttatgggagggatcacgtntagcaacatatgatgactgttttgtgctagccatttgaaaaaaaatgaaaaaaaataagtgaacatattaaacaattatatttaaccaagacaataaaataatataaanaacattacatttgtctaaagtaattaaaataaaataaaaaaatacgataaaatcatgaatctggtgtacattatgatgaatcacacaacggaatngtgattcattgtatattttcatag

SEQ ID NO: 222670 - DNA, 413 bp, Glycine max
  unsure (1)..(413): unsure at all n locations
tgctgatggtgcctcagagagccttcatgttgaggactacaagtactgatcaatctaagtgcgggtaggaatcggtattttatgggtacaaccgaattttcttggtaatgagtattgtgcttcgactcttcccagaataataatcgtttggaattttgctttttgtttttcctagtgttccttcatatcaattttagtaattcggtgtattggtcaaacctgtgcaaacaggggaggggatgtaactttgttttcttgatagacaccaccaccttgctgttaacgaggctttgtgtttatcttgcaattatctttctttgggtttcatattatatgatgtgatatntctctaaatatttgtacaaaatttagataacgtgctgatagtttctaaaataattatgcaatataat

SEQ ID NO: 222671 - DNA, 320 bp, Glycine max
gtgcttatcgataatggttccagtttaaacgtgatgcctaagagcactttggagaaattaccattcaatgccttccacttaaagccgagttcaatggtggttcgtgccttcgacggcacccgccgagaggttaggggagagatcgatctcccagtacatataggccctcacacctgtcaagttactttccaaataatggatattaaccccccctacagctgtctggtggggcgcccgtggatccactcagtgggagttgttccctctacactccaccaaaagttgaaattcgtagtggaagggcatctggtcatcgtatc

SEQ ID NO: 222672 - DNA, 457 bp, Glycine max
  unsure (1)..(457): unsure at all n locations
tgtagactggctagacatgatacatgtcanggttnggtttggttcaatgataaaagggatgccccacattatttccatgacacaaatgcaaaaatgatgatttggaaactttatgcaaaactggtcatgcatgcacctatgtggacactcaagtgtcaaaattttttatggtcatgtgatgctaaagctcagaattcatttcctctattctaaatcaacccaatgtttccaaaatatgttcttttatcaatttgtgcattcatccgagtccatttcgggtgtccggngaaatttcacagcattcacccttcaggtgtagacacatttttaaaaattggttatgatcaatgaattttttcacagaaaagttggaaatcatctctcttcaaagaatgtcngtccttagctagacacctaatttcttttttccattttttctacttgcttctttttctat

SEQ ID NO: 222673 - DNA, 417 bp, Glycine max
  unsure (1)..(417): unsure at all n locations
agctnnttggagtagaaacatgggaccaactcattntatttcataaagttgtatctagtcaaggtctgagagaccatacaagtttcctagcgatttctaattatgtgggccattaagtctatcatatgctgacaatagccgagaagcccatgaatttcttcgggggcggagtaggtgtccgccatcgccttggccttggctaacaatcggngaagttcctgactcccgttcaaggtaagagcaaaccgatccatccacatggttgcctctagcctctttntccgcgtatacttgggcatactcgtccgcgatcctatgcccgtgggccgtggctagacctaactcttcttggtacttggcgatgatagctagcatgttggtctccgtctcgcataaacgctgagacaagcttctttt

SEQ ID NO: 222674 - DNA, 428 bp, Glycine max
ctaagctagacatacatatctcttcttgatacactaattcaaataatctatttcatggtctacccaatgaagacccttatgctcacttggccatctatatagagatatgcaatattatcaggttggtgggtgtgcctgcggatgcaatcaggttgagtctgttctcattttctttatctggagaagctaagagatggcttcattcttttaaaggaaacaatctgaagtcatgggatgaagtagtagaaaagttcttaaagaagtacttccttgaatcgaagactacagaaggcaaagctgccatatcttttttccaccagttaccagatgaattgttgagtgatgcacttgaaagattagaggtttattgagaagactccactcaaggtttttagaccaatacagctcaacatattatagatgggtga

SEQ ID NO: 222675 - DNA, 210 bp, Glycine max
  unsure (1)..(210): unsure at all n locations
tgctgattctttgacaccttagttaatatccacatctacttgacactcctttttnggatctatccttctctcttggggggacaacacatttatcaattacttatgtaataaattagaagcaaataataaacctaattaatatacttaatgaaataattaagtgagttttaataattatttatgaattcgataaatagtataaattcatat

SEQ ID NO: 222676 - DNA, 511 bp, Glycine max
  unsure (1)..(511): unsure at all n locations
cgggcccccgcgggtgaggctgtgacntcgngaactctgaatacttaagcataaatgcctntaatgacgcgattccattaggcaattctatattttaagaattcacgccagtcaagaacctcaagtgctttganggttttcaaaatgggagacgtcacctaattcataacctttcaagcgcagagtatgaagatttctgtacgacgtcattgattgtggcagagaccacgagagataccatgtaccacatgcctgtgtcaattcacgcctaatgaaagtatagctagatggcgtggtcaattcacgcctacaccaattatagctagatgttcctatcgcaggattctaatcacttatagcctttctgaacaagtatatgatacatggaagtccacctcaggagaacgatacacgataatttaagtgattgacatttccatgatgctaatcagaagctgccatttttatatccacgagatattactccttatctttatggtgcatctctacg

SEQ ID NO: 222677 - DNA, 118 bp, Glycine max
  unsure (1)..(118): unsure at all n locations
agcttgtgggctgctgttctcgtagttcccgtgagcttggtgttgttntgaagtgaaagggaagagttttgggtgaagaaaatgttccccctccacccctatatattttcgtacaggg

SEQ ID NO: 222678 - DNA, 414 bp, Glycine max
  unsure (1)..(414): unsure at all n locations
cagctcgcccaggcgagcacggttgcttccttcagaagcaacaaccttctggaggaaggatcttgaaggcctaagtgggccagattgctattcgtaccccccctttntactaaatgcaccctcatttatttttttggtaattctttttctgtaacgttacgaaactttacgaatttcgtaacgatacttattttccttccgcaagggtacgaatccttacggattatgtatttactcttttttggctttcgaagaagttacggaaactcacggattgcgcaaaaacacctcttttcgatttccgccacattacggaatttcacggatcgcgcaagcctgcttgcttttgatttctgacacgtctcgggtcttcatttattgtgcaacacaggacgccaagtatctcaaagcagc

SEQ ID NO: 222679 - DNA, 180 bp, Glycine max
  unsure (1)..(180): unsure at all n locations
ttttcatgtcacttttgatcacaacaatctctctttaggtcacatttggcacaccctttgacttctcctgaatctaagactcttaagtatctgttaacactaagtcactcttggctntcacaaacaaatatgtttgaatgaacacaccaattcaatcactccatagagtagataaacact

SEQ ID NO: 222680 - DNA, 446 bp, Glycine max
  unsure (1)..(446): unsure at all n locations
agcttatgtngtcttatgagaggtatttattagcttgcacagcttgctatttaatataaatacatacatacttacacacacataacactgttaggttgtcttatgggatgtgtccttataatttattaatgttaaactgacgcgtcctctactctgactggtcatttacctaattttatacttgattctttgcatactataggctagacacggtgctcttctccttaatattctttcaaaatactgcgatggtacttagtcatcccttatatacggcttcttatctcttcaactattacatctgttattcaattncattagtttcatattcatttatggggatatcttatataactaccttgcaaagatgatcatgtgattataactatatgatttttcatattcatgtttctcatattcattcattggaattccttaatattctt

SEQ ID NO: 222681 - DNA, 453 bp, Glycine max
  unsure (1)..(453): unsure at all n locations
tactcattgngaatccatgggaacctaaatgctcgaagtctttgtgcaatagnaaattccacaaaggcattttaatgcttaagttaatgaaaaaaatgcattgtccagtatgtcacgattttggatcatcctacttgaacgtgtgtccctttatatacattgatatcttacattcaaatatgaaaagttgtatcctttattgaaataagtaaagttagaaaataaaatgattttatctataaaaggataaaatcatgattttatcttggtatagaattaaagacaataaaggtagttaagccatgatctttagagatatggggatataactaatatgattntggaatcaatcttgattgagaattcatcaatgattatcgacccttcatctcttcattgaagacatatgaagtgacagttgacctgcacaaaacaatatgggtagatgacatc

SEQ ID NO: 222682 - DNA, 343 bp, Glycine max
  unsure (1)..(343): unsure at all n locations
agctntgaattcattctatgtacccttatgggtccattcttgctttgtatgccttcatcttcattattctaccgttgatattctttttctttgttttaagagagtttcaaccaatcatttaagccgtaatctcacttaatcaatgttaaaatgaatttcaactgatcatttgtgttgtaatcttgtttaatcacctttaaaataaaattcaaccaatcgtttatgttgtaacatcggttaatcatcacaaaggtaagtttcaaccggtcatttactttgaaagttctcttttatgagttgaaaataaccaagtgaaaccaaagctaatatcaactcacaaatc

SEQ ID NO: 222683 - DNA, 301 bp, Glycine max
catataaaacaataacatataggtatttctttctaatactgattatataagaattttattaaaatggccacttgattggtttgaagacttgataacaaaattattagaaattttatttaaggttctattttattacattggattccttagactattacatatggtagaagtaataaatggggactatcaggtataacactaagactgcaacaatggtcctccacgacatttttctgccccaaaaagtttgaaggaatagactcagcatgtttggtttaccgtcagagctcttgcatatgct

SEQ ID NO: 222684 - DNA, 430 bp, Glycine max
  unsure (1)..(430): unsure at all n locations
agcttgcttctacaaaaagaatacacacacatgacctctatttatagcctaagtgtcacaganaattggaggggaaattgaatnttctattcaaatttcacttgaattagaaattgaatttatggagccaaatttcggagccaaaatttcactaattatgattcgtgaattttagctatggttcaacccactagtccaagatcaagtccaagattctccactaagtgtgcttaggtgtcataagacatgtaaagcatgaagtatatgcacaaagtgtgactatatgatgtggcaatggagtgtagcanacaaatgctcacctccccgtctaanattaattagattgggcttcncaaattcaattaatttatttccaacaacacataaatattcattaatgatgtganatacaaactaccctaaacaaact

SEQ ID NO: 222685 - DNA, 336 bp, Glycine max
  unsure (1)..(336): unsure at all n locations
gatgttcaaaatcacccataacagaatgcacagattcaccaataatggaatgctcaagatgatcaaaaggtataaaatgatgcctaactaatctatgaaatgtcctatctatctcaggatcaaagggttgtaagtcagatggattgcctctagtcatacactacattcagcatgcacaactagttgccttgtcatgtaaataaaggtgcaggtttgaactacagctaccctcaagtgatatccaaatgactttgaaatttgtgagcaaccttataaaatgatgagaagatagcacancaaaaattagacaaaaattcaaagtctaactatgaaagc

SEQ ID NO: 222686 - DNA, 356 bp, Glycine max
  unsure (1)..(356): unsure at all n locations
agcttcatgagagtgtgaagaacatctagaagaattttgattctgctcttgtattcgaagagaacggtgaatccagcaatgaaggtaattaattccagtacttcctagtacttctctttngtttctgaatggattactctgatgtgctgtgcgtggattactatatgatcgagggaggtagatgcacagttcattaactgctgtgagataatatgagtcttgaattgttggatgggatgtgtgttctctatgtgggcaattttcagatttgacactgattggagccatgtgctttttcttgctgtatttcagaagcccgatcatggcctatacctgctgacaggaaaaccctatta

SEQ ID NO: 222687 - DNA, 399 bp, Glycine max
  unsure (1)..(399): unsure at all n locations
agaatctacctctcaaatgtatttatcttgctctctatntgctaaaattccccgagccctcactacacactctctacctttgtttatatacaactttcctttcaattctgttatgacagaatattctcccttggccctccttttcttcctattatagacattcttctattaagagtattatatgcatttctaataagacgtctaacccacatgggtgaaagtgatacaaaaaaataattctcttacaatcggtagagggacaacagaaaagagtgcgctctgataatatacgctgaaaagcacaattgtgcatgttangagttctaaaaagttttgacttgagattcatgtgccaccaccatgtacgaagtgagatacaattacacaaatcttattgct

SEQ ID NO: 222688 - DNA, 310 bp, Glycine max
catattacatgtcatatacggtatttggtattttaaaacttagtgcaatgaagtactttcgaaggtaaggagaatggacatccacctcaatggattgaaccaaaggtatgtcgttattcccgtattgaatgaaatttcaaataaataccatgtgttacctacaaatgacaaagcttaattgggtattttcatattgcacgtagagtcatgtacaagccggagggtatgagtgtggatattatgtcatgcattggatgtggtgcatagtcagcgacggactgaagaatgaatggaacactgtatgcatact

SEQ ID NO: 222689 - DNA, 440 bp, Glycine max
  unsure (1)..(440): unsure at all n locations
tgctctaacgagctactgtttggattgcagtatgcccacttagctttcctttattcacttgatctctcaaaaatgaaattgtgtcttaatgtgcttactcctttcataagccacaagattctttgcttaatttacaaagatgactcaaatgtaaatcatcaattgtatttggccatcattcttcaagtgtagctcctctaataatgcttcaagccacaaagctggacaatctccataagagtttgcaatgaactatgcttcatangacgagagtgaaaccatgacgccaaagccttgcctaacataaaaacatatcctcttgggctctttctgtctttnntatcttcaaactaatcaaaatcaaataccttctattntgtctatccgcatcatcttgaatgtttggaaacaatagaccataatcaagcgtggtctttatg

SEQ ID NO: 222690 - DNA, 372 bp, Glycine max
  unsure (1)..(372): unsure at all n locations
gtcacctgcggctgcagcttacccttacttgcaagaaccacttctcataacaacaacacacacttctcttgctatgtccacaacagtctccttagtccataagaaattcataatactgttgtatctagttcttttaaactttggcatcanagactaggccatcctaacaaggatgcactagaaattgactaaataaatgtaatataccctttatcaataaaactaacaggggatttttgtaattcttgctctatagccaaatctcacaaactaccctcttctccctctttcactggttatactgcacctcttgaatagtattctttgatgtttggggccctcttcagtagagtcatcttatgggatcttata

SEQ ID NO: 222691 - DNA, 402 bp, Glycine max
  unsure (1)..(402): unsure at all n locations
ctgaaggtgtgntaacccaccattttttcatagtagaacacctgtcacgtgtctactatcattgtgataatctctttctctcgttttgggggtgctacttgagttgccaagcctcttcatctttgggcgtgttctttgaaagatccgtccccccttttgcacacgttctgtagttgcatcctatccgaagccatatcagaattgtactgacaccgcctaacgaaggcaaccattaggtccttccaagaatggactcaagaaggttcctaagttagtataccaggcgacagttgtcctagtaagactttctcagcagtttctcatcttttgcgtatgcccccatcttccgacagtacatctttagatggttctcggagcgagtagtcccctcgtactcgtcga

SEQ ID NO: 222692 - DNA, 297 bp, Glycine max
  unsure (1)..(297): unsure at all n locations
agcttatgtgaggcagtgagcctcgacctgcattacacacagttcaccatcaatatacatgtngtacccattttcggcgccaatgtngctttangaagtcagtggctaaaaatccttgggtcttgatatcatcgactataacaccctttgcataccaattttctatgatggttgtcttgtacaacttcagggcgacaaagatttcactctgaccccggntacgtcatctcaatttcgcccggtgtcacggatgaagacagtangattatactggcatatctccctcctcgcggagga

SEQ ID NO: 222693 - DNA, 250 bp, Glycine max
actagtactttggtttctagccgtgtatttggctatattatgacatttgaaccatttaatgatgcaatccttcctaggaagggaccaatcactagaaccatgagccagaggctccaagaagattgggctagagctgctgaagaaggccctatggttctcatgaaccttatgatagatttctgagcccatgggccaaggttgggtccaattatctttgtacatattagactaggatgtcattatatttggt

SEQ ID NO: 222694 - DNA, 342 bp, Glycine max
  unsure (1)..(342): unsure at all n locations
gcgtttatgcgagacggagactctcatgctatctatcatcgccaagtaccaagaagagttaggtctagccacggcccacgagcataaaatcgcagatgagtatgctcaagtatatgcggaacaagaggctagaggaagggtgatcgactctttacaccaagaggcaacaatgtggatggaccggcttgctcttaccttgaacgggagtcaagaacttcccttgttgntagccaaggccaaggcgatggcagacacctactccacccccgaagagaatcatgggcttctcggctatcgtcagcatatgatagactttatggcccacataattagaaaatcgta

SEQ ID NO: 222695 - DNA, 467 bp, Glycine max
  unsure (1)..(467): unsure at all n locations
gcttaagctccttcaactgcacaaggctcttaatatttgaagagtattcttgtggaaccttcacctgacgaagacacttgacaaaacttatctnctccttcttggacaaagtatggcaagctgggggcaagtaacttttcttcccatcagaccttggatgcaactgtgatcttatacccatatcagctagatcttgacgggtattcaagccatccttcgtcttgccttgaatggtaaggagcgtcccaatcacactgtcacaaacatttttctccacatgcataacatcaatacaatgtctaacgtcaagatcacaccagtacggaagatcaaagaaaatggacctcttcttccatatgcaactctgacttttatccttcttttgggtcttcccaaatacagtgttcaggtgttgaacccgctgatatacctgctcaccagtcaacggtatcgacgcaatatcatgc

SEQ ID NO: 222696 - DNA, 208 bp, Glycine max
ttccagcatctcgttatattactggactcaatccgacatcccagtaataattattgccgcttgaataggctcagagggtcaacattcatctatgagcgtctcgatatattatgggactcaatcacacatcccagtaaaaagttatcgtcgtttaaattggcacataggttcaacattcaatttcgaccgtctcgatatattacgggac

SEQ ID NO: 222697 - DNA, 417 bp, Glycine max
  unsure (1)..(417): unsure at all n locations
ttctaacgacaataactgtntactcggatgtnctgattgagtctagtaatatatcgactcgctcgaaattgaatgttgaagctctaagccctattcaacaacaataacggtttactcggatgtccgattcagtgacgtaatatatcgggatgctcgaaattgaatgttgaaccttctgacccactcaaacgacaataacgttttactcagatgtctgattgaatcccganatatatcgagacgctcgaaatngaatgttgaagctctgagccaattcaaacgacaataactttttactccgatgtctgattgacgtccgcaatatatcgagacgctcgaaattgaatgttgaacctatgagcctattcaaacgacaataactttttactctgatgtctgattcgagtccgtaatata

SEQ ID NO: 222698 - DNA, 324 bp, Glycine max
  unsure (1)..(324): unsure at all n locations
agcttggactntctgtngtctgggaacctctnctttctcangtgtacccaaacccaatcaccttgttcaagcacgactttctttttgcttttgttggcttgccttgcatagctcacaattttcttttcaatttgagccttcacttgctcatgcaacttcttcacatactcagctntagcctgtgcatcattatgcttaaacatagcaatgttaggcataggcaacanaatcaagaggagtcaaaggaataaatccatatactatctcaaatggtgaacaattagttgtgctatggacagctcgattataagcaaactcaacatg

SEQ ID NO: 222699 - DNA, 453 bp, Glycine max
  unsure (1)..(453): unsure at all n locations
tcaggctgttcaattgcttcagattggtgcacagaagggcaaatgtctgtgtggtggtcggcagaggagcataaaccacagagtctagcgacaagtgcatattttttattcatggcccagtgggttactaaggtaaccaaggcatctaatttaccttcaagcttcttagtctcagctgatgaaaatgaattcgtggctacttcatgcactcctctaatgacaatagcatcatttctggcactaaattgctgggagtttgaagccatcttctcaattaaatttctggcttcagcaagggtcatgtctccaagggctccaccactggcagcaccaatcatacttctcttcatgttactgagtccttcataaaaatattggagaagaagctgctcaaaaatctggtggtgacgggcactggcacatangtttttacatctcttccagtattcatat

SEQ ID NO: 222700 - DNA, 351 bp, Glycine max
  unsure (1)..(351): unsure at all n locations
agcttgcttgtggngcttctatggaggctggatctttgtgcttcaatgaggtcctttaatggtgattctccaccatggagatgcagcggaagacaaaggagaagaggtgagaagaggcttcatccactaaggaataagccatggaagaatgagcttcaccaccaagatgagccttggataagaagcttggagaggatgcttcaatggaggaaaagaaagagggagagaaagagagaggggggagcacgaaattgaatgaagaaaaagggagagaagttgaacttngagttgtgtctcacaagactctcattcatcaaagttacaacaagtgttacacatgcttctatttat

SEQ ID NO: 222701 - DNA, 401 bp, Glycine max
  unsure (1)..(401): unsure at all n locations
ttattttcaagtgttattcacttatttttcttaacctaccaattntagatttgatagttagactntgaatttttgtatgaaattttttgtgctatcttctcattattttataaaggtgctcacaaaatttcaagtcatttggatatcatttgagggtagctgtagttcaaacctacacctttatttacatgacaaggcaactagttgtgtgcatgctgaatgtagtgtatgactagaggcaatccatctgacttacaaccctttgatcctgagatagataggacatttcacagattagttaggcatcattttataccttttgatcattctgagcattccataactggtgaatctgtgcattctgttattggtgattntgaacatcctgatcttgagcatta

SEQ ID NO: 222702 - DNA, 452 bp, Glycine max
  unsure (1)..(452): unsure at all n locations
agcttgtattcatttgatgtatcatattgagcatcatagagttgctcatcaacatcagacattggcctatgacaaataacagtagctctaggatctgtctcaatgatatcctcgttggcttccacaagagatgcttcaatgattgactgaagcatggcttcttcaaaagcttccctttcaggagggccatgtctttaggagtagcggcaacttctatctttgcttgtctttaagcaagatctagaaaaaagaattgtgctgcaagtcttgcttcaaattgagctcactctagttcttccatctaagcattcttcatctctggtttaaattatgcatgtattgattcaacaatgacagattttggcactaccttcaatatataagacatcgtctgtggaggctaaaaaggggatatcaattntacctattncattaatctttcccttacccat

SEQ ID NO: 222703 - DNA, 410 bp, Glycine max
  unsure (1)..(410): unsure at all n locations
ngaatctgtacaagttcatcanggatggtctttgttttagaaacagaaggctnctttacttcggcagctttagttttcttagttaaccttgcatggagatctcgcacagaagtacccctggctactttctccaatagttcattccgagctgcttcatattccttctaacataattaatacgagtaaaatatatcaagctaatgtcgaattccggcttaataggagtgggaaggatcctagaatcaacttagatgcggattatgagtgggaatatcaataaacctagagaatacatacacatagcattaataggagattgcaaagactaaactttttcagaggtagttatggcaagcataatcaagaaacattaccctcgatacattcagaanaatagaattgatatattc

SEQ ID NO: 222704 - DNA, 424 bp, Glycine max
  unsure (1)..(424): unsure at all n locations
agctngatcaaaacaattatctaatcattccaatccactcaaatcatacaattgttcattcaaatcattctcaaacactcatttcatacaaaacaatccattgcatatcattntcaatcatttcattgttcaaacaagctttttggtacaagcaaacaactcanagtgttgaaatttaaataactggaatttaaagaattgaaatgtaaaaactgaaattaaaatgactgaacataaatcataaaataattgaaaataaaataaactaaaaatgttcaagatgcactaatttatatgtcctgctcttggtggtggtcttgtgcatgctcattaaggtccaacacctgagcaattggtgaatcctgagagataggctgtcctaacttagatgctggtgcagatggtatggcatcatcaggtatgg

SEQ ID NO: 222705 - DNA, 355 bp, Glycine max
  unsure (1)..(355): unsure at all n locations
ctaagctatcctatgctngcctccgacttacccccgtgcacctcgaagattaagcagcccctactttcagggcactccacttatgacactaatccggcagacatgaggaagaatactatttggcccctgctcacctaaaaatcgtcccccatgaactacccaccgacataatcgcatatccggtttaccacactgtaaagaatttgtccttccagagataagggaagatgagcgcttgagagaggtaagacagtcggggccttggaattacccatcttcgatttggcgattatctctatgccaacatcgcatccttccaagtcaagtccagacttgatagtacaaggacacatgt

SEQ ID NO: 222706 - DNA, 286 bp, Glycine max
  unsure (1)..(286): unsure at all n locations
agcnttttctcctgccacacacggttattattattttctctctactcgatgagaaagaaaaaacaagagctaaacattaataaatacccaacactgcatgttcttatttattctcaagatcgaccctcgttcatgcgatcatgtctgttcttcatttatatttttcttttccattgccatgctttctctctttatatattatttgtctgcttatttataatttttgcagcgtcttagaaactttagatatcgcgcaggtttcaatgttagtattctggtgagatct

SEQ ID NO: 222707 - DNA, 360 bp, Glycine max
  unsure (1)..(360): unsure at all n locations
ntaaaagctggcttgtaagcagccatttcatagatacaacattctgtcaaatgttatgtcaaaccaaatgacaaatacagttaaaaagatattgtaatagaacgaaacaaaaagaagtattaagttttcgcaatctctagaatacaaaagccatctatcctacccaaagaccagatatctgacttagagccatacggtatatcagcaagaagctctgggcacatataacttggagtgccaacaacctaagtttagagcaagaacaaatagctcattaattccccaaaaaatgttgaaacagtgtacataacagaactttggtaatatcactcaccgacgaagcaagatcatcagatgaca

SEQ ID NO: 222708 - DNA, 440 bp, Glycine max
ttatttagtaaccatgaccaactattgaagaacgtcgcagaacggttgaagcctttgcgaaattcttcacggataacgctacggaaacgtttcggaagcgcctcggcttagattctgctgactgacacaatttcttcctgctaactcgacagagagggaagcgcctaaggggcttgacccgtttatgcatcactctctgacctatctatagcaaaatacgggagacggttgctcgccggctcgaccaggcgagccacgtgctttcctcctttggaggaactttctggaaggtccaagagggcctggttgctattagccccctcatttacaacgaacaccccgtccgatattctttggagaatctttcttgaaacagcacgaagcttcgaattttaacaaactcgtttctcctgtttggtcacaagctgcgatacgtcacc

SEQ ID NO: 222709 - DNA, 362 bp, Glycine max
tctaaaccttgtacaagaatgaagctctgataccacttgttatataagtggcctcaaatatcctaagaacggcgggggttgcagtaagatattccaaactgtttcccctaatttaaaaattattttactttttactcaaggtattaatctcctcaatgacaatcgtcttaaatatgaactcaaaccaaaccaccttgatatgaatatatagcaaacataaataaacgagattaacggaaaagaaaatgcaaacctcagtttatactggttcggtcacacccttgtgcctacgtccagtctccaatgcaaccgcttgagaagtccactaacttgttaattccttttacaagttctacacacac

SEQ ID NO: 222710 - DNA, 368 bp, Glycine max
  unsure (1)..(368): unsure at all n locations
agcttccanataatttcgttaactctctataatacttctagaggaaagtgagatccataaattttcattgtttgggacttggatgcattagccgtgtttagtctaacatactaagtgaagtttatgaagaaatataagaaacgaatctaccataatgttgttaatgcatgttcttttatggccaaatggaaaattgctaatgcatgttatacgtactactaatggttctttagttctactctgttntgattctcattacctataagtgctatcatattatctgaattcaatttacctttctctgttatggtagggaattcccgttttcacagatccaatagctccatgtaacatcaggtttgatgact

SEQ ID NO: 222711 - DNA, 345 bp, Glycine max
tgtagagtgtccatgttatgttcctagaattcaaggactaggagacctccagaaaaaaggggattaaggagagcaaatttattgattgttattgcttgcatttctattacaatgattgtccatttataagcaccaaatacttattctagttccttctacaagtcctacgagggaggctaacaataatggattttggaaatatcctaatagaaagatatattccagcagacagaatatcctaattgtccatgttatgttccttttagtgcttgtctccttcttacctgctagcaattcttctgtgttgggtgcctcatcataacatttcttggcccatcaaaaaca

SEQ ID NO: 222712 - DNA, 406 bp, Glycine max
  unsure (1)..(406): unsure at all n locations
agcttattgatttgtcatgaattgaaccctgaactttaaatgagtatctnctaaataccttggttagattctaggagattatatgggtccaggaaaatttactctaaaattgggggaagaaagtcaattataatgaaaagaaaaaggttaagcatcaacacacacaacaaataagttgtatgttaaaaanaataagttgtgttgtacaaaaaggtcgaaagtaacttaagaaaagggaatagtgagaaggctatttgtacaaaacaagaaaagatcattgngattagtctaggacttgtgctctcttagaatctaaactttcgaatcctagaagaaccagtgaaaaattttgtagccacaacctcactacaagcctgagaaagccttctgatctattatatatttc

SEQ ID NO: 222713 - DNA, 451 bp, Glycine max
  unsure (1)..(451): unsure at all n locations
tcaggttgttcaattgcttcagattgttgcacagaagggcatatgtctttgtgatggttggtagaggagcataaaccacagagtctggcgacaggtgcatatttttgattcatggccagttgggttaccaggttaaccaagacatctagtttaccttcaagcttcttagtctcggctgatgaagatgaatttgtggctacgtcatgcacttctctaatgacaatagcatcacttttggcactaaattgctgggagtttaaagccatcttttcaattaaatntctggcttcagcaggggtcatgtctccaagggctccaccactggcagcatctatcatacttctcttcatgttactgagtccttcataaaaatattggaggagaaagcctgtcagaaattggtggtgaggacaacttgcacatagtttcttaaatctctcccagtattcat

SEQ ID NO: 222714 - DNA, 429 bp, Glycine max
  unsure (1)..(429): unsure at all n locations
ttaagcactgggctgcagctgatgattggctgagatgatcgtggttagtaatttaggctacaacatagaacacaagagcatgatngattagagaaatatatttatatgcatcaacttgtttgttagaaaagacccaacatttctacctactgctatcacttttacctaccttgcattntatattttagcataaagggttagtttaaaattttgtttgaaatatcaaccatacatgttctctcaacaatgctttatttatgaacttaactcangctaacattagttccctgtgtttgatactcggattcatccattttaattnttaaatacttgacgaaccggtgcgttttccggtaaacccccattcaaattctcttgaaacatatatgagcaaaaagtaactgcaatggngagtcaacacctaactta

SEQ ID NO: 222715 - DNA, 440 bp, Glycine max
  unsure (1)..(440): unsure at all n locations
tggactcanagagaaacttagaatggctctagagtagagtaaaataactataaaataaagactcaacaaacctctagctttggcactttgtttcacagtaattttcaattgaaatttcggaactaagattggtataacatangcaccaattataagaataaatttgagccaaaacaacaagcgcacttccctttcactttttttttcctggatactgatttttctgccaacttgtgtgatttttagtattttttcctgttatccaaatcacttggttctttttttataactcttttccagatgtctagcaaattcagtaaaactttcagctcanaattcgaagtaaccaattctcagtaattnttacaagtttgtatgttcaagctgccagcaccaacgattnttttttaagcatggtatattgattgccttgggcttac

SEQ ID NO: 222716 - DNA, 337 bp, Glycine max
  unsure (1)..(337): unsure at all n locations
agcttctacttatgtggcanggcgggcttcctttaccttcttgtctacaacgtgaactntgaccattgttcttccttcccgcgatgcttcttttcatgtacgcctgagtgggcttatagcctaaaccatacttgccacgatttccttgggtatttatcaggctagttatgccgccgttgttttttcctaaacccatcccgggttcataaccgttccccaacataactcgggccatcattaccgctgcatcggacagacaatgctgcccaaagagggagtccacggaggaaatgctgaccacctcaaaagactggaaagcagtttctgacgattcttc

SEQ ID NO: 222717 - DNA, 444 bp, Glycine max
  unsure (1)..(444): unsure at all n locations
agaggattgatggngacccngtgtngagagaaacgaagatatgggctacgtgggaatacgtgagcctaattggaggtgggccacnagggatggtgggtttattgcgcgcattgtggattgtggaaaagcttgtgtgcaccattcgccgaaccgcacctagtacgacatgtgatgggtaccccataatcctaccaacttgagatgaggaagtgttgaacggtgaaacttcctgcttttattgttgaccacaaaatggtacctggagatatgtcgcggcggtcatgatacctttnggacgtcatgtggggcgcttatcccacaaccaagcttaccaatccacaccaaccgggcatatttgtctattaaactcttactactctactaggcacttctgctttcactctataagtacccacccctctcgccgagtctgcgcgacgcccg

SEQ ID NO: 222718 - DNA, 313 bp, Glycine max
  unsure (1)..(313): unsure at all n locations
tacacttctttcagagaaaggagcttaacattttcttctcaaaaactgaaaataacactactaagtcttcaatctgtacttaatgatgctgaggagaaaaaaatcactaatcctgctatcaaggaatgggtggatgagctcacacacactctctatgacgctgatgagttgttagatgagatcaacaccgagacattgtgatgcaaagtggaagttgtgacctaaagtcaacccattggtgattaggcgccaaacgtgctttcttattctttcanaagggtttatggggtcatcaattatgagatacaaagct

SEQ ID NO: 222719 - DNA, 463 bp, Glycine max
  unsure (1)..(463): unsure at all n locations
taacaatcagtgtcatactatngatcaaaacanagcaggtattaatatgccatactagactcaaaatatgccacaaacactagacctaaatcagtgtcacagaaattggaagaaaatattttatccaagcacaaacttcaagccttattccatgtattggggggaagttatggctggccatatgggtagaggtgtcataaaggagcaagtatggaggaagggaccttggactgctgaagaggacaagttgcttgttgagtatgtcaggttgcatggtgaaggcagatggaactctgttgctangcttgcaagtaagaaacaccaaacttttttcactggtttgtttcttaatatatatgattcggatttgacatttataagtgacaatatagcacaaaaacaactgaaatngttttcaacttctactgttcatngtggctacattcatgttcacccgaagctc

SEQ ID NO: 222720 - DNA, 390 bp, Glycine max
  unsure (1)..(390): unsure at all n locations
agctntanaaagttngggtttctaagctggaattacatttgtgcacctatttngattttccatgcccgctncacatacataanacagccccacccatcccaatttttgcaaatcatgttcatataccatnggngcatttcatcgagcactcggtgggcgcacgtntagacaaaaattgcaagagaatgggagcaatgtggcatgccccattgtttcagaatacaacctangcctaaggccttttcattcatatcctcaattcaagaagacaagcaccaaagcaaaccaacactgccttacaaatataagcatgttctcacaattcgaggcaccaaaagatgaagaaagcacatcaatgganaacaaaaacatcaagtatgggacacttac

SEQ ID NO: 222721 - DNA, 450 bp, Glycine max
  unsure (1)..(450): unsure at all n locations
tctactaacttaagagatacatgcagggcacactgatcattatattattattagacttggttggcttaaaaaatagcatagaaaaattgactttttctcttctcattgagatgacctctctctcctagctaggggttccttccttggtagccttgtataagcttcttctacgtgtgaaacactattttttttttgtgtttttgtttggttcctccatggatcccctggcctacttgagaacttatccattgaagaaaacattctagagacactaattccagaagatgccattgcggatgatggtcccaatctatctctttatctcgttggacgttntttatgaaaagaaccatcagaagttcctcatatgaaggagaggatggttgaagtctagcacccaccattagagaggtagatcaagggatttttctctttgaattctctcatcat

SEQ ID NO: 222722 - DNA, 345 bp, Glycine max
agctaactaatcaaatgggacaattggctactcagttaaatcaacagcagccccagaattctgacagattaccttctcaatctgtctagaatcccaaaaatgggagttccattacattgagatcgggaaagcaatgtcaaagacctcaaccagcaacatcttcctcatctgcaaatgaacctgcccaacctcactctactccagaaaaagatgatgacaaaaatttaaagagtaagttacctaacaatttctatgaaggtgaatcttccacttgtaattctgatttacaaaagcagcatatccctcttccattcccttcaagaagcaattccaacaaaaaaatgg

SEQ ID NO: 222723 - DNA, 455 bp, Glycine max
  unsure (1)..(455): unsure at all n locations
ntcanaaatatttaaaagccatttaaaatcatttcagaaagctttntggtcactggtaatcgatggcagcctctggtaatcgattacgagagagtaaataaaatctcaaaaacttttgaaagattcctttggccaaaccttatgcatcacaatttagaaactctttctaagactctagagactagatccatcatttatcttagatttcttgaagtcttgtcttggatcaaacatgagaagcgcgtttctttggcatcatcaaaacttcatgacatatttgcttctacaataagtggttcgatagtaatataaaaaagatttcacataaaattggtaaaataaaaatgttgtcacataaaataaaaagataaacattgtctacacatttggctaanaaaatctaaatgtcttcatgcgtcttccatgagccgccttcatcgtgaccgacatataca

SEQ ID NO: 222724 - DNA, 331 bp, Glycine max
agcttctatgctatttttctttgtcgcgcgggttttattcattgatgtactggtgtatgtcaaagcatatgcacaaacaagtatgcttaacgctcacatcaataggcgtgtagataaagagtaagaatcacaatatatactctctaagataaaaccacttatgcatagtcaaagagaaaaaagtttacaaattatcaaattacacccacgtaatgtgtcgaatacataaatcataaatcaatgaaattctctcgagacttactctaaaatgagaaaaacgaatgtgatccatctagaatagaatccactctattatttaagtttccacttt

SEQ ID NO: 222725 - DNA, 442 bp, Glycine max
  unsure (1)..(442): unsure at all n locations
tgtttctccacctcatgatgattatgattatgacttctatagaaaacatggtgatattccaagccctggtgttggtcattaaggtgagtatcgatctattgatgatatttttgatagacctattgcttcttaattaattgacatatgtattttcataagatacagtttgttccctttttccttttagattttgtttcttcaatgttctgttggccattttgtgatactgttcttgttcttcgtagatttggctatgattgtgattatggttttggggaccaaaacttgcctattggtcaaataccgtgccgaagacgatgatgtgagagatgttntatatggatcgtgggcattttagttgttggttagtggttatatgacatacaaaattgaggataagataaatcgaatttataaagattcgtttatttatatagtgagg

SEQ ID NO: 222726 - DNA, 283 bp, Glycine max
gctgcaagatatgaccatttcatgttcacagcatctcaacatttcctaacactttcagttgcttccaagatttcgttgtatgcttcttttacttacccgaccaaaacttccctggttattcaattaaacaggtttaaagacaacttctttcgatgggaaaattgttgaaaatcattcatcatcaacttaatgatgcattgtaccaaagtatatggaaaatattaaagtctaattgtgctcacctgtctggcttgaaaactatgttcttatatacaaaccaact

SEQ ID NO: 222727 - DNA, 357 bp, Glycine max
  unsure (1)..(357): unsure at all n locations
ntgacagtttccncgtttattggggaaacaataatagacgcatagctatggtctaagaanaacgaactgtaagagctgtttgaaattaacacagccgcgacaacatttgcatcaatcagcttagcccgctgaacatcaatgatagttccattcttgtcttcacacaccacaatcttgcttttcaccttggctagttccttcacgttgtcgcacaagcccatgaaaacaattggaacattgctggaagagaagtttcatgatagagagacatgccagttatttggacaccattgccaagtgtaagagtaccatgaaattcacggtccaaggtgccagcagccacggttatgacccatg

SEQ ID NO: 222728 - DNA, 176 bp, Glycine max
  unsure (1)..(176): unsure at all n locations
agctntatacacaaaagttagtcatattcaccgactaacaactcncccaaatgtatagttgtggttgctctcaagcaaaaagagaacagttcacttcgcctctagtgacaacaacatgcattgactatgctcaaaagagtatgctacataagttcctgattgcatgatgagagaat

SEQ ID NO: 222729 - DNA, 373 bp, Glycine max
  unsure (1)..(373): unsure at all n locations
tgaccaatcccgacccaacccggcatagtcggtcagtgagaatcttgtgatgtacctaaacangcgaagctctggcaagtcacagatnanaaggaaaccagaccaccaagcaaggaggcttgtggtggctggccaactgtgaattttgtgtaatatgtggattggggcctctggtaatcgattaccaacggtgggtaatcgattacaaggcttaaaattgaggacaggaggctaagatggtctctggtaatcgattaccaangngtgtaatcgattaccaagcttgaaaacgaagtcaggaaacttatggagcctctggtaatctattaccancctgtgtaatctattacacagaagaatgggtcactggtaa

SEQ ID NO: 222730 - DNA, 344 bp, Glycine max
  unsure (1)..(344): unsure at all n locations
agctntgccacatgctgaacccatattatgcatattaattacactcaataagaatttcagtacaaaatggcaaaagcagacttttctcatgctatatgattgtacctgaggttaacctagacatagtttgattattgatttctgcattctttgattcttcatagctgagatgttatgccaaagaattagcagaatcataaatgatcaattcaaataatcatagttaatgggtgaactgtactttattcgatcagtgaacatagcttcttctttcagagtaagctctgcagtcagagaaaattctgcaagaataacatgtaatgggtttaataatgtggaacttt

SEQ ID NO: 222731 - DNA, 451 bp, Glycine max
  unsure (1)..(451): unsure at all n locations
tataagaacaaaattgcctcaatcattttcaaatatgcatgtgaattangaagcatcaacaagaatcaagcccaggctattgtgcaagccatcaatggggcaaaacacaccaaatgattatgatgatggatggctcaaattctcacaaaggtaaactcatcactttcaaattgagctttcaaaactatcatgacatgtagaggagaatcaaagatttcaagtcacaaaatgtcaaaaacttttattttcaaaacaattacccatttcttgaacatatcctataattcaaagaaaaacatgcaaagtagtacatgcgccacggaatggcccaaaatattaaactaaaaatccgacgaaactaacaacattaacaaattaacacaactgacanattaacaaaaccaacaaaactagcaaaaccaaagaacactttcccccatacttaaacaac

SEQ ID NO: 222732 - DNA, 524 bp, Glycine max
  unsure (1)..(524): unsure at all n locations
cgcgcgacacgcggggtcaanactgtgtaactcttgaancccttctgaattcgccgcctcttgacaactcagctctccatttattatataggaccagattgagagggtgtttatttgatcattgacatggctagaaaaaaccaaccccaacacgaagaagaagaaaaaggactacccttccttatattaattagacactacaagactaaaccacacagtatacaatcaacgagaaaattgaaagatagcacttacgtttgcgcctccacatgccatatcagctacttggtctcctcggagatacgcttatcttctcttcctttggctccatatgcttctcctttttcttcagaaccatctcccgctgctcgatccatgacgataacttcttctcctccaatacctacttctcctttgtaaccgcctcttcaccaaggcagggaccacagccgcttgtgctccactctagttatacctcttgtaaacgctaataattgatttcgaaacccaaataanccaaatct

SEQ ID NO: 222733 - DNA, 244 bp, Glycine max
agcttgaacattcatacattaaggagaagcatgatagaatccaagagaaataccactcagtgaaacacaatgctgatagagtctatcattttcttagccaaggtcttgtattgagtcttactttattagaaaagctctctttgaagtgtagaatctataattctttaaatgggttgcttatgaaagctaggagtcacttagtgacaaaacaatacttgaatgttcttaagttcaaggcgagtct

SEQ ID NO: 222734 - DNA, 370 bp, Glycine max
  unsure (1)..(370): unsure at all n locations
tgatcaanacanacatctaatcattccagtccactcaattcatacantttctcattcaagtcattcacaaacacttcattcataagaaatcacaccactgaatatcataatcaataagttcactgttcaaacatgcttttgtacaagctatcaacacttcaacaacaaaaatttaaaagactaaaatttaaagactaataaagcataaacaaataattgacatgaactaaataattgataaaagaaactattcataatttgcaaaattttaaaaactatgtagaatttaaaactcatgatcatcctactgctgatcttctgcatgctcgttcagatccagcattggagcagctggtggatcctgtgaact

SEQ ID NO: 222735 - DNA, 179 bp, Glycine max
  unsure (1)..(179): unsure at all n locations
nctccggtccgnntctcatttctattgttacaactaatatttaattttgcattcatcccttttatacttttcgtgtcgccccaaccgttatggcccaatatcgcttaaaaaatctcccttcctcaccaatccttcagtgtatttataggattgtccttgaacctaactacggatatacg

SEQ ID NO: 222736 - DNA, 450 bp, Glycine max
  unsure (1)..(450): unsure at all n locations
agctttagttgtaagtgaagattcctgactagttntgttatgtaacaaaaaggaaactaaataacctcattcgagaaagattctagaanagttacttggggaatgtggaagggtacaatttcgtaagaaatgggatggttgcttggatacatgacatagcttatagctatgaaggagttaagggaatataagggctattaagccttgtacataaagaagcatgatctggtgggtgatagaaataaatatcttttaccagtttctagtgcctaattctcannatatttaatcatcaaatcttaaatggctgagattcaatttattggtggatgaagttttctacttgaaacacaatacacaatttctactcactacttttagtacctgtctctagtaaatgagtaataggcaggagtactttagcacaatctaaggtgaatcataaactat

SEQ ID NO: 222737 - DNA, 441 bp, Glycine max
  unsure (1)..(441): unsure at all n locations
ttctcagaagctttcaggagctacctattataatagaagcatgtgtacacttgttctactttgatgaatgaaaagtttgtgaaacaccacttaaaggttcacttctcttcctttttctttcttcaatttcgtgcctcccctctctctttctcttcctctttctttttcttcattgaaagcatcctctcaagcttcttatccaacgctcatcttggtggtgaagctccttcttccattgcttattccttaatggatgggcgcctctctcacctcttttcctttgtcttcctctggcatctcatggtggaaaatcatcattaaaggaccccattgaagctcaaagatccagntctcatagaangcccacaagcaagttttcatcaccttgtgaaaagacagtgatgaggtcattttacttcattctcttatcatgcaatcagt

SEQ ID NO: 222738 - DNA, 433 bp, Glycine max
  unsure (1)..(433): unsure at all n locations
agcttaagagcaattnctttcttttcttatcattctcctcatgctgatcaatctcataaattccatttcatgttcctataactttctaaacaaagtagcaagagacatngctagataatctcgtgatttaataacggctgttaccttgggttgccattccctgcttaagcatctcttgacatcccagtgtgccttcatgggttacttgtaatgtatcccacatttcttttgcatttttacaatttgagaactctaaatattcatccatgccanatgcagaagtganntatattttggcctttanatngtattgaacctttcttatttcatcatcatcccattcttctctanggttttctatangtgcatttcccactaccattgtangaatgaagggaccaaattcaatggcttcccatatatttaaatctat

SEQ ID NO: 222739 - DNA, 443 bp, Glycine max
  unsure (1)..(443): unsure at all n locations
ttctctttctctattattntatttaagccatgccacatgtcttccgttgaagggagcaagaagggcccactttccctttttactgtgacccacactcaaccacaaaagtgagaaaaatctgacctttgaaacgctaaaatcatgcctcggtttgcgtgcccgttctctggttccagttcctcgcgtttctctgcgtccgtcggggccagttttcgaaagcaagcaatatatatatcaaaacgctcagaataaaaccctgagcgtggttcagaggttggttntgttaaattctaagtcgcacgcaaaacgatgatttttaactaattaattaagaaataacccantaacctccagttatggatttctcttncttaattagcctaacccgtgtattttgcccccactattcctacttctaccaagaacatataggcatatacact

SEQ ID NO: 222740 - DNA, 282 bp, Glycine max
  unsure (1)..(282): unsure at all n locations
agcttctagccaaatggacttaccttgaattaattcctttgatatgccctttgagccttgtttccctttccttgttntgaagctcactacaagccttaagtgaaaaaccatgatattaccatatccttaagggaatttggagctttggaattgttttgggaataagtgtggggggtttttgtttcattggacaacttgttttgttgactatgcttcatgatgtattttgcgccatacttgatgtacattgtatattggctaaatggtggacatgctgaatga

SEQ ID NO: 222741 - DNA, 469 bp, Glycine max
  unsure (1)..(469): unsure at all n locations
tgcctgggcgagctgngcggcaaccaccttccttcattntgctatnaaatggtgtgaggggctgangaaaaaaggttcaacatctttggcactcaggattcactaaaaataagtgaggaaaagaagaaagaaggaaaaaatcccagctgagacgctttcataatgaattcatgacattgttgtgatcaattacgctaatggtcttcaccattctttgcctttcttcgttcgntcttcatcgttcatcgatcttcaaccggttagttttcgatttcgaagctntgaattcattatatgcacccttaggggtccattcttgctttgtatgttttcatcttcatctcgtttactttcggtattcttttcttcgttntaaacgagtttcgactgatcgtntaagccgtaacctcaatgaatgataaaatgaatttcaattgatcatttgtgttggaatggttgttaatcatcg

SEQ ID NO: 222742 - DNA, 357 bp, Glycine max
  unsure (1)..(357): unsure at all n locations
agctngcttatggngcttctatggaggctggatctttgagcttcaatggngtcctttaatggtgattntccaccatggaggtgcaacggaagacaaaggaaaagaggtgagaggaggcgccatccattaaggaataagccatggaagaaggagcttcaccaccaagatgagccttggataagaagcttggagaggatgcttcaatggaggaaaagaaagagggagagaaagagagaggggggagcacgatattgaaggaataaaagagggagagaagtggaactttgaagtatgtctcacaagactctcattcatcatagttacaacaagtgttacacatgcttctatttataaact

SEQ ID NO: 222743 - DNA, 471 bp, Glycine max
  unsure (1)..(471): unsure at all n locations
cttcacctttggtcctcttcatagttggtgcatgagaaaacattctctattttcatctcccactccaagtaggcctccgaatcgttctttcctttaaagggaggaatgctgagtttaataccatcaattcggttttgtctaggaaaaccatcattccctcttctcctcctttcttcttcattatgatctctgttcaccatttgatccaacctctcatggagcgcatcatctcgttgtttcattaacctctccaaatgttgcatcaaagcttgcattaggaattgtgaaagcccccctccatcattangatttgttcctgtcatctcaaacaaacaaatcanatgtaacaagacaattatagttgttgtttgaataccttanacaaatcanacgtaacaagacaattatagttgttgttcgaatacctcacccactcaagtgtatcacacnaatatggcttttctctaatga

SEQ ID NO: 222744 - DNA, 361 bp, Glycine max
  unsure (1)..(361): unsure at all n locations
cgaaatgcagatattgtttcatttcggaagagtgcgcaaccaaaaagtacagtctttccatgactattcatacccacaaaaattccaaatggcacttcataagaattgaccttgtgtgtagtatcaaatacaacaacatcaccatattnttggtgcccatcagagctagaagtatgagaccaaaaaatatgctctcaccttctctcttcatcacgtggatatgcatactggaaattatagccacttctttttgcatcctcaccgtacttgagaagatcttggcatcatttctttcacttatttttggtttcacaaaaaatacgaatgccctttcataaatggaaataccatgcttacattt

SEQ ID NO: 222745 - DNA, 378 bp, Glycine max
  unsure (1)..(378): unsure at all n locations
ctgagaaacgctgatcatgttaaagggttcattttcaatcatatttttatcttctcttaacttagctctttcattttattttatttttaaaaaaactttggaaaactttacggtgtattattttattgctattcatggaagtggaagtatggtccctcatattttgtaatatgaatatgtccttaccttacctgaagaatatccacactgccatttccattatctctgaatgacttttatattgctccgttttctttccaagtaacgagtaaacatagctntgatgcataaatatgttgattgaattgactccaaagttccaaatttgaccatgaattgcaatgtacgtaatanggataaacttaaattaactaatcc

SEQ ID NO: 222746 - DNA, 423 bp, Glycine max
  unsure (1)..(423): unsure at all n locations
agcttattgattntgataatatcactatagaaaatacaacattaaaagtaatttaaacacaaaataatcaatctttatattgtgtntttcttgtcagatctcattccaagtgaatttatccatgttattacggatgcacatgtttaccacaatcatgtgaggccttngcaggagaagctccataaccagccaaaaccttttccagtatgtgtaatgtttagcacttcttttactttatattgtgactcttttacttgttgaccccctaatctacttcttgtagactttggagatcaatcccaaaatgagagatatagattcttttgtggctgttgatttcaagctcataggctatgatcctcaccagaagattgacatgaagctggctgtctaaaatctggggattctcactccttcgaactg

SEQ ID NO: 222747 - DNA, 448 bp, Glycine max
  unsure (1)..(448): unsure at all n locations
ntgattnntttanactntntacactanagagaaatcatatgacaattntgaagaagaacatcatagggcatatcctcttcatcgtctgatgaagtacaagaagtattagatttagaataagttttacctcgaccttatcatttgtatctgccatgagatagatgttggcttggtcatcatctgaactattacttttctcattgtttgagtcatctcaagtgatcatcacgcttttctttttcttgtccccaaaatatctcttttttagttggggacattcatccttcaagtgtccaggttttctatattcaaagcagatgatctcattgcttttctccttggtcttctttntgaatctagaatcctttcgtctgtagcagggttggaaattcccttcttctttgaattctgatactggggacagatgtcgacaggatgtcacgacatc

SEQ ID NO: 222748 - DNA, 289 bp, Glycine max
  unsure (1)..(289): unsure at all n locations
agctttcgagctnttcattggagtattttgatcttgctttggtgctctagattgtgggaatgtactcaaatacgtggggcaatattggtttgttttcttgcttggatgggttgaattgaggatttgtatgagatgaccctatgcctataatgcattttggagcaatggggcatgccgcattgtccccattctcttgctattaatgcctaaatgtgcgcccaccaagtgtttggtgaaatgcctcaatggcattngcgcatgattctgtanggatacaacctatgggaca

SEQ ID NO: 222749 - DNA, 405 bp, Glycine max
tttgctgattagttttcgccgatgaaaggatcgaagtgggtctaataagacgcaaatctgatcatcatgtttgataataccaaaaaacctaggccaatgaagatggtgagaattaaggagaaacccattgtgtgacttgcattcctatacaggccaagtttccaccaacccaacaatgtcattactcagcccataacaaaccttcttcttacccaccacccagttatccataaaggccaatcctaaatcaaccacaaagcctgtctaccgcactttcaatgacgaacaccacctttagcacaaaccaaaacaccaaccaagaaatgaattttgcagcgaaaaagcctgtagaattcaccgcaattccgtgtcctatgcttgacttgtcccatatctacttgataa

SEQ ID NO: 222750 - DNA, 363 bp, Glycine max
  unsure (1)..(363): unsure at all n locations
agcttaaaaccttgatgggataaactattataattataagaatcactaaacccagatacatatataaaagagaggttcatacaaaaagaaggaaaaccaaaaaccagaattgtacagcttgctgaaagcaacacagatcaatactctcttataactaacacgaagacaggaatacaccactaacataagataacaagcttgcaaactttntaacttttcagatacaacatataaataaaccctagatatgtaaacactcagaagagatcgagaaaagaaacccacatcaattaaggaaaatagtttacaaaaagagcatgcactaaaaagctattaataaagtagatcgactagtcaaattaa

SEQ ID NO: 222751 - DNA, 409 bp, Glycine max
  unsure (1)..(409): unsure at all n locations
tncgctnttggtgaataataagaaaaaagtcatctatccaaaattatcacactcctttcttcatccaacaatgaattggtctatttaaggaagatgatacacagcattattgcacatctctgtagaagcagccactatagtaaacaatcttctctatctaaaatggagtttgttctaaattacctaaatgccactgccattggagttctttctataaccctcttctttttgtttttgtataatcccttcaaatttgcattatgtaaaaaagaggctcccaaagttgcaggtgcatggccaatacttggtcacctaccactattgagtggttcagagacacctgatagggttttgggtgctttggctgataagtatggacccatattcaccatcaactatggtgtcaaaa

SEQ ID NO: 222752 - DNA, 341 bp, Glycine max
acggagattcatgcatcatgatacaatttcactgtaaagcgggtctcaattggattcctaattttcaacttacctatttggaagtgacatcatggcagctaggccccagcttttcattgtggattcagtcacaaaaccaacttcattatgttggactatctagcacggggagtttcgattctattcccacacagatgtgggaagcactttctcacgttttgagtgtaaacctctctcgtaatcatattcttggagagactgggactacattaaagaattcaatatctattccaactattgatctaagctcatatcacttgtgtggaaattaccctatcttt

SEQ ID NO: 222753 - DNA, 305 bp, Glycine max
taaggcaatgaaatatacaatatacctaaatatcctcttcttctacagctagttctcccttcttctctgaggagggtctggacctcgaaatccacaagctatcaatttattaccaatgaaagctgaacatgcagacaccccatatgaacatgttcatagtatgcgaaagctttgcacatttttaatgtttacaatatctcgttagaaaaggtctcactcgtaacatgcaacatgttgactcacaaatttctaaggaaacttaataccttcataactatcatcacatagatcagatctctcaagtg

SEQ ID NO: 222754 - DNA, 348 bp, Glycine max
  unsure (1)..(348): unsure at all n locations
agcttgagtttactagtantttgtttatgaaatcagttttcaaaaactcgaaagtgaatcaaacctgccctanaaaatctttggtttctctcttcttctatattcttcccattctactcattttttctcttctttccctatcacctacacttgacatggcagtataacaccccaaactttttaaccccatgttatagaatcatcaaatatacatatccaccaaagaagtacaaacatagacatcatactcaagcttacttctcattatgtaaccatggatttctttccctaaattaaagcaacccaatcaaatgactgcttgtagagcactagttattgaacatgaat

SEQ ID NO: 222755 - DNA, 340 bp, Glycine max
  unsure (1)..(340): unsure at all n locations
nggtggagtttaaagaaaaccgtggaaggttcgagctaggatataagcccacacatgccgacataaggaaaaacaccctaaaaagaagggaccgaagcatgcgcccgcagcaagaaccgcaagtggaagggacttccttatgtcatatcatttaaagcttcatcagcgtacgctggatgtgtgaaaggcggatcgccatgatcaacaatgaagtccctcaagagcaatcaaactcagtatggtcatgccctcctgagttcgagttgggaaactggcaaattatcgaacaacccaaaattntcatggcaaacataatggtaattgttagtccaaaccctat

SEQ ID NO: 222756 - DNA, 76 bp, Glycine max
tgaaactgtgaaagttgattgattcctgacatactaccacttgaataataagctacctcatatctgtacatccact

SEQ ID NO: 222757 - DNA, 442 bp, Glycine max
  unsure (1)..(442): unsure at all n locations
tgacctttctgtggattgaagcaaagcttgttagagttagaccaaagcatgccctttgctgggccacgccgaaagaacactntaattgtgcccatcccctgaacatttggtcatgaggtttgtaactcatgttcccaagaagtattatctaatgttagtcacaaactcaacataacaatttgcataaaatttcttgattaatttgagcaagaacaaaatattgttgatggtaggagacataaaataacttaatgttgcacgacatacatggtcttgaaagcgaggctgaaatgcatctggctattgttggagaatagagagtgacaatgttacattccctttgttcgcaaggactcacgaatactataatattaattaatatttcttctggacgtatatgtaatgggtttcctaacttctataatctagaaaatgaacacct

SEQ ID NO: 222758 - DNA, 386 bp, Glycine max
  unsure (1)..(386): unsure at all n locations
ctctaggatcttcttgacttctcttgataaaacttcaacttgcccattggtctggggatggtaagggaagctaccttgtgtctgacactatagtgctggaggactntcttgagttggatgttacagaaatgagatcctncatcacttatcagtacccttggtgtgccaaaccttgagaagatgtttttcttgaggaagcgaataatagtctctgcatttgcatggttcacaactatttcttccacccatcttgttacatagtccacaaccaatataatgtattcatttgagtaaaatgattgcaatggaccaatgaaatccatcccccagcagtcaaaagcttcaaccctcagaatgttctatagtggcgattcattccttctgga

SEQ ID NO: 222759 - DNA, 360 bp, Glycine max
taccaaacaaatatcatacaataatcaataaaaacgaagagttatcgattaaaacaaagagaaaacacgaaacaacttagaaaaacttgtgatattcaagcaaactaatgagtatgcacatgaatcaacaaactaaggcacaaactaagcaaaaacaaatgatatgagtagcaatatgagtcacacactatgcaaacaaaaagtattttttgctagatgcatccaatatgcctagttcatttctaatgaaaaagaacctatctctagtaagcggtttagtgaaaatatctactagttgatgctcactatcaatgaactcaatgcagcagtcaccttttaacacatgatctttaagaaaat

SEQ ID NO: 222760 - DNA, 487 bp, Glycine max
  unsure (1)..(487): unsure at all n locations
gcaaaaagatgatattgataaccactcgtgtatttccgcccgncagcgtgactcataagtcagtatgacagatcttttgagcacggaagatgacgttaatcaccgcgtgtaaacgggcttgttggccgcaattgacgaatggcgcataatacgacagtagtgtctacgtgctatcanagctttcgtcttacagacagcaaaaagtttatacggataaccactcgggtattttcgcgcgtcagcgtgactcacaagtactatgacagatgatgtgagcgccgaagaatacgtatatcttcacgtgtcaacggagctgttngtcacgatttgcgaatggcgcataaaacgacgcttgtctctgctgggtggcgcccttttctgttacggactcacaaaagttataggataaccactccgtggtttcgcccgtcgcggactaaaagtcagatgaccatcttggagcgcggagatacataaatctctcttn

SEQ ID NO: 222761 - DNA, 350 bp, Glycine max
  unsure (1)..(350): unsure at all n locations
agcacgcagagactaacgtcgtcttctgtgccattcatctatcgcggncgacaagcccgttgacacgtggagatttacgttatcttccgcgctcacaagatctgtatactgacttttgagtcacgctgacgggcggaaatacccgagtggctatacatataaaatttttgctgtctgtaatacaaaaagcctgatagcacgcagagactaacgttgtcttctgcgaccttcatcaatcgcggccgacaagcccgttgacacatggagatttacgttatcttccgcgctcacaagatcagccatactgacttttgagtcacgctgacgggcggaaatacccgagtggttat

SEQ ID NO: 222762 - DNA, 224 bp, Glycine max
cactgcctcaagtagttcacgatctgcttccataggataacacgttgcctaacagttactatcaggtcaagagatcttacgcttgcactagccagtgatggaatgaatccacatggcaatttaagcactcaaaacagctcatggccagatctactattaatttacaatcttgctcctgagttgtgcatgaagagaaaatacatgacgttatcgatgatgatatc

SEQ ID NO: 222763 - DNA, 281 bp, Glycine max
  unsure (1)..(281): unsure at all n locations
gagcttcatcatgcgttgcttccatcacactgccgactctatagttattatgtcctatntgtttagttgatatggatatatctctacccctggattttggctcttattgctacgtacttttgtcacagcagccttagatggctaccaatatgaattggcctgagctcgggtactgatgactctgctctggatgattaacacctgtgaggttattctatgagattgaatcagtttatggaacaaatgtgctatgattgtaatgctgtgctacatcctttctc

SEQ ID NO: 222764 - DNA, 580 bp, Glycine max
  unsure (1)..(580): unsure at all n locations
actctccctctctttcntcttccacnnnntcctnnncnnnnnnnnnnnnnnnnnccgcgcgtgatgatgctttgatncatcagngaccgaganaaaccaaacttaanctacctcacttaaatctacgaaggctgtgtgattctatcctattgccataagaggaatatgacgacgatgctgggatctgattcctccaacgtgtgatagacgtttagaaatataagctccaacatacatcacactagcatgattgattagagaaacgtagatatatgcatgagctggtctgttagaaagacccaacaatactatctactgctcttaattttacttacttgcattcttactcgacctatcctaaacctacctgaagtatgttctaaatcagcagttattaatgcttgtttcagcaatgccttatttctaaatttaaccacccctcatactaatttacctcacttcgatattctacttcatctgttttaatctacaaatacttgaccatacgccgtgctctccgaaacacgagagtaacctcgaatatatttgtacgactagacagtggaacgcaagtaacccc

SEQ ID NO: 222765 - DNA, 344 bp, Glycine max
  unsure (1)..(344): unsure at all n locations
aattaagcaccctatcagtataaagatatttatgaagattacctcaggtcttctgtttcttctgcttcaaagattgaagttctgaagacacattgcttaaattctttagttggaggaaatgtttcttgctcattagactcagattccttgactatattttggacaacactgggttctacttcatgaatttccctgctttccttgtatttgcatcctccttcttcagaggaatacatccaacgaaacccacactctgttataaccacttcatcgttgttattttcggtttgaacaaagaatntaaatgtaagctttggatgatgagtggtgctcttatcattaat

SEQ ID NO: 222766 - DNA, 378 bp, Glycine max
  unsure (1)..(378): unsure at all n locations
acaaaaaggagttagtcaatactgggatggtattgatgagaagagtttaatttcgggtgttagccatggaacatctatcatgttcttgaaagatgcatgtgttccaaattatacggcgctggaggacaaagcaacaattgatggtgttagatgatattgacaagcttgcttctgccaatgactttgtcacaccattcgaagttgatcgatcaggatgcttgccacggaaattgnggaggttattatggccatggttccccctgtgattntgtgtccttatgatatcccagcctagaagcattataaagacgagttctttatagtagcatctacctacaatnntcttgtgggcaatgttgacaggtgtgatccactact

SEQ ID NO: 222767 - DNA, 457 bp, Glycine max
  unsure (1)..(457): unsure at all n locations
tatctaanactgcgattgtgagattgatgcttattcggaaaacctctaatcctgcccatttttagtctaatattagttcacacttgtaattctaaatctaatatggctgaaaaatagagaacattggtttccttttcttatacgtatttttcaatttttgttcctactttattatgtgtttatagacttgagtgaaatgaatacaaactcaacttttggatcatattatgaatcctagatcaattgtgcttcgtctatatatttcgtggcatcataaattatcttgtaaagcctttcatttgtctatatttataaatcataaatataaacaatatcatagatattctttgtgaaattcaatattaaatcttatatattcattgtttttctttctcaacaactctcatatctccatctatctagnttatctatngactnttatgcggatctacatata

SEQ ID NO: 222768 - DNA, 356 bp, Glycine max
  unsure (1)..(356): unsure at all n locations
agctngcttgtggagcttctatgaaggctggatctttgagcttcaatgaggtcctttaatggtggttttccaccatagagatgcagcggaagacaaaggagaagaggtgagaggaggcgccatccactatggaataagccatggaagaaggagcttcaccaccaagatgagccttggataagaagcttggagagaaggctccaatggaggaaaagaaagagggagagaaagagagaggggggagcacgaaatttaaggaagaaaaagggagagaagttgaactttgagtaatgtctcacgagactctcattcatcaaagttgcaacaagtgttacacatgcttctatttatagact

SEQ ID NO: 222769 - DNA, 464 bp, Glycine max
  unsure (1)..(464): unsure at all n locations
tgggctcttgcctcactcaccgcctctttggtttcatttctagctatcttatacttatcccaagtttcagaatttctacacctagaccactccttgaaacactccttttttactctaactntgctctgaacactttcattccaccaccacgattctttacccctaggtccaaaacctctagattcacccaacgtctctttagccactttaataatctcttgggacgtcttgttccacatatcatttgcacttccttgtgattgtccacatcatccctcccatatcttttgttggaagattccttatttctcacccttcaagtgccaccatttgatccttggtgctaccatangacttcttctctntgccctatctctaattcttacatccataaccaaaactctatgttgggtagtcaagctctcttccgggataactntacagttcaagcaatacttcctatc

SEQ ID NO: 222770 - DNA, 423 bp, Glycine max
  unsure (1)..(423): unsure at all n locations
agcnttgcagatttggtcttcgccagtgaaaggatcgatgtgggtccgaaaagaggcaaatttgatcatcctactaggacgactgagaaaactggggcaaatgaagagggtgagaaagagggagaaacccatgctgtgactgccattcctatacggccaagtttcccaccaaacccaacaatgtcattactcagtcaataacaaacctcctccttacccaccacccagttatccacgaaggccatccctaaatcaaccacaaagcctgtctaccgcacttccaatgacgaagaccacctttagcacaaaccanaaaaaaaacaccaaccaagaagtgaattntgcagcgagaaagcctgtagaattcaccccaattccagtgtcctatgctgacttgctcccatatctacttgataatcaatg

SEQ ID NO: 222771 - DNA, 410 bp, Glycine max
  unsure (1)..(410): unsure at all n locations
tgagatgaggaagtgttgaagggtgaaacttcctgcttttattgttgaccacatagtggnacctggagatatgtcacggnggtcaggagaccttgnggacntcaggtggggtgctattgcccaaaaccaagcttgaccaatcccgacccaccccgagcatagtcggtcagtgagaacctgtgatgtacctaaacaggcgagctcctggcagtcaacagataaaaggaacaaanancacaaagcaaggaggtttgtggtggctggccagctctgaaacttgattgatatgtgagatatggnntntcgtaatcgattaccaagggtgggtaatcgattacaaggcttaaaaatgaagataggaggctaagatggtctctggtaatcgattaccacggggtgtaatccattac

SEQ ID NO: 222772 - DNA, 351 bp, Glycine max
agcttctacttatgtggcagggcgggctttcttcaccttcttgtctccaacgcgaactttgaccattgttcttccttcccgcgatgcttcttttcatgtctgcctgagtgggcttatagcctaaaccatacttcccacgattaccttgggtatttatcagtctagttatgccgcgcgtgttttttcctaaacccatcccgggctcataaccgttccccaacataactcgggccatcattaccgctgcatcggacagactatgcttgccaaagagggagtccacggaggaaatgctgaccacctcaaaagactggaaagtagtttctaacgattcttctgcggcttccacat

SEQ ID NO: 222773 - DNA, 443 bp, Glycine max
  unsure (1)..(443): unsure at all n locations
tagtttaagttagtctaaacctaggagggctgtctaaattgagcctagtccaataagaggaatctgaggacgaagcttggattgattcagtccaacttgggatcgaggtttagtaatttaggctacaacatagaacacaaaagcatgattgattagagaaacatccttatatgcatcagctggtctgttagaaagacccaacacttctacctactgctcttaattttacttacttgcatttttactgtttttatcctagacctagtttaattatgttttaaatcatcaattatcaatgtttctttcaacaatgccttatttctgaatttaacccggtcttagactagtttccctgagtttgatactcgaattcatctgttttaattnttaaatacttgacgatccgcgtgtgctttccgaaaaccagatttcccttgaatata

SEQ ID NO: 222774 - DNA, 404 bp, Glycine max
  unsure (1)..(404): unsure at all n locations
cccatggaagctcctaatatctcccacactatntgggatgggccattcttggatggccttgattntctcaaggtccacttggaccccatttctgccaactacaaaccctaagaaaactatattatctacacaaaaagtacacttctctatatttgcatagagggtgtttttcctaaagactgaaagaacttgcctgagatgtcctaagtgataatctaggctcctactgtacactaaaatatcatcaaaataaacaactacaaatctacctatgaaatcccttaagacattatgcataagcctcataaaggtgcttggtgcattagtgagcccaaaaggcatcactagccattcatacaaaccagacttggtcttgaaagcgggtttccactcatcaccctttt

SEQ ID NO: 222775 - DNA, 436 bp, Glycine max
  unsure (1)..(436): unsure at all n locations
tctcaaggaaggtntcttaagaaagcttctcaaggaagctacctagtctatcaatagaagcatgtgtaacacttgttgtaactttgatgaatgagagtcttgtgagacacaactcanagttcaacttctctcccattttcttccttcaatttcgtgctcccccctctctctttctctccctctttgttttcctccattgaagcatcctctccaagcttcttatacaaggctcatcttggtggtgaagctccttcttccatggcttattccttagtggatggcacctgctctcacctcttctcctttgtctttcgctgcatctncatggtggaaaatcaccattaaaggacctcattgaagctcanagatccagccttcatagaagctccacaagcaagctttcatcaagtggtatcagagcacaagagcttcaagt

SEQ ID NO: 222776 - DNA, 477 bp, Glycine max
  unsure (1)..(477): unsure at all n locations
agcatttacatgcatgttcaaaccatatttactatacttcgatcaactgatgcaatctatntgattgaaaagataatttatattacacttctaatgtagtcgacaactaaaaaaaaatataacagagagtaatgcttaagccaatcaaatcaaatcatttagaatctcatcattactatcatgcatctcaaagagaaggagaatcaggcatcataatgtatagcacaacaaaacattaaaagaaaacatgccttctaaagccaaccaagggaaaaatgtatttatatttgtgaactttntcaaaattataacacatatataaccatatataaaaacatggttgaacaatctgaccacatgcacaacacattccacacattatttctgaaaatgagtggtaagggaatataataaagcattgttattaaaactgtatgtgcactaagataacaagggtgtcatgacaaaaggaacaca

SEQ ID NO: 222777 - DNA, 367 bp, Glycine max
tctgcacgtcaacaagcaacaccaaccaaatattatttttgcgttctcattaccacctcagctgatttttgtgtttccattccaactgcatgtagagcaacctcacctcatttctacatttccattatttgttctaggaagctcccttctccctctctctgtcgatcccactttgctgttgtgttgccaccgtcatgttgacttgatttgaatggcttaagcactattttctgtgagattaattctctaattgtagactacattacaagagtagtatggattatcttttcaatcaatagattgcattagttgatcggagtataccaaatatggcgcgcacatgcatctaaaagcttggagctgctat

SEQ ID NO: 222778 - DNA, 275 bp, Glycine max
ttgttggtgtcacatctgaatgagagcttcttttgttgaggtatgacttgccaattccatttgtaagctttgtggctatgaatgacatctttcaaaaggtaccaaatagccaacgtttacacggtgaatcctatggaagataccaccatgcttttatcagagtggctaggatattgctagtaatccttggttatatgaaagtatgggtctgactctcgacgttgttaggattttggaaaaaatacttgatgagctgaacattggggaacatgata

SEQ ID NO: 222779 - DNA, 423 bp, Glycine max
tctagccaaatggacttaccttgaattaattcctttgatagcccttttgagccttgtttccctttccttggtttgaagctcactacaagccttaagtgaaaaaccatgatatcaccatatccttaaggaattttggagctttggaattgttttgggaataagtgtggggggtttttgtttcattggacaatttgttttgttggctatgcttcatgatgtattttgggccatacttgatgtacattgtatattggttaaatgttggacatgctgaatgaaatgttgtttctcacaggctattcaaaaaaaaaaattcgaataaaaaagaatagctatatagttgagtgaataagatcttatatggcacacgaatgatgacactctcggttctactcttcatgtgtaaaatttatcttcacttca

SEQ ID NO: 222780 - DNA, 281 bp, Glycine max
  unsure (1)..(281): unsure at all n locations
ggtgggaatcctgnaacccagaccattcttgggaagggttcaagatcacaatctcccaaaggtatgaagcatctaacttgnggaatgcttttcaagcgttgctagcgctggaacatgaataaacagtgcgataattcataggcccattcgagaagcatgtcagaatggtgaaggtgttggaggaaccgattctggtggagatgtttctcatcgagctgaaagacgagatcaacactgaggtagcgctccatgaaccaaaacacttgatggaatctatggtc

SEQ ID NO: 222781 - DNA, 283 bp, Glycine max
  unsure (1)..(283): unsure at all n locations
tcttgaaattataacttcttggagtgcttgatacatacaactgttgggagtcgatgaaattataatagttgcatacgattgttaagtgtgagggatcattgaagtcaattcggatataccccttacggtttttctcatgagaatacgtgtctgcgatgtgtatgatactctcgcgcacgatacgaatatacttgagcgctgattgggtaaaggatcatcaactattcttcctatgcgcaagattctgtctaacagangcccattgaatggctataatttatat

SEQ ID NO: 222782 - DNA, 476 bp, Glycine max
  unsure (1)..(476): unsure at all n locations
tcattagttgtatatcttgcattgtatagttgcttcattattgtgcaactgttggcattgtgctccttcaaagtgagaataatattctttggtttgaccattgactttgtcatatcacgaataataatcttttcatcctcagtcagtcaaccaacatatggatgtccaacgaatgacttatccaatgcatgattatgagtctcacatattaacttcatcatccactcttcacctcccaacactggtttcgcaccctgcttaaagggacacccacattntcgactgtcaatcaccgttcatactagatctttctggatgttntggatttccacttttctcacaaccaataaaacaaatgagggtnttcctttcttttctgtatgtgtctgaccttattatcatagccacanaaccaatatcatacgcaacagtatgaaccccattgcatacgtctcacggtagcanatacctacaaa

SEQ ID NO: 222783 - DNA, 429 bp, Glycine max
  unsure (1)..(429): unsure at all n locations
agctnngggannaaattgaagatattntgtcttttaaatgcctaactcccttgagtgacatttgtattggttgttatcttgtgtgttgcgtcttagtacatatcgtatctattatgcatccttcatcatcataggaagtgtgaataaaagtttctatgttagaaaggtttcttcaagaggcaaaacttttgttttcatcgattacagggttgtcataatcgattacaacaagttgtttgaagcttggagagttgatcttatatcggtttaatcgattacagtagtctcataatcgattaccctgctgtttgagacaatgactgattgatttaggagtccctactttaattgattcccaagtggtttaattgattacttctctntcatttagtagtccagaagttaacaagaacactntaatctattaca

SEQ ID NO: 222784 - DNA, 435 bp, Glycine max
cacactcatcacggcggaaaacggagagttccgcgatacattctagagagaccggcccacagcacaaagacgaaaggcgcgaaccatccagatccgggcgcaaccccaaataccaatctaggcccccccggaacatactggaagaccggtcgcccatcgacgaagcccacgagcggtaagctcacccacgccgccgaaaaatggcccacgggcccccccgctgccgaacgcccccgcaaaccccgacactccgggaaaccaattgacctaccccggggaaaggcacacacccaataaacccccacgcacccacaccggacggctccccacctccccgacaggacacaagggcaacacaacactcgcgggccgcacacacccccgagacccaaggcagcacacctcctacacctaaacacggagggaccgcccccc

SEQ ID NO: 222785 - DNA, 410 bp, Glycine max
  unsure (1)..(410): unsure at all n locations
agcttcttgcgtagccgctcttggtgctcagaatatcctcaaaacaaatccctcttattactagctattntgaattctttagttcctaaatgtacaactttcaaattgttgctcgctcccctctttcttttctgcaaaaaagaaaatcaaatgctatcaaaacatggatgaagtcctaagaaaatcaatatcaaagaaaacatggatgaaatcacaattaaaaagcacaactacctatctttcagagtcctttggttaatatgtcttgtctccttatgtggtggggttntgtttaataatcttatacgtttgccttccaaaaaaaacttatcactaatcctcttttcattaatccaatnctgtatgttattgtataaaagatcatgggttctccacctggctgcactact

SEQ ID NO: 222786 - DNA, 464 bp, Glycine max
tgtcgctggagctgacccatcacctgccctaactctttcaaactggtgattcctaggctcttgaccttgacttgatagaacctctttttaagcgaaggcgcctgactcgatcctatgttttactaaagtgaaacaaaacccagtgcgaatcaaaactctaacatctatcatgggtggaatggatgaatgcatgaagaaatgcacatgacacagatgcaatttataaatacgggagcccgggaaattgtccccttcttagatacaacattcgggtagcatagcgcccgacgtatgcatttaagaaggcgacacggaccctccatcggtttaacaaagtaaggggatcaagacgcaatccgtgcatgatgcatatgtgaaaggcacaacacgaggatgtacatagtacgacaatatccacaaaaacatacaagcataggcgtacatgacatttaggactacatgca

SEQ ID NO: 222787 - DNA, 429 bp, Glycine max
  unsure (1)..(429): unsure at all n locations
ttttagttgaaattgtcatatttacacatgcaatcttaattctcaacacactttttggatgagtcttccaaggattgtgttgccttctctaacttttcttccttttccagcaataaggtaaagctacaaaattgagtctcccaatgtttgatataagttttgtaagaccatctttaatttgaacaagtggcttaaaggtgtaaatgcacagtccttccaagcgagcaactcanaggtgtaacaccatcttagaatttcgtatgagcatcttcattaaaaatggaagacttgaacgaaaatggttggcttgctcctcattgttctgggaatagataaggatctatataatgagcacaatgtatgaaggatggaaaaactccaatntatgtaatcccaggttaagacttgtagttcacactaatcaatgac

SEQ ID NO: 222788 - DNA, 450 bp, Glycine max
  unsure (1)..(450): unsure at all n locations
attggcttcctcatcatgtggcttatgatgtttacaattaaatgatcctttgctaccctgccatgagacacacacagatacacaaacacacacacatagagacagacacacgcagactcagacacagacacgcgcacacatgaggagggacacagacacactcgcagagtcacacacacataaagacacagacaaagacacaaacacactgagccacagacacacgcagagacccacacacgaagacacacacactgagtcataaacacacacatagacaaacacactcacaaacatggacagacacacacacacacataaagagacaaacacacacacacacagagtaagagacagacacaaacacacacactcacacacacacagataaagagacanacacacacacacacacacaaagacacacacactgaggtccagacacacaca

SEQ ID NO: 222789 - DNA, 465 bp, Glycine max
  unsure (1)..(465): unsure at all n locations
tgtggcttcaacttgctntacttttcntagttttccctcttcatcaataagttnttcttgaatatgattctcccacgtagacctttaaggctttagttctttaaagatatgcaatacgcgtgtagtgaaatgttgatggattggcaagtgcaccaattcgtcccaagtagtaaagttaaaatcgaagtccgagtgtcgaatccacagagactttgtttatacttaggtagatgattatttaattaagaaaaagatttanaaaggttgtagaaaacagtaaatcaaattgcttaaaattaaatcaaacaagaaaaagaattaaacatgaatntaaattaattaattaattaaagacaaaaaagatgagaaaatccacaatattgtagaacgaaaattataagatgggaactgtggaaactttggttatcagaagctactcttgatgtaatgttaatgaattttctc

SEQ ID NO: 222790 - DNA, 174 bp, Glycine max
tgcgcgccttcatgtctggaatatgagagtcgcatatatatctctagaaccttacgtgctctgctgatggcttaattccactcccagcttcaatacgagtcttggactttacagactcagtcggacatctgctgagtatgcaaacagcactgtatactgcttccacccagaatg

SEQ ID NO: 222791 - DNA, 432 bp, Glycine max
  unsure (1)..(432): unsure at all n locations
agcttctaaggtcaacatcaaatctcaactctgtccaaagataacatgggaaatccccaaaactgacccatccccagtgtatgttgcactaaatgtggcagaagcagaatatcacaacagaactataatgatgctatttatatgcctgaaatattgtatctcacctgcccacatgacaacaccaccagcattctcgattctcttccgctcatcacttctatttggtttatgatcctcagagagagcatttgctgccaaaataaaaaaaattaattcaagataccaatcttatttccaaaatgtattcaaatggaactgtaggagaaaatttatcatatgaccagacaaggactcttgtctgaaatgctgtatcttccacatgatctctgtatntacattatcaagcagcttttccccaacatcacatcatta

SEQ ID NO: 222792 - DNA, 358 bp, Glycine max
  unsure (1)..(358): unsure at all n locations
taacactcatcacggtggaatccgtagagtttcgtgagatttctgaaagagaacggccaaaaccacaaaaatgaaggggtgaacttatcaagataggggtgtaaatagaaattcgaatctaggcccttccgganacatttggaagttgggttgcttaaggaggaagcaactgggcggcaagctccttcacgttgttgaaaaatggtttccggggctttcatggcttctgtaatgcttccgtanaattccgaaaacctgggtaagcatatttactaaacattggtgaaagggaagagaaaaaaaataaaaatcaaatccaaaacactttcgtaaggctttcgtaacttttccgtaaagt

SEQ ID NO: 222793 - DNA, 471 bp, Glycine max
  unsure (1)..(471): unsure at all n locations
catgcangctttctgctcgatactcatctgggttgtgcgactaccatttccatcaacagacaactgatcgtagttgctcaaggaaacacacaaaatggccaattcaacattctcaaacatttctagccacttgcaattttctgctagccctctagcatgtattggaattagttgatacctgcaatcaatgagaacaaagcatatgacacagatcagcaactttttatagcagctctggcaatcggatcaatcatgactacctataaaatttctcacatgaaacaataggcgcaaatattttcacccacctaactaaagaatcatgtagatcggcagtgtcgacagtttcctcacgagctggccgaggaaatgaaaactctaccagaagccatcccattgtatgaagtaactccttcagcatagaggatatctaaatccgagggttcataatcagtcctcaatatctcaaca

SEQ ID NO: 222794 - DNA, 447 bp, Glycine max
tgtagagtctttcgtcaggactcgggcttgtgccctgttggtgccatggagatgatccaaaagtctctacctgaatctctaagaaagagtgtaaacaagtgtgacctcgcacaatccaacaagagcatataatggattccacacaactttacttttcgatatctcatacctaaggagcttgtaaaataattgcttggtagcccttttttcttactatgggagacaatctacttcaagttttaaacaacagttcacaacttcaattgtagctgcattagtcgtatctgtctgcaattttccaatcgagacaaaactgctactacaattgctactgcagtttataaccttgatgtgcgttgcttgctctatgatgtattattcttctgtacaaagatgacagggtagcaccaacagagaaatctaatattgcaatgtgtagcattgagt

SEQ ID NO: 222795 - DNA, 342 bp, Glycine max
  unsure (1)..(342): unsure at all n locations
gcttccagattagtgtaccagatgaccgcggctccagccaagctatcttggaanaagtgcatcaacaacttttcatccctagaatgcgcccacatcttgcgacaatacatcttgagatggttcttatgacaagtcgtccctttgtacctgtcgaaatcaggtaccttaaattttggatggatgacgatgtccggcactaatcaaagatccgccatgtncacgaacggatagtcgccaaagccttcaacatctctcaatctctctttgatagatcgagtttactttattcttccgctgctaggggtggtccttctgtggacaagaatatcggctatgctggga

SEQ ID NO: 222796 - DNA, 283 bp, Glycine max
  unsure (1)..(283): unsure at all n locations
tcccctcaattgatgcattnntaactaaagcttacatatttatcaatgcacgacataatgcanagatagaaacagaaaacacaaaacagaataaccattaatcaagatcaatttcattaataaataggatcatataaaagatatcaacaaataaataaataatcacatatcatgatcctacaaaaacttatctccttcctacaccaatctcttgtaatcttctctccatttgttgtcaagcaaaaaaccaaagggaggaacgaagggtatagaccaatcatgc

SEQ ID NO: 222797 - DNA, 307 bp, Glycine max
  unsure (1)..(307): unsure at all n locations
gctcattgactccagatcgntgtanagaaggacagagatctgtatcatgatttgtagaagaatatataccacaaactcttgcaacaggtgtagatgcagatttctgattcatggccagctgagttactaggatgaccaaggcatcaagttttccctcaagctttctattttctgcagacaatagcatcatctcttgcactgaattgttgggagatgaaagccatcttctcaatcaaattcctagcctcaacaggagtcatatcaccaagagctccaccactggcggcatcgatcatactcctctata

SEQ ID NO: 222798 - DNA, 412 bp, Glycine max
  unsure (1)..(412): unsure at all n locations
tctgatatatattcacttcctttaatatatgatatgatgccaggagttttctgacagacaaaaccagcaaactgttaaccgactctaacagctagtccctgtactgagtaaggttgcaaattcacaaaaactagtggaatgaagtcatacttgagacagtgaaagcaaatggacatattgtggccaaatttatgctacacctgaacactgaacatacattctgncaccacgggctatggaatgccctgcaatgtggccactacagactctatggaaacctccacgactacaaaaaggctggtagccgagatttgatgaccctgagtgaagtgattatgcaaaatgtgcatgaggaggatagtangaggataatacaccggctgataaggaagattctgaatgaaataccaat

SEQ ID NO: 222799 - DNA, 428 bp, Glycine max
  unsure (1)..(428): unsure at all n locations
agcttattagacttataacaccataataaacacattttatttgctgggttagaacatgtgtacttaaaatgcacccncacttacgttntgtcactaataagaacacgcctctggccaaattgaactgtgtctttatgagaaaagtagttccacacaaaatccataagaactcgatgaccctcattntgtctttcagtactgtttagcactctatcaccactactttctttatccacagtgtcacgaatccggataagagaagaacatggctttgcatcttggctacaactagcttgagcaacagcacgagacatatatctatccattggtccatgggtatttggtgctttcctcttccttgcatcattaattctcactagctcctttgcccctacacttgaactanggacagatagatagagtgattc

SEQ ID NO: 222800 - DNA, 430 bp, Glycine max
  unsure (1)..(430): unsure at all n locations
ntactggaatctaagaaggcacctattattgctgcttgaattgctgcgagaatgcatgctatcattgttccccaaaacctcagtggaaatattctaagcaacttcacctttttcaattgaaaatagctattcaagatgaatatataataataataataataataataatcacattgcatttttagagtgatcgagaagataattgttcattaacttttttaatttaacatttgttaactatattagatgcaacaatatatatagtagactaatactataaagaatgagatgcatacttgcgcaataaaccaggccgttaaagagaagcaactgcaaatcaaaaacaaagtgccacgaagcatgttggttntgtgtgctgcagtancagtttgagcgtgatgactatggtgaccaagataaaactccttcc

SEQ ID NO: 222801 - DNA, 441 bp, Glycine max
agcttattctatcccttgagataatcccaattaagtacttgattcatgtttggatttcaacaaggctcgccaaagcgcaagtcaatttctgaattcatctataagatgaccaatcaaataaaatcattaagtgcgaaaacagataaagaattcaagatgaaatattgaattgatagaattaaaggataacaagggtagttttttcttctcctaggcggaaggaatcacactcataataataatacaacgaaacctagagtgtctaaatggaataatggaggcatctagtaggtggaagtctaaaatataattctaagaactgctcaggatttctacacgttataatgaatgcctaccgtcttatttatagaattggagttgagtgtaattaatgagataattacatgaaattacaaacaaataatatctctaattatttca

SEQ ID NO: 222802 - DNA, 461 bp, Glycine max
  unsure (1)..(461): unsure at all n locations
tatttatagaccttcttcaacaaatgtttgttgtctctaaatatcaagatttcttttctttatcttgcggctgaagaatatggccattggagcatttaatgtttgcattaaatacacatacttcttcatactagaactcgactcttcttggatatcatgttgaacaccccagtaggaaatcgcttccttttgcgttaaagcagatttgcatagtagagtgcttcttttgatggaaattagcgaatttgaggacttggactttatatattcttcataggatttgacagatcctagagaatatctctgtaaaacaaatctcanacacagtgtattaaattaagtcttaaatatcattctttaatgttgtatcggatcataacttcagcttgctatcttctgaaacgtcggacacaaatgtgcaaagcatgttatgatatcatataagacacaacttgtaacct

SEQ ID NO: 222803 - DNA, 102 bp, Glycine max
agctttacccatatcatgaggtgcagaccaatatatcttatttagtcatcctctttctggaatcttgtagttttgaaacagtttatagtacaccttatgcgt

SEQ ID NO: 222804 - DNA, 305 bp, Glycine max
aagatacattgatcattcgtttgtgttgaagctgctttacctttttgactcagaagaccaaagagagagggattacctgaagactatcctccaccgtatttatggaaagttcatggtgcatcggccattcattacaaaagccatcaacaatatcttttacaggttcatatttgagacagagaaacacagtgggattgcagagttgcttgaaatattgggcagcataattaatggtcttgctttgcctttgaaggaagaccataagctgtttcttgcccgtgcgttgatcccgcttcacaagccta

SEQ ID NO: 222805 - DNA, 412 bp, Glycine max
  unsure (1)..(412): unsure at all n locations
agcttagaacaatatacttggccttcttttaattgtctttgggcttgnggaccacaatcaacaaagtactttcggcacctactatatgttgacttgaccaatgctgttattggaatgttgcggcaatctttcaacaccttattcacacattctgatagggttgttgtcatgtgaccatatcttcatccagatgtatcgtaagccatgctccatttttcctttgaaatgcgatcaatccatgttgctatggctggactcaattgacgaaatttttctaagttttgatcaaacacatgcttgcaaggagtgtaccgctgcatcaaattgttaccatcaaaagttgtaggtagatatgaaactcanatttacttaatgtataaaataaaccttaagcaatttcttgaaacttctc

SEQ ID NO: 222806 - DNA, 466 bp, Glycine max
  unsure (1)..(466): unsure at all n locations
cctttatgaagtgcggacagaanaataacttgaaaaaaattttgttgtccactcgctaagcgcaccactcgcgctaagcgccatcttcttcacgcgctaactgagttctgctaagcgcgtgacctgtgcgctaagtgctattctcctttgtctgaataatttcgagaattgngctaagtgagagctcttgctaagcccaattccttctttgtttggaatagcactaagcgagacggatgcgctaagcatgggccactattgcatttaaggagcattttatttgctaagcatgaccttggcccactaagcgagagttgcaggaccaatcagagctacagaactcgctcagcgcgtatcttcgcgctaagcccaaaaacttctctagaatttcaaaattttgtattgggcttagcgagtagatccgttaagtgcatgaantttanaactaaaacgtcatgttgactcg

SEQ ID NO: 222807 - DNA, 440 bp, Glycine max
  unsure (1)..(440): unsure at all n locations
agcttatattaaatagagtataaggagtactctaatgtatatgtaaagtgatatccgntaatttgaataaatatatatgatctaataagatgaacaaaattaatataaaatatgtttagtctgttagattgtaaaatgaacacaatttgaaagacaaataagaggaagatacatgtttttgtctaaatatgattggatatttttctctttatagcgcttttctctctgaggtcttttactgagtttcataaaatgttgtattggaggatgaaatacctacaaagatactgtgacgcttaaataagattntggcctagagtaataaataaacatgttgtactaacctcaagtccacaagcatcgttataatcctcgtatccgagatattatgcacttatatgcctggtggccatcacggttttatccttgtaaatacaact

SEQ ID NO: 222808 - DNA, 440 bp, Glycine max
  unsure (1)..(440): unsure at all n locations
tgatttcggccagatcaatccccaagagctggcattgtttggtaatgaggctgatgggtgagaagatttcaaatcctgagaaatatagagatgaggagcccaagctggagtttgaagatcccactttgtatcattatgctatattctcagataatgtcatagctgtgtctgtggtggtgagatctgtggtgaagaatgcagtggaaccatggaagcatgttttccatgttgttacaaacaggatgaatgttggggcaatgaacgtttggtttaagatgaggcccattgaagggggtgcatctttagaggtgaaatcggtggaagaattcacattcttaaattcatcatatgtcccgatcttgaggcaacttgagtcagccaaaatgaagcagcggtacttggagagtcaagctgataatgccacanatgatgcanacatg

SEQ ID NO: 222809 - DNA, 360 bp, Glycine max
  unsure (1)..(360): unsure at all n locations
agctttggtacaagcaaacaactcanagtgctataatttaaataactaaaatntaaaagaattgaaatataaaaactgaaattaaaatgactgaacataaatcataaaataactgaaaataaactaaaatgttcaagatgcacaaatttaaatgtcctgctcctttggttgctcctgtgcatgctcattaaggtccaacacctaagcggctagtgaatcctaagggataggctgctctagctcaaatgctggtgcagatggtatggcatcatcaggtacaggtgtagaagatggctcatgaatgtggtctgtagaagtctcctcctcctgagccatgtatacacctgcatcacaataaaa

SEQ ID NO: 222810 - DNA, 425 bp, Glycine max
  unsure (1)..(425): unsure at all n locations
tttggttntggggtttactacttntttcttacttaccacttattccccattgctcctctatccctttcggttntagctactatcccatactttcatctaccttgtccttggtcccattacaaccttaaaagaccttttgatcctcatgtgcatgtgcttgcgatgtggttgtcaattttagagtcttgccaagtctatgtggtgtttgttttcatgggtgctctgagagtaaatagtagcctatacacttgagagatagagtgcatatcttgtgaggctctatcactcttcattcttgagctgattgactatctcgccatatctgagatgcttggaggattttcatgacggccttgattatttaactntctacgtgtcggatgttacccattcttttcattctttgagattcactgagaaatatg

SEQ ID NO: 222811 - DNA, 354 bp, Glycine max
ttaaagcgcgtgacttaatggttgccgcatgtcatcgggcccgccgcctctggatgacaaacagcacagaagacgatgttagtctctgcgtgctcctcttctccgaggcttatagatagcaaaaaggtgtaggaccaacaggctcccacatgtcatcgggccctgagtattatagatagcagaaatatctcaaaagtgcgggaccacatggttcccgcgtgtcatcgggcccgccgcctttggatgacaaaaggtgcataagacgacgttagtctctacgtgctatcatgctctgagtcttatagatagccaaagtatcttaaaagcgcgggaccacatggttcccgcatgtca

SEQ ID NO: 222812 - DNA, 359 bp, Glycine max
  unsure (1)..(359): unsure at all n locations
agctctngaagatagagagaagactcagttgttataatgtttagtttgacctctagatctataaattattagaggatagttgcataagtggagagagaaggtacgagaccacctacacaatgcataaacaaaaattacatcatctctacctttcataatccttctatgtgctaaaaggaagcaaatagagtgaagtatagccaaaacatcaatgaagatccaatcaatgagtgttgtatagttgtaaaaatccctcaaacagcttctccttgtatgtaatatatatgcatcccacattaaccatgtgggttaagtttggttatgagagaagtgattgggagatcccatggaatatgagt

SEQ ID NO: 222813 - DNA, 212 bp, Glycine max
gcttgcttgtggagcttctatggaggctgaatctatgagctttaattacgtcattcaatggcgattttccaccatggagatgcagcggaagaccaacgagaagacgtgagaggacgcgccatccactacggaataagccatggaacaacgagcgtcactaccaagaatgtgccttggataacaagcttgaaaacgatgcattaatggaggaa

SEQ ID NO: 222814 - DNA, 458 bp, Glycine max
  unsure (1)..(458): unsure at all n locations
agctngaaccttgaatcttgattcttgatatcttatttcctcttgaaccttgaagtgttcttgattcaatcttgagcatcttgaactcattctttgattcttgagatcatcatctttgttatcatgaagtattcttgatctttgagctttttgtcatcacctttgttatcatcaaaacttctttgaatcaatcttgattcatcatgaagcttgcttctacaatgaatgtggtgagtagtgcaaccctcttttgaaaatcacccatgcatccatcatcttcatgattcacatacatagggactcattacgtaggtttattcttattctttgtttcaatacaaacccagggtttcatatgggacaccttaggtttgtcatactnttnggtaggagtaatcaacatgaaaatataaaacaaaggtatattntattgcattactttccttanattcttaagt

SEQ ID NO: 222815 - DNA, 189 bp, Glycine max
tgttagacagacggcctcagttctcttaagaagggggtggttgttttacgataacaagaactctcgcgcaattcgcctttcactctctgctcttacatgaacgatgcaccctcaacatgaattactctaaagacaattctccatagactgctttaatggaagagagaactgcacactagattcatgctg

SEQ ID NO: 222816 - DNA, 406 bp, Glycine max
  unsure (1)..(406): unsure at all n locations
gcaagcttctacttatgtggcagggcgggctttcttcactgtcttgtctccaacgcgagctntgaccactgttcttccttcccgcgatgcttcttttcatgtccgcctgagtgggcttatagcctaaaccatacttcccacgatttccttgggtatttatcaggctagttatgccgccgttgtctttgcctaaacccatcccgggttcataaccgttccccaacataactcgggccatcattactgctgcaacggacagacaaggttgcccagagagggagtccacggaggaaatgctgaccacctcaaaagactggaaagcnggttctaacgattcttctgcggcttccacataaggcatagaggatgggcagcttaccaagatgtcttcctcgcctgacacgat

SEQ ID NO: 222817 - DNA, 433 bp, Glycine max
tgggtgatgttgcgcgtactgatgggtaccatgaggtgtttgttgtggtttgacccatgcgggcgttgaagagaccgcatgggcatctccttccttactttctgcccctgttgccccgattcttttggcgttcacgtttgtggaggaaacgtaatcaaactttcctctcttcaatcccacctcgattctttccccggcaaacaccagatccgcaaagctggacggcatgtaacccactagcttctcatagtaaaacactggcagagtgtctaccatcatggtgatcatctctctctcaaccatgggaggagctacttgtgccgccaaatccctccatcgctgcgcatattctttaaaggtttcaccctctctcttgaacatattctgcagttgagtacggtccggagccatatcagaaatgtactgatactgc

SEQ ID NO: 222818 - DNA, 198 bp, Glycine max
tcggagcgaacactggacatacttttggttttgcaagtgaggcctgacgtgttatgtgatgaaagcctccgtatttgagaactctggtatattctaaccattagagaatgcattaaagaaaaatattatgttttacccgttgattcaggtgtgtgcggggcattcacgacactcatgcatacgtgtcacttgtggagt

SEQ ID NO: 222819 - DNA, 404 bp, Glycine max
  unsure (1)..(404): unsure at all n locations
gcctgaaactgttcgatcatattgaaacatcatagtgctctacacagtaatagatattcaaatttgacaatatgctcagaaaattaatacaacgttcatgttttcacatctaaaaagtcctatattcgccaatgtntggaacttaattaggccctacatataacgaacttttttcctttaaattcctctcgaaataataattcattcgcgaaagtactatagattgcgtaccgagacaagcaactgaacattgaaaactgcccatcacaattaaagatttgataaatgtattgcgcgtttattttataaacagtcaatattttaaattatgatatgcactctcatttaatctcccatgcactgctgatatgtgaagtctcacaattaataacagatgcttgaaa

SEQ ID NO: 222820 - DNA, 397 bp, Glycine max
  unsure (1)..(397): unsure at all n locations
ttctcttttggaaccngaagcgccacgacatcatcttgagcctctttgacttatatcttgacttctgaaaagatcatactcgtcttcatgcaatctcttcgagcctcgagcttattgaacattccctagtttttctccaatattcttttaattaacttctaaatgtcatgaagcctgcttatacattgatgtcgcgcttttgcagtctttttttgacaacaccctcgttccacatctcatgattcatcctaagacccatacgccgcgcctatatttctgttcaacaacactcggtatatggaccctacggtgctaccttgcgcgctaccacctcaactaccaaggaattttaccatctcgctaattaaaggaaaaggctccacacctaaaataaact

SEQ ID NO: 222821 - DNA, 434 bp, Glycine max
  unsure (1)..(434): unsure at all n locations
cttagaaatttcaaaagtgatatcagatgcatccatttctaatatcaaatatatagcatgtacggcgttactaattgcagtattgtgagtagtatattaacaaataaatgaatgcatagcataaattagttnttgcctgttccataaattgtaagatgatacgcaagcccttcttgcatgtgtgtgcaaaagaagtagatcaattgcattgtgtattaatatattatagttggtaattttctttacggtctctatcatgaactaccgcgatttggtggttgcttaattctaagtagaaatattctattgttttaataaattgagcaatgtgaattaaattacgacacttgtagaatgtaattattttgaaagaaattcgtcttatttgagtggcatatctgtaataatagaacagatcntaaatgaaaaacgta

SEQ ID NO: 222822 - DNA, 427 bp, Glycine max
  unsure (1)..(427): unsure at all n locations
agctngttacgcaagacactctcnttggggngaagctcctccttccatggtttattccctagtggatgacgcctcctttcacctcttctcctttatcttccactgcatctccatggtggaaaatcaactttgaaggacctcattgaggctcaaagatccagcctccatagaagcttcttaagcaagcttccatcagagaaattcacctagaaacaccttatctggaagtacgacctcccatacaccattgtcacggacaacgacactcaattcaaggctcagacttacaaagaattcttggaaggctaggcatcaagcacttagtcacctctatcgaacatcatcaaacctacggacaggcagaggtagctaacanagtcatccttagggccttacgtactagactcaataagtctaaaggtctatg

SEQ ID NO: 222823 - DNA, 428 bp, Glycine max
  unsure (1)..(428): unsure at all n locations
actaagctntaatcaatctaacagggactggttattcaaaataagatgatgtggaaggtggnggatggagagaaagttagattctggacagataagtggattaatcaacaggagtcgctagcagaaaggtaccccaggctgtttattatatcctcacaacagaatcacaccattaggcagatgggaactcaaaatgacacgggctgggaatggaatttttcatggagaagactgctttttgacaatgaaattgatactgccatcagtttccttacggaggtagaaggacaaaccatacagcaacaacaaattgacatttgggagtggataggagattcatcagggatttacacaactcgtagcgcctacaatctgatatgggaggaaattgctggtggccaaaaggaggattggagtatggaactatg

SEQ ID NO: 222824 - DNA, 427 bp, Glycine max
  unsure (1)..(427): unsure at all n locations
attgtgggactgatttatatgtatgaggacagcacgtaaaggataaaataagtgcccgaatgcgattctaggcctatgaacccaagcttttaatttcaatacaaaggagcatgacttacgcctagaaatctaagttttggttttgaatgtaaaaggcatgaatattgggacatgtttgagaggtttttgatttgaatttaaattggctgcctcatgaggaataccttgcacctaggtagcatggaaaatacctttcaatggtatgtatatatgtgaatatatatagcatggaaatgccttgcaaagtgtgtgaatatatggcataaatatacctcgcaaaatgtgaatgtatagcaaataatgcatttcananatctgtatatgtaagataggtagcgtaaaaaatgcctttccaaatatgtatatt

SEQ ID NO: 222825 - DNA, 461 bp, Glycine max
ctctgaatcagcgacgttgcgcttagtgccaccctcgctcttagcgcgagttagtggatttgggcttggtgccagtcatgcgttgagcctggcaagagacaaatgtctcgcttagcaagctgatctcgcacttagcgtgcggcctagatccttgtgctcttctagattcccttgtcacgctaagcacgctgaagctatgcttagccgtggatgtgcgctgagcccacagggtccacttagcgcgactactccttttagcacttcaagattttagcctcttttgacctaaaattgaacagatttcatcattaaataaaatggaaaatattctagagacagctataacaatgaaacaagatttatttaccaatctctacaaaaataacaataaattggggaaactatacaagttttggaaaatgtcttctatacaaacagtagttgtataagatgactaacac

SEQ ID NO: 222826 - DNA, 443 bp, Glycine max
  unsure (1)..(443): unsure at all n locations
agcttgtanaaccaaaatcagcacatggttacattccaacacaccattttcttttcttaggccaaacttcttcttctagtgctccattaattaggagtntgattcctgaaaggtgcagacacacctgcaggctacccctgcaagccacctgctaatagaacattgatgactttgtgtacactaggttatagctgaagctgcaaatgtcataaacataatgaatgatgttgtgaccccagcttttgtggctagatcccatgtcttaattatttttttttgaactgcaaaaataatttatattaaaagataaagagtaccaggggtactatataaacacacaggagtaaagatctcctgaaaatgataacaaaaatacaacaacccaacaaaaacagccacanacccaaatctacacacccactctaattaaaagctatagacat

SEQ ID NO: 222827 - DNA, 404 bp, Glycine max
  unsure (1)..(404): unsure at all n locations
tattacgtgttgatgattatatgtatatcaattgttaaaatatattagaaattaatagttcaaataagaaaattaaattgaaggaaattaatatattaagattcaacgataaatactttcaatgcanttttagtttaattatttattagactcttttaattgaaaataatatagttcgatttaatatgtacatgttttgtgccatgtaaatattaatattgtgtgatgtctatatgattcatgagatgtgataacatgtttcattgagattataacattgtgattgaaaataaatataaatgtttgattaatacttgatgtgatattacttgtgttgtgacttatgaattggtgaatatacaataattcgactggtgtttactttgagaaaaatgtttatgtgc

SEQ ID NO: 222828 - DNA, 463 bp, Glycine max
  unsure (1)..(463): unsure at all n locations
agcttcaggttgctcattgactccaaattgctgcaaagaaggacaaagatctgtatggtgatttgcaaaagaacatagaccacagactcttggaacaggtgcagatgcaaatttcttattcatggcaagctgagttactaggttgaccaaggcatcaagttttgcttcaggctttttattttcagcagatgaagatgaatccgtggccacctcatggactcctctaaggacaatagcatcatttctcgcactgaattgttaggagttggaagccattttctcaatcaaattcctagccttaatagaagtcatatcaccaagagctccaccactggcagcatcaacaatacttctctccatgttgttaagtccctcatagaaatactgcagaaggagtngctcagaaatctggtggtgatgacagcttacacacaatttcttgaatcttttccagtactcatac

SEQ ID NO: 222829 - DNA, 463 bp, Glycine max
  unsure (1)..(463): unsure at all n locations
tccttgngaagctagagcttagctacacacacccatctaanatctaagctcacctccttgacaaaatacatgaaaatacaaaaaaaacgtccctactacaaagactactcaaaatgccctaaaatacaaggctaaaatcctatactaatagaatggccaaaatacaaggcccaaaagaaggaaaaatctattataatattttcaaagaagagaggacccaaccttggtccatgggctcagaaatctacccttggattcatgagaacccccaggccttctttagcagctctagcccaatcctcttggagtcttctatccaatacccttgcggngtaggattgcatcatccttgctcttccattgaactcgacgaggtggacggctcgaacttcctccattgctctctctgtctctgagttngggagggtgaactcaccananaanaaagatattttaatacact

SEQ ID NO: 222830 - DNA, 100 bp, Glycine max
agcttcatccgcagatccctcttctaagactatgttctagactaatctagcattatcggaacaacataattacgagcataccttactgcgcggatcgctc

SEQ ID NO: 222831 - DNA, 459 bp, Glycine max
  unsure (1)..(459): unsure at all n locations
tcttagttntagatgatgcagatgagtntgtagatacctcatgcactcctctaatgactatagcatcatttctggtgctaaactgttgggagttggaagccatcttctcaattaaatttttggcttcagtaggagtcatgtctctaagggctccaccactggcagcatctatcatacttctctccatattactgagtccttcataaaaatattggagaagaagctgctccgaaatctgatggtgagggcaactggcacatagttttttaaatctctcccagtattcgtataggctctctccactgagttgtctaatacttgagatatccttcctgatggtcgtggtccaggaagcagganattntttttctaagaatactttcttaaggtcatcccagctcgtgatggaccttggagcaaggtaatacagccagtcctttgccactctctctaaagaat

SEQ ID NO: 222832 - DNA, 414 bp, Glycine max
  unsure (1)..(414): unsure at all n locations
agcttcttgcggctgtccttctcgagagtaagactagtacacgatgtttatgaattntaaattggatgagagtctgttatgagtagaggtaggggagaaagattaagctacttgatttcgaggaccaagacctcttcacaagctaagtatcaaaattcttctctgccttattcattgattggtattgcttttatacacaactatggaagtgcatatgtaacagaatcctaacaatctttaacagaatgataatcgcttctaacaacctgaatattgntataactattatttgaactcctatggcagattcctatgacagagcactcgtgtgatcaaacgaaatccctcaagtgactangccttgtactgatcttcttgggcctactgctgcatcttcttcctatcanagtcatg

SEQ ID NO: 222833 - DNA, 474 bp, Glycine max
  unsure (1)..(474): unsure at all n locations
taattcttagagggngaaggccctttcangggcggtgcatgatgtgtttttaaaagttgtagctaaaacagttccaaattattgtatgagcatttatcattttccaaaatctttagctaatgaacttcataagatgatgagctccttttgttggggtgccaaaaggagtggtcatagagggattcactggatggattggcacaagctgggcagttcacaaggaacatggcggaataggttttaaagacatatatggatttaacctcgctttacaagggaaacaagggtggaatctattgaaaaacccaactgctttggtttcaaagattttcaaagctagatattatcctaaagcggatttcttggtggccattgagcataaataatccttcatactcttggagaagcatatgcaattcttgggttctattaagggaagactatagatggaaagttggaaatgggtcatcaatc

SEQ ID NO: 222834 - DNA, 441 bp, Glycine max
  unsure (1)..(441): unsure at all n locations
ntctcttccaagaaaagttctttgtttaaaaacttgtgctatttatcttttcattctcttcttcctttgccaaaaagaattcgtcaaggactaaccgcctgaattctttttgtatctctcttctaccttttccaaaagaacgaaggattaactgcctaaattcttttgtgtctcccttctcccttgtcaaagaattcaaaacgacaatctaagaattcttttgattcttccctttcccataaacaaaagttttcaaaggactaaccgcctgagaattcttttgtttccccattcacaaagtttcaaaggactaatcgcctgagaactttgtcttaacacattggagggtatatcctttgtggtacaagtagatgatacatctacttggtttattgtgactgagaacaagagagggtacatctcttgtggattcagtctagt

SEQ ID NO: 222835 - DNA, 391 bp, Glycine max
  unsure (1)..(391): unsure at all n locations
ttaagtcacctgcggcatgcaagcttcttatacaaggctcatcttggtggtgaatctgcttcttacatggcttattccctagtggatggcgccacctcttacctcttcttctttgtcttccgctgcatctccatggtggaaaatcaccattaaaggacctcattaaagctcaaagatccagcctccatagaagctccacaagcaagctctcatcaagtggtatcagagcataagagcttcaagtaggtgctccttaaacctccattaattatttgctttaccttctctttcattgttgcttcttcattcttctccatgtatctactcacatgtcttgtgctaaatgttgttaacatgattctttagagtttccnccgattaaacttgctat

SEQ ID NO: 222836 - DNA, 445 bp, Glycine max
  unsure (1)..(445): unsure at all n locations
agctntgcagacccgttntgctccgtcacaataataagacccaacaggtgccttatttaagctaacgtagaaaggatcagtgagtcaatacctgtcagagtttgaagacctcgcgaatcgaattatcgggctgccatctcctttcctcctaagttgcttcatctccggccttacttcggagattcgcagggaggtccaagccaaccaacctctcactttggttcaggccgcgggcctcgcaaaactccaggaagaaaagctcaccgatagccggaaccctccgcgagctagagcgccaccactagctctaaatctcattcgcgccaacaacccaactgctgacgtttgcgcccttgttccgccgttactaccagctccgcctcgcccaccacaacctgtgatgaagcgtctcaccccggaggagataacctcacgccaagaacat

SEQ ID NO: 222837 - DNA, 355 bp, Glycine max
tggcgtgacacttgatcacacgctccatatatatacattacgtccttcttgacatatttcacgcctacacaggcaaaccgaatatgatggcagaaacgctcggaaataccatgactttaagggggtgttcgattactgaagagagaatcgaaatacgaagaccattatgtgagcttcatgtggatgtcaaacattctatattcaactctcattcacaaaattatttcttattattcttttatcctttacatcaaacctgccttaactgttcgaagatctttttttctttaaatgagcacgaccgtgaaattaaacgtccaattattaaaaggaaactgatataattagcacagac

SEQ ID NO: 222838 - DNA, 417 bp, Glycine max
agcttgaaggtaaactagatgccatggttaacctgttaacccaactggccatgaatcaaaaatctgcacctgtcgccagactatgtggtttatgctcctctgtcgaccaccacacagacctttgcccttctgtgcaacaatctgaagaaattgaatagcctgaagcttatgctgcagacatccacaacagacctcctcaacctcaacagcaaaatcagccacaacagaataattatgacctctccaacaacaggtacaatcccggatggaggaatcatcccaaccttagatggtcgaatccttcacaacagcaacagcaacaacaacagacttattttcaaaatgctgctggcccaagcagaccatacgttgctccaccaatccagcagcaacagcaacaacagccccagaaataac

SEQ ID NO: 222839 - DNA, 473 bp, Glycine max
  unsure (1)..(473): unsure at all n locations
tagttctttgcggctagaactggggttcatgaagctaagcaccagtcatggcggctaagctgaattccttgcggcactgtaagcgctaagtgagtccttatcagctaagcgcatacttctctatactcaagatgcatcattttagctaagctggcccagaacccggcttagcaacagttgcatcttttctaatctgcagacctcgctaagcggacttatccgcacgctaagtcaagcctgtgtgctaaaaaaaaaacttgaatttcaaagttaggctaagcgcacggtgccgcanagcgagcatcttcgaaaaaccaaacgtcacttcgagaaagcaaaatggcttatgtgagtgtaacggcaactactctcacatttgttggaaactgatgtattgcctgcatcttctctcttgcactcattctccttcattntcgccttcttctgcatcanagcatcaacaatacaagtaa

SEQ ID NO: 222840 - DNA, 410 bp, Glycine max
  unsure (1)..(410): unsure at all n locations
agcttcttgatgtagaaaagacaaaagttatattctttaaatatttaatttctcaaatagaactttgggtttcctatgtatttcatctcaaattatttcttcaatcaatctatagcttttggaagctcttcaaaagttccaataatatatacgtcatctacataagcaatgattatgaaaatatatttttagattttcctgaaaaatgacaaataagatcattttaatatccttcctttaacaagtactcactaagtctattatacaacatgcgacttgatggctttagtccatacaaagtattcttcttgagaatatgcattattggacaaactatttcctttaaggagttntatgcanatgccattataaatagagttatataagtaagatgtaacaatatccattat

SEQ ID NO: 222841 - DNA, 392 bp, Glycine max
tgtaacaaatatatcttttaaatataatatgggtcacaccagacatggatgaaatgattatcatcctagagatctgggtagaatattgcattacgaagaacagagaattcatcagctcatggttcattgagacaggagaaatcaccattggtgttaaagtattgtgtatgctagtcatctcatctgtgctattgtacagcttgtttagctaaagttatttactgttgtaaagctttcagtgcaagctagctctagcctctagtatataaactgattactgatctgatctatcagattgtaaaggtctcagtgccagcttactatgatttaagcttataacagatataccttttaaatataatatgggtcacaccacacatggatgaaatgat

SEQ ID NO: 222842 - DNA, 380 bp, Glycine max
agcttctttggagaaacttccttgagaagctatagcttaggtgcacacacccctctcataactaagcgcacctccttgagaagcttgcttaagaagattcctaaagatgcttgagcttagctacacatacctctctaatagctaagctcacctccttgagaggagaagccagagcttagctacgcacgccctataataactaagctcacccctatgacaaagaacatgaaaatacaaaaaaaagtgcttactacatagactactcacaatgccccgaaatacaaggctcaaaccctatactactagaatggccaaaatacaacgcctacgaaggagatacctattctaatatttacaaagataagcgggctcatacttag

SEQ ID NO: 222843 - DNA, 439 bp, Glycine max
  unsure (1)..(439): unsure at all n locations
tctcaaggaagttntctcaagaaagcttctcaaggaagctacctagtctataaatagaagcatgtgtaacacttgttgtaactttgatgaatgagagtcttgtgagacatattcaaagttccacttctctccctcttttattccttcaatttcgtgctcccccctctctctttctcttcctctttcttttcctccattgaagcatccttccaagcttcttatccaaggctcatcttggtggtgaagctccttcttccatggcttactccctagtggatggcgcctcctctcacctcttctcctttgtcttctgctgcatctccatgatggaaaatcactattaaaggacctcattgaagctcatagatccagcctccatangaagcccacaagcaagcttccatcatatacatattattntctattactttnttttaat

SEQ ID NO: 222844 - DNA, 371 bp, Glycine max
  unsure (1)..(371): unsure at all n locations
agctntctttggaccttgaacaagcaatcaactcctctttcagaaccatgctatgtgctcgcgactggtccctttcttcccttcgcaacttgagttcattattgctaccccatagagctccgcgaaatttgttccggccatactcttccttgcgagccctcttggtctctttttcaagggctcttgcggtaattgcattctcttcccgtaacccggcgcactccttccgaacgtgtgtagcagccaacttgaacttctccttggcgagttttgcctttcctaactcgcttttgagagcttggacttcctcgtcctcttccggtgcttcaaaattctcttcgctgacgacttttaacttggcgagccaatct

SEQ ID NO: 222845 - DNA, 382 bp, Glycine max
  unsure (1)..(382): unsure at all n locations
nttcgcanagcttacggtaaaatctgggacctagccatggtataagtctccatagaggtcattgcctccctcgcccagtattatgatcagtcgttgaggtgcttcacctttggggacttccagctatcacctatggtagaagaatttgaagaaatcctaggatgtcctctagggggaaggaaaccatacctcttctcagggttatatccctcattagctagaatttccaagatagtccaaatctcggcacaggaattagaccacagaaagcaagtcgaaaatgaggtggttggaattccgagaaaatatttggaggcaaaagcaagaatctatgcaggtaaagacgagtgggccccgttcatagatattctcacactgttga

SEQ ID NO: 222846 - DNA, 457 bp, Glycine max
  unsure (1)..(457): unsure at all n locations
gagctngcttctacaaccaattgaataggaacatttgcctttggaggcatgggtaagggaaagattactagtataggtaaaatccgtgttcctttcttagcctccatagacaacgtcttatatgttgaaggtttgaagtataacttattgagcaaagttaagtttgcgacaatggttatattgtgtccttcaacaaagaccaatgtatagtcaagatacaagatgacaagtncttatttactactaaatgacacaacaatctgtatgagattgatctgataggtctaagtaaacaaaatataatgtgtctgctttgtagagaatatgagagatggatttggcacaaaatatttgggcatgtgaatctganacatatctcacaactttcttaaaaaggaattagtgaacagacttcctaagatttgttgaaactctcatcttctctgtgaagcatgtc

SEQ ID NO: 222847 - DNA, 479 bp, Glycine max
  unsure (1)..(479): unsure at all n locations
ngtcagaggttgaagaagaagttggtagaacaattgagcaaaatagattagaatatgttgataatcatttatcaatataaggagaaggtgaacctggctgctagtcatgggcagatgttggaagatgaataggcaaaggtattggctctgcaaattgaaagggaagcgagagagagagagggtgatggagttattgcatggggaagccatgaaatggatgaatagattcgctctcactctgaatgagagtcaagagtttccaaggttgttagccagagcctatgcagtggctgacacgcactcagctcccgacgaagtccatggtcttttcgattactgccaacacatggtcgaactaatgacccacataattaggagtcactaaggcatttgtgttgtatttatgctntgactctaacaagatgtgatgaaacatgttgttttaatgaaatanggattgatttgaccctatgttctat

SEQ ID NO: 222848 - DNA, 472 bp, Glycine max
  unsure (1)..(472): unsure at all n locations
cctataaaactaagcttttatccaggctcatcttggtggtgaagctacttcttccatggcttattctctagtggatggcgcctnctctcgcctcttctcctttgtcttccgctgcatctacatggtggaaaaccaccattaaaggacctcattgaagctcagagatccagcctccatagaagctccacaagcaagcttccatcatataccatgcaagaaaaacaaaatgacataattaaaactgagttgcctcccagaaagcgcttctttaatgtcattagcttgacgcttttacctcaatgggtgaatatccatttgtcctttaacttcaggacctccttaccaccctgcatcacttgcaagcagacattttgatatgacataggctngtcttcttcacatagatcanaattgatcttctgatcttcaaaacccatcttcaatgtctatcttcccatgtcaactacacagc

SEQ ID NO: 222849 - DNA, 470 bp, Glycine max
agctggcttctacagttacgatgtttcctacgatgacagttgtaaaccgatgtagtatgccccagataaccgatgtagaatcctgcttctctagtagtgataaattttttatcttagcttccatcttattatcaagtgtatattgttactaaaaaattaaatataaaatatgaaaatttaaaaatcttgcgtttggtgtgggaactttcaacctttggcgatcttgttgatatcgcaactcatgattacgatcttaatgatatcgtaactcgtgactataagtgcatttccataatttagaaattataatattcttcaatcattcaaatgacacttgtttatatgatttttgaaaataagagatcctttcaattggaaaacaaatagagtttaataattagaatatttatttttattggaaattagcaattagatattaacaaagaagaaaacacttattatataataac

SEQ ID NO: 222850 - DNA, 438 bp, Glycine max
  unsure (1)..(438): unsure at all n locations
nntgaaagacttattagttcttttcggtcttgctttggtcattgggtttcattcattacataagatatttgaagttagtggacctttgctggatcatatcactttcatttcgatttagtcctatagttttattttattttagttcttattgacaagtaatagtgttaactaataatgctacagtcattgacaatttattgaattgtcacatctcaagagtcagacaaggtagtcgtgtgtaattnttttttttgtaatctatacactnttaaattttcatttattcaaaatagtggatgacgttaaactagctagggaattttttattagtcgatgttagttgttagtttttttgttagtagaaggattcgaaccaacaacatcttcgtcatttctttctctcttcaccactaaaccaactttatgacgtccaattag

SEQ ID NO: 222851 - DNA, 357 bp, Glycine max
  unsure (1)..(357): unsure at all n locations
acagaataatccgaaaatgtcagagaattgngtgttgaattagcataacaagactttctgtgattggtttaaagatacaatctttgcagatgagaatgcttaagaaacattaagatagctatcagatgggcctaaaagaaatgttataacctggcaaagatacgacataaacaggtattcattttacacaaaagcacaagatgacaaaagtacgatgcagaacagtggggttaccctaagggctgaatctcaacactttgcaagtgtcaatgacgccaatccttgtgtagcttccatcccttactatgggttcatagatgaaatttgagagcttaactatgtgaaattacgtgatgt

SEQ ID NO: 222852 - DNA, 354 bp, Glycine max
  unsure (1)..(354): unsure at all n locations
tgatatattcgatggactcatggtcactatgaatgacaaattccttgngataaaggtagtgttgccatgtttttgatgaggacatgaccaagagcaagggcaaggatccacttgaaggacttggaggacctatgacaagggctagagcaaggaaagccaaggaagctcttcaacaagtgctgtccatactatntgaatacaagcccaagtttcaaggagaaaagtccaaggttgtgagttgtatcatggcccanatggaggaggactaaatgacaccactntgtctcaatttttagagtgtttagtttggctaaataatggcccaatccttgtaaagttggctgaccaaaaata

SEQ ID NO: 222853 - DNA, 320 bp, Glycine max
tatgaccattcgaatatctcaagagcttccgctggtctatgtctagcgtgtagatgaggtatgtccccgactctgacatgagcgtgaaaagatgtgaccattctattgtgtcgagagcttatgatgttcagtttagaacgtctcgatatattatgagacgcgcatctgacgtgaagtgagacaatccctgatctcttggatattttccagagcttccggagattactttcaagcgtatagatgagctatggacacgaaccgcacattccagtgaaaacttgtgacggttcgaatttctcgagagctttcggtggccaatt

SEQ ID NO: 222854 - DNA, 467 bp, Glycine max
tgttcacatgtgttagcaaggtatgccactcttgaactgactgctggtaattctctgccctcttttcctttcttactatggaaagcctgccttacaggcggcttcctaacacactcttaaccatgcaacacccattactggttgacaaagatgatacatatttaataagcataatgagcatcctatcctatataactggatattaataattacctaactcctctgccgtcattattccaaacccaatgttagaaaataaaatctcggagaccttctcagattatgatacacagcagcagcattattaaaattgttaccatctctatacatggcatgtattcccgtacgatatacaaaaaagatattgataacacatggtatatgctagtaacgtcccgttagtggtaacagagactctagtcactagagaacatcttggagaacacattaacacagagaactccatt

SEQ ID NO: 222855 - DNA, 475 bp, Glycine max
actaagcttacaagggaagataacacctcattcatatttggtcgatgttcaagatctgggagggtgcagcacaatgataacttaatgagctctggcaacacttcgtcatggtcaacatcccaggtaaacaaagggtctacaatattggcaagttgttttattccatttttaagggcttttgtcactacttcacgcaaagtgattggcaaaccatcctctttttagagtcctgtcggccttctttttgttagaaactccattactatgacaccgaagctgaacacatctgctttagtggttactttcctcatgtaggcaaattctgaaaattacacagcataaatatcttgtttagagagtgaaacttataaaaactctcgggtatacaatgttaataagataagaggattcgaaacatagtgacaaaataagacgttgtgtaattgtgccagtcttggtcatgctaccttctctg

SEQ ID NO: 222856 - DNA, 263 bp, Glycine max
agttttgaattgcaaaacgtagcagttgggctaagcacatctccaccgctaagcgtagtttcagcgcgcttagcgcaacggagaatctagcagagcattatcatcaaagccgcacgcttagcgcgagatcagtgcgctaagcgcagaaggttccttcagctatgctaaggtcgagactggtgctaagcccaatttcacttactcgcgctaatctcgagggtggcactcagcgcaacatcgcgatttcaagcctattaaagtct

SEQ ID NO: 222857 - DNA, 475 bp, Glycine max
  unsure (1)..(475): unsure at all n locations
gggagatgatgcttcaatggagganaagaaagagggagagatttagagagtgaggagcacgaaattgaaggaagaaaaacggagagaagttgaactttgagttgtgtttcacaagactctcatccatcaaagttacaacaagtgttacacatgtttctatttatagactaggtagcttccttgagaagctttcttgagaaaacttccttgagaagcttctttgagaaaacttccttgagaagctagagcttagctacacacacccctctaataactaagctcacctccttgagaagctctcttcagaagattcttaaagaagctagagcttagctacacacacctctctaatagctaagctcaccttcttgagatgagaagctagagcttagctacacancccctataatatctaagcttcacccatgacaaaatacatgaaaatacaaaaaagtccctactacaaagactactc

SEQ ID NO: 222858 - DNA, 264 bp, Glycine max
  unsure (1)..(264): unsure at all n locations
tttcaattgaataatgttatatgatacacacatgttaaagtagatgcattactatcagactctcttatacattaattggtttatatgaactgggagaatgattatataattagaaaaacattgtaggagtaaattttctatgagacatttaaaactaacatgaaagatgaacatagaaagcctgaccattgtgtcaattaatgtcattggtatattgcaatatgacttataataaatgaatatatgcttataattganatatga

SEQ ID NO: 222859 - DNA, 459 bp, Glycine max
  unsure (1)..(459): unsure at all n locations
ntgtaatacaccaaattcttttctttgtttatttgcggccacttgaattatttatttcaatttctatccttatacccatagtaagtattgacatttatccatattttatttttccattatcagctgacaaggttgaagctattctatctaattttttatagataattttcacacatcaatgaaaactcacataaaaataaataaaacccatgcacaatacaaaaccttatatttcttttgtattatattaattatataaaaataaatttgaattataattgaatatgtttgctgttttgagaaccccttgaatcactattaagatacttgattgaaaagtttaaatatatcaataaatatatgttttaacatatagtatgacacacatttattatctctctatacattaataatatattacattagaatggataaatgcatatgtatatatatatatat

SEQ ID NO: 222860 - DNA, 433 bp, Glycine max
  unsure (1)..(433): unsure at all n locations
agctnggtaatcgaccacacctcctcggtaatctattaccacaagccctcatggcttcctgacctcgttgtcaagcctggtaatcgattacaccccgtggtgatcgattaccagagaccatcttagcctcctgtcttcatctttaggccttgtaatcgattacccacccttggtaatcgattaccagaggccataacccatatatcacacaagattcacagctggccagccaccacacaagcctccttgctttgtggtccttgctccttctatctgtagactgccangagctcgcctgcttaggtacatcacaggttctcactgactgactatgcccgggttgggtcgggattggtcaagcttggttttgggcaatagcaccctacctgacgtacacaggtctcctgacccccgcgacatatctacaggtacc

SEQ ID NO: 222861 - DNA, 464 bp, Glycine max
  unsure (1)..(464): unsure at all n locations
cgtcactcanaacaactcattgtgcatgaacctattgaatctagctntcaacattgaaataaagatataacaattgaaattgtaacatctcattttcttaaaactaattttaagaaaatgttatttataaataaatagagttttagaaaaatgatgagatttttgtaattaaatgaataagaagaaataattgtattaaaataatggtttgagagaaaataaaaaggatacatttgataggaaataaaatagagtgtttgtttataaagtaataaaaaaatagagtagacaatagactaagagtatctaactatgaatagagacatgctaggtcatttntaactntctctccctctcagtttgcgtntctttctcctcctctaaacctntctattccgcatccaccaatttatcccagaaaatgtgatctcgactcattcatcgtggatcgcataatattaaca

SEQ ID NO: 222862 - DNA, 367 bp, Glycine max
  unsure (1)..(367): unsure at all n locations
actatgaatgacaaattccttgggataaaggtagtggtgccatgttttcaaagcccgtactaaggcatacaactccttatcataagttgaatagttaagggtaggaccacttaacttttcactgaaataagcaattggatggccttcttgcaacaacacagccccaatcccaacatttaaagcatcacactcgatttcaaaagatttttgaaagtttgcaacgcaagtatggnggcattagttagcttttgcttaagaatattgaaatcttcttcttgtttctctccccattagaaaccaacatttttcttgggcacttcattgagaggtgctgtcaatgtgctaaaatcattcacaaatcgtctat

SEQ ID NO: 222863 - DNA, 423 bp, Glycine max
  unsure (1)..(423): unsure at all n locations
tcaggctgctcaattgctccaggttgctgcatggaaaggcaaatgtctgtatggcggtcagcagaggagcacaaaccacaaacccttgcgacaggtacagatttctgattcaaggccagctgggttaccaagatgaccaacgcatccagtttgccttcaagcttcttagtttcagatgatgcagatgggtttgtagctacctcatgcactcctctaatgactatggcatcatttctggcgctaaactgctgggagttagaggccatcttctcaattaaatttctggcttcagcaggagtcatgtatncaagggctccaccactggcagcatctatcatacttctctccatattactgagtacttcataaaaatattggagaagaagctgttctatgatctgatggtgggggcaactggcacat

SEQ ID NO: 222864 - DNA, 395 bp, Glycine max
  unsure (1)..(395): unsure at all n locations
agcttgtatcaatatttaattataaatatgtcttgggttcttatattattcgactgcttctttntatttggaaaagaaaaactatcatcttctccttggatgacatagttntctcatgcaatttgagttaatgattagtctcggtcccttgtgtgctgctaactatgaaatgtgaatggataagcttgagatgttcacatatccctttcaagatctttggatttggagataatttttccttggtttgggttgtttattctacatcttttctcacggaagcctttcgggaaatctatattcttaaacatgctctttccttgttggttgaaatttattagaatttaccacaatttgagtgccaccccatgtttattaagtgattgggaattgggttt

SEQ ID NO: 222865 - DNA, 340 bp, Glycine max
  unsure (1)..(340): unsure at all n locations
tatcctgctactggtggacaaaacttanagacatttttttatattctattcgtatatacctatgctcgatatgcgatcattctaatctatgtgctcagatagaacaaaagtaacataggggtacttctctgaatgtagatcgaaagtgcctccaccacattcccaaacatgcattatattattctttaatataacataaatgttaccgcacaccatttgcacacaaatattccgcattaaatatcaagttaagttattgaagagaactctagttctcattagagaccaacgccacaaacactccaaaggatttgcatataagactattttttattctgta

SEQ ID NO: 222866 - DNA, 439 bp, Glycine max
  unsure (1)..(439): unsure at all n locations
agctngttngaaacanaatanaaaccactgtttacaccaccttgttttacacatggaactctcttgttttgggcctagcccaattntgttaagtcacaaaataaaaaccattatttaaacacccctcttttacacatgcaccttatctcgttgtaggcctagccctttttacacatgcaccatcttccattataggccttacccttttgggcctagcccatttttgttaagtctgaaataaataaatattgctagtcaagttccctcaattacacatacacctgctttcctttgggcctagcccatttttgttaattntgaaataaaataaaaaattctatttacaccttttcttttgtattttatacatgcacnctctttcattgtgggcctagcccatttttctttgtctgaaataaaataaatactactaactaca

SEQ ID NO: 222867 - DNA, 453 bp, Glycine max
  unsure (1)..(453): unsure at all n locations
ctaagcttcntagtctctaaagcaggttgtggtccccgatacaacatttaggaataatgagaactctaacaggttaaaacctaaagcaaggttgtggtcctcgatacaccaaatcagaaattgtattcttttctctccatctggcgagaaacctaaggtactaaaaggaaaatgatgatttggttgaggaagaatacaaaaccaacagttcctcagactcatcaattccgttgtttatcatggatccaagtattcttcacaacccctcttgataatctaacttaatgtgtttccgatgattattggtattttattaagatccctagaatatcatataattggtatcagagccaccattactgttagattatcgggaattaaagatatntgcgttgcgttatacctgtattatctcgttacatgaacccctattntattttgggattttatctt

SEQ ID NO: 222868 - DNA, 369 bp, Glycine max
gcttaagctccttcaactgcacaaggctcttaatattttaagagtatccttgtggaaccttgacccgacgaagacactgacagaaacttatcttctccttcttggacaaagtatgagatgctgggggcaagtaaattctcttcccatcagaccttggatgcgactgtgatcttatacctatatcagctagatcttgacgggtattcaagccatccttcgtcttgccgtgaatgttaaggagcgtcccaatcacactgtcacaaacattgttctccacatgcataacatcaatacaatgtctaacgtctagatcacaccagtacggaagatcaacgaaaatggacctcttcttccatatgcaactctgac

SEQ ID NO: 222869 - DNA, 468 bp, Glycine max
  unsure (1)..(468): unsure at all n locations
ntctccctatgttgctataaataggggaagaagtgaagaagattagggttcagccccttaggcacttctctctctttcgaatttgctgaggaaaattatttccgtgaagaaaatccaagccgaggcgctttcgtaacgtttccgtaacatttccgtgagtaattacgcgaagattctcgaccgttcttcaagatccatcgttctttcttcgttntcttcagtcttcaacgggtaagtacctcaaaccaagcttttcaattcattatatgtacccgtggtggtccacattgtgtttcatgtatttttattctcgatttcgtttactttttatacccacttttgacgtgcttaagccatttatttaagtcgtttctcgcctaatctaaaaataaaataaatttccaccgatcggttgaattgtgtcatccattaattttggttaaaatgaattccgaccattcggtcgtg

SEQ ID NO: 222870 - DNA, 264 bp, Glycine max
  unsure (1)..(264): unsure at all n locations
agcttagccccagaggggatggacctcttcatgttttggagaggatcaataacaatgcctataggttggacctcccagaagagtatagagtcaacatcacttttaacattnttgatttaattccttttgcacgttgagctgatattgaggaggaggaactaacatatttaaggtcaaatcctcttcaaggggaaggggatgatgcaatcctccctatgaagggaccggccacaagatctatgagcaagaggctccaagaggatt

SEQ ID NO: 222871 - DNA, 444 bp, Glycine max
tctatataagctgaaccagtttatcaataaacacaagttgagttgtattcagatcattagagtttatctcttttatcttagtgaaagtgattctcctaaattcttgagtgattcaagaacaccctggctgtatcaaaggactttcacaacctttgtgtgttgccctcgccggaaagagtgattctttgcttcccttcatcttcgaccttgttctttcaaaccacaattcaaaaaaaatccacttctgtctagaattatcttgtggccataactcccattttacgcactcaaattaagtgattcttgagcctaaattgaatttcaaaacgagacctttcaccttgttttggaatcacctcatttggagccctgtagctcgagttattgtcatttctatatctctgtccagccaccacttaaccgacgatttaccatcgcattcat

SEQ ID NO: 222872 - DNA, 486 bp, Glycine max
  unsure (1)..(486): unsure at all n locations
agcttctacattcaatttcgagctnttcgatatattactggactcaatcggacatccgagtaaaaagttattgtagtttgaatttgctcagggcttcggtattccatttcgagcgtctcgatatattacgggactcaatcggacatcagagtaaaaagttattgttgtttgaatttgctcagagcttcggtattccatttcgagcatctcgatatattacgggactcaatcagacatccgagtaaaaagttattgtagtttgaatttgctcagggcttctgtattccatttcgagcgtctcgatgtattacgggactcaatcagacatccgagtaaaaagttattgtcgtttgaatttgctcagagcttctacattcaatttcgagctgttcgatatattacgggactcaatcagacatccgagtaaaaagttattgtcgtctgaatttgtcagagcttcatattccatttcagcgtttgattata

SEQ ID NO: 222873 - DNA, 323 bp, Glycine max
ctgacaagattcaaacgacaataactacttactcggatgtctgtttgagtcccgcaatatgtcgaatcgctcgatgttgaatcccgaagcgctgatcagactcaaacgacaataactttttactcggatgtgtgactgagtcccgctctatatagtagagctcgaaactgaatgatcgagctctaagcaaattcgggcgacaagaactttttactgagatgtctgattgagtgccgtaatatatcttaacagctcaaagggagtgtcgaagctctgagcacattctggctacactaactatatactcggatgtgtgattgagt

SEQ ID NO: 222874 - DNA, 484 bp, Glycine max
  unsure (1)..(484): unsure at all n locations
agcttgcttctacaatatccnncttttgatgatgacatcttctgaaatcaagaagcacacacacactttttcctagtcgatcactcatataaattctcctcctttgtttttgaatttatgtttatcttaaaaataagttgattactcatgtgaattcttgatttaatcccatttctctccccctttggcatcaacaaaaagccaaagtgcgtatcaaacttaaggtatacaaatataacttaaacatctatacttaatattcatgaaaaaaatatcaaccaaatcatgaagcaagaagcaagaaccatgaaaaccatgaagcaacaaccatgaatagattaattttaaactccacatagtcaaataacatacttaatattggtccaaacataccatgcaaataaggaaatagtatattgttcaaatatcataataataatagagaaattatttgataagtcactaacatctattagtcctaact

SEQ ID NO: 222875 - DNA, 461 bp, Glycine max
ggaccccggttgaagagacaaccactttctagcttgtgcctatggaatgtcatgttactcaattggggaatcaactacccaaggatgacagcatctgaatacaagtcatccgagaacatgtcaacttattttgctagtccataatagacatgcccggtatcacccaagcttccattgtcttaagttggccatatgtgaagatgcctagcccattgcctagaggaagagaaagatggatgaaaggaggtgtcgagcagtgcggcaagaagtggccaagttgatggttgccaggtttaataagccaaacgagaagtggaggatgtgcaacaactagactgatttgaatcgagcgtgccccaaggacgcacatccacacttgaacatcgaccaactggtcgatgaagtggccggacacagagtgttaagttctctggatggttattctaactatgatcacgata

SEQ ID NO: 222876 - DNA, 286 bp, Glycine max
agcttcggaagaaagtgatgaggtacaagccctataggcagagcttgaaagagcccgggtagtcgaagagaagttcaagtccatagccatcaaagtctaaaaagagtatgatgaactaagggacgtcaatatggccacagttgaagccttggaacgagaaaccaagaaggcccgaaaggaagaacacgaccaaagcaaagttttgaggggctctatagggcagcaatagtgagctcaagctccgaagaggtgaaaggaatcatcacgggtcaaaggcatgatcttg

SEQ ID NO: 222877 - DNA, 417 bp, Glycine max
tcaggctgctcaattgctccaggttgctgcatggaatgtcaaatgtctgtatggtggtcagcagaggagcacaaaccacaaacccttgcaacaggtacagatttttgattcaaggccagttgggttaccaagttaaccaatgcatccagtttgccttcaagcttcttagtctcagatgatgcagctgagtttgtagctacctcatgcactcctctaatgactatggcatcatttctggcgctaaactgctgagagttggaagccatcttctcaattaaatttctagcttcagcaggagtcatgtctccaagggctccaccactggcagcatctatcatacttctctccatattactgagtccttcataaaaatattggagaagaagctgctctgaaatctgatggtgagggcaactg

SEQ ID NO: 222878 - DNA, 444 bp, Glycine max
  unsure (1)..(444): unsure at all n locations
agcttgctcatatccaataacacaactgaaaccatttaccaccatcatcttctcgaggacttagatatacaatgaattggattatttatccaataagtagataaaggatagatattcctttttcgaaaccgtagccggccgcttccatgataagtatgtcctcaaagatatatgaatatagcactgaagtttgttaatttgataagtaattttgctaactaaggtctgaaatgaataaatgacattttcattcaccaacaaaatgatatttaagaatatatattagtaaatttatatatatacttatataagtatttacaaatacatattatatatatgcttaaatatatattttttcatacctganaaataggtcattttcagatttacaatcttaaattacttacagtcaattacgtatctgaaaaaaaattatgtttcaac

SEQ ID NO: 222879 - DNA, 429 bp, Glycine max
  unsure (1)..(429): unsure at all n locations
cggagaggatgctntaatggagganaagaaagagggagagaattagggaggggggagcacgaaattgaaggaagaaaaagggagagaagttgaactttgagttgtgtctcacaagactctcattcatcaaagttacaacaagtgttacacatgcttctatttatagactaggtagcttccttgagaagctttcttgagaaaacttccttgagaagcttctttgagaaaacttccttgagaagctagagcttagctacacacacccctctcataactaagctcacctccttgagaagcttccttaagaagattcctaaagaagctagagcttagctacatatacctctctaatagctaagctcacctccttgagatgagaagctagaacttagctacacacccgctataatagctaagctcactcccatg

SEQ ID NO: 222880 - DNA, 465 bp, Glycine max
  unsure (1)..(465): unsure at all n locations
ctattatcatatgcaatagatgccacatgtctacatatgagaggagcaaaaagggcccacttttccttttgactgtgacccatactcaaccaccaaagtggggaaaatctgacctttgaaacgctaaaatccagcctcggtttgtgtgccgtttctttggtatcagttcctcgcgtttctctgcgtccgtcggggccagttttcgaaagccagcaatatatatatcaaaacgctcagaatagaaccccgagcgtggttcagaggttgggttcattaaattttaagtcgcacgcaaaacgatgacttttagactaattacttaagaattaacccataacctngccagtatggatttctctttcttaattagcctaacccgtgtatctggcccccactacttctatttctaccaataacatatatatgcatatacacttaataatacttatatatatatatatatat

SEQ ID NO: 222881 - DNA, 393 bp, Glycine max
  unsure (1)..(393): unsure at all n locations
ggccgccacggagttntccgactatgctcttgtgtggtggaacaagctacaaaaggagagagcacgaaatgaagagccaatggttgatacatggacggagatgaaaaagatcatgaggaagcggtatgtgccggctagttactcaagggacttgaaattcaagctccaaaaactaacccaaggcaacaagggggttgaggagtatttcaaggaaatggatgtgctcatgattcaagcaaatattgaagaagatgaggaggtaactatggctcgatttcttaatggtttgactaatgatatccgtgatattgttgagttgcacgagttngttgaaatggatgatttgcttcacaaagcaatccaagtggagcaacaattaanaaggaacggagt

SEQ ID NO: 222882 - DNA, 294 bp, Glycine max
tttgcttttattggataaacgtggactttcaaaagcctagagtcaacatgtaactttgtcactactttcaaaaaccaagagatcattaatgggccaatgccttaatgtttccctcccttcaaaagaatcaaaaggtctgtcaaatggtccaactccttaaacgaatttagcttaatcaaaatatatcttggcaaacacaaaaacaacttaactaacgttcagatctcgaagaactacgtaggtctgatttccttatcacaatctaggaatacgtaggaacaacggaaacaccct

SEQ ID NO: 222883 - DNA, 447 bp, Glycine max
tgcaggtgctgctactggtggaggcacttgaatttgcttgccagaccacaaggtgatggcactcacatttttcggattctgcacagtttgtgaaggcaatttgtcaaaaatttgggactgagcttggttcaactgagtagccatctgccccatctgatttgttagactctgaatagaggctcttgtctcttgctgaaattgcatattctggatagtcatttgcctcactaactcttctaaggaaggttgaggaggggcctcagttgcttgttgtctttgctgttgctactgctgtattggaggaggaacatgtggcttgcttggaccatcaacattctggaagggagggacaagctgttgttgttgtggacgacttgcccatctcaaaattggatgattcctccaacctggattgtatctgttgcttgaaagatcataattattctg

SEQ ID NO: 222884 - DNA, 222 bp, Glycine max
agcttgtacactgcatgggacctctctcttatctctttatgatactgtataatgtgcatccgttcatttctcagccatttccccatatctatatacgccagtgagagacagacatttactatccttgtgccattaccggttggtacccatattcacaagaaatatgttacttggaacgccttctgcttgatttatctaagcagattagaacatacatttcta

SEQ ID NO: 222885 - DNA, 418 bp, Glycine max
  unsure (1)..(418): unsure at all n locations
ggagcattccaacgacgacgttaacgtgggcttccccaaaattaactcttttggcgatttagggcacgccattgttggccctcttggcaagctattcgttgatgtcatgatcgtgttttctcattgcggtttctgcgtcagctaccttattttcatttccaccacgttggcctatctcgccggtgatgatgacacctcatcagcatcatggtcctccttgttttggggtttcgccacgccaaaggtgttgtttctgtggggatgttgtccctttcaattacggctgaatgctatcccaacattgacccatttggctcctttgagcattattgctgattttgttgacattgtagccaagagtgtggtgatggtggatgatgtctntgtgttcatgaagaatatgcctcctttgaaagcc

SEQ ID NO: 222886 - DNA, 415 bp, Glycine max
agcttgatagataagtgtaaactctctaactgatgtacaagaatatctaccataaatcgtgacaggcattgcactttactaaaattcaactgaagtaccacaatgtcaaccataaattgtgaaacatctttctcatcagaagtagagaaggaatgtcatacaagaaacaccaacgagtgtttgtaacaaaatcattgaaaaacaacacaaaatgagtgtgtaacagagattattaatttgcaagtcacattgtcagaaataaatatcatgaataataggggaacctttatatgttcctcaactgatgtgtagacttatatatctctccaatgtgcacaatgctcctaaagttcagctctactctatatgtgattgtactatttcttcgaattatcatttcttagaaatgtatgat

SEQ ID NO: 222887 - DNA, 411 bp, Glycine max
  unsure (1)..(411): unsure at all n locations
tgaagtggatgctntaatggagganaagaaagacatattggggagcacgaaattgaaggaataaaagagggagagaagttgaactttgagttgtgtctcacaagactctcattcatcaaagttacaataagtgttacaaatgcttctatttatagactaggtagcttccttgagaagctttcttgagaaaacttccttgagaagctttcttgagaaaacttccttgagaagcttctttgagaaaacttccttgataagctagagcttagctacacatatccctctcataactaagctcacctccttgagaagcttccttaagaagattcctaaagaagctaaagcttagctacacacacctctctaatagctaaatcgacctccttgagatgagaagctagagcttaacta

SEQ ID NO: 222888 - DNA, 402 bp, Glycine max
agcttatatctaggacagccatcatgcttgttgcaagcatttgttagaggtaaagagtgaaggacaaaggtttctacatttaaatatacactgagctgctgttctcgctacttagattgggattgcttatgctattgcattgtaagtagtgttcacaacatcgtaaggtaattgtcagagttgttttgaattttattttccactgtttcttttggttcacattacaccacacaactaggattaaacttccctaatagcaagaatctctatattcgtagtgttcaaatcccttgaaccctacttctcttataacatattgagtgcctaggttataccccacggcttgtatccaacataacaatattccatttatactgccataatttctcggattactgctca

SEQ ID NO: 222889 - DNA, 454 bp, Glycine max
  unsure (1)..(454): unsure at all n locations
tctcggctcatactgggaatacctctagttcaacacccgtgctacctaaggcacccacccagagggaagctccccaagttccaactccgaacacgactcgaccggccggtaattccaacacgacaaggaacttccctccgaggccatttccggaattcaccccactcccaatgacgtacgaagatcttctgccatccctcatcgccaatcatttggccgtggtaactcccggaagggtcctcgaaccccctttcccgaagtggtatgaccctaacgcaacttgcaagtaccatgggggtgtcccggngcattccgtcgaaaaatgcttggcccttaaatacaaggtccaacatttaatggatgctggatggctgactttccaagaggatcggcccaatgtgagaaccaacctgctcgccaatcatggagggggagcagttaatggcagtgaatc

SEQ ID NO: 222890 - DNA, 416 bp, Glycine max
  unsure (1)..(416): unsure at all n locations
atcctgactcaccatanaccttgacccagggtgagaatgtcaatccttaccctcggaagcaaaaaaagaatagaggggaaatttccaatcaaagaacaagagaaggaaaatttccaatgaaagcaaaaaaagaaaagaaggaaaattccccaatcaaagagtgggagaaagcaaaaaaagaaaagaaggaaaattccccaatcaaagagtgggagagagccaaaagaaaagaaaggaaaattcccaatcaaagaatgagagaaagtaaaaaaggaagaagaagaaggaaagaaagctcctgatcagggatcgaaggataaacagaagaaatgtgcagagaggtctctggaccggacaatatatgaacaatacagaattgtcaccaaatgaacaaaaaagaaggaaaggaaaccacg

SEQ ID NO: 222891 - DNA, 459 bp, Glycine max
  unsure (1)..(459): unsure at all n locations
ctaagcttcttataagttgaaccattntatcaataaacacaagttgagttttattcagagaattagagtttatctcttttatcttagtgagagtgattctcctaaattcttgagtgattcaagaacaccctggctgtatcaaaggactttcacaacctttgtgtgttgccctcgctggaaagagtgattctttccttcctttcatcttcacccttgttctttcaaaccacaattccagaaaatccacctctgcccagaattatctcgtggccataactcccattttacgcactcaaattaagtgattcttgagcctaaattgactntcaaaacgagacctttcacctcgttttggaatcacctcatttggagccctgtagcttcagttattgccatttctatatttctgtccagccaccacttaacctacattntaccatcccattcatgcattttatg

SEQ ID NO: 222892 - DNA, 430 bp, Glycine max
  unsure (1)..(430): unsure at all n locations
agctttaaaaattgaattaaaacgttcaataactgctggtaatcgattaccatatatgtataatcgattacacaatgcaaattntgaattcaaattttaatagctgttgtaaatcacttttgaccactggtaatcgattacatcctctggtaatcgattaccagagagtaaatctcttgaaaaagactcttttgtgaatgtatgtatacatgattctgatgatgtcaaagaagaatctaacaaggctgcttcaaatgataagcattntcttcaagaataattcaagattgcttcaacaaacaaagccttgtttcaagattcactaaagaccaagccttgccttaaaacaatgtgctttcaagacatgcaaggctctggtaatcgattaccaggaagtgtaatcgattaccagaagacagggttgagaaat

SEQ ID NO: 222893 - DNA, 446 bp, Glycine max
  unsure (1)..(446): unsure at all n locations
tctataagacacgtgtaattgattacggatagttgagaatctattattacaaagagtttatgcattgaagaagtttctaactgtagaaacaatcttactatctctacatgatgatgggtgatgaacatatgaatagattgagactaaggtgcaacaataaatacaaatgtcactcaataagttgggcatgtaaaatgacaaaactctttaaacttcaaaagcttaatctttatgttactccccctatctctaacaagttacagttccaccatgcatggnggtcaggcattgaaacatacacctttctcctatcttgtttcgttagtagccactatctacgtatgataggtatttctttcctattgtcaaagacatctgcaataggaataattgtgtgcttaggtacccaaacttatttaggtcctctcatgttagtactaaacgca

SEQ ID NO: 222894 - DNA, 465 bp, Glycine max
  unsure (1)..(465): unsure at all n locations
gcttcaacatcagaccacttccagggtgctggtactacttcacatggacttgatggggcctatgcaagttgaaagccttggaggaaacacgcctgcctatgttgttgtggatgatttctccagatttacctgtgtcaactttatcagagagaaatcagaaacctttgaagtattcaaagagttgagtctaagacttcaaagagaataggattgtgtcatctagagaatcaggagtgaccatggcagagaatttgaaaacagcaggttcactgaattctgcacatctgaaggcatcactcatgagttctctgcagccattacaccacaacagaatggcatagttgaaaggaaaaacaggactctgcaagaggctgctanggtcatgcttcatgccaaagaacttacctataatctctgggctgaagccatgaacacagtatgctacattctacacagagtcacact

SEQ ID NO: 222895 - DNA, 265 bp, Glycine max
aatcggtggtctgattgtgtcccataggatatcgagatgctcgtagttgataacggaagttctgatacaaatcaaacgacaataactgttaactcggatgtactattgagccctgtaatatgtcgagacgctcataactgacaacggaagctcttagaaaagtgaaacgacaataactattgactcggatgtgcgatatcgacctcgaagatatggagacgctcgtaattgaacatagaggctcttagcaaactcaaacgacaat

SEQ ID NO: 222896 - DNA, 104 bp, Glycine max
attatttaatattgttgggtgcaccaccaatgttgctgggtgcacctacaaaagacccaactgcaatgggagatgttggactaagaggaaggaacgggcctgaa

SEQ ID NO: 222897 - DNA, 276 bp, Glycine max
ttcctcagatctgtaacaagctatgaacagttataatttagtcttgatttaactgtctttgggcttggcggccacgctcaacaaagtactttcgacacctactgtacgttgatttcaccaatgctgttatgggaatgttgcgacaatccttataaaccttattgatacattctgagaagacacgtgtcatgaggccatatcgacaggcttacctatagaaaccatcttccatatttcctttgagatgcgatctatccatgttgctatagctggact

SEQ ID NO: 222898 - DNA, 431 bp, Glycine max
  unsure (1)..(431): unsure at all n locations
agctcatgctttttccccaagctgtacagtttattattttaaggactgttggcaagtgatagtatgatgtagtaaagaaacatgcataatgagattaaagtagtggttactagtggtaattacagtatatatggttgataactggagagtaataaacctagcgaggtgtaatatatcaagtgtgatagaaaatgtgttactagcatttcacatatactaattacagaaaactacttatgtttttattcaagttaattagctattactttgtatgtggcagttctttcttctgtgtatgttgagtggctgtagcatatgttggttcaacacagtatgttntgttctctgcattaggaatttcccagttaacagaccccttgcattatcactcactgtgagtgtcaatggtgtgagtgcagcactctacacac

SEQ ID NO: 222899 - DNA, 467 bp, Glycine max
tatagttgagaccatatcaattgtctacacaccccacactgtgtcttattcaccatatggaatagaattctttgcagtgtacctcagatcatgtcagacattaacacagaagatgttgtccttgattgttttaatttaagttgaaattaagaagcatagagatggtacagacatgatcacaaaagatgcacccagtagcatggcaaaatctaatatactaaccactaaggaatcgaggacacaacacatcatatacaaatagagatatgtaggtgtgtgcatatgtacatgtgtgtgaagtgaactgtgaaggtcaatcttatgtggaaatgaatagaatttacattatcagatttgtcataatggacaagactaatacatcaagtcatattacattttagaatgctcatacacaacgacttgatgttttaatctggaagctcatcatgtgtacacgtctaacaatt

SEQ ID NO: 222900 - DNA, 450 bp, Glycine max
  unsure (1)..(450): unsure at all n locations
ntgagggtgtgtagcccaccatcttttcatagtagagtatcgataatgtgtctaccatcacgatcatcgtctccctttccatcattgggggtaccacctgngccgccagatccctccaccttttgggcgtgttctttgaaagatctgtccccctttttgcaaatgttctgtagttgcatcctatccggaaccatatcaaaattgtactgatactgcctaacaaaggaaaccattangtccttccaagaatggactcgggaagattccaagttagtgtaccaggtaacagctaccccagtaagactttcttggaaggaatgtatcagcaattcctcatcttttgcgtattcccccatcttctgacaatacatctttagatggttcttgngacaagtagtccccttgtacttgtcaaggtccagcaccttgaacttgggaggggtgatgata

SEQ ID NO: 222901 - DNA, 416 bp, Glycine max
  unsure (1)..(416): unsure at all n locations
tgngaggatngatggngacctggtgttgagagaaacgatgatatgagctacgtgggagtacgtgagctcagttggaggtgggcaacaggggatggtgggtttatgcgcgcattgtggatgtggaaaacttattgtgcaccatcgcccgaccgccacctagtaccatatgtgatgggtaccccataatcctacaagcttgagatgaggaagtgttgaacggtgaaacttcctgcttttattgttgaccacagagtggtacctggagatatgtcgcggnggtcaggagaccttgtggacgtcaggtggggtgctattgcccaaaaccaagcttgaccaatcccgacccaacccgggcatagtcggtcaatgagaacctgtgatgtacctaagcacgcgagctccctgcagtcaacaga

SEQ ID NO: 222902 - DNA, 335 bp, Glycine max
  unsure (1)..(335): unsure at all n locations
agcttcacatcataccacttccagcgtgctggatctacttcacatggacttgatggggcctatgcaagttgaaagccttggaggatagaggtatgcctatgttgttgtggatgatttctccacatctacctgtgtnaactttatcagagagaaatcagatacctttgaagtattcaaagagttgagtcttagacttcaaagagaaaaggattgcgtcatcaagagaatcatgagtgaccatggcagacaatgtgaaaacagccgggtcactgaattctgcacatctgaaggcatcactcatgagttctctgcagtcattacaccacaacagaatg

SEQ ID NO: 222903 - DNA, 460 bp, Glycine max
  unsure (1)..(460): unsure at all n locations
tgccnanataaagaaagggaatagattgaatctagtaagatgcattaaggatgaagaaggaaaagtattggtcagagatcaagatatcaaagaaagatgggagaaacattttataagcttttcaattatggacaaaggatcagcttggaagtgaagacagagcatatgcattgcaattttagcaagaggcaagaggagtatgacttggaagtgaagatgggagaagatgtcataccacatgttactaagtttaaatatatgggatcaataatataatacaatatcatgaggaaattaatgaggatgtcacacatagaatacaagcaaggtggttaaaatggagaaaggcgtcaagggttatttgtgattgcaaaataccaactttaaatgcaagttttgttgtacagcaatagtttgactatactctatggtagtgaatggttggtttagagggacaata

SEQ ID NO: 222904 - DNA, 261 bp, Glycine max
agcttgacaatattctctattggcatgcattcaaacaactggatatcccagaaagctagattgagtcattcttggagcaactcatatgcttcttgagtgagacaactaaaatgatgggacacaccaacttgttaaccacttaagttccaagaccatcatgatcaagtatcaatactctcacttcttataatatattaatgtggtgacttgcacttagctccctaaaataatagatatgagactagaagggggggggggggg

SEQ ID NO: 222905 - DNA, 478 bp, Glycine max
  unsure (1)..(478): unsure at all n locations
gggagaggatgcttcaatggaggaaaagaaagagggagagatttagggagggggagcacgaaattgaaggaagaaaaagggagagaagttgaactttgagttgtgtctcacaagactctcattcatcaaagttacaacaagtgttacacatgcttctatttatagactaggtagcttccttgagaagctttcttgagaaaacttccttgagaagcttctttgagaaaacctccttgagaagctagagcttaggtacacacacccctctcataactaagctcacctccttgagaagcttccttaagaagattcctaaagaagctagagcttagctacacatacctctctaatagctaagctcacctccttgagatgagaagctagaacttagctacacancccctataataactaagctcacccncatgacananaacatgaaaatacatanaaaaaagtccttactacaaagactact

SEQ ID NO: 222906 - DNA, 456 bp, Glycine max
  unsure (1)..(456): unsure at all n locations
agcttgactggcccacttacatcaaccagtatattagcacacttgatatccctttaaaatagaataattgaatcgaaatgttcagaatgtagcaaatcaatgcaaattcaagatatttaagaagtcaatttccaagcactgcgtccaactttcatcttttgtaatgattgaaagtcaaacatttttcactgtctgaataaaatctgttaaagcaaaactctgcttcccaagcggagaatcatactcagtatctggttgctcacctatgttctcaatataaatatatgtgcacatagagctataacatatcctctaatatatgaacataaatacaataactatgggtaacacatgactagaatgctaacttgcaagagagagaagtctatgataggaactaatgcactatctactcctgatactatgaaaantnnttacaaaatatgtgtctataaa

SEQ ID NO: 222907 - DNA, 330 bp, Glycine max
aatctgaccttcttgattttcttcgaggtaaccatgatttttagcttgctccttgggagtttaagcttatctttgcatcttttctgactctggaacacatcattgtacggtttacgcttccttcgaaaaaacttagagaaaaagactttgttaaagttatctctttatgaaatggatgttatattcgtgaccttcactgaactctggtcacattggcatgatcgaaatttcaaaatgatattccttttcctgagatgcgaaacaaccctcatccctttcatgtagggacatgagtatttgactcagagtattgtgatagctctatttctg

SEQ ID NO: 222908 - DNA, 433 bp, Glycine max
  unsure (1)..(433): unsure at all n locations
agcttaagctccttcaactgcacaaggctcttaatatttgaagagtatccttgtggaaccttcacccgacgaagacactgacaaaaaattatcttctccttcttggacaaagtatggcaggctgggggcaagtaaattttcttcccatcagaccttggatgcaactgtgctcttatacccatatcaactagatcttgacgggtattcaagccatccttcgtcttgccttgaatgttaaggagcgtcccaatcacactgtcacaaacatttttctccacatgcataacatcaatacaatgtctaatgtcaagatcacaccagtacggaagatcaaagaanatggacctcttcttccatatgcaactctgacttttatccttcttttgggtcttcccaaatacagtggtcagggtgtgaacccgctgatatacct

SEQ ID NO: 222909 - DNA, 424 bp, Glycine max
tattacgagctttcatccttctattatcattatgatggagactcatcgtttgttcaagactattgcaaggttatgtaacattttgggttatgaaatatgtcacttacttgaagccaatggccatgctagaggtatttgggttttggtggagataaaatagggacttttctatcactaatgtccattctttgtcccaagccctgacagttcatatgtctacgaattctcaatcttggatctgcacgacactgtatgaaaatcctcacacgcttctatgttgccttatgggatcatattgctgatgtcaaacaatctatacatcttctctagtgttctgttgatgaacggactgagatttttcattttgatgagcacggaggtagcttctgtggatgatgcttctacgctcatggatatgatcgac

SEQ ID NO: 222910 - DNA, 414 bp, Glycine max
agcttgaccaatcctgacccaacccgggcatagtcagtcagtgagaacctgtgatgtacctaaacaggcgagctcctggcagtcaaccgataaaagaacaaagaccacaaagcacggaggtttgtgtggtggctggccagctatggatcttgagtgatatttgggatatggcctctggtaatcgattaccaagggtgggtaatcaattacaaggcttaatagtgaagacagacagttaagatggtctctggtaatcgattacaaaggaggtgtaatcgattactacgcctacaaaggggaccaggaagtcaagatggcttatggtaatcgattaccaaaggggtgtaatcgattaccacgcttagaagtggaactggaatattgagggggcctctggtaatcgattaccaatgc

SEQ ID NO: 222911 - DNA, 423 bp, Glycine max
  unsure (1)..(423): unsure at all n locations
tgaagctcaaggaacaaggaaaagnttgaagaagctctataatatgttntggcttttacatgcctaactcatttgagtggcatttgtattggttgttaactctgattgttgcatcttagcacatttgatatttgtttcgcattgtgcatcatcatagtgtgtgtgaaggaaattttctaagttagaaaactttcttcaaaggcaaaaactctttgtattaatcgattatagagttgtcgtaatcaattacaacaggctgtctgaagcttgtagagttaagtctcgtactggtttaatctattacggtagtaatttaatcgattacattgttggttgagacaatgattngatttttcaagagtctctactntaattgattaccaagtagaataatcgattacttctctcttgtttaagttgttc

SEQ ID NO: 222912 - DNA, 387 bp, Glycine max
  unsure (1)..(387): unsure at all n locations
tgcgcatatgactctacgaacgctcacttgcacaagacattctattaaccgatataatgcacccatatacaatcaaggcagctgtgttacctaaattatttacacgtactgccaaggtgtattcggtacttacatcacacacatctccttggctaaattcacatacatgcatactccaagcattttggggtaccaaaaattgcacatgtgcacatcttggtatttctaatacctatacatacacaaacttcatgatgaatcttgactatctacacaataaggtgctacatttcatgccctttttcaagcttttgctacctaaagccgcatgcagaatgcagcatattggtcttcgctgactaanatagtattcaaattatatatata

SEQ ID NO: 222913 - DNA, 440 bp, Glycine max
  unsure (1)..(440): unsure at all n locations
tatgcagattcataaacagcattctcttccacctacatctaaatgctagttctttatcttttgagaagagagtaatgaggttataaaatagttctaatttacaggaacatcatacacatgtgagataataatggatttacttagcattcatgaagctatcattaaagctgttatcatatgaacagaataactttatgtatgacataatattgtttaagaaatggaagacaaagtcttaacttacacatttttcaagcccaactaggaccaagggatcacattgtataatgccatacttcttcgaaaacttttgcctacaagcacaaaacagttttttggaattacaattgataaacaagtgtgataaaggaacttccatgaatcccttgcatacctactctatcaaaatatatcatcggtcacatntttaaacatctacc

SEQ ID NO: 222914 - DNA, 151 bp, Glycine max
cctgtctcctatggcgattagtcatcagtgtacatatcttctattcgtatttacgagttgtcgtctctgtccgttcaaagattgatctgataatctcatgtcttcccacacggagattaacatcatcaatccttctgtgtctggataggct

SEQ ID NO: 222915 - DNA, 469 bp, Glycine max
taatcgtaaaagtaaaagctaaagaagattcaactaatttagactccaattaactcttatttctattaatttgaacataaattgaacaagtaatggtatatgtaaactgaaattctcataatagaatttgtcttttgtcatttcagactatcagcaactctttattcttgttccctaattactagcaccaaatccttgcagcatttccatttcattgacacgagtgcagggcttcagaccttcagacgaagtcttttaggtacgtgggactcacaatcctctttttagttttactcactaattgcacctctttgtttggttggtgtacccctgttgttgctacagtagcatcttcttgttgacttgctatgttatcccctgtatttcatgagctgtcacttgccatattctcgtagtagttgtaatgattgactgcattataaaaaactagaaagcaactgtgtgtctt

SEQ ID NO: 222916 - DNA, 446 bp, Glycine max
agcttaggttaaattagtctaaactttgttaagctatttaagctgagtctagtccaacaagagggatctgaggacaaaacttagtgtaagttagtctaaacctaggagggttgtctaaattgagcctagtccaacaagagggatctgaggacgaagcttggattgattcattctaactagggatcaagatttagtaatcgaggctataacatagaacacacaagcatgattgattagagaaacatctttatatacatcagctattttgttagatagacccaacacctttacctactgctgtcaatcttacatacattgcattttactattcttagcctatacttagtttaatattgttctaaatcatcaattatcaatgcttctttcaataatgccttgttgctgaatttaatcctatctaatactagttccctgagttccatact

SEQ ID NO: 222917 - DNA, 226 bp, Glycine max
aagcacgttaagaactctattccagtagaaacgttgtttctacttcaaaaccctttgaactacttcacatagacttatctggtgcctctagaactatgagtttgggtgcgacttactacggcttaggtatagtacacgatgacctccgattacatggactgtggttttgaacaccaatgatgaagcttttgacggggcctgcactcttgcccttgctcttctatat

SEQ ID NO: 222918 - DNA, 494 bp, Glycine max
  unsure (1)..(494): unsure at all n locations
aagtcacctgccgcatgcaagctctaagcaagcatataggacttgatttccctctnttttctcttctctntcaccaatattaagtcaaataggcttactcaaagttttaggaattntaaggaagcattacgaaagcctcggaagctccggaaaccattttccaacaaaacgtggaggatcttgataagttcacccccccccccctttgctaaatgcactcatttttatttacacaccccattttgctaaatacactcccctttgcccttgttttgctgattctttttccataacattacggaactttacgaattacataacgatacttgttttcttttcgcaatgtcacgaaactttacggattatgcaaccatcccctctntgacttttggaatgttacggaactctacggattgtgcaataatgcttactttcgactcccgacatgtcgcggaacttcatagaatgcctaacgatgggtgtcacgttcctcg

SEQ ID NO: 222919 - DNA, 411 bp, Glycine max
atttcaattctgcctgacaaataataaattatgttttattgttagtaaattataaattttggctactaaacaaaatcaaagaagaaaactaacatacctgaatatcctcctatatcaaattcttgcatcccggatacaaaggcttctttgaatcactctgcaatccttcatacataggggcatgtgcttgctaaaaagactcttgtccaaggtcacgaatcatatcctccaagcgatctcctatatgtacatcaaacggttcagattgcgacccactttgcatgtgtattaattcaccatgccatatccacgtcgagtaattcttcttaatcccatcacacaatagatgctcccacatgccgcccagtaattgttgtcttacattcaaacaattgatgcaaagacaataat

SEQ ID NO: 222920 - DNA, 448 bp, Glycine max
  unsure (1)..(448): unsure at all n locations
agcttgttcaaccgaccgaggtagcatgagatggcagcaaagagggagaacaattttatggtgattcatacataagtgagaatgaaatttcaggtaatcataaagaggaagaggtcacggaaacgaatgcggatgcaagaggttttacaggcaaacaacgcttgttggtggtagctaacangttgcctgtgtctgctgttagggagggtgtggagtcatatcgccttgatatcagtgtaggagggctagtcagtgcacttctaggcaagaaaaattttgtcaccttgcattaattgttttttttggtgtgttttgttaatttgtttcttggtgaagttgtaattgtaactcagctatgctaattagttatcttnaattgttgatgatctcaccatagaggtcacaacaatgatagttatctaatcttcgcaacattctaataataatc

SEQ ID NO: 222921 - DNA, 448 bp, Glycine max
  unsure (1)..(448): unsure at all n locations
tgttcttgagaaatgctggaaagccagatacaccgagattaataatgaaatcacagcaccttcttttgtatacctgaggaagaaagatgttgaagcattttattttactttttgaaaaaggtataaagaggctgacagcccaaagtcccaaaaagatggacttgcttaccttaatttcatagcctcgtagggagctaccatcagcaagagcaatgccagaaatggcaactcaagttcacctagaaatgaaaaagacccagaagaaaatgtttctttccttcaatgttcaatcattatccaacaagtacgaaaaacaaaaaacacaacttattgttcttattacactccagaatcaggattttctttctcatgtttcgcagtttatacaaagagaagatatagagcccagcctgaggttcctagagaaatgctntgantacaccaattc

SEQ ID NO: 222922 - DNA, 472 bp, Glycine max
  unsure (1)..(472): unsure at all n locations
agctngtaggactnntggcaagcgtaccaattgtcgttgtaggtttcacatttataaaaaagagttcgtctccacagggacttgagtttacttaattcattcggataaaggttatcagttcaacagttatgtacaaatttaattaaatatcattagttttgttttgactaactaaagacaacttaaagtaaaagaatagtgaaaataacggaatcacggaataacagaaatacggaaaatatggaaatacgaaaataacaaaattcagtgtctcgaaaatatgtaaattacataaataataattacgacttanattaattcaagaaaacataggattggatttcatcgttcatacccttagtatcctagtaagattaacatctatgaatcattttccaatattactgatgcacacattaagttatcctaagtcaatccctcacacttggaacctaagaatatntactaaaca

SEQ ID NO: 222923 - DNA, 475 bp, Glycine max
  unsure (1)..(475): unsure at all n locations
ntgttcaataatcagggcatttgttgacaaaaaataatatttgttaattgaagtaaaagtatgatatatcctaattcgaaaacagtaaacgcaagcaattaaaagtgacaacagtggtttaaaagcgttgggtcttcctaataaacgagttgatgcatataaagatatttctctaatttagaatgttcttgtgttctatgccgaagactaaagtactaaacctcgatccctcacaagtttagactaatttaagccaaacttcgttctcagatccctcttgttgaactaggtttaattcaaacagcattatactcacagcataagacaaactaaaaccctgcactctatccctagtaatgcagntatctagccctgctctatcaagttctaaggaaacagtacacttcccagtgctaaagttccctaacaatacacactagtgggtgaatagacaaaggcatgcaacaataaagca

SEQ ID NO: 222924 - DNA, 416 bp, Glycine max
  unsure (1)..(416): unsure at all n locations
agctntgaacaatatacttgtccttcatttaattgtctttgggcttggcggccacgctcaacaaagtactttcgacacctactgtacgttgatttgaccaatgctgttatgagaatgttgcgacaatccttcaaaaccttattgatacattctgagaggctggttgtcatgtggccatatcgacatccttctctatcataagccatcgtccatttttcctttgaaatccaatcaatccatgttgctatggctggacttagatgacgaaatntttctaaattttgaaaaaaaatgtgcttgcaaggagtgtaggctgcataaaattagttatgaataacaattttaagtatatatganagttaaataaacgtgaccatcatatatgaaatcttacccaatttcttcaacatttcttt

SEQ ID NO: 222925 - DNA, 471 bp, Glycine max
  unsure (1)..(471): unsure at all n locations
taagcctaatagcaagctaatgagagagttaactcanatggtgccttaagtttcaaacacatgacacaaaacaacttgtatgtacacttccaaaatgagttattctacctgctccattgaaataaaagcatcatttccttactttattttcaaaatgattgcacacttccaacaccctatgctagtacaaatcaataatagtttattctacctatattttaaattctattgaatatggatagatgtaaaatgtaacaagtgcatccatgaattataaaataaaaaaagtgcatcaatgattgaatagagtccacatggatgtgaataagtattgtggggatcctagttgaaacacccatttactgaacaacaaccactagaataaagcagcacaataattgattatntggtatcactgtacgccaatcaaccctcaaaaattcatcatgaaataagaaacaagactcactc

SEQ ID NO: 222926 - DNA, 382 bp, Glycine max
  unsure (1)..(382): unsure at all n locations
agctntaacttgtatttctttaagtcctttttgacacactntatcacacgagtgtttttcaaaaatcttctaagataactgtgttttatcactcactggacaataatccactattttaacaaaaaatgtatttttaatcattggacgacacactagttttaatcattttaacagaaaactctgttttatcataccgcttgttatcttgtgaaaaacttctatttgtgaaaaactttatatctttggttaacacaccactcaatctcccttctagtgtgatttgacaccaccaccactattcatcatcaaatcgttctcccaacaccatcaaccatcctccgcacacgatagtgcagatctggctagtgacgacacacagtga

SEQ ID NO: 222927 - DNA, 475 bp, Glycine max
  unsure (1)..(475): unsure at all n locations
tgtctcagcgtctatgcgagacagagaccaacatgttagctatcatcgccaagtaccaagaagagttgggtctagccacggcccacgagcatagaatcgcggatgagtatgcccaagtatatgcggaaaaagaggctagaggaagggtgatcgactctttacaccaagaggcaaccatgtggatggatcggtttgctcttaccttgaacgggagtcaagaacttccccggttgttagccaaggccaaggcgatggcagacacctactccacccccgaagagattcatgggcttctcggctattgtcagcatatgatagacttaatggcccacataattagaaatcgttaggaaacttgtatggtctctcagaccttgactagatatgacttcctttntgaaataaaatgagttggtcccaggtttctacttcaaaaagcttgtgcaaatcaaatcactcctacatctcatctcta

SEQ ID NO: 222928 - DNA, 467 bp, Glycine max
  unsure (1)..(467): unsure at all n locations
agctngagcaggttggaattggaaagcaacaaattaactggagaaataccctcctcccttggtaatcttaaaaggcttcaattcttgtaagtatggcattctgtttgctaggctctacatatatataatgagtcttaggccttagcatgtattttttgtgcaatgtttaaaagtgtctgtttcttgtcctgctaccagaacattgagccaaaacaatctcagtgggactattcctgaatcacttgccagtcttccaatcttaatcaatgtgtatgtaaaataatggtttctagaactctgccattnttttaaagtatatttcattaatttagtatctgattgattattcaaacttctcttttgcagtctgctagattcaaataatctgagtggccaaatcccagagcagttatttaaggttcctatatacaagtatggatggtacaaccataaaattagtatatgat

SEQ ID NO: 222929 - DNA, 477 bp, Glycine max
tatgacatgcttggattagcgaaagagagtttattggatgctattttatttataaatgagtgctctcagtcaaatgatcctgatctctcactgaggcaaaataaagttccagattatgccgagcgtttagttaagaagcagatgcgtgctgcttggttatttcgagaggcagctattaagcatggtggggtccatagtcagggtgatggcggtgatatgtatggcccacagactgatgattctgaatgggagacagctagtgaaagtgatatatgaaatgatggacgggatgacatgggcgaagacgacgatggtgattggaataatgatgatgagaggaaaaattatgacaaaccctcgatgaaaggtattttcactataaatttcctatctatatgctctattaataatctgcattattatgtgatcctacttcgtgcttgtgattatgcatgtctgatatggggagtcgggact

SEQ ID NO: 222930 - DNA, 361 bp, Glycine max
  unsure (1)..(361): unsure at all n locations
agctggcacactcaaagggacatctcttctatatctttatgaaaaactattatgtacagttgtccattacacaaaaataacaccatctaagcaaacttaactgagtagagactagtactctccttcttccataccaatatgtcctcctcactcagaatcaaattaatacttctaaagtcataacctttntttatctaagcaaattagtatatttatttctgctaatgatatagagatttctccattcccatctccacattcaatttccctccctacggtcacctaaacctgacaccctggcctttatggctactacaagggtgtataatctagtatacttcctaaatgtgaaaataaagca

SEQ ID NO: 222931 - DNA, 408 bp, Glycine max
  unsure (1)..(408): unsure at all n locations
tctcgtagtagaacataggcaacgtatctaccataatcgtgatcatctccctctcagtcatgggcgggatgacttgggctgctaggtctctccacctttgagcatattctttaatggactcatgttctcgcttggtcatgctctgaagatggttccgatcaggagccatatccgcgttgtattggtactgcctaatgaaggcagtttccaagtctttccatgaccggatctgagaagcttccagattggtataccacgccactgctgctccggctaagctgtcttgaaagaagtgcgtcaacagctctttgtccagagaatatgcccccatccttcggcaatacatccaaagatgacctcttggacacgtcttccctttgatntatcaaaatctggtattttaaactt

SEQ ID NO: 222932 - DNA, 374 bp, Glycine max
  unsure (1)..(374): unsure at all n locations
agcttgcccttgttcttcaccctaaagtgtatataaattaggaacaaaccttttgtagaagcttgctcacccctagaagctcctaatatctcctatactttntggggagggccattcttggatggccttgattttcttagggctcacttggaccccatttctaccaactacaaattctaagaaactatattatctacataaaaggtacacttctctatattagcatagagagtatttttcctaagaactgaaagaactttccttagatgtcctaagtgatcatttaggctcttactgtacactaaaatttcatcaaaataaatgactacgaatctacctatgaaatcccttaagacatgatgcataagcctcat

SEQ ID NO: 222933 - DNA, 464 bp, Glycine max
  unsure (1)..(464): unsure at all n locations
taagctccttcaactgcacaaggctcttaatatttgaagagtatccttgtggaaccttcacctgacgaagacactgacaaaaacttatcttctccttcttggacaaagtatggcaggctgggggcaagtaaattttcttcccatcagaccttggatgcaactatgctcttatacccatatcagctagatcttgacgggtattcaagccatccttcgtcttgccttgaatgttaaggagcatcccaatcacactgtcacaaacatttttctccacatgcataacatcaatataatgtctaacgtcaagatcacaccagtacggaagatcaaagagaatggacctcttcttccatatgcaactctaactgntatccttcttttgggtattcccaaatacagtgttcaggtgttgaacccgctgatatacctgctcaccagtcaacggtatcggcgcaatatcatgc

SEQ ID NO: 222934 - DNA, 420 bp, Glycine max
  unsure (1)..(420): unsure at all n locations
agctngaagggtgagcgaatgagatgtgatgggatgtgtagagggttcaatggaacctagtatttataggagtggagcgtgaccgttggtcattgtttgtagggactattatagcccttgcagataatttccgagttgtagatactagtcgggagcttatagataatgttaagagataaacatatgcttatagataaaaggtataagataatcgtaccttttagataatgtgtggacttataaataattaatatctgtcaatagataagatattgggatatattcaaatatgagtaggttagagataacctgttggttggggagtctgactgctaagggccaagcatctgcgctcctatagcagggctgatgtggagggtggacacgtgcctcacagtaccatataacatgtcacatgta

SEQ ID NO: 222935 - DNA, 436 bp, Glycine max
  unsure (1)..(436): unsure at all n locations
cgcatgattatgtatgatggcaattatggtgatgctccaccactgacttggccccaagatgaccccattgaggtgcactccatcatcaaaaggtatgagagcataaagaatgagaaacttcccaagaacttcgatctcaataatttttttgagattaggaagaacatggttgacaatgatatttccaaagtccaaaaagagaccctcaagatcaaatatccaacttggcatccaagcttcaacaacctaggtgtagaggagctgaggaatttcatcgctaggttggacattaagcttgaagcttgtaatcaacgaaacgaaatgtcgaaacacaaccatcaaaatgaagccaacttcaatttcatgcaaagcatggttcaatcagacagtgttgctccaaacccaagccaactcaatttcatgcangaaatctctc

SEQ ID NO: 222936 - DNA, 453 bp, Glycine max
  unsure (1)..(453): unsure at all n locations
agcttaatgtgcatgtctctatgaaatgtgttccactctttaccttgaattactgaagctccatacctcaaagttccagatttagggtttataggatcatcactaggatcaataactntataatggatgaggtcatctccaatgttgtttgtcatcttgccagtgtaaccaacggaacatgttgctagttgaggtcgatgcctcctccattcaggattcagtctccaacatcgatcaattacattcatttttaagccatttattttagattgttttgcggcactaagggttggagtgaaaagggcaacaatgacaataaccaaaacaaagtgccaaaggatagaattgataccatgagagaccatcatgaaaaatattttttctcaatgaatgtgaaccacagagaatatagagataaaatagagtctttgatagtatattgaacaagtacta

SEQ ID NO: 222937 - DNA, 467 bp, Glycine max
  unsure (1)..(467): unsure at all n locations
cataaatcaatcttctatgctgatctatcggttggatggtgttcacctaatgagtgtatgaagatattggctcaaaattcatccttatgttataggatttgttgagagataagctgatgaattagtaaaggtggcttcattatatcctagtctcgatgtcttttatcattgtaattccttgtgtgaagaatgtggtgtttaatgaaatgagataactattntacagtgaaaaaaaataataataggcagcattggttggctcccgatatttactagctttgttataattgtttacttactatcatatggtgtctaatcgtttctgtaacttcacacttatagtgtccgcatcatgatataacaataacaaagtaacttatgataacagttcaaatggatgttttgtaaaaatgatactatatatgaatatgtacttattatatttcataaaaaaatataagcttaat

SEQ ID NO: 222938 - DNA, 415 bp, Glycine max
gagcttcttatactaatgtcacagagaatgtgttagttttattcattaagaaggatttgatttgtcgatacggactccccaggaagatcattactgacaatggcaccaatctgaacaataagatgatgcaggagatgtgcgaatacttcaagatccagcatcataactctaccccttatcggccaaaaatgaatggggctgtcgaggctgcgaataataatattaagaagattgttcataagatgacagtgtcatacaaagattggcatgagatgttgcctttcgccctacatggatacagaacctcggtgcgaacttctactagggaaacgccgtattccttggtttatgggatggaagcactgctcccatctgaggtagaggtttcttctcagaggataatggcggagtcagg

SEQ ID NO: 222939 - DNA, 479 bp, Glycine max
ctaagctgcttgggagctctatggggctgatcttgagcttttttgttttcttctatggcgaattctcaccatggagatgcagcggaacgcaaaggagaagaggataacggacgcgccatccactatgtgataagccatggaagaaggagcttcaccaccaatatgaaccttggataagaagcttgtaaggatgcttcaatggacgaaaagaaagagggatagaaagagagaggtgggagcacgaaatatgacgaataaaagagggggagaagtataactatgaagtgtgtctcataagactttcattcatcatagttacaacatgtgttacacatgcttctatttatagactatggagcttccttgagaagctttttatgataacttctatggaagctttttaaaacacttccttgaaagttccttgagaaactccttgaaagtatagtttactcaccacccatctatactaactcact

SEQ ID NO: 222940 - DNA, 394 bp, Glycine max
  unsure (1)..(394): unsure at all n locations
cgctggttgactcttacgtgagtcagcggtccctatttctttatntcattaaacagcaccctcaatatctatcaaaattctggccttattttgatatctgcgtaacactacttatgttgaaattaccgtttaaagtaaattattcgagagcgacaatcctagtaacctgttaattctaccacctatcatgatcacaaactaaagcaagggatttaagaataatccttatccttactactctaaacatgacatctacgctggacaagtctcattgaccactacttttactagaaatcaaagccttgtattctggaggtacaaacctcgaaagatcagtgcttcatatcaagttttctgttgtcaccaccaggggtagaataacattcactcatga

SEQ ID NO: 222941 - DNA, 330 bp, Glycine max
ctatgaaactcagcttctcaccaactattcaaactaccatccttttatctaatatatgttataaaatgatacaaaagcttatatctcaagctgtaatgtcacttatgtgaaagcttaatatcaagctgttatgtcagtaacgaaaggtttaatagtgaccaacatactaagcatatgcgttgctgatgactcgcgtacctaatcctccatgtttcaaccccacaagatctttcttttcttaaaattcaaaaagaatcaattcggtttttatgagtacagtaattgtaacatgggcgggaattttctatttatataacatggtgtgctgct

SEQ ID NO: 222942 - DNA, 418 bp, Glycine max
  unsure (1)..(418): unsure at all n locations
agctnggacagttctcaccttgcaagccagtttcgttggactgagttatgccctaagcccaaatactaagaagtacaactacttcatggttacccatccaaacatcccttttgtagggaaggtgggttagtcaactcttgtattctgcatgtgaaagtcattaagatgttgggatctgtatcctaaagtatgttaaacgagctcctaaaataagcttatgtatgaagatcagggacgagcatagataataagatactcataaatgccaatcaggcatgctctcctacttacaaacaatcccttttttgggaattgtgtactcattaggggtaatatgatagccaggaagaataagatacataaacaaggtcacaagatccagtgcaaaagcagactgccaaatcatggcttcatctac

SEQ ID NO: 222943 - DNA, 470 bp, Glycine max
  unsure (1)..(470): unsure at all n locations
ataccaattgcacataactgtatgttgtcaatggttattactttnttaatcgcaatctgcattttgagttacttattatggtctttcaatttatattttgaatcatccagtgataagtacagcagtgtcacccccaactccagttggtgactatgatattgggctcgaacaacttgtttcaatgtctaaggatcagaatatttctgctttacaacaatatggaggggcaagtcttctacatgttgtatggttgcttatagaaatgttgaagtgatttgttgtgctaatacaatctagtgatatcttgttcagattataggcgtatcagatctaataatatctaatccggataaaggtattagtggagatgatgctgatctggaaaaaggaacaagcatttggaactatacatatcctcggaaaaaggagacgttctgggatatcttacgactcatattctcatatatatt

SEQ ID NO: 222944 - DNA, 449 bp, Glycine max
tgctgcatgcaagcttgagctcacaagatagtaagcagaattatcgatgtttctaaaggaaacaaatagtctcccattacatagcgacattaacgacttgggtctcaatatgttaactaaaatggccatcaccaacttttatatcattgtactctatattattgactatggggatacatttcaacacgccttttctctatgaatgctacaataatacattcatatatttatggctacacatttcatcattggcataaatatattaattttataatctatccatcatatcatatatgtcttcctaagtaaacctttttattatagacggcacacatctactcattagatcatcaatcttatattcaatatgactatacaataaaaatttataacattactctattaacacttattacttatacgggagatcggtcatgagtaccttccat

SEQ ID NO: 222945 - DNA, 436 bp, Glycine max
agcttgacagactcatctaatggctttggctcaatgatgcatagcagctcatcaggctctcggagctttgagaaccaagatcagtccaaagtcaaatcaaccatcattgattgtgggtcgaaactaattgtcaaagctacctatagagaagacaccattcgcttcaagtttgatccatctgaaggttggttcagactatatgaagaagttgcagcaagattcaaactacaaaatgggttatttcagctcaaatatctatatgatgaagaggaatgggtgatgttggtgaatgatgctgatttgcaagagtgtatacaaatattggatgatattggcacacgtagcgtcaggtttcttgttcgtgatatgccttccgttttaagcaagtttggcacgagcaatagctacttgggaggcagctcatatcatatgggat

SEQ ID NO: 222946 - DNA, 447 bp, Glycine max
  unsure (1)..(447): unsure at all n locations
agcttgaaggtgtgtaacccaccattttcttattatatcactggtaacgcgtctactatcattgtcatcattttttcgtcattgaggtgccacttgagctgccaggttctccacctttgggcgtattctttgaaagatccgtgcccccttttttgcacatgtnttgtagttgcgtcctatccgaagccattataccgactctgcctaacgaaggcaaccattaggtcctcccaggaatggactcgggaaggttccaagttagtgtaccaggtgacaactaccccagtaagactttcttggaaggaatgtatcaacaatgcctcatcttttacgtatgcccccatcttccgacaatacatctttagatggtgcttggggcaagtagtccccttgtacttgtcaaagtccancaccttgaacttgngaggggtgatgattttgggtact

SEQ ID NO: 222947 - DNA, 501 bp, Glycine max
  unsure (1)..(501): unsure at all n locations
tgtcanagacttaaaacacacatatacagtatatgtttaatattgatcttgagtatgacaataataacaataatagtaaaagaacttagtcttcataagttgtctaaagaagtttcacctgtgacacaacaacaatttttctagatattatatatacaaaacttcttcaaaagactaaacacactcgtgtacatacaagatataaaatgatcgacacagtttaacttctataaaaaaaaatataaaacacaacgtcttagacgttgctctttaatatgtaaaatttttattatagaaattattgagctaggtaaaacttcaatgaaagaataataccgaatacataattcttccatgtaagcttaatattagaagagaaatagtgattaatatatttattacccgtggagatgatgaggtcaatgtgttcttgatcagggttttcttcagtgacagcgtagtatctacgtggcacagtgtctctgtactcgtacgatatct

SEQ ID NO: 222948 - DNA, 130 bp, Glycine max
  unsure (1)..(130): unsure at all n locations
agacttatcctacagcgactggtctcattatttcaanggcncaggngatttcttcatataaacaaccaacacaattctcaactttttcatttcatctcattccatacacacaattgagaatctgaaggac

SEQ ID NO: 222949 - DNA, 449 bp, Glycine max
  unsure (1)..(449): unsure at all n locations
agctngtgtctgtttatatgcctaacttattctatggactctaagcaaacgagcacggacccataggggaacgcgcgattttctactttgaaaagggggggggggtatgcacaaggttagctcgcctgggcaaggttagctcgcctgtgcgagcaccccctacactagataagttaaaaggaaagggacggggtgagtttttcaccaaaaacttcttcctctcatccaaaaaacgtaagctcacgggatccctcagatttctagccttaggtcaccatttctcagcgttttttgattccattttgcattggtattcatccccaacaagagatggctccgaagaagctctccacaaagaggtccacgagggacgctcaattggaaagcttcagtgcccccatggagttcgacagtcacatggttcggagtgccgaacaccaacatgcgtt

SEQ ID NO: 222950 - DNA, 467 bp, Glycine max
  unsure (1)..(467): unsure at all n locations
tacctaccgcacttccaatgacaaacaccacctttatcgtataccaaagcatcaaccaagaaatgaattttgtagcgagaaagccttagaattcaccccaattccagggtcctatgctgacttgctcccatatctacttgataattcaatggtagccataaccccaaccaaggttcatcaacctccatttctccgagaatacgactcgaacgcaacgtgtgcttgtcatggagaagccccggcgcattccattgagcattgtangggcctaaagcgtaatgtgcaaggtctaattgatgcgggctggctgaaatatgaggagaatcggatgtaaatcccgacattgacaagagatgccacacatggtgcaatttggaaagctgttgttgatgtctctaataactcatccgattttcagtttgaccatattgaaacacggtacatgtaaagaaagataagtgatactt

SEQ ID NO: 222951 - DNA, 372 bp, Glycine max
tctacatcacctaatttcaaagatattgtttactcttccgatttcgctctccgaaatataaaggggagcgtgtttgattttatcgcatgcacaaagaaacatctctttttgattgcttggcgacgtttcacgttaacctgccctccctatcccaccagctcgtgaaaattcaaagtcggcgctgctcgttgcaaccctcatttgtactcctttcacattttatatcgattgaaagcttaactattattactatttctatatctcagaaacacacaattaattcaccccgtcaataaaaatgcttaaattacttattttacttataatacctcaacttaattgtttccaaaattccaaattaatgattaatgt

SEQ ID NO: 222952 - DNA, 429 bp, Glycine max
  unsure (1)..(429): unsure at all n locations
agctntaagcttaacctctcattaatgtattgtatctagcactttctcacaccataagaatggactaaaattctttaattttagtgctagcagaactaaaagtgacttgttcttacccatatgaaccttcttcatgggatctctaatcataaaggttaggttaccatcacttgtttgtttcaagtggcatatgtcccattcccctcgatgtttcgtatatcagtttcttccctaggggtttcatcagagggtttgccaaatttccttctgacttcacatagtcaatggaaattgctccatcctttagcagctactttaccatcttatgtctcaattgtatatgtttatttnttccattgaaggtttttgttttcgctatggctatcggcgattgggtatcaaagtgcattgacatttgacaggttgatt

SEQ ID NO: 222953 - DNA, 412 bp, Glycine max
cgagatgaggaagtattgaagggtgaaatcttctgctcttattgttgaccacagagtggtacctggagatatgtcgcgggggtcaggagaccttgtggacgtcaggtggggtgctattgcccaaaaccaagcttgaccaatcccgacccaacccgggcatagtctgtcagtgagaaactgtgatgtacctaaacaggcgagctcctgtcagtcaacagataaaaggaacaaagaccacaaagcaaagaggcttgtggtggctggccagctgtgaaacttgattgatatgtgagatattgtctctggtaatcgattaccaagggtgggtaatcgattacaaggcttaaaaatgaagacaggaggctaagatggtctctggtaatctgataccaaggggtgtaatcgattacca

SEQ ID NO: 222954 - DNA, 417 bp, Glycine max
agcttgtcggttggcaagcgaagcaattgttcttggttggtataataactctttacaggactgttattcaatctttacctgtttattctaaagctgtgttaaatgagattgagaaaattgagaggtcttttatttgggattatcagattgagaaaagaagatatcatgttatatgatggaaaaggatgaaaagatcgaagcataataggggtataagtattaggagcttggaggaaatgaataaggcctctcttatgaagctggggtggaatcgttaaaatggtgatcaaaatctctggcgtcaagttttgattgttaagaataatagggggagtttagataatgatgttattcaagctaaaactcataattcggctttgtgaaaaccaattgctaacatatggaatctttttattg

SEQ ID NO: 222955 - DNA, 375 bp, Glycine max
atacaatattaatattcatatatcattcagcatcaactcatcacagtgacttgattctatgtcatcatatgttatcaagttatggttaggtaagtctaacttcaattatataaatgattctgtcgaaatctccaattgagtaaagattaatctcaactcatcctatgaacactcttaattagttacatgtgtgtctctggtatgaatgtagttacattctgctttagttaaaattagtaccctatttattatgcccctgaaattcattgtactaacaagccttgtcatcaaaatcagtgccaatggagaggaatggaacacgtaaaaaactgttgatatcgctatgagttatcgtaaagactatagtatgcaaat

SEQ ID NO: 222956 - DNA, 468 bp, Glycine max
ttaagtcacctgcggcatgcaagcttgggcttgattttaccttaggtctttatcatgttttgaacaatatacttggccttcatttaactgtctatgcgcttggcggccacgctcaacaaagtattttcgacacctactgtacgttgatttgaccaatgctgttatgggaatgtttcgacaatccttcaaaaccttattgatacattctgaaaggttggttgtcatgtggccatatcgacgtccttctctatcataagccatcgtccatttttcctttgaaattcgatcaacccatgtggctatggctggactcagttcacgaaatttttgttaattctgatccaaaatgtgcttgcaaggagtgtaggctgcataaaaatacttatgaataacacatttaagtatataggacacttaaataaacgtcaccatctaataggaaatcttacccaattgtctcaacatttc

SEQ ID NO: 222957 - DNA, 442 bp, Glycine max
  unsure (1)..(442): unsure at all n locations
ccctttagtcctttttagctagatatccattggatttttttacagnacaaggccacttactctgttggaatggatattactactaatatacgtgtagcggcatttcatttctcaggcattgctggatctagatcatctagaattattgtgagcattggactctgatatctggtgagtcatatttatgaaggtgcctaaatgaattatgagggtacatgctcagtatgcgatcgtatgcatgtatcacttgcgatgcaatcctacctaccaacggcattgtataaacactccaatatgattgtgcagagatccagagaaggcctatgctctcatgacctatgataataccgcccatgcctaatatgaccccttatttgtcatatanataaatttatattttgggctgtttatgctcctatgtagaggtatctaacagagattt

SEQ ID NO: 222958 - DNA, 414 bp, Glycine max
gctgcagcttgtaatcgggcacaataggcagcttgatttcttatttacaacacattatcctcctaagggtgtttggaatatcttgacttactatcaatttaatcaaccatgagtcggaatacgcggagcgtattatgtttcttatccgagatcctgaaagtaggtaacatcggacttatgatagttaagattaattttaccaagctgcgcatgtattgctccaagtttgaggtacttgcgtatgcatcgtcatccagaacatcgggtggaataattggaatcggctccaggggtgacaatatcccctaagtttacttttacaggcttttgatattgaaaaccgtatctaactcattttgtatattatcaccaagaattatttcttatgttccattttatcaccctgagcttata

SEQ ID NO: 222959 - DNA, 263 bp, Glycine max
atgctccatctttaataaccatggaattcaaaccataccaacgtctcaagaataattgctttaagttctgaaaccccctgattgggaactgcgaaacctcacccttgtatgcactatgattaataaagagggacgacaaatatggtaggtcattaaatagtggcaatggatcaatagccaaacgggtgcgtgtcaaggacaacgtaacaagattatggagcatggcaacccattttgtgaacttccttaacccccctacaatg

SEQ ID NO: 222960 - DNA, 465 bp, Glycine max
  unsure (1)..(465): unsure at all n locations
ttaagcaccgcagctgcagcttgtatcctttctttctctcgcaggcttctcttatacaatntacaagaagaaatcatcagaaggatttcaatcaattccatatgcggttgcacttcttagcgcactgttgcttctatattatggcttcataaagaccaatgctactttgattatcaccatcaactgtattggatgtgttatagaagtttcatacctaacaatgtacattatatatgctcccaggaaacagaaggtggaaccaacatgacaatctttccttctcaactcttttccattttgctctagataacgatatttaaagtaactgcacaaatttgttcattttgaaactagctctattactgttaagagagttgtaaactgtaacttggtaagcttattaccttataaatgtttgatggatatttcagatatccactttggtaatgatactcattgccgaca

SEQ ID NO: 222961 - DNA, 503 bp, Glycine max
  unsure (1)..(503): unsure at all n locations
ctttatcattattaaatacaatntattgagatatactgtaattatgtcacttataaattaaatattgtcattaacttaatttttgaacaaagtaaacaattaatgcctaataaaatttctagattgatattgttgaagcaaagattaactaatcaagaattatttttatcaaagatcaaattcatgtagtaaccaaatgatttcaatcttaacttcatcacattaatcatttgttctcaatcacttgttattcttaaatttaattttatgtcaaatatatatatatatatatatatatatatatataagtatttaatatttatcttaaaagattgactcatttatagtgtgagagttcattcttgaaagagacaataatgcaagaatttaactattgatagaaaagaaacgtaaataataaatttatgaattattatatataattatattctattcttaataaatgaatgataattaaggataatgaataactctcttataat

SEQ ID NO: 222962 - DNA, 436 bp, Glycine max
agcttgtcaaaaggggaaacaagttaaaaacttatttcaaagtacaaatgttgttcctactacaaaaccccttgaactaattcatatggatttatccggaccatcaagaactatgagtttaggtggcaactactatggcttaataattgttgatgattattctacgttcacttagactttgtttttgagaaccaaaaataatgcttttgatgcttttcgcaaacttgccaatgttattcaaaatgagaaaggtcttaatattatttcaattagaagtgatcatggaggtgaattttaaaatgatcattttgaaaagttgtgaagaaaatgtaattcaacacattttttcagccccaagaacacctcaacaaaatggtgttgtggagaggaaaaacacatctcttgaagaaggagttagaactctctaaatgaaaca

SEQ ID NO: 222963 - DNA, 429 bp, Glycine max
  unsure (1)..(429): unsure at all n locations
cttgaganaacttccttaagaagcttctttgagaaaactttcttgagaagctatatcttagctacacatacccctctcataactaagctcacctactggagaagcttccttaagaagattcctaaagaagctaaagcttagctacacacacctctctaatagctaagttcacctccttgagatgagaagctagagcttagctacacacccccttataatagctaagctcacccccatgacaaaatacatgaaaatancaaaaaagtccctactacaaagactactcataatgcctcgaaatacaaggctaanaccctatacaactagaatggccaaaatacaaggcctaaacgaaggataaanaactctattctaatattacagagataagcgggctcatacttagcccatgggctcanaatctattct

SEQ ID NO: 222964 - DNA, 441 bp, Glycine max
agcttctgatgattcaactaggaagctatgtttcaaagtttaccctttagcactgtacacctattagagtgaacaaattagcttttcacctgccagcagcaataaaacaaagaacaattaacaaggttcaaaaataaaatatttggtcagataacgagaatctttagatcagaaagtttcaaaagtagaaacttttaccattcacatccagcaacatcaatataggctaaaaacaccaataaaaagagtctctaactggtaaatcaccacacgaacaatcttaaaattttcaattacaaggataaaattacccacaaggataaatcaccacaaactactagatcagagatatacagatcaaacccacccaagaatcatacatgaagcacagaccctgcctcaatgatgattcaaaaagatttgtttcatcaaaccttcatg

SEQ ID NO: 222965 - DNA, 288 bp, Glycine max
gtatctcttttatcttattgagagtgaatcttcttaattcttgcaggactcaagaacaccctggctggattaaaggactttcactacctttgtgtgttggacctccccggaagagtgaatttttccttcctttcatcttcaactttggtcttttgaaccacaatttcagaaaaatcacttctgcccagaattatctcgagccataactctcattctcgcacttcaattaagtgatttttagtcctaattggattcaaacaagaccttcgactcgttggaatcatctat

SEQ ID NO: 222966 - DNA, 453 bp, Glycine max
  unsure (1)..(453): unsure at all n locations
agctntacgttacacaaggcgtgatcacagtataagcttacgtcacagngaaactggaattgttgatcaagtaagtttatcatattcatttactttaatgtgtggcccggcccaataaggataacaccttaagggtctactcctgtaggaagagttagttagagtagttaaatatgtatataaacagtttgctagatagtcagttagtgaataatcagattgtaaccttgagcaattggctcagctgaagggaaagaccctttgtggagtcttgtctcctgagtgcattccttaactctcttataacctgngtgcctacatacacacatgttgagtntgagcctatgttgtgaatgattaatgagtgggaggttttaaattctaattattaaataagaattgcttgacaaaattaatttaaaatgtctatatgtgaagagtgtattaatgtat

SEQ ID NO: 222967 - DNA, 461 bp, Glycine max
  unsure (1)..(461): unsure at all n locations
tanacttcttcactcatggcctatctccactcaagataagttattgcctagtggtagtactgtggttcataagtggtggatatttgactgataaaatggtgataatattgatttaaatgaaccatagaacataactgttgaatacgatatgattgtgttggcttggtgcaaacaaagtcaaacatatataattgttggcaccttagttattttagaggatattttcaaggaaggcaattgttcagatataactggaacaaaagctttattagtagcaacatcatgagtagaagcatcagtaataggtggaagaacaacatctantggtgtggtagatacactagatgcaaaaatagaagtatcaacattatgtgcaaagtaacgaaaatctataagtggcatagaaaccacatagtcactcaatgaatttggacttcttggtcattgggtgacatttaaaa

SEQ ID NO: 222968 - DNA, 215 bp, Glycine max
  unsure (1)..(215): unsure at all n locations
ctcctttaataggccaaaggcagcacaaaanncatgcgacctcacactaagcatgacgctttgggctgagcgaggggagcacgcactgagcgcgcgagcgcctgggctaggcgaggagattacacgcctagcgccagagatcatgctaagcgcacctttatgcttcctcgccggcctacgacgcgtaaagcaagagcttgaccgcgaagcgggga

SEQ ID NO: 222969 - DNA, 450 bp, Glycine max
  unsure (1)..(450): unsure at all n locations
agctngccgcctcggagttttccgatctatgctttttgtggnggaacaagctacaaaaggagagagcaagaaatgaagagcctatggttgatacatggacggagatgaaaaagatcatgaggaagcggtatgtgccggctagttactcaagggacttgaaattcaagctccaaaaactaacccaaggcaacaagggggttgaggagtatttcaaggaaatggatgtgctcatgattcaagccacattattttccatcctttcctaaatcaatttccgcattttccatcaaggtttaatcctagacgatcctaagtcagcccttgtgccaagagggttcatatcagccagcattatttttatcagtatctcggaatgatgtttctatgccgaggttggtcaatggtttccatgcctagaacatgataacatgctggtgttggtcgaaacac

SEQ ID NO: 222970 - DNA, 455 bp, Glycine max
  unsure (1)..(455): unsure at all n locations
agctngaagaagcactactagaatatttgcctttaacattggttattaaggactttcaacatcggttattaaccgatgttgaaattaccgacgttaaaagtctcaacattaacaaaaaccaatgtttttgactgacaatatgaattttcataaaaaatagatgttgttttttaatgacaacatcagtttttagacaatcgattttgtcagtcaaaaagatcggttttttggaaaactgatgttgtcattcaaaaacaacatcgatttcttggaaaagtggtgttgttttttactgacaacatcgatttttataaaaaaacaacatgttttgtatttttntaatattctgtatgattttttaattagcccatttaatctgtaaattcaaaagcaatactagaccagatagtttttcttaaccaatntaaagtttcggcactatatataatngaata

SEQ ID NO: 222971 - DNA, 297 bp, Glycine max
  unsure (1)..(297): unsure at all n locations
ctctctcgaaatagctaaggaaaactagttccgagaagaaaatccaagccgaggcgctctcgtaacggatccgcgagtaattacgcgaaaattctcgaccgttcttcaagaatcactcgtccggtcttcgattacatcagccttcaatgggtaagtacctcaaaccaagcttttcaattcattctatgtacccgnggtggaccacatttcgtctcaatgatttttattctcgtgtcaattacctcacatacccactttggacccgccatagccattaaattaagtcatttctcgctt

SEQ ID NO: 222972 - DNA, 192 bp, Glycine max
tgcctattggatcgacagtggtgcatcaccgtggggtactggactgatcacaagcgactcctctatgaattaactgaacgatagagcacacctgctgaatccgatatcaatgaacccgttttgagcgtacgtagacgagcataaataattgttggcaccccatgctcttctaccgcattctcaggaaggctt

SEQ ID NO: 222973 - DNA, 438 bp, Glycine max
agctttaaaaatcaaaatgcctattctactttatccccctttgtcattatcaaaagatgcgggtccaaaaagataaaggaaatgatttggccatcactgtcaaccttcagtggatggaggttgagtgataggaggtggtgactttggtggcgaaggcagaggcacaagcacatgatcaataggtatagcaacctctgatgcaggaatcatttgtgcaagaacctcaggatgaggttgcacaacagtggtcggtgttggtggaggtggttgaggcatgggtgtacactggtgttggacaaatggaagcaacctttgtcgattatcagattcatgttatagggaacaaaatcgctgaaggatttgagcgatcactccagagtgttcttgattagcatgttgtgctcaatgcgtgcaacaatgaatcttctatacatagtc

SEQ ID NO: 222974 - DNA, 452 bp, Glycine max
  unsure (1)..(452): unsure at all n locations
agaagaagaagaaagatgagtaggagagaattgtttagatagtatagggttataggtttctccaaagttgttcaagaagatgttcaacaagaagaatagattttttgaatgcaagtcaaggtcttgcttttatagactcttcatgtctagtcaagacaaccatcggaagaattatgaccttgagaaaatcatgtcaagagttacatctcttgaccttctattcaaaactcgtcactggtaatcgattatcataatcatgtaatcgattacacaatgcattntatgaaaagatgtgactcttcccaattgtaatggaatatcaacattcaaatacactggtaatcaattaccaatatattgtaatcgattacaccatttaanaaacattnggaacattgcanattcagttaanagctttttgaaatcaaattctaacattggtaatcgattac

SEQ ID NO: 222975 - DNA, 427 bp, Glycine max
gcttgcttggactattggagcttttctttatctcaagcagtccttcttggtgatttatcaccatggagatgcagcggacggcaaacgagaagatgataggggaggcaccatcctctatggaataatcttatgaagacggagctttttcactcaataattgccttggataaaagcttgatcaggatgctcattggaggaatgaatgatagaaggggggagctccatattttacgaatcaaaaaggtatatagctggtactttgaagcgttctcatatgactttcattcctcacagttactaacggatggatccatgcttccattatcgaacacgtgtcttcctgagaagctatttgaaaaactatttcgaaagttttctgaaaactttcttgaaagctagacttatctcaccactctctataactgac

SEQ ID NO: 222976 - DNA, 483 bp, Glycine max
  unsure (1)..(483): unsure at all n locations
ggtgcaaatcanatcactcctacatttcatctctagcatgctatttctttctttctttacccactcctcacgtttggttttatagggaaaaacaccataactaaacgcgccacaaggcatccctatcgcaccagatccaaatctagaacgatgggtgatcaagaggagacacaggaacagatgaaagccaacatgtcggctctgaaagaacaaatggcctccatgatggaggccatgttaggtatgaggcagctcatggagaagaacgcggacaccgctgccgctgtcagttcggctgccgaagcagacccaactctcttggcaactgcgcaccatcctccctcanacatagtatgacggcgaagggacacactgttgcacgatggcagcactcacctgtgatacaaccgagcggcttacccttatggattgccgccaactactaccacccgtcttgcagagatgctgccatattgttctccc

SEQ ID NO: 222977 - DNA, 267 bp, Glycine max
tctacatccttgaatgagcacggcactgacaaatccattcttgaaagtgtcacctaaggtctttcattaaccgacgagaggtaacgggaaaatgaagttgtcacactcttttcactttccgaaacaaaaatctgaattctcatctatgacaaacaaacccccaaactcctgaggagtgaaccaacaaacatcgggaatggcagaggatggctatctaatccgaccatgtatgcacgcaacagaaaaatggaataaaatctgagatca

SEQ ID NO: 222978 - DNA, 358 bp, Glycine max
tgaaggacccgtagagactcttcacaatagtctcttgcagtcttcacaccgactttgttcaaacatgaaactcatctttatcttaacttagtcatgctcttgcttattttaatcgttgaaactatgtttcttattttgacaatatgattctaatataatcaaggtctttattgcgtaaatactttagtttcacgattttgtatattgatccagttttggaataaggcatgacaaggatgcatttttgcgtttcatctgaacatgatcttattaagcttgaatgacccaataagcttcttcacaatattatctttcagacttcacatcgaatcgtttcacacatcgaatatagttttac

SEQ ID NO: 222979 - DNA, 426 bp, Glycine max
agcttggagatgcaatagtgctaaggggtcttgttttttttactccatattgtggacaattaacttggggtcctgtctttatgatctctaagtttaatgagccaacctgtttcaagttgggtctgtggctaaagtgataaagatatgcacgttgcttaatacgatcgtttcttcacctataggatatgaacagacttcaattctggggtatcgctaaactacttgattctcaatctgatgcaggcgtactccacatatctactcccatattatatatatatccttcaacatagacgggtttggtatataaactcaatctgcatattattcataatatcctgctggctgtgattcttcaacagaacatataaccctctctcataaatcggatgtctctatctgagaatcaaataaatgcgatttttt

SEQ ID NO: 222980 - DNA, 459 bp, Glycine max
tgtgcgatttagggattgaggactggtatggttcgagtttatgtttgttattgtgatagaggtttgtgttttggaagaaaaactcttagataaagttttgggtttatgtgtatgtttctcttcatagagtttggccaccgaaattggtctgaggagtcatgttcgtgattgtgcaacgacatcccttctgatatcacgctttaatcctcccacaaagcaatccaataaagcttcttgtgtaattccttgtactcgattagctaaagccgtgaactgcacgtaatatgactgaactgaaccaatttgagcatgtttaaacaactgagatctatgacattcatacggtgatgggccaaattctgtctctaaggctctcgtataagcatccatgttctgatgaatgtcacgagtcatcatttgtcgacgggccatcctcttaatcagtgaatgataataatt

SEQ ID NO: 222981 - DNA, 375 bp, Glycine max
tactggaattccaagaaaagaaaaaggaatctccatctggctatagttaagaaaatgagctgcattcctacaccaaccctttgaatatcctatgcaaccgcagtgacttttagcatcaattatcttgaggccagagaccatctcaaaacacctcagtatacattttaagactctaacattatccgtagttacagccccaaataacagagtgccatctgcatatcggagaatattaacatcctccttttgacctcccacatgatagctgctgaacatattcttagaaatggctgtcctcatcaaaccttgaaggccttccactactatatagaacagtaaagggctagggagtcaccctgccttgagcctttatat

SEQ ID NO: 222982 - DNA, 387 bp, Glycine max
atcaagaattaaaatttaaatcaaattaaaatgaaaattgagaaataaaatttgaatgtaaaaaatataaattaaaaataaattgaatatttacctatatatgtgtaaatatctctgtaaaagatcaaaaatataatcttttaatatatgggttaaaatatacaagaatgtatagtattgaacaattttttaagttatttgatatgataaatatatcttctttaatttcttagaatcttgataattaaggttcatgttaagaatacccataacccaaggaaaataatattttcatcataatgcaagcagcgccaaatttatacatatttcgtaaacaaaatgctcttgaatattattgatgcactgccacactacatcatgattata

SEQ ID NO: 222983 - DNA, 439 bp, Glycine max
agcttatgtagacagaaaagtaaaatatggttttctactatctcacgacactctgcgtgctctatggacatacacactattgttgacacctaaaccctcacctgtcgtcggtacacgcaaactaatacttttagtgctatttgattgctgaaattgatagtcaaagctttttggtgatgttcacaatcaattacttcattgagaagcacattaacaacaccatagagacatatatagttcgctacaagaagagttttagccgcttatagatctatgatggcgatgacgatcgatgtgccttactgctcaatgaagggtatacaaccttcaagtttatgtgagcataacaacctattgccaatggttgtttctgacactggacttgaacaactgctactatctcattgcaaggatctaccacaccatcatgcactgtaat

SEQ ID NO: 222984 - DNA, 476 bp, Glycine max
  unsure (1)..(476): unsure at all n locations
tcagntacttggtgtacgggtgtgagaattcaggatatgattgtgnaataattaaaaaaaatctctcaccaaaaaaacaaagatcacaataaagttgctctaatttactctagaatctaacgagggccgagttataattgaatcaaaaggattgacatacaagacatctggcttataagtgaagataacttgatctttgaactagtaagcacaaattacaggtgcctagcattgttttggactaatatttaatttaatgacatcatgcatatcataccatgaagtccactagtattaagtatataaacaaactaaaatttccgtagttatcgtgtcgtggataacgacgtataaccatagaccaacaattttgttcttcgaaaaaactcagtaacttatgtggcacctatgttgagggaaaaatcacttagaaataccaccttctttagatttaatatgtgggcaactaagtgatg

SEQ ID NO: 222985 - DNA, 451 bp, Glycine max
  unsure (1)..(451): unsure at all n locations
agcttacaactagtttgtttagaataatatatataatttgattatatatatatataatcaaattgtagcttttacaataaaattatttaataagtagttattaaataacgtagtaataattaaagtagtttatttggtattgtctaaacgttaagacaccaaatttcaactttcacatgttcctattttcggtacctacactatggtattatttatttatttattatgttattgatatggagtattgattaattttgttgctaattaattttgattgaaaaatttaactgattattttaatgcgttttttttctttcatttatatttctttatcctcaaaatttaaattaaaatttttattaaagataattaaatatatacgcctattggtcacatgctacttcacttataaaatacatgatacatactagtctttcaaanatagagaaat

SEQ ID NO: 222986 - DNA, 435 bp, Glycine max
  unsure (1)..(435): unsure at all n locations
ctgaattaatctgttcattcttagaaaacaaaaaaaggtacatgaaccttacaattcaaccatttgtgtttcttccccccttccaatcctacattggatctcatgacaaccttgagacatcttacatgacattcgcaccatgtttcagaatataatgcttcagctggaatagccataaaacgtgataataccaaagattccatataattactagaatagccatntgaagatccctcgtcatgatacttcgaattcgaagtggaaaatctcacatttttcagatcagctcgcaacttgttggctgagtccgacatgaagaaacatttctttgaatggaaagggaacggatgatgccgatgctaangatgaaatgagcttgtgggggagagggaggaaaaacgaacggaccttgtgaaatactactatcttccattc

SEQ ID NO: 222987 - DNA, 446 bp, Glycine max
  unsure (1)..(446): unsure at all n locations
agcttccatcactaattaattgagatttattctataactggccagttatgaattactcttcgttaattagcctaacccgcgcatctttcccccaatgtacatacttctaccaggagtatatatatatatatatatatatatataattatttaaaatatatcgtttacaaaattccgggtagaaattttcaggatgtcacaaaaaacatttatactttctttaaagacttattgagatcaagagacaaattgtctcttgaactgtaagtttcctgaacacaagggagagggatccctcgggtgttcagaagttgtaaaaagaatttttacaaagttagtggaaatttcaagtgagttgcttgatgactgaacgcacgcacagaaagtggccgaaccangataaactgagtttgcatttctctcttcgctatcctgattatattatct

SEQ ID NO: 222988 - DNA, 476 bp, Glycine max
tcatgatgatgaatcaagttgattcaagtagttttgatgatttcaaagatgatgataaaaagcccaagagaatgatctcaagaatgagtcaacaacgtttaagaatcaagagaagtttgatttcaagattcaagagaagatgaatttaagattcacgagaagaaatcaagaagacttcacaagggaagtattgaaaagattttctcaacaaataaacatagcacagttttgtttttcaaaagagtgtttctcaaaatcttctaagttaccagagtttttactctctggaaatcgattaccagtttcctgtaatcgattaccaatggcaaagtttgatttcaaaagtattcaactgaatttgcaacgttccaattgatttcaaaatggtgtaatcgattacaagatattgcgtatcgattaccagtgtatctgaacgttgaaattaaaatcaattgtgaagagtcatatcctttcat

SEQ ID NO: 222989 - DNA, 373 bp, Glycine max
aattcggtcgcccacttaattatgtgggttaattctcatctgttctaaactctatttgtggatagtcaactcaaagtcacagccacgaggattctgattatttattacaagaagtctaaactcaatttgatgaacagcgagttagagctattgtgactacctatgttttcggagacaaattgtgttatgagaaaatacatttttctccattaattttgtacattaaacgtattgataaatcagaaacaattacaaacttactcttaccaagatgttagtaaattacataagcccactattgtatacatttttcgaaaaatatatatatttaatatttaatgaactcgaaactgtgcctaatataacatattta

SEQ ID NO: 222990 - DNA, 452 bp, Glycine max
  unsure (1)..(452): unsure at all n locations
agcttgtcaaattagtgtatggattgaaacatgctcangagtgtggtatgaaagaccaagttcatttttagttcaaaatttattctccaaaggaatagcggatattacaccattcataaagacttagaaaatggatctgttgatagtatagatctatgtagatgacagcatctttggtatttcctcaaaaaggatgtgcaaacaattttttgagctaatgaaaggaaaatttaaaataagcatgatgggagaactaaagttctttctaagggctttaaatcattcaaaagaggtttagaatggatgaaaccagaccagtggctaccctcatgcatccatccactgttagtgataaagcagaaaagatnagcaccaatagtgcataccaatttcatgggaaatcactagtgtcatagtcttcagagaaacaacaccatttgccatcatacacc

SEQ ID NO: 222991 - DNA, 388 bp, Glycine max
ttacattatgcacgctacaagttgatttatttctaacattatagcttatctcttttatcttattgagaatgattcttccaaaatctttgaggatatcagaaccccatggctgtttcaaggactttacaacctttgtgtgttcccttgctggaaaagagaaatttaccttacttcttcacacccctggtctttcaaccacaattcagaaaatccacctctgccataatttctcgtggccatacttccatttacgcctcaattaagtgatcttgacctaattgaatttaaacgagcctttctcttctttggaacacctctttgaccccgtgcttactatggattttatattcgccacccccttaactcgtttacctccatttccattatg

SEQ ID NO: 222992 - DNA, 462 bp, Glycine max
  unsure (1)..(462): unsure at all n locations
agcttaaccctgaaagagtggtatggataactaaacacattatttaagaaattttgtacaaggtgataattgaatatgagttcttttgacaaatagatcattatcacacatgtgaacaaaaaattaactttggcttaacttaaagaaattatggaagagtttatcaaatcaagatttcaaataatatcatgattttgatgacttgaaagaaatcttttttgcttttattggtttctttggatcaaaagtagttacaaaagaagttacaaaagtacttatatttactttcatgcacatgatattttattttttattgaactaaatttaaaacaattattaatagtaaaacgtaacaatcattgtttttttttcttaccatgtaataaattttggccccctattatgtgtttctggttccgaccctagttngatccatttcagttatctcaatctgctattcag

SEQ ID NO: 222993 - DNA, 457 bp, Glycine max
agcttgggcattgcgaccttattgaggagattatgattgtcgaggataaactgattcatctttctggtgttgctatggggcacgcatgtacaatatgtttgagaggtgctacgtacttgatactcttttattatttaaaacccctttcaagtgttcttttacatagtcaggcattttattggtgataacatattatatcaaatctttctgtcacctgaagatttaatatttcggcagtaggattttttttaatcttttgttccattcaagtataatcactatctattcatggtggattatattacttccgtttttgctgtttccatgctgaattattgaagtttcacatccagaaacccgtatatatttcctttcagaatattggatatgcatattgagcccaatgatctaacttctgagtgctaaaatttcgaatgctacttgcttttatgcatgc

SEQ ID NO: 222994 - DNA, 437 bp, Glycine max
  unsure (1)..(437): unsure at all n locations
aacctatgaccctacccgattcaattatattggattgtgtctctaaattgattaagtcaaattcgacctatctcaatttagacccgatcatgaacaggttgggtaacatgttttattatttgaacccgacccgacccgacacataccatataatntaatgtattatatatataaattaattattaaatacaaaacacattagcaatttttagttcacataatctattaaattattaatttaaacaaaacatgatttttttacttattctttaagttatctttatctctggctttgattatgtttatatattcacatgctaatatcatactttatttctatctaaaataaaaatatcgtattagtatttaaattattaatcttattagtctaatatttcataatctgatctctttgagtgcatttcgtcatatatact

SEQ ID NO: 222995 - DNA, 429 bp, Glycine max
tagcttggggcaatcacatgccaagtggcctttctctacagtaagaacccaagactttactatatatttttttctttcagaacaccctgttcaaacatatctgaacgaatataaattgagattttggatgttggtgtgtttgggtggccctggtcacaagacgtttcattaagtgattatgtaatgcaaggctggtcagtctggttttgcaccaatgcatgattactttgtggaatatacttaaagttgaagatttttcagaaatccgttttttttcttggatatgtgtaaacaggagactcgctgtgccttggtgacttgttggacatgggctccaatccggaaacagcctctatgcataagcaatggtaagggtgcgaacaacatccctcacccataccttcgcataaagaagagcctctgggcaat

SEQ ID NO: 222996 - DNA, 222 bp, Glycine max
ataagatttcttgtttaaaatgcataacaaagtttatagacagtgtagattcttaattgactaatttttatctaaaattaatttatcggcgaaaattattatttttttggcctgatttacgcattatcatctcatagtagaaggcctaaaattaattcttgacctagattggttcttgctaaaattatcatgatagtttcaacaatttacgtttcttcgcct

SEQ ID NO: 222997 - DNA, 433 bp, Glycine max
  unsure (1)..(433): unsure at all n locations
agcttgtaggattacggngtacccatcacatgtggttctaggtggcggtcgggcgatggtgcacaacaagttttccacatccacaatgcgcgcataaacccaccatcccctgttgcccacctccaactgagctcacgtactcccacgtagcccatatcctcgtttctctcaacaccgggtccccatcaatcctcccaagcttccacaacatccaagcaaaacaacattcaaacagcacaagctatcacagccaagcaaaacagagcaaaggcagaaaactctgctcaacacatcaaccaaaatcacagcttttctcacttaaagaccacagtaacaattccttcgatccaattcgttaaccgttggatcgactccaaaattttactggaagtctatagtgcataagcctacattgtggccgttgggatctact

SEQ ID NO: 222998 - DNA, 432 bp, Glycine max
  unsure (1)..(432): unsure at all n locations
actaagcttacgcagatttagtaatgacccactaacctagaataatttatcttaatgccattaacctagggaattaaaaaaaacttaatggctgagtgtaactgaaattgtggcaaccaaaagtcaccctcaacagccaacaagtcagccaccatttggtctcccaaaaggctgatgcctaggttgccaatngggcccttattacaacttgaactaaacctaactaaagcccttttagttgattaacccagaacatatttttggtcagccaactttacaaggattgggccattatttagacaaactaaacactctaaaattgagacaaggtggtgtcatttagtcctcctccatttgggccatgatacaactcacaaccttggactnttctccttgaaactngngctngtattcaaatagtatggacagcac

SEQ ID NO: 222999 - DNA, 411 bp, Glycine max
  unsure (1)..(411): unsure at all n locations
gcttggaaaaaaaaaaaacagacctttcttcttatttgtaacacgngaaaatggcgaatgaacgctctaatngacatttttttccctcaaggaatcacgagataacgtgtaggcttaaatgacaagttcaaatgacacttgaatgaccgctagccagccatgcttcaattgggtggtttttctttttgcaaaactaccaaaaatggaggggataggatctgccaaaaagggatagttttgcctttttaccaaaactagtaaatcttatcttaatcgcataggatattgtgctaatcttcctatgaatacgtgtatccagagtgtatcttacacaacaaacactctcacatagagttaaattacactttcgctcagtgcgcggtgcaatttcgctatagatgaaatatttgg

SEQ ID NO: 223000 - DNA, 496 bp, Glycine max
  unsure (1)..(496): unsure at all n locations
acctnttccacactaacatcattgtcaacatgtttgncttttcttgttctccaaagacctctatcccatccccatgtagctcaacacttattcccagcttttgcattaccacaattacctcttctttgcacaatcttactccatgttgaatgcactttaaactgtggttttctggttcatgatttgagtcactcctacggttgttggtgcaacaatttttccaatttcgtgagacccaattccacaaagactgcaaagaataaaacaaaattgagaggaaacaattattaaatttaatatcactaacgagaattctaagacataaagataatccagatatatttatgttgctatgtgcttgctccattgataaacaaagatcacatatatttagcattcacccttangcaaggacttgttgtgcatgggtgaattcttggattcatatatntatagcctatanaagtgaaccttacatgagctcaccatataatat

SEQ ID NO: 223001 - DNA, 191 bp, Glycine max
  unsure (1)..(191): unsure at all n locations
agcccgaccaagcgcgacccaacctttacatatttggncaaagagaacccgtgaagcgcctaaccaggcgagctcctgcctgccaacagataacaggaacacacaccacaaaccaaggaggcttgtggcggccggccagcagtgaatttagtgcgatatgcaggacacggcccccggtaatccattaccaa

SEQ ID NO: 223002 - DNA, 267 bp, Glycine max
ccatccggataaaagatacggcgaaacgcaagcgccaaaggcccaatacacaaatgacaacgaaagcttatattctccgacccactcagatatatcgtgtagcatactacaggcggctgtacaggctcagacggcataaacaaccatcacgagcgtcccgaaataatacacaactgtaactgacaaaccaaaaaaaagacactgcataaaaaattcgcaccacaacttaagtttatactacacccctatctaaaaggaaacgactca

SEQ ID NO: 223003 - DNA, 322 bp, Glycine max
tcgccattcaaaccttatgagtcacaagattatgccaattctgtcgtctagacatgttcaaaaccttacgcatggctatatttcatgctgaacgcactgaattgtctatggctatgcttgttcggaactgtgatagatcgattacgttctcgattggttgaaaaaattcaattatgatttattttcccatcgacattcagattttgagagacgctgaaaagttctggaattctagagacattggattggacagatatatatgtttcttgtttcagatgattcaccaagattacataagttagtttatttccttattgcctta

SEQ ID NO: 223004 - DNA, 454 bp, Glycine max
  unsure (1)..(454): unsure at all n locations
agcttggaacatatagactgaattctgttttctcttanggacttagtcaaaatatctgctggctgatcattanaattaatgaactcagtgataatctccttggaaaatagtttctctcgaataaagtgacaatcaacctctatgtgcttagtcctctcatgaaagactggattggaaacaatgtgaagggctgcttgattatcacagaataacttcatttgcccaacttcacaaaacttcaactcttgtagaaattgcttaatccacataagttcacatgtgaccatagccatagatcgatattcagcctctgcactggatcgagcaacaacagtctgcttcttgcttttccaagaaataagattccctccaatgaaaacacaatattctgatgtagatcttctatccatgggacagccagcccagtctgcatcacaatatccagatacttgag

SEQ ID NO: 223005 - DNA, 484 bp, Glycine max
  unsure (1)..(484): unsure at all n locations
tgcatgaattacattctccncgctttctcaagcaatttcttatttcttcttgacatcatcaaaatcttcatgatttacattctccccctttttgatgatgacaaccacctgtaggttaggagcaacaacaaagaataaaatatttatttgcatatagtttactcccccttggttttgcaatgattgcttatatgagacagttgaagatttcatatttttcatatgtaaacaaattgtctcataaacaataatagatagtctttcttactattatatcttttatctttctctccccctttgtcaacatcaaaaacaaatcatgaatagagaggagaaaggcgttaccacttgttgcaatgtatgagaatcaagtgataccaaaagacattaaaacaatcattcaatatttaatcaagcaaaacaactacaataacacatcagtcaaacacaatcaaatacaatcaatcatcaaatatgtcaaatc

SEQ ID NO: 223006 - DNA, 435 bp, Glycine max
agcttctccaaccacctatctggcttaaactctgcccaatcctcaccccaaatactctccattctccccatcgcatacacgtgatacgtcacaaacatcctcttctttaccaccgtgccactcggtataacatcatcgttcattgtttccttcgtgtctaaaggcaccggcgggtacaacctcatgctcctacacaaggctggatgtgtgaaaaccatatcctttacttcatcgtacaccggagcctctgattgctccattatctccttcaaaacctccttttccacacgcgggttcttcgataacaaccataaaaaccacgtcagcgccgctgaggtggtatccttccgcgccaatatgaaacttataactatgtctgccacaaagtcttcatctgagtgttccgaacttataaaccgtgaaagcatgtcatca

SEQ ID NO: 223007 - DNA, 411 bp, Glycine max
  unsure (1)..(411): unsure at all n locations
acactataaaactaagcttcatacacaggatntgtggtcctatatttaaagcttaagatttatatcctgcatgatactagataaggtaagtataaatcatactttaattacgacaatctcatacactcatgacatacagggtaacaattcccaaacagaacttcttgtgattatgattgatgacactgacactgaagcagaaacgtgtaccaatgtatatatactcataaccggctgaaaggcaacaacaagtactatatactcattcgactactatctatttacacaaaacttgttagacaattcaagcatttatcttgctctgttttcagttactaatttttttcccagaacacactcatagttacatggactaactgcttgatactatgtttgggcaaaaaaaaccaa

SEQ ID NO: 223008 - DNA, 427 bp, Glycine max
agcttaaacattcaattgcgagcgtttcgatatattacgggactcaatcacacatccgagtaaaaagttattgtcgtttgaattggctcagaggttcaaaattcaatttcgaacgtctcgatatatttcgggactcaatcacacatccgagtaaaaagttattgtcttttgagttggctcagacgttcaacattcactttcgagcgtcccgaaatattacggcactgaatcggacatccgagtaaaaagttattgtcgtttgaattgggtctgagcttcaacattcaatttcgagcgtctcgatatattacgggactcaatcagacatccgagaaataagtattgtcgcttgaattggatcataggttcaacattcaaatttgagcgtctcgatatatgacggcactcaatcagacatccgagtaaa

SEQ ID NO: 223009 - DNA, 375 bp, Glycine max
ttgagccaattctaacgataataaccttttactctgatgtctcgatgagtcccataatatatcgacacgctcgaaattgaatggtgaagctctgagccagagcaaacaacaataacacttttactcggatgattgattgagtcctgtaatataacgggacgctcgaaatcgaatgttgaagctctgagccaattcaaacgacaataactttttactcggatgtccgattgagtctcgtaatatatcgacacgctcgaaattgaatgttgaagctctaagcctaatcaaacaacaataactgtttactcggatgtccgattcagtgacgtaatatatcgggacgcttgaaattgaatgttgaacctctgagccaac

SEQ ID NO: 223010 - DNA, 387 bp, Glycine max
  unsure (1)..(387): unsure at all n locations
agcttccttgagaaactttcttgagaagattcttagagaagctagagcttatctacacacacctctctaatagctaagctcacctccttgagatgagaagctaagctctagcttctcaccccctataatatctaagttcacccctatgccaaaatacatgaaaataaaaaaaaaatccctactacaaagactacttaaaatgccctgaaatacaaggctaanacactatactactagaatggccaaaatacaaggcccaaaagaaggaaaaacctattctaatatttacaaagaagagtggacccaaccttggcccatgagctcagaaatctaccctgagattcatgagaaccccagggccttctttagcggctctagcccaatcct

SEQ ID NO: 223011 - DNA, 432 bp, Glycine max
agcttcaatgttaatgtcacatcagataatgtcttataccgtatcaaattatggagatcatggtatggtattgtaagtgacatccttggccatagtggatttgattgggatgacactaagcacatgatcacagttgagaatgaaaatgcttggaatgaatattgcattgtaagtatcctctaatatgttgctatttgtttttcaaagtagaatggatttgactttttctttgttttccagtcgcataaatcaactaaaccgttgcgatacaaggtgcttcaaaattgggatgatatagtggattcgtgtgctaaagatagagccaccggtcatggagccgaaactgctatggatgctgatgaaatgatgagtaaagaaacacatgaagtgtaattcatggggttatgtgctactcgtctatattacaagaac

SEQ ID NO: 223012 - DNA, 497 bp, Glycine max
  unsure (1)..(497): unsure at all n locations
tgaaataataaacttcaactttatttctgcggaaatttcttctacaaatgtttgtcaaccgtangatatataacataagtaagactcccactaaactaaggtattatcaggaattacacccatatgagccgtatgctcatganaaactttaagtgttatacctttagtaactagatcagctagcatggaataagttcctatatgttttatacaaatctatattttctgaaatctttatgtaacaaccaaacattttatggcaacaaactattacttggttgaatccttgataataccgctaagatattgtcccaataaacacccgatgtctacttaatgttggcgacaatatgcaagccagttacaataatttagcaattataaattctagtatgatgtctcatagcanaatattaactccaccaacacgggtaaatgtggatccttatgtagagtgattactattaagacattccanaaaaattgaagtcaaaata

SEQ ID NO: 223013 - DNA, 468 bp, Glycine max
cttaagcaccgcagctgcaactttagtataagcgaatgctaactactttactgttgtgtcaccttgctttctgggtagagaaaaatgttgcttgatcaacttgaatttaatcataaatatatcttagtggcgcaagacatcaaacaaaaactattcatcaatataaactcatttgaagaacataattagtaaactacaactatgaccacgaattttacatacgaatcagcatacagagtaacgcaccattgtcagtctcatcgtcatttgtccatggattgtctatttctgtccatcctctgaaagctttactgtctaaagtacggtcaacagctgcctgaagttttccttcttgagcaacaagatcagtcattgtaaggcgatggtcatgcttcttaaatgattccgagaactcgctttcagggcattcacacacactacagtcccgcaaccggcacatgccatcat

SEQ ID NO: 223014 - DNA, 453 bp, Glycine max
  unsure (1)..(453): unsure at all n locations
agcttgganatggtcgttcttgatgaanatatatcattattgtcttgtaatcatatttttgaagttcaatgtcacaaaaaaaaaaacctctcaataaagttgctttatttgtatagaacgaaacatgtgtttgttaggaagaaatatataaaagtgtttgtggaattgataaaggaagaaaatacttatgtatttgcaaaattgttggtatatttaaatgatcaaaaattcaacttaatgtttgtaggggaaataaattatctctaatgccttttttggaacaaagctaagctcaacttgatattgtggaggaattccaaactaaatactatattattttaagattccgtataccattataaatttntattttatgtggcggagtggttataatatatattatttatgtggctcgctattacaaaatatgatgaagggggagtgaacatcaac

SEQ ID NO: 223015 - DNA, 504 bp, Glycine max
  unsure (1)..(504): unsure at all n locations
tgttctaaagctaccatgtgcaaacactaaaacactgcatgttcatgtttnttcagtcctagctatatccttgataggttcaggaatcataaattgaagtcatgtggtacgttcacgagattaaatcactgttgttttctgctttttctttgttgcacattgagtgaacaatatattgcaataaaggcatggtgtgttctacattatattgtagatttctgcattttctttgtagcacattaatggcatgctaatacctgcatttgctgaattggtaaatggtgtagaatgaatcattgataccttggatggcgtggataagcacgagacatttgctaaattggtattccaaatccatgatttcttataaatattatttcattacagtttgcattttgaatatcacttaagctacaactcttagaccttattcaattntacgatgaccgatatctagctcatggaatatatatatatatatatatatatatatatatatatata

SEQ ID NO: 223016 - DNA, 367 bp, Glycine max
agctcgcacaggttactgaagaagaacatatttttatgtgggcttctcatacaggccgactaatatgattgggcacacttagtccgatattgcatgcataaggcattgcgattaactgcttcattgccatatccacacttagtcactctcttcctttaacactttaacatccctcttgattctgaaccttttgttccaatcaaagatccttcttaattggtgccgttgtgattgcatcttttggtaccgtaaagaacatgatggctcttggttgaaaaaacgtgcacaacccattgatgaagaaggacacttaccagctggagaacatttctctgttcttcaaaggattttggacaggttctatggt

SEQ ID NO: 223017 - DNA, 373 bp, Glycine max
  unsure (1)..(373): unsure at all n locations
gccatcaggctctcggagctttgataaccaggatcagtccaaagtcaaaacaaccatcatcgatcgtgggtcgaaactaattgtcaaagctacctatagagaacacaccattcgttgcaggattgatccatcagaaggtgggttcaaactatatgaacaagctgcagcatgattcaaaccacaaaatgggtaaatacgcgcacatatccagaagatgaagaggaacgggtgatgttggtgaacgacgctgatctgcaagagtgtacacaaacatnggatgacattggcacacccagcgccacgttacttgctcgggataagccttccgaataagcagccctggcaggaacaacagctacatgggaggcagctc

SEQ ID NO: 223018 - DNA, 452 bp, Glycine max
tggtcaccgcagcaacactgtagaaaccgtaagctttcttctcgacacctactggatcttatccgactaccgccttcctctttattttcggctagtaattgcttaaattcaactgattgtggttttaaattgaaacaattaacacataggttgcatagaataagaagaagaaaaatttgggtttatttgcaccgtctagtattagcagacacatagaataataaaaatttgggtttgtctttgaaaggttaaatatcttatgttatatataagtactaacattgtgaaaatgggtctcatatttttcaagcttatctaaaatctcatatggtgaaattataatatcgtatcatactgataacttcactaaatatcattataaaagatagttactgtataatatatattgcaatttgtgtgctgctaagtgtcagattaagctactacacagc

SEQ ID NO: 223019 - DNA, 389 bp, Glycine max
atgcttggtgttatcagaaaagggttctcctcttctctcccacaccaagtaaaacaaaaagccaatttaggtccaccatatacgggcatccaaattccaaaacctggtgattatcttatcacaaaatgtagaggtctaaaacaaaccaaaagagagtgctacgtacttggtaaataatggttggagtcttggaagaatggatcagcgtcctcttatacatatatacgatttttattttcttatagttgcatgattttccatgttgcttcaccgagttcttcactcttgattttttaaatgctgatagctagtgtaattacgtagaagatacataagggagaacgagtctagtgtaatattaataaagaacgagttaagtgtatgaaaac

SEQ ID NO: 223020 - DNA, 472 bp, Glycine max
tctgcttaagaagattcctaagaagcagagctattctcacatacctctctaatagctaagctcaccttcttgagatgaaaagctagagcttaactacacaccttctataatagctaagctcaaccctatgccacaaaacatgaaaatacataaaaaagtccttactacaaagagtactcaaaatgcctcgaaatacaacgctaaaaccctatactactagaatggccaaaatacaaggcccaaaagaaggagaaacctattctaatatttacaaagataatcgggctcatacttagcccaagggctcgaaatctaccctaaggctcatgagaaccctagggtcttcccttggatctctggcccaatctagttggagtcttctatccaatgcccttgtggtggtaggactgcatcaaaaggtgatcggagacgccacttcaaggagaagatgagtcaagaacaagctcaccac

SEQ ID NO: 223021 - DNA, 355 bp, Glycine max
agcttcaaaggctcaagaagcaaggataattgttatttaatcaacaagcaacacaacccttttctataaaagacaactgggataaactactaaatgatataatccctatgagagcaaggcacactttgttgggtagaccacggaactttgacaagatacaaacccataatgatctcacctaagaaataaccccaacccatggaagcaaatagattaaacttgttcccttgacacctacagaagtggtggggggtcaagtacaaataacacctcactcgcgatgaggaaaagaacccataacgaatctaagaacaccctctaatggtcaacgaatagagtaaggaatacatgtctc

SEQ ID NO: 223022 - DNA, 446 bp, Glycine max
  unsure (1)..(446): unsure at all n locations
agcttaccagaagcgccaatcagtgttcttttttgttggcgatttngtctgagctatcatgagtaaagatcgtttacccactcattaatacaactagcttattgctagaaaaatcgagtcatattcatagttctaatgctttcaatgttaatttccttattgtggtaatgcttcttctgatgatgagatggcttttgatctgtggatgaatcttctccaccccgaaaaggatcctgcagtgcaagattgaccaaagttgacccaaaaaagtcattcgtgtccatttttttacaaaggagtacactntttggaatggaaatgaccttctaaggagactgcattccctactagcaatgtggtgattgatattttagccaaattctattgttaaagggtaaaatttgcacttttatctctattgttttttagacacattctattggtta

SEQ ID NO: 223023 - DNA, 416 bp, Glycine max
  unsure (1)..(416): unsure at all n locations
tntcgattcattctatgtacccgtagtggtccacattgtgtttcgtgcattattattctcgatttgtttactttttataccccctgttgacgtgcttaagccattttacttaagtcatttctcgcttaacttataaataaaataaatttccaccgaacgtttgaattgtattatccattaacttcggttaaaataaattccgaccgttcggtcgtgccgtaaccacgttggaaatagaataaaagtaaaataataataaaataatcaaaatatcttgaaaaataataataaaataatcaaaatatctntgaataaaataataaaaaaatcaatcggacgtttttctctggaagtttccttgaatgaattgattaataaaccaaagtgaaactaagactaaaatcaactcacaaatc

SEQ ID NO: 223024 - DNA, 449 bp, Glycine max
  unsure (1)..(449): unsure at all n locations
cattacgcgacactataaaactcagcttctatccaggcaaatcatggtggtgaagctccttcttccttggcatattccctaatggatggcgcctnccctctactcttctcctttgccttccgacgcatctccatggtgtaaaatcaccattgaaggacctcattgaagctcaaagatccagccttcatggaagctccacaagcaagcttccatcaagtggtaatcatagcacaagagcttcaagtaggtgctccttaaacctccattaattgctttgctttaccttttcttgcattgatgactcttcatttttctccatgtatctcctcacatgtcttgtgataaatattgttaacatgattctttagagtctccaccgattaaactcgctataaaagctagatttgattttctatggttcacatatcttggtcttgttcttgaaccat

SEQ ID NO: 223025 - DNA, 314 bp, Glycine max
gatatgcgaagcgctttttcttccattatgcggcagacagcggttggatcgttgagcctcatcctttctaaatttaccagattttcactctctatttcacgacatatgcatcaagagtcttgacccaaatccacatcgctttggaacctcacacatgatcacaagggggctatgcaactcgttgcaagccttatcaatgaacttccaaggacacttgaatcatttggatatgcagcgaaaggctttgacaactctagcagcaagtgaccaaaccattcacacaactccaaagcgggaatagcgttctgcttttg

SEQ ID NO: 223026 - DNA, 457 bp, Glycine max
agcttgcccagagaaggagtccacggaggatatgctttctcacctcaaaagactggaaagcggtttctaatgactcctctgcggcttccacataaggcatagaggatgggcagctcaccaagatgtcttcctcgcctgatacgatgaccagatgcccttccactacgaatttcaacttttggtggagtgttgagggaacaactcctactgagtggatccacgggcgccccaacagacagctgtagggagggttaatatccattatttggaaagtaacttgacaggtgtgagggcctatctgtactgggagatcgaactctcccctaacctctcggcgggtgccgtcgaaggtacgaaccaccattgaacttggttttaagtgggaggcattgaatgggaatttctccaaagtgctcttaggcatcacgtttaaactggaaccattatcgatgagcac

SEQ ID NO: 223027 - DNA, 419 bp, Glycine max
  unsure (1)..(419): unsure at all n locations
tgttcatgagaganaaagagatgaagagaatggtgttagctatacaacctatgtatttactaatgcattatgattattgtccatcttctattgctagttgttctcccccaggtgtggaagaattattgaagaagtttggggattacttccctaaagatccccctcatgggttgcctcctttgagagggatagagcaccaaattgatctcatgcctagagtttctataccaaataggccaacatatagacgtaatctgaaagagaaaaaagagagtcaaagacaagtggagagcttgatggaaaatgatgggttagagaaagtttgagcccatgtgctatgtttgtcgttntggtaaatcaaacttctaaggtgctaggtaggtaagaattagaaagcttgtgaggaatgcctaccccac

SEQ ID NO: 223028 - DNA, 335 bp, Glycine max
  unsure (1)..(335): unsure at all n locations
caactgcagctgcagctttaaggctgatatcacccatttttttttttctagnggaagcccaatccatgcggcccaaagaacgggggcaccatcatcctccaagatgaaaagagtgacctaagcccaacaaggacgttcactggctggacaatatgcttcgatgaccacaagctcagcgaaaccttgaggaactgacactttcctttgcctttattggacctaacgccggagaggatagagggacatgctcactccaacttcttgatcagatactctggatctaatctaaatactgcggaccccagagaccaagagaagacaaccttcacatgacc

SEQ ID NO: 223029 - DNA, 474 bp, Glycine max
  unsure (1)..(474): unsure at all n locations
catgtttccaaatatgaataaatgtttatattatattctcacaacattctatcaaataatgtgtgtagcccatgtcgctagcacccttgtgaatatttagcaacatgggctatacacaacacttgataaaatattggaaaaacatattagtaacatttatttctatttgaaaacattttttaaatcttgccaaacgagtttagcaacatttttaattagtgcaaggcaaaaaatgttgttaaagattacatgtgatgtagtcgatgcaagctctatgtttccaccattcaaacattgtgaacattctcagaggatgcacaaataaactcagaatcacctcatcccaaaggtaccgtaccatcttccactagctatggggcttccccaacattgcatgctgttggcataacatcttcactntgatagggtgagatcctttggataaactgatacaaccatgtacgctatatttac

SEQ ID NO: 223030 - DNA, 411 bp, Glycine max
  unsure (1)..(411): unsure at all n locations
agcataaggcccagtagcatatacaaatacttttagtgtttttgaagacgcncttttatcaagcccatgccaaacatctgaattaatttggtctttgggacagtccttcattgtcttccattctctatgttttcaaaagagttcttttgatgtgttctgatccaaaaataagtttcaaaaatatcggttgtctgattctttccaaagcatggtatgttcaagaaatattttttgcttacgtcccaaaagagtataatctataactatactaatataatatcaaagcttgcttatattatcaaaatagactcgcgtagctcttctataattccaacaataaataaggtataatgactgaatctaatccaagcgataaacgcataagaccgtcccaatttttaacatcatggt

SEQ ID NO: 223031 - DNA, 482 bp, Glycine max
ttatatatggagattatagagactgattggtttaacatgatgctaatatgatacgacacatgatcgttcacctagttaaattttatcaattatcaagtgtttgctatacacctttgaaacctttccattagtgttttaatactatgataataacagtaagagtttgaagagttttctcttcaatggtacaaaaatttcttgtcacttctaaagggttatgctagtgagtgagtcaatcaaagaaaaagagcaatttggtaactatctgacaaattcagagcctttatccaacatatgtccctgtttccctttcaactgtttgtgtgtaaacatcaatctcaaagaagacaatggtgcaggtacattaatttgtctcaaccccaagcctattcactccttttaccattcccaagtgtattgatttatctagaggttcgatgacgtgaactttccaatgtattattctcttatgaatagcatta

SEQ ID NO: 223032 - DNA, 445 bp, Glycine max
  unsure (1)..(445): unsure at all n locations
agcttctacttatgtggcagggcgggcttctttctctttcttgtccccaatgcgagctctgaccactgttcttccttcccgcgatgcttcttttcatgtccgcctgagtgggcttatagcctaaaccatacttcccacgatttccttgggtttttatcaggctagttatgccgccattgtctttgcctaaacccatcccgggttcataaccgttccccaacataactcgggccatcattaccgccgcatcggacagacaagggtgcccaaagagggagtccacggaggaaatgctgaccacctcaaaagactggaaagcgngttctaacgattcttccgcggctttcacgtatggcatggaggatgggcagcttaccaagatatctttctcgcctgacacgatgaccaagtgcccctncactacgaatttcagctttggtggagt

SEQ ID NO: 223033 - DNA, 459 bp, Glycine max
  unsure (1)..(459): unsure at all n locations
ngtttacctcatgttcgaattgcttacaatagagctggtcatatcacctctaattgttctccatctgaagttgtttatggttntaacccactaactcctcttgatcttatgcctatgcctaatgttaatgtttttaagcataaagaatgtcaagcaaaggcggactatgtgaagaagcttcatgagagagtcaaagatcaaattgagaggaaaaataaaagctatgctaaacaagccaacatagggagaaagaaggttgtcttctaacccggagattgtgtttgggtgcacatgagagaagataggtttccggaacaaaggacatcatagcttcaaccaaggtgagatggaacaatttaagtgcttgaaagaatcaatgacaatgcttacaaagttgagctgcccggtgagtataatgttagatccaccttcaatgtctctgatatatctctttatgat

SEQ ID NO: 223034 - DNA, 457 bp, Glycine max
  unsure (1)..(457): unsure at all n locations
agcttgtagaatggctagacatgatacatgttatggtttgtgttggttcaaggataaaagggatgccccacattatttccatgacacaaatgcaaaaatgatgatttggaaacttcatgcaaaactggtcatgcatgcacatatgtggacactcaagtgtcaaatttttatggtcatgggatgctaaggctcaagattcatttcctctattttaaatcaacccaatgtttccaaaatatgttcttttatccatttgtgcattcatccgagtccattgcgggcgtccggggaaatttcacagcattcacccttcaggtgtagacacattttccaaaaattggttatgatcaatgaatttttttcaaagaaaagttggaaatcatctcttttcaaaagcatgtcggttcttcagctagacaacttatttttctctttntccatattttttcttacttgc

SEQ ID NO: 223035 - DNA, 458 bp, Glycine max
  unsure (1)..(458): unsure at all n locations
tcaacatcataccacttncagggtgctggaactacttcacatggatttgttgaggcctatgcaagttgaaagccttggcggaagaggtatgcctatgttgctgtggatgatttctccacatatacctgggtgaaatttatcagagagaaatcagaaacctctgaagtattcaaagagttgagtctaagacttctaagagagaaagactgtgtcatcatgagaatcatgagtgaccatggcagagaatttgaaaacagcagattcactgaattctgcacatctgaaggcatcactcatgagttctctgcagccattacaccacaacagaatgggatagttgagaggaaaaacaggaccttgcaagaggctgctcgggtcatgcttcatgccaaagaacttctctataatctctgggctgaagccatgaacacagcatgctacattcacaacagagtcac

SEQ ID NO: 223036 - DNA, 446 bp, Glycine max
agctttgattagctgaagagagatttcatttttatatggcgggacacacgcaagtgcgggcgcattattagctgccacaaatcacacatttcaagcctaagatcaagaacaccctggcatattaattatcattaacatattcattaacggcaaagaaacaaaggaccataactcattgtcgataacctaaaataacatctttcacaatcgctcgggacacttgggtatctcctttgcccaatgttgggctatatatttaacataatgtagaggggaaataagtattccgtcccattataactgttcgggaaaaataattatttcaaaacaattgcgatcttaattctataacataatattaatcactttcttacttatatcgctcggaaattaatagtggacaataaaatctataataaactacattggaaaagattaatctacaa

SEQ ID NO: 223037 - DNA, 429 bp, Glycine max
agcttaccgctttcaatatatggcctgaatgtttcctgagtggcaattgttattcctccgccggcaagagccagcctcaacatcagacgcagatcattagtcgtaatctgcggttcaatcgcaaggtcgaaagttctcccgttttcttcaaatggccagcgataaggcgcaacctccggggactgacgccagccgatacacttatgggtatttcccccggaggcgagaaagcactctccacgcccggccgcaaggatcaggacgacgggggcaggcatgaatcctcctcctgatggagacgtacagaggcgacttctgccagcacggagagtgccagagtatgcgcatcccgggctttggggaatatcccgacgggtgcccggatttgcgttgtttcctccctggaccatcccagctcgtggagctttt

SEQ ID NO: 223038 - DNA, 431 bp, Glycine max
  unsure (1)..(431): unsure at all n locations
tcgcganatggatgcctcggcagtcgggtttgattctgagctgtcgcagtttgccgacggcaagattaccaacggtacccgaagcgccacgctacatgaagccaccgcaggcggcagactgacagcggaagagagcattgaattcggaacactgagcaaagagtaccagcagtcgacctttgccgggcattttgtggaggtcggcgtgcatagcgcgacgggagaagttcgggtccggcgtatgctcgctgtgtgtgctgcaggacgcatcctgaatccgaaaactgcgcgcagccaggtcattggcgcaatgactatgggcatgggcgcggcactgatggaggagctggcggtggatgaccgtntgggctacttcgttaatcacgatatggcggggtatgaggtgccggttcatgcggatatcccaaaca

SEQ ID NO: 223039 - DNA, 416 bp, Glycine max
  unsure (1)..(416): unsure at all n locations
agcttgtagaatggctagacatgattcttgtttggctnggntnggntcaagggtaaaagggttgccttacattatctccatgacacaaaatgcaaaaatgatgatttggaaactttatgcaaaactggtcatgcatgcacctatgcggacactcaagtgtcaaatctttatggacatgtgatgctagggctcacgattcatttcctctattataatcaacccaatgttgtcaaaatatgttcttttatcaatttgtgcattcatccgagtccatttcgggcgtgtggggaaatttcacagcattcacccttctggtgtacacacattttccaaaaagtggttatgatcaatgaatctttcaaagaaaagttggatatctctccttttaaacgcatgtcagtatttatctagacaac

SEQ ID NO: 223040 - DNA, 490 bp, Glycine max
tgtaggattatggggtatccatcacatgtggtactatgtgtatgtcgggcaatggtgctaaacaaatcttcacatccacaaatcacatataaacccaccatcccctgttgcccaccttagactgagcacacgtactcccacgtagcccttatcctcgattctctcaacaccgggtccccatcaatcctcccaagcttccacaacatccaagtaattcatcatccactcatcacaaactaacaaaaccaagcaaaacagggaaaaggcagataactctgcccaaaactcaaaccaaaaatcacagtcttttctcacttaaagaccccagtgacattttcttcgctcaccgttggatcgactttgaaattgtactggaaggacctagtacatatatttacattatgaccgttgcgatctgcttaaatatgttcgataacacatatgtactaccctgttcatagtctgccatacacaagcatatctttactct

SEQ ID NO: 223041 - DNA, 407 bp, Glycine max
  unsure (1)..(407): unsure at all n locations
agccnagnaaaccgcatgcacgagtttgtttctttgcctctcccgccagcatagcggcggtccctactctgggctttgctctttttacaaaaacaattatactttggctcggatgggtagcaagggataaattactgtttgggatgaataaacatggcctcgtgccatttcaaatcttgacaaaagacccctatgagttacatttcgggataacacccatgacaaacgcgacgctacttcttctttgttcttaattattaccctaacttttacctaagccgcccttgcgggggaggacttcttatcttcccctatggcttttgaaccttacgcacggctcctacccttgcctcactgtaaggcacaacgaatatgcttgtgcatctgtcatgacctcgcacatcaac

SEQ ID NO: 223042 - DNA, 470 bp, Glycine max
  unsure (1)..(470): unsure at all n locations
taagcaccgcggctgcaacttacgaacaaaggttattgtaatatacttttgtaatnnttntttaaaaacgacgattaacggaaatcatgggtgatcagctatgtgcagtgtttcaggcgactcgaatcggtaccaatatgcaatttcctttaagctttctgatgaaaatgcacgaatcaaagttatgcatattgcaaaagcaacatacaaaaatggcaaatatgtatacgagcctacacagatcacaaattgaaagaatgctggatctggagaaatggaaacactactgaaatatttaagtctataaaatgtacaagtttcttgataaaacaaagatcttcacacaatacatatattcaaaacactaaaatgaaaagatgaataaacctatctgcatccgcctccccccatttcccagggcgactgtaatattctacacttacaaacatggcatgcctttttctttcctt

SEQ ID NO: 223043 - DNA, 431 bp, Glycine max
agcttcagaccaaatgtggttataatcttctggttacgaaggctgggcagcctttaaatgaagcagcttcatgtagctttctctagaaacttcattaagaggcttcctccagaagcttcctcgtggcttctttgagaagatttctcaagaggcttctttgagaagctagatccttatctatccacacccctctattaactaaattaacttccttaaaaataattacggatgaaaatagcgcaacaaataatcaaacatcaaacataattactaagaatatatagatatatatatcagggtgttacatatggcaaccaaacttgaatttgaagtaggcattgctatcttgaaactaaaaataatattgagaaatgatcttacttgaaccatatgaagcttgattgtgaacataccttgtaatcaaggattat

SEQ ID NO: 223044 - DNA, 466 bp, Glycine max
  unsure (1)..(466): unsure at all n locations
tagcagggtagcaatagatgtcagaatatctcttctcaaccataccaatttatggaaacccctacagagccaactgagtcaatggcaatgcttggtgtgaccccaaaccaaccaactaggtcaatgaaaatatttggcgtgacccttacccaaccaactgagtctatggcagcgcctagtgtgacccatatccaaccaattgaccaatctatggaaattccttgcgtgacccatattcaaccaattgagcctatggaaatgcctggtttgatcccaatccaaccaactagttctatgaccatgcgtggtgtcacccctacccaacaaactttgactatggaaatgcctagtgagacacctccttctcttgagtttatgaagcanaggttggagatgatggcatcaaccatggagacttcatgacatacactttcccctcatatgagagcccaactggattctggaa

SEQ ID NO: 223045 - DNA, 409 bp, Glycine max
  unsure (1)..(409): unsure at all n locations
agcttaatttgtccacactttgaaatttgttttgtagtcataaaatagtaagctaattaacaacattcaatttccttcaatatatatggtttgattgacaacaattaaccatttggtttcatgattcagcttcctgagtcatcgaattttaaagttaggtggaggttagatataaaaaaatgaaggacctacgagttggttctaccttttagacatgggtagctactggaataacaatggtgatccttgtgatggagatgatgttagtagatatagtgaaatgatcattaatcctgaaaaacgagcttggtgcagtgccaccattttgggcaaccatccacccaccatttcatatgactccagaggacanntatttttatagaaatgacactgccaatttcccctactt

SEQ ID NO: 223046 - DNA, 443 bp, Glycine max
  unsure (1)..(443): unsure at all n locations
tatacaagtggatgcaaacantctaacttgtntttctttttttaaaaatcaaacaggtcccttaagaacaaagtttaaccaagttttcaagttatacttgtgttgtatctattaagcacataaaatgaatgaccaagaaagtcaaattacttgtttttgcatctgaaaccatcgcggtccataataatcatattgttgtccatagcccgtatgtgctcaaggcaattacaaaacacaacattgataattcagccaacatttctgtacaaaagcaattcgaattggtacaaaagcaaggcaatatctaaacctgcctctctgggcacaatattaacaaaatcaattcaccactataatattcatcaacatcaacatgaaggtaacaaaataaaaaagaataagcacatgcacaattataatgacttgaaatntacccgcggagc

SEQ ID NO: 223047 - DNA, 426 bp, Glycine max
  unsure (1)..(426): unsure at all n locations
agctnggaattgaaaactgaagctctgagcttattctaacgacaataacttttaactcggatgtccgattgagccctttaatatatcgagacgctcgaaattgaaaacgcaagctctaataaaagtcaaacgacaataactttaaactcggatgtccgattgagccctataatatatcgagacgctcaacatatgaaaccggatgctttaagaaaagtcaaccgacaataacttttgactcggatgtccgatagtgccccgtaggatatcgagacactcgtctttgaagacggaggctattataaaaatctaacaacaataacttttaacttggaggtctgatcgagccgtgttatatataagatgctcaaaattgagaacggaagctttaataaaagtcaaacgacaataactgtggacttggat

SEQ ID NO: 223048 - DNA, 407 bp, Glycine max
  unsure (1)..(407): unsure at all n locations
tctatnttcaattacgagtgtctcgatatattacgggattatatcggtctttcgagtaaaaagttatcggtcattgatttttctcagagcttcagttttcaatttcgagcatctcgatatacgccggacacaatcggacacccgagtcaaaagttattgtcgtttgaatttgcttagagcttctgttttcaattacgagcatctcgatatactacgggacacaatcggacatccgagtcaaaaggtattgtcgtttgaatttgctcaaagcttctatttcaattacgagcgtctcgatatattacgggattcaatcggacattcgagtaaaaaagtatcgtcatttgagttttctgagagcttcagttttcaatatccagcatcttgatatactacaggacacaatc

SEQ ID NO: 223049 - DNA, 459 bp, Glycine max
  unsure (1)..(459): unsure at all n locations
agcttgcagattacaatgacatatcttntattaaagttccatgagctaagttctttcattaactgctctaagggtgcatttgaaagagctactggggagcctatttaagcttgcgaagatatcttaggacttctataagctccttttagcttatttcaatgggtttcttggtgtagcttattgaaataagctctattttgcttataagttttcatgatcaaatttatggcatgagccctaatgtaataagaacttattaaataagtgcttaagtatgttgcttaaccaaatgcacccaaattagtaaaatctggcacttatgctgaaaaagggaataggttactatcaatataatgagagcatataataaaactaaattcccaaatcaagactttcaaacagagaattgcaaggcattaacanaaaatcttgctctagtttctaatactataacaaact

SEQ ID NO: 223050 - DNA, 503 bp, Glycine max
  unsure (1)..(503): unsure at all n locations
tgttcagaaatgtgcatntgtgtgcaatacacagttcccggttcactttttcaaaatggtgtatcagaaaggcgtaatagaactttaatggatatggttaggagtatgttaatcaattagactntacccgtatctttgtggatgtatgccttaaaaactgccatgtatttgttgaatagggttcctagtaaggcagttccaaagacatcttttgaaatgtggacaaataggacacctagtataaggcacctgcatgtttggggttgtcaggcagaaataaaaatttataatccgcaagaaagaaaattggatgcaagaacaataagtggatatttcattggttatccagataaatcaaaggggtatatgttttattgtcctaatcacagtatgaaaattgtcgaaactggaaattgcatgttcatcgaaaatggtgaaatcagtgggagtatagttccatgagaagtgagattaaagaagtagagtgtagtccttttacttat

SEQ ID NO: 223051 - DNA, 446 bp, Glycine max
  unsure (1)..(446): unsure at all n locations
agcttctatataagctgaaccatgntatcaataaacttctgttgagtnttattcagaaaattagagtttatctcttttatcttagtgagagtgattctcctaaattcttgagtgattcaagaacaccctgtctgtatcaaaggactttcacaacctttgtgtgttgccctcgctggaaagagagattctttccttcctttcatcttcacccttgttctttcaaaccacaattccagaaaatccacctctgcccagaattatctcgtggccataactcccgttttacgcactcacattaagtgattcttgagcctaaattgaatttcacaacgagaactttcacctcgttttggaatcacctcatttggagccctgtagcttcagttattgccatttctatatttctgtctagccaccacttaacctacattttaccatcccattca

SEQ ID NO: 223052 - DNA, 502 bp, Glycine max
  unsure (1)..(502): unsure at all n locations
ntgaacgcttctaccaacactcattccataggtagaggaatgtttatttgttaggcagaggaaggggtcaaggccgaggcacaagcaactatagaggaaatcagcagcaacaacaagaaaaagaaagaggaagttggagccatcagacaactaactacaagttagcaaacaagtctaacattgaatgttttaaatgtcatcggatgggccattacaaatcagagtgcatgaccaatttgtccaacgagcaaggggaaaaatctaactttgttgaaatagaagaagaagaagaagtgtgcctcttaacctcttgtcaagaagaaaaggaatcaagtaaaatgttgtgatacttagacacaacttgtagcaatcaaagatggacaatggatatgtagtatccttcaaagatggagcatgcaaaactcaagagtcatagtcgattataatcgctgaagccaccaagaacagagatcgaatattctcgtcttatcttcatatcact

SEQ ID NO: 223053 - DNA, 363 bp, Glycine max
  unsure (1)..(363): unsure at all n locations
tactcaagcttcgaatgagcttagcctatcaccctcagtccaaaggggagattgtagttctatatatagnncatcgaaagcatctacaagctttcgtccattctcggccgacaacatggggaaaatttctatcatgggcagagtggtcatataacacgttcatcaactcacgaactcagatgtcaccttacgagattacttttggaaagcgacctcccaatattgcctagtacattgcgggaacatccaacattgatgattgtgatgaatctctggttaatcgtgaagctgtatttgccaatctaaagaagaagctcctcaaagcacaacatactatgaagcactctgctgatgataagagac

SEQ ID NO: 223054 - DNA, 391 bp, Glycine max
  unsure (1)..(391): unsure at all n locations
cgactgcagcatgcaactngaagactagaaaatagccttgtttgcctccctggctcttgcccgtctgaagagctacaattgagggtagatgggataggagtattaatgctcgatttttcgggagccgctcttcttcatttgcatccttggaaacactggatttctgccccatgaaggaacgggaagaatgggaatgtaaaggtgtgacaagtgcttttccacgtcttcaacgtctttatatagtgcgttgccccaagctgaaaggtttgcctgcccttggacttttgccatttctgaaggaacantcaattaaagggcttgatgggatcgtgagtatcaatgctgattctttcgggagtatctcttgcacatatacatccttggaatcttt

SEQ ID NO: 223055 - DNA, 456 bp, Glycine max
  unsure (1)..(456): unsure at all n locations
agcttaatgcttcattaattcttgatattatattattaacatcaaattagcttaatgggcccaaataataaaactgcctaattaatttgacaattaagattaatcagtactttaaatggtgcaaaaagggttaagaaataggagaaaataatggcacatcactaactccaatactggtgcaaatggttgggaatccttaggaatgggtgctggagagatatgaactggagaagtaggctcctgatctactgcttcctcctaagcgactggatcaatctcaaagataaatggctcaagaggaacaggctcatcctctacatctggcataggctcctctgctggcacaggctcttgngttgcaggggcctcaccccctctagaaggagaaggctggcctcttagctaagccacctaagaaagaaaacctctacactcataatagactacaggctggag

SEQ ID NO: 223056 - DNA, 459 bp, Glycine max
  unsure (1)..(459): unsure at all n locations
actaagcttgtaggctatgggtgggaagtgataatgagactttacttgtgttacatctcttgngctacaacaattgtagcaagacccattatccacaatgggagaacaatttttgtttaaaaccttgcatcttgtatgaaagatgttctgtctttaggtttgggttaggtcacaagaatgactcccaaggagccttctcaccattagaagatcaccttcttcatagaggtaaaccttttcaatgtgctcatcacccttggcttcaccctcactttcacttgaggaaggagaagaagtagcctcctcttggctactatagatgtcttgatccctcatgatcatggtattctttgtggagcattgagaagaaatgtggtcttttccaatacatttatagcacttgatgttactagttctatcttatgaactagtccntggagtgattcctctatgttttac

SEQ ID NO: 223057 - DNA, 441 bp, Glycine max
  unsure (1)..(441): unsure at all n locations
agctntccacattgaattcagcacctaatgttatattagatgggaattgggtatcttaacataagagatttcagatggactttaatcctaatcccacagccgaccatttcacgagatctctacttaaccctttggttgaatgatcggccaaattatgctgagttctcacaaactccactgatcacaccatgcatgattaactcccgaaccatgttgtgtctaacacccaagtgtctagacttcccattatacacttgactatatgccttagccaaagttcatatggggtaaccttattccttttgttaggaatttggttcaacaagtaacaggctgtcaacatagcctcaccccaaaatccttcacttatacccaaataggataacatggaattcaccatttctttcaaggttctattcttcctttcggctacaccattct

SEQ ID NO: 223058 - DNA, 370 bp, Glycine max
cttgtgaatctccaggatgacactggcatcctcttcaagagtcactatgccatagtctttcaaacacttattcttagttatgaggtcttttaagagccttgagtattctagcatcatgtctatgacattgatgaaaggaatggtgacatcaaattgcttaatcaagtctataagccttctatatcgccactccttatcttgctttgctggtatggagagatacaacttctcatgtgtaattgcttgtttagcttcttttgtaagccgactctatgtcttagttggctctcatggtgattcttcaactatcacatactcctcttgatgtcttcttcacttcttatctaccctcatgtctttttactactct

SEQ ID NO: 223059 - DNA, 474 bp, Glycine max
  unsure (1)..(474): unsure at all n locations
taccttgaattataattgtatcctccgcaacctttttgagtttgtttacatnaacacaaaggaaccctgaacttaaatgaatatcttcagataccttgtttagatcctaagagagcagattgttcaaggaaaattaccccatatattgggggagttgattatgatgtaaaggttaatgtatagcattaacacacacaacttattatttgtgtgttaaaaacaatatcagtaacatgataatgtgtgttgttgtaataaggtcaaagacaaaataaagtgaatcgctggtaatacagataagtgtattgaaagaaatatatggatgagtctacgatttgtgctctcttagaatctaagcctgtgaatcctagataaaccaattatttntgtagtctaacctcactacaagcctataannagccttctaattcttctatgcatactcgcttgatgactgagatgaagttcaatatt

SEQ ID NO: 223060 - DNA, 420 bp, Glycine max
agcttgcctgtccgaagcattattaatgatggcccgagctatgttggggaacggctaccaacccggaatgggtttaagcaaagacaacggcggcataactagcctgataaatgcccaaggaaatcgtgggaaatatggtttaggctataaacccactcaggcggatataaagagaagcatcgcgggaagaaagagcggtggtcaaagctcgcggttgagacaagaaagtgaaggaagcccgccctgccacataagtagaagctttataagcgcgggtttgggagacgaaggtcaagtggtcgcgatatacgaagatgatgttctaagtacattggatttggtacgaccatgctctcctgatttccagctgggaaattggcgagtggaggaacgctccggcatttacgccacgagcatgat

SEQ ID NO: 223061 - DNA, 364 bp, Glycine max
  unsure (1)..(364): unsure at all n locations
ntgtagcatagggactaaagttagtgagctntggacatcctttcttactgntactgatggaggagctggagtggatgatgaagggatgtcctccgttctagctctttttcttgatgtcatctgtaactaanaagaactcaaaattccttataccaaaattgttcaagttaaacgacaaaaataaaggctgaaattaacaataggcgcttagcgggatatagcttgctcagcactccctgagaaacataacatatcaacttagttggagccaagctcgcttagcctaatagttgtcgtgatgaaatgcgcttagctcaagtgaactaggcttagcgcgaggctttcaacacacaattttctaagt

SEQ ID NO: 223062 - DNA, 390 bp, Glycine max
aagaatatccttgtggaaccttcaccccacgaagacactgacaaaaacttatcttttccttcttggacaaaatatggcaggcttggggcaaataaattttcttcccatcagaccttggatgcaactgtgatcctatacctatatcagctacatcctgatgggtattcaagccatccttcgtcttgccttgaatgttaaggagcgtcccaatcacactgtcacaaacatttttctccacatgcataacatcaatacaatgtctaacatcaagatcacaccagtacggaagatcaaagaaaatggacctcttcttcatatgcaactctgaactttatccttcttttggggccttccaaatacagcattcaagtgttgaactcgctgatatac

SEQ ID NO: 223063 - DNA, 414 bp, Glycine max
  unsure (1)..(414): unsure at all n locations
tgtgttggtgtcggttatactatgtggtagactggtcactgagtggtttatcaatgttctggtcttcttgattgagaggaacttcttgtttaagaagaacgtcttgtattttgtttatggtgtgcagaaaagtgatcagggctatatatggctaagtttggttctcttgacatgggttctgcttttccaccacggagtggagagaacccgaaatgttagtaggattcttaattacataacaagggcattngtttcttgtcttattggagcagctatatggttagccaagacattgatcattaagctgttagcttcaaattttcactctactagatcttttgatagggttcaagagtcactctgtcatcaatatattctgaggacactctcnggtcttccctttgtgaacatgtc

SEQ ID NO: 223064 - DNA, 444 bp, Glycine max
agcttgcccaggcgagctggttacttcaccatgaagttatttgggggcccaggcgagccagaggctaaccagggcgagccagggttcaaaaaaatccttaaaatgacttttttgccctcccctttgggtatttttgcattcttgatcaaaacattgaatgatcatctgtttctcactgtaactggcgtttaacactgtaagtcaactagcaaggatcaaaagatcaacaaacgatagtccctggatgaaattaggatatgacaccaggctgaaggagtctgagttatgggtggctagggagagggagaccattaaagagcttgaagaggagctgataatgtacgagaaagaggttgcggagcagaatgaaaagggctttaacaaggccgtcagggaggccgggttcttcaccaaggaccttgacttgggtctttttgacccttt

SEQ ID NO: 223065 - DNA, 405 bp, Glycine max
  unsure (1)..(405): unsure at all n locations
ntacatcannatttagtaatgatccactaacctataattataagaacttaatggcattaacctaggaaattgaaggaacttaatggctgagtgtaactgaaattgtggcaaccaaaagtcacccccaatagccatcaagtcagccaccatttggtctcccaaaaggctgatgcctaggttgccaattgggcccttattacaacttgaactaaacctaactaaagcccttttagttgattaacccaaaacatatttttgtgttggatcgagtggcctcagaataattaagaaggggggggggttgaataaattattcctaaaaccttaccaattaaaaaatactcttttaagctnttacttatngtngtaagagaatatggagtagaagagaaacttaacagaaag

SEQ ID NO: 223066 - DNA, 472 bp, Glycine max
  unsure (1)..(472): unsure at all n locations
acctgcggcatgcaagcttcacaccattaacaatgacggcacacatgnaattatcttaccccccttgcaatttgttttaaaacagaccttatttggtaaattgtttttaaaatcagcaaattcgccgtgaagtgacatcaatgtggatgatatatgattttaggtcttgatatggattgaagtattttcttctcttacgaacaatgaaattaatatcaatatttgaattttgtatgagataattgtccttaaattacgtaattgtttaatttgaatacgtgttttgaaattattgcaagactaggtaattgaatcctttntaacaagaaattagattgaacaaggaattacatatcattcatctttaattttacagtattgtctaatccaagtttttttgtgtgttaatacgagaatattgtgtaagattcaaaattgtttagcattaaaattatntttattattaaatatt

SEQ ID NO: 223067 - DNA, 455 bp, Glycine max
  unsure (1)..(455): unsure at all n locations
ntgagacgcatgtgaaccttnggcatcatcaagacagtcagtttgatccttngtcttcaataaagncaaattctggaaagataaatggttgtgggctgactctaaccttgaacagtaatataatcagctgttcctcatcagtggacagcagaacaacactatttcgaatatgggcagcatatctcagggtcaattgtacattggtttgatcacacataacacactatagaatattattcgtcataattaccaaacaattctaaaagctatagcgtcatggtactttaagatgacatatagagttctaggtttatcaaagaatttcccataacatatccaggactatatcccaacaatgcaaatagtacaagagcaagcaatcaatatactttagcatctcacacccatactccatttcaagcattataatttttcatatttagacataacttggc

SEQ ID NO: 223068 - DNA, 467 bp, Glycine max
  unsure (1)..(467): unsure at all n locations
ttaagtcacctgcggcatgcaagctcgagcatgtcaaacactgcatggtctatatttttgtactttgacgtgaggcctagcattggacatgaaagtgagcagtctgctttttcttaggattgccgctcacatgatttaggtattcttttgaaagaaaaaagtattttttaattgaataatgtgtttaaaaaacttataataattatttatgcccaccctcaaaaaagcaatacctcggatgttcccatgcttatcttagaagctaacaaaataacaacttatgaaaaaaaaaggctgttataaaatcacattttttacggcttaatcatagggagagtcttaaagaatagtgtaagagtgctactaatatttctctaattntatacattaattactgagaaattattatataaatctataactaatatatgcataatataataataaataaattattaacggacaat

SEQ ID NO: 223069 - DNA, 429 bp, Glycine max
  unsure (1)..(429): unsure at all n locations
tatattctnntatataaaataattctcggtatacaaactgatttcttttttatatgagttctatttacccataaccttntaatttttctagctcgacccctttacacagagtagaaaaacgcaaaattgggtcaagagacatacctatggtccataaaagaaattgtgcttaccttatattcaagaaagcctaagctcagcccttctttacttgtctcatgggctacgtcattcttgagttaatatctaatgggtgttgctaggtgcaaccagtaccattgcttgtgcacccttcatttaagtgaagtgacaaaaatgcccttcaattaaatcttataaacccttcatcttgttgtgttcgtcattcgacccaacagcccacgttcttcctttgttctccgtttgggtcatgtcgccgccatcctccac

SEQ ID NO: 223070 - DNA, 462 bp, Glycine max
agcttatatatgacaaaattgaatatctcttttttttattttagggactactcacatgctccatatggaggtctatagtgtcctataggcccagcacatagcagataggtcaagtaagcacaaaaatttgaaaataagccacaattatcaattaagcctcaatcatttgcctaagaccaaaactaagttaaagtgagaatataacgttcaaagaggtttcaattgagctaagaagaatagaacaatactaaattaaaaatgctcaattaggtgccatcattcacacttgtcttttcctgaagatgtgatcctcttgtcagagctgactgacattcactgtttctattatggctttctccagtcatcctaatgtaggatatgtgtcccatgccctctcagggcaaccataactaattcaattgtcaaagtggaatctctagaagatctgcctaagctgctctg

SEQ ID NO: 223071 - DNA, 494 bp, Glycine max
  unsure (1)..(494): unsure at all n locations
tcagctataggtgtaggccctaaggaatacctcctatgggtggtaaactctatgatttgataaaaacctctaaggataacctacggaaatttgtttgtgggcataaagccctggacaaaatgattaaagtgccaagaaacccccaaacacaaatctgcccatggtttcaaaagcaaaaaggttatggatagtgaagaagtcattgttctctatntctgttggaaggtatgtcatgagacttataagtgcaatgacctccctgaaaggacaacccatcacagggtccatccaatgcttaccagcacccacaagctaaccaggaaaaagaaccaaacataattgggtactattaatggtttaantatgctaacgattatgtcgaccaagtgtaaccgaatcccatntgaatactgaattggactacgtcgtctccgagtaatagtacatgatgaatattcacataaaccttcggataatatatatgtgtttaattt

SEQ ID NO: 223072 - DNA, 457 bp, Glycine max
  unsure (1)..(457): unsure at all n locations
agcttatctctaagatgtcgacttcaaggtttatttattgtctatcacaggttatattggagagacgaactgcatttttggaagcatgaaatacattgaatgggactggattgtggttcttaatgagtatgtgaattttgcctcgagacatggtaagagttgttttcattttaaaatagatttcaaaaaagtcttacgatttaacagggagctctttgattatatgatggaggggtatttatgagtcggattagattagtttgcttaaacttgttattcaatccaatcaaaactttacgggttatattgggttagatttgtgtatatttttttacaagcctaacctgatcataaataagttgggttaatcgggtctaaatattttttattcttttattttataaaaatgtattttttagaacaatantctattctttctaccgctctgtaattatat

SEQ ID NO: 223073 - DNA, 338 bp, Glycine max
  unsure (1)..(338): unsure at all n locations
atctcactctatcaccgtgttagtatattatattacccaatctaccctgagacgcttaaaagtcttcatatacaaagaaatagggaatgtaaaggagaattaatcatgcataaatattatataatggactntccattaaaaataagccctctcagattaaagcttacactaatcttattataacaataataaaagattatgtattctcgacctgtagcatagacttggattattgaattttttgttgaatgaataagtgaaattaaactttttaatgattatacatgttcattttgaatgcacaacataaatttacaatgaaataaccgaaactgtaa

SEQ ID NO: 223074 - DNA, 443 bp, Glycine max
  unsure (1)..(443): unsure at all n locations
agcttgcaactcttaaggcatagatttatgttgctanaagggttctcccactcttaaatgttggaagtacacacattcctagtgataagatcaaagacaagcaaaaggatttgcaagatatggaatctactttgaaggagctattggtattgttgttggattctttgattttgttttaagattcataggatattgtaccttaattgttgagtttctcaggaccaaggttcagctcgattaatggaactgaaaagtcttcacgaggaaagaataagaatattacagcagttgtgtgatctacaggtatttttttcccttaatactatgtacaccagtattttaacctagtattttttcctacaatgcatgtatgtgtattttctttcggcttttataatggttgatgttaatgaatggatcacaacactctgaagaatttgaag

SEQ ID NO: 223075 - DNA, 457 bp, Glycine max
  unsure (1)..(457): unsure at all n locations
ctcangcctgcaagtgtaatcgagttacttgacttattgttcaacatatgtataagggnnggactagaactgaaggtacactcaaaggagtattccttatgatatatatatatatatatatatatatatatataatgtccatcaaactataaggcattaacatttctacgaacaaggaatcgtaaacatccatacaacaaacatacatagacttataggctcctaccacaagcatataacgtacatacaagaaataagaattgagctgtcattaatagtgcattactaaatcgcaagcttcaacaattacattcatgactacacacaaaataaagggagttaagtagtcatgcgttacacatcaagaaagacacactcatccaacgcatatatatactgttcacaagattttccaacactaatcacacatcatagagaataacttattacaacatac

SEQ ID NO: 223076 - DNA, 457 bp, Glycine max
agctttaggaagcctctaaagaattgttagattttaaaatgcaggtgtaaattgagcttcctggcatagtcacatagtatgaaatgcaatcataatagtcaaaatacacatataatagtcaaagctctttttcaccgggctacattagtatccttgttgcatcctacagggggctataaatgcataggttcattaacaacaatcaagagcattcttaataaatatacaagtgtcattgtcaaatcataaatcaaaccctccataaaatagtcatagcactataaatgtttatcttagaccaatatatgaaatggaaacttaataccaccttccaatcttcttattgcattagtcaacgacttcatttcctacacttgcttatccaaaaggctcacaacttctacaatatatctcttctctgcaaagttaaaaccagatgcaacaaaaaagtattcag

SEQ ID NO: 223077 - DNA, 350 bp, Glycine max
acataagcttgaaaatgccaacaaaaatagggctaatgaagagggtgaggatgaaagaaaagcccgtgctgcgactgtcattcttatacgaccaagtttcccaccgacccaactatgtcattacatcggccaataacaacccttctcattaaccaccacccagtcatccacaaatgccgtccctaaaaacaacctcaaagcctacctaccgcacttgcaatgacaaacaccacctttagcataaaccacaacaccaaccaagaaatgaatattgcagcgagaaagcctgtagaatcaccccaattccaatgtcctatgctgacttgctccatatctacttgataattcaa

SEQ ID NO: 223078 - DNA, 453 bp, Glycine max
  unsure (1)..(453): unsure at all n locations
agcttcggttcccgagagcatctcttatttaagcatttcagcctttgcattcgtgtagcttaggaaaaacgtcatttcttcttctttctttcttccaaagccatttctaaagttccaagaactttctccatcacccacaaccaccattagccatcacaaaccatcgttgttctccacaccgagaggaacccttcaaccgaagcggaatcttccaacttggcttgcggtttcggtagagaacgaaaccctaatctaacctttcattttctttcgaggtaaccatggttctatgcttgtttcttgttagtttcatcttgtctttccatcttttctgactgtggaaccgccattgtatgtcttatgcttcctttgaaaaacttttgagaaagagactntgtaaacgttatcctttcatgagatgcatgttatgttcgtaacctacactgaaccccg

SEQ ID NO: 223079 - DNA, 427 bp, Glycine max
  unsure (1)..(427): unsure at all n locations
actaagctgatcaaacaattctctaaccattccaatccattctaatcatataaatgctcattcaaatcactctcaaacactcatttcatacaaagcaattcactgcatatcattttcaatcaattcactgttcaaacatgcttntggtacaagcaaacataaaaaaatttaaataactgaaatttaaaataactaaaacataaaaaataaaattaaaataagtaaacataaatcataaaataactgaaaataaactaaaatgttcaagatgcacaaatttaaatgtcttgctcatcatgtggttgatcttcattaagatccagtgctggagctgctaatgaattctggataggctgctctggctccatgactggtgtagaatggtgggtctcctcangagtangtgtagaggatgcctcaagtgtct

SEQ ID NO: 223080 - DNA, 450 bp, Glycine max
agctttatcaaaattacgcaaacatatatttggtgcattggtcaacttatctttcaataaattaaaagttttctcatgcacaccaatcaacttaaacactgtattcttttttacaagttcatttaaaggtgcagtaagtgaactaaagtttttcacaaatcttctatgaaaacttgctaaaccatgaaaacttcttaccttattagcattcttaggtataggccattccctaattgcctttaccttttcttcatccacacttattccttttgagctaatgacaaaacccaagaacacaacatattcaaggaaaaggaacactttttaagattttcatactatttattttttcttaaaacattaagaggagcatgtaaatgatcaacatgttcctctaatgttttgctatagatcaaaatatcaacaaaatacaccacaaaaaatttccca

SEQ ID NO: 223081 - DNA, 405 bp, Glycine max
  unsure (1)..(405): unsure at all n locations
nntaattgagaaaagtattgttgcatntgcagtattgtgacttatatggngataatgtggcgttcccacgtatagaagaatggaggaagcaactatgcttatcagccttaattaactctgatgccaacttggagacatatcgagattcgtgggatgatcatgagctactcaaagacgcccttcaaagccctcacttcactcaacttggacttgaagattctcccatgtaaacccacaaataaaatataaaaaaaattatgaaaatataatacaggaaattttgattagctctaaaatcatttgtttatgccaattgtgtttataaaatattggaaggagacaaaggggattgaacgagaagaatgttgggtgttattatatagagaagaatatgttcgtgaagct

SEQ ID NO: 223082 - DNA, 446 bp, Glycine max
  unsure (1)..(446): unsure at all n locations
agcttaatatccaagcttcgtccacttatctctcatttaagactccacccgatttagacaaccctcttaggtttagaataacttaaactgagtttcgtccgcagatccctcatgtaagactagacttagctcaagtagcttacgaaagtttagcctaatttagcctaagcttcgtccgcagatccctcatgtaagactaggcctaaactaaacatcattattgtaatagcataattaaaaccaaaacttaacccgtaaatccgtcatgtaagattaagtttcgatcctgattcaatcaagttctaaggtgatagtacatttcccaatgctaaagtcacctaactgtgcacacaagtgggtgatcaagaccaaagcatacaaacattaagcatggaatgaagcattgaacacagaaaacataatcgattagatattatgtatntaca

SEQ ID NO: 223083 - DNA, 436 bp, Glycine max
  unsure (1)..(436): unsure at all n locations
ttaggagataccattaanactaaagtagttcctatttaattatcaattgatggagcttcgccaagtgtccccatcgaaattgaaaaacctttattcaaacctttcaaagatagtgagaaggctaaacggaaaattatggaacttagaaaaactaaatccttaactgagggtgtaggtgacaatcatagtgaattactaaacaagattggtagtttactaaaggtcattccagatactccccaaacctctgaaaatacttccaaaatggtaacaagaagtacctccaaattaattaatgttataaatgaagatagtgaccaaacctcagataacacaactgagataggatcagtgtcataaaagaatataaatccaattaattccaaacactggaaaacaccctccatattatattaccaacgtccaactgcccctg

SEQ ID NO: 223084 - DNA, 133 bp, Glycine max
ggctccaccactggcatcaactatcatacttcatctccatatatactggggccgtaatatcaacattccagaaaaggccgttctcgaatctgatggtgggggcaactggcacatagattttaaatctctccca

SEQ ID NO: 223085 - DNA, 240 bp, Glycine max
actcaactgcccaaaagagtccaggagaatgctttcactttatgactggaagcggttcgaagacccctcccggcttccacataagcatagaggatgggcgctcaccaagatgtttcctcgcctgatacgatgaccagatgcccttccctacgaatttaacttttggtggagtgtaagggaacaactcccactgagtggaccacgggcgccccaacagacagttgtggggggggggggggg

SEQ ID NO: 223086 - DNA, 378 bp, Glycine max
  unsure (1)..(378): unsure at all n locations
atcctttggattagagcagtcatctctaacacccaacccggtgtggaaactacataaaagcataagtcagtaggcatccacacataatcgggatagccaaggaagtgatgcacgcctctagtcatgttaggtatccaccacctccaagtgcactcaccctcgagatggagtgttgactccttgcctgccatgtgatcctaanaataaaacataaggggtgagtcttcctgcttcatcaataagacataaaaagactaaaaacaagtcacacacaaactaataaccatgatgatggggttatcctccatgtctcactcacattgtagatgggttctcttatatctcaacatatatttcatacttggatttaatattctt

SEQ ID NO: 223087 - DNA, 273 bp, Glycine max
  unsure (1)..(273): unsure at all n locations
tattaatataatgacacgctggccattcaactctttttgtaagctacattatcattaactcatttgagctgaaaataacatctactacttaatatgcacaagattctcattgacagtgctactttataacatacttagtcctaccttncttcactcatacaggacatctgtctatatattatactatgtttgtctttcttacgctaaaaatngtagaaactttttatctacctttacgttggcatcgtgactgattataacacatgtatttga

SEQ ID NO: 223088 - DNA, 433 bp, Glycine max
  unsure (1)..(433): unsure at all n locations
agcttataagaacaaaattgcctcaatcatatccaaatatgcatgtgaattangaagcatcaacaagaatcaagccaaggctattgtgcaagcaatcaatggggcaaaacacaccaaatgattatgatgatggctcaaattctcacaaaggtaaactcatcactttcaaattgagctttcaaaactatcatgacatgtagaggagaatcaaagatttcaagtcacaaaatgtcaaaaacttttattttcaaaacaaatacccatttcttgaacatatcctatgattcaaagaaaaacatgcaaagtcgtacatgtgcacagaattgactcaaaatattaaactaaatatccgacaaaactaacaacattaacaaattaacacaactaacaaattaacaaaaccaacagaactaacataaaccaaagaacactc

SEQ ID NO: 223089 - DNA, 404 bp, Glycine max
tgaacctccggttgtgcaatgctagtgtaaaattatggtactcttgaacttgaatagtcttcaagggtcactctccttggctgctcagccatgatagtgtctcctctaactcctgtatgagattgcccatgagtaggaaaactagaagatgccttagaagatcgaggttcttctcctggagttgttgctgcttctaagtcctgcaaaaattttctaattctctatgcgtttcgattcctgcaagtagcgttaatctccaaatctatgggaattaaatcacctacagcatatctcctttgcatacaaaacaagcagagcaacaattatccaattccaaagaacaataaattctacagtaactaaatattcgcaaaaataatcaatgaatcaaagaaaaagaatga

SEQ ID NO: 223090 - DNA, 473 bp, Glycine max
  unsure (1)..(473): unsure at all n locations
agcttaatgtgcatgtctctatgaaatgtgatctcacactttaccttgaattactgaagctccatacctcaaagttccagatttagggtttataggatcatcactaggatcaataactttataatggatgaggtcatctccaatgttgtttgtcatcttgccagtgtaaccaacggaacatgttgctagttgaggtcgatgcctcctccattcaggattcagtctccaacatcgatcaattacattcatttttaagccatttattttagattgttttgcggcactaagggttggagtgaaaagggcaacaatgacaataaccaaaacaaagtgccaaaggatagaattgataccatgagagaccatcatgaaaaatattttttctcaatgaatgtgaaccacagagaanatagagataaaaaagagtttttgatagtatattgaacaagtagtagtataaagaagcaattata

SEQ ID NO: 223091 - DNA, 440 bp, Glycine max
tgctgatctatcggagggagggtgcttagttaatgagtgtaggaagatattggctcaaaattcatccttatgttataggatttcgtgagagataagctgatgaattagtaaaggtggcttcattatatcctagtctcaatgtcttttatcattgtaatttcttgtgtgaagaatgtggtgtttaatgaaatgagataactattttacagtaaaaaaaaataaaaataggcagcattgtttggctcccgatatttactagcttttttataattgtttacttactatcatatggtgtctaatcgtttctgtaacttcacaacttaaagtgtcccgtatcatgataaaaacaataaaaaaagttaaatatatgataacaagttaaaaatgaaatggttttgtagaacaatgatcctattatatgtaactatgtaacttaatta

SEQ ID NO: 223092 - DNA, 397 bp, Glycine max
agcttgagggtgcgtagcccaccatctttttatttagagtaccgataatgtgtctaccatcacgattatcgtctccctttatgcacatgttctgtagttgcatcctatccggaaccatatcggaatagtgctgatactgcctaacgaaggcaaccattatgtccttccaagtatggactcgggaaggttccaagttagtgtaccaggtaacagctaccccagtaagactttcttggaagaaatgtattaacaattcctcatctttgtgtatgcccttatcttccgacaatacatctttggatggttcttggggcaagtagtccccttgtacttgtcaaagaccaacaccttgaacttgggaggggtgatgatattgggtactacgaacaactcttct

SEQ ID NO: 223093 - DNA, 343 bp, Glycine max
ctggactttattcttagactctagaggaactactgagagccgtcattataaagcaacaaagtcactggatgaattgtaagacattcattgagattacttacaacactagataccattccaccataggcaaggctgccttagaaactctatatgaaccaaaatgaaagacttgtatttgtgggcatgatgacggagaaacaacacatgctgtagctgaaatgctccaacatagtattgaacaatcgaggtcgattatgaagacaataatagcatcgaaggataggcatatgagctactatgatctatagaggatgccacttaatgtcaggaaagataaatgtga

SEQ ID NO: 223094 - DNA, 439 bp, Glycine max
  unsure (1)..(439): unsure at all n locations
agctntaacctcatcgtctgtcacagtctttatatttgggagccaatccaatccttgtgttcggactctcagccacttatgatagccgccgatgatcccattactgcttcccctaagctctctgtcctttcttcacgccgcatcccatgccttgtgaactccttggagtaccctcacgttgtggtcactgaaacctcgtgcgatgaaaggcgtgatgctttcgtctgatggcactcctctcgtgggacatccttcgcatgaagatagaatcctgattcttccttccttctagcgagggaaccatttaacagacgcccctccatgctagccaagagttggtgcacaacaaacaattcttgcgccgctcttttcacatccccggtcgaacgtgtcatacatggccaaaatggcgacgaccgggctttccttgccatgatga

SEQ ID NO: 223095 - DNA, 462 bp, Glycine max
  unsure (1)..(462): unsure at all n locations
tatgctgcanatatttacaatagacctcctcaacctcagcagcataatcaaccacaacagagcaattatgacctttccagcaacagatacaaccctggatggaggaatcaccctaacctcagatggtccaaccctcagcaacaaccccagcagcctgctccttccttccaaaatgctgctgggccaagcagaccatacattcctccaccaatccaacaacagcaacaaccccagaaacagccaacagttgaggcccctccacaaccttccctcgaagaacttgtgaggcaaatgactatgcagaacatgcagtttcagcaagagaccagagcctccattcagagcttaaccaatcagatgggacaattagctacccaattgaatcaacaacagtcccagaattctgacaagctgccttctcaagctgtccaaaatcccanaaatgtcagtgccatttcattg

SEQ ID NO: 223096 - DNA, 457 bp, Glycine max
  unsure (1)..(457): unsure at all n locations
agcttaagttctaggagagcattcatccttatatcaattctttntctttttattccagcttcagttacttgcctttttcatttaaggcacttagcttcaaataagagtccacacaacttctatttttgaaatttctttttctctctctttttttttattttttttattttagcagcttttatttactgcttctaaacaattttctgtgtggctgttatttgtcttaccactcttatcatcacccaacaatctgccccaaatttgggacaaatttgctttgaaccataatgctctcctacaaactaaggaaaggtggatggagattatgactttataggtttaaggttcagctcaatcactcaaaaataagctcaacatgggtgcaagggattcatcattcatgaacaaggtatgctttcggctaagtggctatttcaatcaatcatggccttcatca

SEQ ID NO: 223097 - DNA, 410 bp, Glycine max
  unsure (1)..(410): unsure at all n locations
cgactgtgcgtgttgattntagccttagattcactctagttattattcaattcgattaagaaagagaaatcccaaagagaaacgtccgattgatttttttgctttattttactaaaagatattttttgattaatatattattattttacctctttttggcttccaacgtggttacggcatgaccgaacggtcggatttcattttaacagaaattaacggatattacacttcaaatgatcggcgggaatttatgttattttttgattaggcgagaaaatgacttaagtcaatgactaaagcacgtcaaaagggggtacggaaagtatatgaaacgaatataaaagtatgcgacacaaatggggatcaccaagggtacatagaatgaattgaaaagttgtttctggaacttc

SEQ ID NO: 223098 - DNA, 229 bp, Glycine max
  unsure (1)..(229): unsure at all n locations
taccttgcagtactggtgcgtcatacctaaacgttccaaatatagggatcataagatcatcactaggtcaactagctccataagagagtaagtcatctcccaggttaggtggcatcttgccagagtaaccaatcggacatgatgatagatgaggtccacgcctgctccaataatgctcttcanaacatgctgattatatttgacatgatgatcagattttaatcttaaa

SEQ ID NO: 223099 - DNA, 448 bp, Glycine max
gtgcttctacaatcgaagtcattttcaactaactattagaattatatttcaatattttgtgaatggcatatacaactgtgtgttttctgtgcacgattcctttgatgagaaagcgacacagggatcctttgtcccccatggacgtcatgatgttctcaccgctgttattggatgtccagagcaccctggacatgtccgtgctgctggagccagtgtcaccatcaagcaatactttggatcggctccacggatgtcccgcagctcttcctccctacctcctgaagaattgcagtagctgacccaacatatcatggaccagctagaggagtccatcacagaaaaagtgacgcgacagctcatggcatcgttcagccagatgcagtcccagattcagtcacaaatgcaatctcaaggacttgcactacctaccgagcctttggttggtccc

SEQ ID NO: 223100 - DNA, 430 bp, Glycine max
  unsure (1)..(430): unsure at all n locations
ggctctanantacatcggtgtatgtatttatgggatgtttttatatgccatttttgctttaagagtaatgtcccactggtaaaactaactttccaaatgtttgccttcgcaggaatggccccgaggaagcttgcctcaaagaggtccaggaaggacaaggcggccgaaggaactagttccgccccggagtacgacagtcaccgctttaggagcattgtgcaccagcagcgcttcgaagccatcaagggatggtcgtttctccgggagcgacgcgtccagctcatggacgacgagtatactgatttccaggaggaaatagggcgccggcggtgggcaccactggttactcccatgcgccaagttgatccagacatagaccttgagttttatgccaatgcttggccaacagaggagggcgtgcgtgacatga

SEQ ID NO: 223101 - DNA, 400 bp, Glycine max
  unsure (1)..(400): unsure at all n locations
agcttctaaacgagcagtagaccttctttttggtacggccancaaacgttgcatctgtgcgttcatcgcatccagtaacagacgttgagctccgtccaactgatgatactcgacaccaccaccacctgctncagccgtaattcaacaggaataaaaaagtgtgcaataaaaattattaaggtttcaggacctcacaacactctactcacatgtttaactcttagatgatagtacactcgtctttgatcaataagtttttgtgtaatgtattccctcttgccttttaccactcgagtttcctcttaagctcctggatggaccaatatagacacaccaggggatataaaataaaaggaacgacagtattctgatcacacacacatttgatttgcgataacaa

SEQ ID NO: 223102 - DNA, 468 bp, Glycine max
tcatgataatgaaccaagcaattgtgatgatgccaattgttcaagtgattgattcaagattgattcaggacttcaagatcaagcatcaagaatccaatccaagattcaagattcaagagaagaaatcaagaagcaacaagttaagacttcatataggataagtattaaatgattttttcaaaaaccaaatagcacagttttgttttacaaaagaattttctcaaattttctaagataccagagtgattactctctagtaatcgattaccagtgaccagtttgtttttcaaaatattttcaaatggtttgcaacattccaaaatgattttcaaatagtgtaatcgattacactatattagtaatcgattacaagtgaatctgaacgttggaattcacatccaattgtgaagagtcacaacctttcatgaaatacattgtgtaatagattacaccttctgtggtaatcga

SEQ ID NO: 223103 - DNA, 440 bp, Glycine max
agcttgccacccagctcgctaggcgagctttttgcttcctccagaagcaacagccttctggaggaatcttctggagggcccaagtgggcctggttgctatttgcactcccatttttactaagtacaccccctgccttttttttggtgattcttttttcgcaaagttacggaaacttacgaatttcgtaacgatacttgttttctttccgtaatgctacggaaccttgcggattacataatcatcccctttttgacttacggaatgttacggaacctcactaattgtgcaacgatgcttccatttgatttctggtgtgccacggaaccttacagattgtgcatcaatattttcttttgtttccggcatgtcccggaattcacaaatagctaatgatgggtgccagcacctcacaaggaccatacaaagttgcatgttctca
